United States Patent Application Publication US 2012/0117685 A1 - sequence listing, part 5

SEQ ID NO: 7816 - protein, 113 aa, Glycine max; identical to SEQ ID NO: 6016
  misc_feature (1)..(2): Xaa can be any naturally occurring amino acid
  misc_feature (27)..(27): Xaa can be any naturally occurring amino acid
  misc_feature (30)..(30): Xaa can be any naturally occurring amino acid
  misc_feature (38)..(39): Xaa can be any naturally occurring amino acid
  misc_feature (57)..(57): Xaa can be any naturally occurring amino acid
  misc_feature (63)..(63): Xaa can be any naturally occurring amino acid
  misc_feature (84)..(84): Xaa can be any naturally occurring amino acid
  misc_feature (113)..(113): Xaa can be any naturally occurring amino acid
  Coding DNA Sequence Number=SeqID_4004
  Subcellular localization annotation: CTP_CleavageSite=14; ConfidenceScore=5.25e-01

SEQ ID NO: 7817 - protein, 95 aa, Glycine max
  misc_feature (81)..(81): Xaa can be any naturally occurring amino acid
  Coding DNA Sequence Number=SeqID_4006
  Gene Ontology: Mol. function=pyridoxal phosphate binding; Biological process=carboxylic acid metabolic process
  Homolog annotation: Hit_ID=A7QN02; Match level="QueryCoverage=93%, HitCoverage=20%, E-value=3e-29, Identity=65%"; Hit description =Chromosome undetermined scaffold_129, whole genome shotgun sequence
GIVAMLNKLSSTVVFDRPHNEEFIRKWQLACKGNIAHVVVMPIIPTEKLDDFLNELLAKRDAWFQDVKDQPFCISSNVGAXNCLCSLHKYFWPPI

SEQ ID NO: 7818 - protein, 196 aa, Glycine max
  misc_feature (16)..(16): Xaa can be any naturally occurring amino acid
  misc_feature (57)..(57): Xaa can be any naturally occurring amino acid
  misc_feature (72)..(72): Xaa can be any naturally occurring amino acid
  misc_feature (109)..(109): Xaa can be any naturally occurring amino acid
  misc_feature (115)..(115): Xaa can be any naturally occurring amino acid
  misc_feature (120)..(120): Xaa can be any naturally occurring amino acid
  misc_feature (128)..(128): Xaa can be any naturally occurring amino acid
  misc_feature (140)..(140): Xaa can be any naturally occurring amino acid
  misc_feature (161)..(161): Xaa can be any naturally occurring amino acid
  Coding DNA Sequence Number=SeqID_4007
  Subcellular localization annotation: CTP_CleavageSite=35; ConfidenceScore=5.20e-01
PLRLDVRLPSFSRHLXYSISSTLSSPLTNTVHTLVSNARDAHHDKSIENSNTSFLSXPPSSIRTCVDDSDLXTLSNAIEYNSHHISLRMTQATIDHTITHILYDSHENXHTYHLXSHVVXSHELLHRXAFVLIFRRPIYXLLSSLSIYAHTDSIYIRIRTXPPTIIRTYALDQLSTTHLTPPFTPRCLSHCVTYIN

SEQ ID NO: 7819 - protein, 80 aa, Glycine max
  Coding DNA Sequence Number=SeqID_4009
FFFFFYHYSLDTLYHAIAFDQAQRSVLQGHKHSWSLRIMVRENVTHMSESDFQFLIFFLHGQPFWCYQIFFFLCRIKTLP

SEQ ID NO: 7820 - protein, 72 aa, Glycine max
  misc_feature (39)..(39): Xaa can be any naturally occurring amino acid
  misc_feature (53)..(53): Xaa can be any naturally occurring amino acid
  misc_feature (66)..(66): Xaa can be any naturally occurring amino acid
  Coding DNA Sequence Number=SeqID_4011
  Gene Ontology: Mol. function=chlorophyll binding; Cellular component =integral to membrane; Biological process=photosynthetic electron transport
  Homolog annotation: Hit_ID=Q2MI75; Match level="QueryCoverage=93%, HitCoverage=12%, E-value=7e-14, Identity=57%"; Hit description =Photosystem II P680 chlorophyll A apoprotein
YKQLQEGIVRALVFSELCFLAAIWYWIYWNLEIFCDEDXGNPSLDLSKKNLNXIYFLYVGVACFSXPTAHNT

SEQ ID NO: 7821 - protein, 124 aa, Glycine max
  misc_feature (9)..(9): Xaa can be any naturally occurring amino acid
  misc_feature (15)..(15): Xaa can be any naturally occurring amino acid
  misc_feature (46)..(47): Xaa can be any naturally occurring amino acid
  misc_feature (81)..(81): Xaa can be any naturally occurring amino acid
  misc_feature (123)..(123): Xaa can be any naturally occurring amino acid
  Coding DNA Sequence Number=SeqID_4012
RDHPPTQAXVYKHCXAHRDDKITHRKHPCAHVLHSSRHIPLDRSTXXRGGCHVSVWRSGYVMHHLSYTSHSLLLVVIGIHXWDYNACSTCHPSRAEARHTSSSRYSDRPTNAHHTTQLRYIDXT

SEQ ID NO: 7822 - protein, 79 aa, Glycine max
  Coding DNA Sequence Number=SeqID_4014
  Gene Ontology: Mol. function=hydrolase activity, hydrolyzing O -glycosyl compounds; Cellular component=beta-galactosidase complex; Biological process=carbohydrate metabolic process
  Homolog annotation: Hit_ID=Q9M1I3; Match level="QueryCoverage=97%, HitCoverage=7%, E-value=6e-27, Identity=71%"; Hit description=Beta Galactosidase-like protein
PPVGNDDAVQGSLDWAAFWVKDLPFVKSLSGYWKFFIADSPNNVPTYFYESEFQDSGWKTLPVPSNWQLHGFDTPIYTN

SEQ ID NO: 7823 - protein, 145 aa, Glycine max; identical to SEQ ID NO: 6021
  misc_feature (60)..(60): Xaa can be any naturally occurring amino acid
  misc_feature (94)..(95): Xaa can be any naturally occurring amino acid
  misc_feature (120)..(120): Xaa can be any naturally occurring amino acid
  misc_feature (135)..(135): Xaa can be any naturally occurring amino acid
  misc_feature (137)..(137): Xaa can be any naturally occurring amino acid
  Coding DNA Sequence Number=SeqID_4015

SEQ ID NO: 7824 - protein, 120 aa, Glycine max
  misc_feature (84)..(120): Xaa can be any naturally occurring amino acid
  Coding DNA Sequence Number=SeqID_4017
ISTFWMTGNGALNVDGESSKLKELDLSLSDAITSTCDSQMHSGEFEALNKKPKSSDIENKGTNNDEELPSLELSLKRLRGVEDXXXXXXXXXXXXXXXXXXXXXXXXXXXXXXXXXXXXX

SEQ ID NO: 7825 - protein, 143 aa, Glycine max
  Coding DNA Sequence Number=SeqID_4019
NLLVADIVLVDAVDLEVGRISELRREQSQLIHKNCYGLAIPITSNPPNLSQSRRARESWKQTSRRHFFGKTSCAAPEASTEINSPRGRYTREKKTEEEEGGTNRRQPRHRQSPLSCAPPPPATTNCGEDWFGGTADWMGRRRI

SEQ ID NO: 7826 - protein, 361 aa, Glycine max
  Coding DNA Sequence Number=SeqID_4021
  Gene Ontology: Mol. function=protein serine/threonine kinase activity; Cellular component=integral to membrane; Biological process=protein amino acid phosphorylation
  Homolog annotation: Hit_ID=A7Q0V8; Match level="QueryCoverage=100%, HitCoverage=99%, E-value=1e-174, Identity=82%"; Hit description =Chromosome chr7 scaffold_42, whole genome shotgun sequence
  Pfam annotation: Domain name=Pkinase; Domain location=69-345; Score =119.1; E_value=1.3e-32; Accession=PF00069.15; Description=Protein kinase domain
  Pfam annotation: Domain name=Pkinase_Tyr; Domain location=69-345; Score=139.7; E_value=8.1e-39; Accession=PF07714.7; Description =Protein tyrosine kinase
  Pfam module annotation: Pfam domain module=Pkinase::Pkinase_Tyr; Domain location=69-345::69-345
MSCFGCCEEDDYQKTAESGGQHVVKNSTGNDGNSRASETAKQGTQAVKIQPIEVPELQVDELKEITDGFGESSLIGEGSYGRVYYGVLKSGQAAAIKKLDASKQPDDEFLAQVSMVSRLKHDNFVQLLGYCIDGNSRVLAYEFASNGSLHDILHGRKGVKGAQPGPVLTWTQRVKIAVGAAKGLEYLHERADPHIIHRDIKSSNVLIFDDDVAKIADFDLSNQAPDMAARLHSTRVLGTFGYHAPEYAMTGQLNAKSDVYSFGVVLLELLTGRKPVDHTLPRGQQSLVTWATPRLSEDKVRQCVDARLGGEYPPKAVAKMAAVAALCVQYEADFRPNMSIVVKALQPLLNARHGPAGETPN

SEQ ID NO: 7827 - protein, 97 aa, Glycine max
  misc_feature (62)..(62): Xaa can be any naturally occurring amino acid
  misc_feature (70)..(70): Xaa can be any naturally occurring amino acid
  Coding DNA Sequence Number=SeqID_4022
  Subcellular localization annotation: CTP_CleavageSite=52; ConfidenceScore=5.55e-01
KKKNGLWDFVVSFRHPYLSLVSTSFSISLRPLSPCEPTLSPSFFRGHWSLVVATCLSPTVTXFFGEVETXLRGVDLRVFLRGFFYLCVIMCMCMCIN

SEQ ID NO: 7828 - protein, 119 aa, Glycine max
  Coding DNA Sequence Number=SeqID_4024
YSPNHFSHDTAPLKPTCTNSPHHHITFLPLTLIQHIPPSLPTYTTALVFACLPHRYNHYLYNILPQPNRICDKQSHPTCASISSHATPTRAPAPITSSTTPHPSLLKCLTLHSTHEIPI

SEQ ID NO: 7829 - protein, 202 aa, Glycine max
  Coding DNA Sequence Number=SeqID_4026
  Gene Ontology: Mol. function=actin binding; Biological process =cytoskeleton organization and biogenesis
  Homolog annotation: Hit_ID=UPI000049A29E; Match level="QueryCoverage =94%, HitCoverage=44%, E-value=5e-11, Identity=25%"; Hit description =Viral A-type inclusion protein repeat
SYVGPPPLANLEKHVVECDEKLTKVLQENSEAISQIRTKLLTEKKQREDAEVDMSKMKPQLDKILADNVDLRRESELREINERLTNKRVDEDEALDKESLEVKKKLIDELQSEKARLFIVTEKDPRLQSLREDNERFLKEVKQAEKKVDDANYKVLETETRQLLSVRKKDEDQEARKKLQAELDKWRDQLDDTTKSNELKVE

SEQ ID NO: 7830 - protein, 92 aa, Glycine max; identical to SEQ ID NO: 6029
  misc_feature (12)..(12): Xaa can be any naturally occurring amino acid
  misc_feature (20)..(20): Xaa can be any naturally occurring amino acid
  misc_feature (27)..(27): Xaa can be any naturally occurring amino acid
  misc_feature (29)..(29): Xaa can be any naturally occurring amino acid
  misc_feature (34)..(34): Xaa can be any naturally occurring amino acid
  misc_feature (44)..(44): Xaa can be any naturally occurring amino acid
  misc_feature (49)..(49): Xaa can be any naturally occurring amino acid
  misc_feature (58)..(58): Xaa can be any naturally occurring amino acid
  misc_feature (60)..(61): Xaa can be any naturally occurring amino acid
  misc_feature (75)..(75): Xaa can be any naturally occurring amino acid
  Coding DNA Sequence Number=SeqID_4027

SEQ ID NO: 7831 - protein, 38 aa, Glycine max
  Coding DNA Sequence Number=SeqID_4029
HYLIVVYFNLFFTPLNRRIIITEICFFLINLLLHLIVV

SEQ ID NO: 7832 - protein, 65 aa, Glycine max
  Coding DNA Sequence Number=SeqID_4031
ALLLTGGAMGEWSGGSFANCHRQFMKEGSLRQRHRPQWSVCMAEYWLCAIDNTGIIKYNINMKSH

SEQ ID NO: 7833 - protein, 158 aa, Glycine max
  misc_feature (82)..(82): Xaa can be any naturally occurring amino acid
  misc_feature (89)..(89): Xaa can be any naturally occurring amino acid
  misc_feature (102)..(102): Xaa can be any naturally occurring amino acid
  misc_feature (121)..(121): Xaa can be any naturally occurring amino acid
  misc_feature (128)..(128): Xaa can be any naturally occurring amino acid
  Coding DNA Sequence Number=SeqID_457
  Gene Ontology: Mol. function=nutrient reservoir activity
  Homolog annotation: Hit_ID=P04405; Match level="QueryCoverage=96%, HitCoverage=31%, E-value=1e-37, Identity=60%"; Hit description =Glycinin G2 precursor [Contains: Glycinin A2 subunit; Glycinin B1a subunit]
AVFIIDTNSLEIHLDLLPRRLYLAGILEQEFLKYQQQQQGGSQSQKGKHLDDDNEGSNILSGFALEFLKEAFGVNMPLVRTXGENVDGXSGSPFVTVKGGLXRVTASALRKPRKKKLIDCXKEELPQXVETDKGCQRQSKRSKMAFVETFCTIETFAK

SEQ ID NO: 7834 - protein, 171 aa, Glycine max
  misc_feature (10)..(10): Xaa can be any naturally occurring amino acid
  misc_feature (71)..(71): Xaa can be any naturally occurring amino acid
  misc_feature (95)..(95): Xaa can be any naturally occurring amino acid
  misc_feature (130)..(130): Xaa can be any naturally occurring amino acid
  misc_feature (139)..(139): Xaa can be any naturally occurring amino acid
  Coding DNA Sequence Number=SeqID_458
  Gene Ontology: Mol. function=binding; Cellular component=protein phosphatase type 2A complex; Biological process=ethylene mediated signaling pathway
  Homolog annotation: Hit_ID=Q38950; Match level="QueryCoverage=98%, HitCoverage=28%, E-value=7e-46, Identity=59%"; Hit description =Serine/threonine-protein phosphatase 2A 65 kDa regulatory subunit A beta isoform
AAKRLVSGEXITARSSARGVHHIAYPNAPESGKTELRAIYGQLCQDDKPMGRRSDATNRGQFAATVEAPHXKSDIKPVFVDLTQEDQDAVRQLAXEGSEASGKSCGNLKKERHIFRPDIANFSHDKTWRXGYMDANQLXYQLCETAGTDRTMSEKVPAHDRQLRDNEAEQR

SEQ ID NO: 7835 - protein, 110 aa, Glycine max
  misc_feature (1)..(1): Xaa can be any naturally occurring amino acid
  misc_feature (5)..(5): Xaa can be any naturally occurring amino acid
  misc_feature (9)..(9): Xaa can be any naturally occurring amino acid
  misc_feature (16)..(17): Xaa can be any naturally occurring amino acid
  misc_feature (20)..(20): Xaa can be any naturally occurring amino acid
  misc_feature (25)..(25): Xaa can be any naturally occurring amino acid
  misc_feature (29)..(29): Xaa can be any naturally occurring amino acid
  misc_feature (45)..(45): Xaa can be any naturally occurring amino acid
  misc_feature (79)..(79): Xaa can be any naturally occurring amino acid
  Coding DNA Sequence Number=SeqID_459
XSDNXSVSXSTLNAAXXCSXCDDVXDCDXRYDSYRAHYLTYTREXSRVERLEVESDRCTYDVMSVAEIRRQVVGSSMRXGERERCREHMSQHSAAGADSVRCATSIICSE

SEQ ID NO: 7836 - protein, 100 aa, Glycine max
  misc_feature (94)..(94): Xaa can be any naturally occurring amino acid
  Coding DNA Sequence Number=SeqID_461
  Homolog annotation: Hit_ID=Q1STP6; Match level="QueryCoverage=97%, HitCoverage=50%, E-value=5e-17, Identity=47%"; Hit description =Harpin-induced 1
GEDVSLMNPNKLGGQYQICVALINNRGKLLVEITMSFGEISSYEFKECHISRSIMADRLLSNSQLTSENTLGTSTISSLVTMSRKISMLSFFKXHVVSST

SEQ ID NO: 7837 - protein, 149 aa, Glycine max
  misc_feature (24)..(149): Xaa can be any naturally occurring amino acid
  Coding DNA Sequence Number=SeqID_462
LHLTEIKRHRVCVINSWFHPRFYXXXXXXXXXXXXXXXXXXXXXXXXXXXXXXXXXXXXXXXXXXXXXXXXXXXXXXXXXXXXXXXXXXXXXXXXXXXXXXXXXXXXXXXXXXXXXXXXXXXXXXXXXXXXXXXXXXXXXXXXXXXXXX

SEQ ID NO: 7838 - protein, 122 aa, Glycine max
  misc_feature (32)..(32): Xaa can be any naturally occurring amino acid
  misc_feature (45)..(45): Xaa can be any naturally occurring amino acid
  misc_feature (89)..(89): Xaa can be any naturally occurring amino acid
  misc_feature (97)..(97): Xaa can be any naturally occurring amino acid
  misc_feature (103)..(103): Xaa can be any naturally occurring amino acid
  Coding DNA Sequence Number=SeqID_464
  Subcellular localization annotation: CTP_CleavageSite=57; ConfidenceScore=5.62e-01
TRLGPIDHFTSRRPKPTKRPPSPSSSTLPLNXLHTTHPPPPAPRXPPPMTVGEPEMPASARRRFFLASVDALIFLNCGLLWVLCAGSLXLGHRAPCXGSGRGXLPRSGRRPGSPFTSLCCSA

SEQ ID NO: 7839 - protein, 234 aa, Glycine max
  Coding DNA Sequence Number=SeqID_466
  Gene Ontology: Mol. function=methyltransferase activity; Cellular component=cytoplasm; Biological process=translational elongation
  Homolog annotation: Hit_ID=Q10BD5; Match level="QueryCoverage=100%, HitCoverage=100%, E-value=1e-106, Identity=84%"; Hit description =FtsJ-like methyltransferase family protein, putative, expressed
  Pfam annotation: Domain name=FtsJ; Domain location=20-235; Score =104.0; E_value=4.5e-28; Accession=PF01728.9; Description=FtsJ-like methyltransferase
MSGATGTADFFYREALRLGYVARSAFKLIQIQKQHKLIAPGAAVLDLGCAPGAWLQVACQNLGPLEKGGLVVGVDVKKVKVPSAHCDWRVRTVCTDVMALMKQQARAMSPQERGFSVILSDMCPVVSGITTRDEAISCELGMRALSLAVGKIKVKESADYRETMERFQSSTGPDPDEDGVLRRGGSLVIKFLENEDIPGFNKFCKEKFKKVSLLRPKATRSSSREIYMICEGLR

SEQ ID NO: 7840 - protein, 139 aa, Glycine max
  misc_feature (53)..(53): Xaa can be any naturally occurring amino acid
  misc_feature (83)..(83): Xaa can be any naturally occurring amino acid
  misc_feature (88)..(88): Xaa can be any naturally occurring amino acid
  Coding DNA Sequence Number=SeqID_467
  Homolog annotation: Hit_ID=A7QJR8; Match level="QueryCoverage=97%, HitCoverage=8%, E-value=8e-32, Identity=54%"; Hit description =Chromosome undetermined scaffold_107, whole genome shotgun sequence
MLNDLDLPGQFHSRDIIISIDRWASSVSANSSPMNDWEQKEAVEEGSYYEAGXVVPDSWKDDSQLHPDSDDFTKTIEGLQSQXMGGIXQNERLEQSLMERNSLVQRWEEPVNRVETPSHLQLMEAEDKIERIASAPEIV

SEQ ID NO: 7841 - protein, 135 aa, Glycine max
  Coding DNA Sequence Number=SeqID_468
  Gene Ontology: Mol. function=catalytic activity; Biological process =trehalose biosynthetic process
  Homolog annotation: Hit_ID=A5AY88; Match level="QueryCoverage=98%, HitCoverage=15%, E-value=2e-36, Identity=58%"; Hit description =Putative uncharacterized protein
PLTFLPDLFTTCTDLVRLTCCAIGFAFTFILVALDPYFINLSMEHIISTYHRTATMAILLDYNGTLMPQSSTIDNSPSITSIEILSSLCIDKIHMAFLVSARSRKMLSEWFCPCDNLPVAADPGYFLRMKRHEDW

SEQ ID NO: 7842 - protein, 211 aa, Glycine max
  misc_feature (16)..(16): Xaa can be any naturally occurring amino acid
  misc_feature (19)..(19): Xaa can be any naturally occurring amino acid
  misc_feature (23)..(23): Xaa can be any naturally occurring amino acid
  misc_feature (27)..(27): Xaa can be any naturally occurring amino acid
  misc_feature (83)..(83): Xaa can be any naturally occurring amino acid
  misc_feature (142)..(142): Xaa can be any naturally occurring amino acid
  misc_feature (148)..(148): Xaa can be any naturally occurring amino acid
  misc_feature (172)..(172): Xaa can be any naturally occurring amino acid
  misc_feature (207)..(207): Xaa can be any naturally occurring amino acid
  Coding DNA Sequence Number=SeqID_4033
  Subcellular localization annotation: CTP_CleavageSite=79; ConfidenceScore=5.11e-01
SPIATTCPAATQAVIXLHXHKSXSIHXRPSRSIYPQSPPPPRRPAHPHLSLYTHTPTSCAFLVFSRAPVAVSLHDPTCRCVAXSCLCRARAQYSILTLYGSRRCTDNTGTGRVVVICVEDDYRKKISDHTSTIKRTTHTDTXIDFTHXFRWTAPLASRHSSVCSPTSTHMMXMSVLDVMDSRECMSGPAPCYYTISLHRVHDVRRLXQYIQ

SEQ ID NO: 7843 - protein, 103 aa, Glycine max
  misc_feature (27)..(27): Xaa can be any naturally occurring amino acid
  misc_feature (53)..(53): Xaa can be any naturally occurring amino acid
  misc_feature (99)..(100): Xaa can be any naturally occurring amino acid
  Coding DNA Sequence Number=SeqID_4035
  Subcellular localization annotation: CTP_CleavageSite=83; ConfidenceScore=5.12e-01
CNVFVEYVWVSYSQRGPSSQLVRMQGXIGLHTRLSSSLVLRPARAAAHTVTAXRSTAAPPSPTNTNHGHERHGREKRRRDAASTASGANTTRGPTPQPXXAPP

SEQ ID NO: 7844 - protein, 47 aa, Glycine max; identical to SEQ ID NO: 6707
  Coding DNA Sequence Number=SeqID_1509

SEQ ID NO: 7845 - protein, 117 aa, Glycine max
  Coding DNA Sequence Number=SeqID_1511
  Gene Ontology: Mol. function=heat shock protein binding; Cellular component=membrane; Biological process=protein folding
  Homolog annotation: Hit_ID=Q94AW8; Match level="QueryCoverage=81%, HitCoverage=22%, E-value=2e-42, Identity=88%"; Hit description =Chaperone protein dnaJ 3
  Pfam annotation: Domain name=DnaJ; Domain location=14-72; Score =122.6; E_value=1.1e-33; Accession=PF00226.21; Description=DnaJ domain
MFRRGPSSKSDNTKFYEILGVPKTASPEDLKKAYKKAAIKNHPDKGGDPEKFKELAQAYEVLSDPEKREIYDQYGEDALKEGMGGGGGGHDPFDIFSSFFGGGGGHPFGGGSSRGRR

SEQ ID NO: 7846 - protein, 116 aa, Glycine max
  misc_feature (1)..(1): Xaa can be any naturally occurring amino acid
  misc_feature (59)..(59): Xaa can be any naturally occurring amino acid
  Coding DNA Sequence Number=SeqID_1512
XYILTRTLYDIDITSDHSSACSLSPTLLSPSLVLAPLTPSTQRLVAHYFHTHNQRLSIXYVATHTTSAYMLISVSFRLIVSSSMICTHLVYSFPVSGPSSSMIFALSQHQSLTTIT

SEQ ID NO: 7847 - protein, 139 aa, Glycine max
  misc_feature (2)..(2): Xaa can be any naturally occurring amino acid
  misc_feature (12)..(12): Xaa can be any naturally occurring amino acid
  misc_feature (27)..(27): Xaa can be any naturally occurring amino acid
  misc_feature (38)..(38): Xaa can be any naturally occurring amino acid
  misc_feature (63)..(63): Xaa can be any naturally occurring amino acid
  misc_feature (85)..(85): Xaa can be any naturally occurring amino acid
  misc_feature (90)..(90): Xaa can be any naturally occurring amino acid
  misc_feature (111)..(111): Xaa can be any naturally occurring amino acid
  misc_feature (126)..(126): Xaa can be any naturally occurring amino acid
  misc_feature (133)..(133): Xaa can be any naturally occurring amino acid
  misc_feature (135)..(135): Xaa can be any naturally occurring amino acid
  Coding DNA Sequence Number=SeqID_1513
RXLDIHTQKLHXTRTYAARRERKRHRXARVDGGRYRDXRIPSDIIGNISRHSLRARSIYLLYXRVMSIYPSFCDDPYIHHTIVLXRVMTXYDITQEIRAKRATARTCDHEXVRIGDAERDDEACVXAQCATRXRXACTG

SEQ ID NO: 7848 - protein, 95 aa, Glycine max
  misc_feature (29)..(29): Xaa can be any naturally occurring amino acid
  misc_feature (42)..(42): Xaa can be any naturally occurring amino acid
  misc_feature (46)..(46): Xaa can be any naturally occurring amino acid
  misc_feature (58)..(58): Xaa can be any naturally occurring amino acid
  Coding DNA Sequence Number=SeqID_1515
  Subcellular localization annotation: CTP_CleavageSite=38; ConfidenceScore=5.09e-01
NHAIYKFTVTHLATTSPAMAPPIAAYITXFSPSHHVVSAAEXRYIXTTVVAPADGSLXSPPNKRQQISSWVFNQTLTWGIFPFSKQIQPKGGFNF

SEQ ID NO: 7849 - protein, 122 aa, Glycine max
  Coding DNA Sequence Number=SeqID_1517
LMIAHLSRRTDPSLISRLCRPYSLILGMYLIGTKTGSRRAMSSRARYKVAVTNDAAIIPCHVMSAPATGALNTHCASALCARRPSSPLIKSTALIRPHYTTTLHCHVTFDFPTRGCLHRRTL

SEQ ID NO: 7850 - protein, 99 aa, Glycine max
  misc_feature (94)..(94): Xaa can be any naturally occurring amino acid
  Coding DNA Sequence Number=SeqID_1519
  Gene Ontology: Biological process=response to stress
  Homolog annotation: Hit_ID=P12952; Match level="QueryCoverage=100%, HitCoverage=74%, E-value=3e-22, Identity=57%"; Hit description =Dehydrin DHN2
  Pfam annotation: Domain name=Dehydrin; Domain location=11-98; Score =89.4; E_value=1.1e-23; Accession=PF00257.10; Description=Dehydrin
MEYQGQHGHATDKVEEYGQPVAGHGGFTGRPTGTHGAQLQATRDDHKTDGVLRRSGSSSSSSSEDDGVGGRRKKGMKEKIKEKLPGGAHKDATXGQQHT

SEQ ID NO: 7851 - protein, 140 aa, Glycine max
  Coding DNA Sequence Number=SeqID_1520
  Homolog annotation: Hit_ID=A7PCY2; Match level="QueryCoverage=100%, HitCoverage=50%, E-value=2e-60, Identity=83%"; Hit description =Chromosome chr17 scaffold_12, whole genome shotgun sequence
  Pfam annotation: Domain name=DUF525; Domain location=79-141; Score= -3.3; E_value=3e-06; Accession=PF04379.5; Description=Protein of unknown function (DUF525)
  Pfam annotation: Domain name=UVR; Domain location=1-36; Score=15.1; E_ value=0.0099; Accession=PF02151.9; Description=UvrBuvrC motif
  Pfam annotation: Domain name=UVR; Domain location=37-71; Score=11.9; E_value=0.023; Accession=PF02151.9; Description=UvrBuvrC motif
  Pfam module annotation: Pfam domain module=DUF525::UVR::UVR; Domain location=79-141::1-36::37-71
AQTYALLKQQLQVAAKSEDYKEAARIRDSLKLFEDEEPVLRLRRLLKEAVAEERFQDAASYRDELNKIAPHSLLKCCSDATTLGIMVQVRSVYIEGRSQPSKGLYFFAYRIRITNNSEHPVQLLRRHCIITDADERTENV

SEQ ID NO: 7852 - protein, 143 aa, Glycine max
  misc_feature (78)..(78): Xaa can be any naturally occurring amino acid
  misc_feature (121)..(121): Xaa can be any naturally occurring amino acid
  Coding DNA Sequence Number=SeqID_4037
  Gene Ontology: Mol. function=magnesium ion binding; Cellular component=integral to membrane; Biological process=photosynthesis, light harvesting
  Homolog annotation: Hit_ID=P12360; Match level="QueryCoverage=100%, HitCoverage=58%, E-value=2e-39, Identity=60%"; Hit description =Chlorophyll a-b binding protein 6A, chloroplast precursor
  Pfam annotation: Domain name=Chloroa_b-bind; Domain location=1-125; Score=9.8; E_value=4.1e-06; Accession=PF00504.12; Description =Chlorophyll A-B binding protein
SDLIHCRLAMLDVPGILVTEALGLSICVTAQECASFSVGQPTYLRDSFPWCTLPTILAIELLDITFVEHQKSMEKDPXIKKYPDGAFDPLGYYKDPKTFHECKFIELKNGRFVLMSYARYXAQHSAYSWTELLKILTDHLNDP

SEQ ID NO: 7853 - protein, 145 aa, Glycine max
  misc_feature (34)..(34): Xaa can be any naturally occurring amino acid
  Coding DNA Sequence Number=SeqID_4038
  Gene Ontology: Mol. function=sulfotransferase activity; Cellular component=integral to membrane
  Homolog annotation: Hit_ID=Q2R3T7; Match level="QueryCoverage=93%, HitCoverage=39%, E-value=1e-41, Identity=63%"; Hit description =Sulfotransferase domain containing protein, expressed
MDSAHDDGFALEMAELPLETRCPPFALRQYSGFXLPEAVLARGLPAARDRFAPRPDDVLLASFPKSGTTWLKALAYATVHRAAHPPSADDHPLGRRSPHDCVPFLEISLARADDVGAAAAELEALPSPRVLATHLPFSLLPERIR

SEQ ID NO: 7854 - protein, 332 aa, Glycine max
  misc_feature (164)..(164): Xaa can be any naturally occurring amino acid
  misc_feature (196)..(196): Xaa can be any naturally occurring amino acid
  misc_feature (249)..(249): Xaa can be any naturally occurring amino acid
  misc_feature (255)..(255): Xaa can be any naturally occurring amino acid
  misc_feature (289)..(289): Xaa can be any naturally occurring amino acid
  Coding DNA Sequence Number=SeqID_4039
SQRYTAALRLPTSHSLDLTSHRLTYSSALYSPPSRRCGIHQHHIPSNYTDAPLCTSTPPVAPLVALTPASVPTPIICAPSSHPLSPPRLSPSPRYYTLHHILSHTSRNSPTHRAPFRAPPAPIHLSSASSSLLNDDLSRLQRSRCWQRTTHRLHLSYSYPRLPXRDTHHTHTPDPDAILLSLLLSIRYHPCNLVSXMTSLLYYTLLLSPNLSIYLSWAAHRHYASSLLVRFSTISIYGCSIPYYINRRXSVARCXSCVETIISSSPPLASHSLLFLWEKNSHHILFSTXRQHSTLPPSPHLHAPSFLAQRVIPVCCCCVQLCSLLHSTRAPP

SEQ ID NO: 7855 - protein, 102 aa, Glycine max; identical to SEQ ID NO: 6039
  misc_feature (21)..(21): Xaa can be any naturally occurring amino acid
  misc_feature (32)..(32): Xaa can be any naturally occurring amino acid
  misc_feature (45)..(45): Xaa can be any naturally occurring amino acid
  misc_feature (70)..(71): Xaa can be any naturally occurring amino acid
  misc_feature (78)..(78): Xaa can be any naturally occurring amino acid
  misc_feature (87)..(88): Xaa can be any naturally occurring amino acid
  misc_feature (102)..(102): Xaa can be any naturally occurring amino acid
  Coding DNA Sequence Number=SeqID_4041

SEQ ID NO: 7856 - protein, 104 aa, Glycine max
  misc_feature (50)..(50): Xaa can be any naturally occurring amino acid
  Coding DNA Sequence Number=SeqID_4043
TSSLSIFRSCTIYLWRTLSVNSVTHIIASQQLDAGRTCYSSLGHMSYKHXNRTIDSFAYIFSTTRIVHHRQCVFDRTICLVLRILATKYRELSNSSHITRLANT

SEQ ID NO: 7857 - protein, 82 aa, Glycine max
  Coding DNA Sequence Number=SeqID_4045
  Gene Ontology: Mol. function=electron transporter, transferring electrons within the cyclic electron transport pathway of photosynthesis activity; Cellular component=light-harvesting complex; Biological process=...
  Gene Ontology: Biological process=photosynthetic electron transport in photosystem II
  Homolog annotation: Hit_ID=Q67GW6; Match level="QueryCoverage=85%, HitCoverage=16%, E-value=2e-14, Identity=57%"; Hit description =Photosystem II CP43 protein
MIGALVAHEALIVYGAGAMNRFGVALLVPEESVYAPGLILCPHLVTLGWGVGPPGDVMSASPKVGDAVHLFIWTAGRLECIG

SEQ ID NO: 7858 - protein, 247 aa, Glycine max
  misc_feature (119)..(119): Xaa can be any naturally occurring amino acid
  misc_feature (132)..(132): Xaa can be any naturally occurring amino acid
  misc_feature (134)..(135): Xaa can be any naturally occurring amino acid
  misc_feature (141)..(141): Xaa can be any naturally occurring amino acid
  misc_feature (169)..(169): Xaa can be any naturally occurring amino acid
  Coding DNA Sequence Number=SeqID_4046
  Gene Ontology: Mol. function=metal ion binding
  Homolog annotation: Hit_ID=Q2HS43; Match level="QueryCoverage=83%, HitCoverage=59%, E-value=5e-36, Identity=41%"; Hit description=Zinc finger, RING-type; Thioredoxin-related
  Subcellular localization annotation: CTP_CleavageSite=59; ConfidenceScore=5.24e-01
PFSHTHSLVSLSSVKNMNLDTQPGTPSYWCYSCTRFVHLSVQATIACPHCQSGFVEEIRAGAEASPRHRLSPFPDDPLSFRRQGFRRRRREGAGNRSPFNPVIVLRGPGDDSAAAATRXASTFELFYDDGDXTXXRPPSSXMSEFLPRSGFDRVLGTVAQMEMNGFRRXENPPTSKAAIESMADVEIGETHVETTGTARGGKGVFELHAKGPEIAVQDINHSRASSRGFRGETRARWAGEVSFHFGN

SEQ ID NO: 7859 - protein, 154 aa, Glycine max
  misc_feature (14)..(15): Xaa can be any naturally occurring amino acid
  misc_feature (22)..(22): Xaa can be any naturally occurring amino acid
  misc_feature (41)..(41): Xaa can be any naturally occurring amino acid
  misc_feature (53)..(53): Xaa can be any naturally occurring amino acid
  misc_feature (124)..(124): Xaa can be any naturally occurring amino acid
  misc_feature (128)..(128): Xaa can be any naturally occurring amino acid
  misc_feature (131)..(131): Xaa can be any naturally occurring amino acid
  misc_feature (146)..(146): Xaa can be any naturally occurring amino acid
  Coding DNA Sequence Number=SeqID_4047
TRHSCLITWYRHHXXFWLMDAXNSRYLCARSCLSRACSCLXHSPSPYETLIDXCERAVRDQMRDYLSSQYYLYTPQHRGMDEQRVGAAGEVDRTNTTRQNTESCDCVFSTIPAHTHNHAIPPTXTNIXVTXIMIYIYNDTNRTTVXYDIHPRDT

SEQ ID NO: 7860 - protein, 143 aa, Glycine max
  misc_feature (28)..(28): Xaa can be any naturally occurring amino acid
  misc_feature (48)..(48): Xaa can be any naturally occurring amino acid
  misc_feature (63)..(63): Xaa can be any naturally occurring amino acid
  misc_feature (75)..(75): Xaa can be any naturally occurring amino acid
  misc_feature (78)..(78): Xaa can be any naturally occurring amino acid
  misc_feature (80)..(80): Xaa can be any naturally occurring amino acid
  misc_feature (84)..(84): Xaa can be any naturally occurring amino acid
  misc_feature (95)..(95): Xaa can be any naturally occurring amino acid
  misc_feature (105)..(105): Xaa can be any naturally occurring amino acid
  misc_feature (138)..(139): Xaa can be any naturally occurring amino acid
  Coding DNA Sequence Number=SeqID_4049
CDVSTQRCARSIKLMIEMMCVSLTVYIXDNVYIYHYKHIDPHDSHLPXSYVSRTLSTTIRTSXSLHVVHKDINKXSHXVXMNMXLRVCACQSIRXESSHHPRLYXVSLYRLSPHTYPQLITTVLVTEQLSSSHARRTXXARYP

SEQ ID NO: 7861 - protein, 80 aa, Glycine max
  Coding DNA Sequence Number=SeqID_4051
CLHATLPHALEGLFKKKSCLPFLLKALRAATYALAVTEVASVEPPPKRLSSKHFKVLHTTHHWVATLDWCMKHHHQNICN

SEQ ID NO: 7862 - protein, 133 aa, Glycine max
  misc_feature (2)..(2): Xaa can be any naturally occurring amino acid
  misc_feature (4)..(4): Xaa can be any naturally occurring amino acid
  misc_feature (8)..(8): Xaa can be any naturally occurring amino acid
  misc_feature (23)..(23): Xaa can be any naturally occurring amino acid
  Coding DNA Sequence Number=SeqID_4053
HXQXASVXVPSILSNVAHARERXRYCRSVVYFRARLYHPRACAVLSSLYHICSRPIAHRCISWAQLLTRVAAHDIYIIQIFMMLHIFGRRRGVRARYFKQQVSHEGGRRVIICLGGVIIYILSTSAGSECVAQ

SEQ ID NO: 7863 - protein, 61 aa, Glycine max
  Coding DNA Sequence Number=SeqID_4055
YITSDLFNSLINFTRHGRRLYFKATQSKYEYDCIIESVDCGEENRKDHGWNKRVIWGTPVT

SEQ ID NO: 7864 - protein, 94 aa, Glycine max
  Coding DNA Sequence Number=SeqID_4057
MERDILTDERLENKSRIHHHPLPRERKAQHLVREQHSREPINRSYSVAFCASSWLLLLLLLTPSLSSLTIKIHIHYEQCTRASGEWRMRATPQR

SEQ ID NO: 7865 - protein, 159 aa, Glycine max
  misc_feature (153)..(153): Xaa can be any naturally occurring amino acid
  Coding DNA Sequence Number=SeqID_4059
DNRTALSNSMLVSPLGNCKLLKQTIIYANSLRCCRWLDYPACGTHLAPLFSGYNKCAVLLARRTSSDSMEGATRSYIYFVESFWPHNQRSIRRPAVVEVLYLSRGLDRVGSCARWWARRKKKERRSLTASRGRGAYLLVVRSPTPRERLDLPXWLGVIV

SEQ ID NO: 7866 - protein, 251 aa, Glycine max
  Coding DNA Sequence Number=SeqID_4061
  Gene Ontology: Mol. function=molecular_function; Cellular component =extracellular region; Biological process=defense response
  Homolog annotation: Hit_ID=Q8GTA0; Match level="QueryCoverage=100%, HitCoverage=100%, E-value=1e-138, Identity=90%"; Hit description =Thaumatin-like cytokinin-binding protein
  Pfam annotation: Domain name=Thaumatin; Domain location=34-251; Score= 186.9; E_value=5e-53; Accession=PF00314.8; Description=Thaumatin family
  Subcellular localization annotation: CTP_CleavageSite=18; ConfidenceScore=5.04e-01
MVKTSLPLTAFFFLLLISSSLAADTGRLFLTVVNHCPFTVWPAIQPNAGHPVLEKGGFALPTNTHRSFSPPTTHWSGRIWGRTGCSHYNGKFSCVTGDCGNRLECNGLGGATPASLAQFDLHHGGHRDLSSYGVSLVDGFNVPMTVTPHEGRGVCPVVGCREDLLRTCPAHLQLRSGHGGHVVACKSGCEAFRTDELCCRNHYNSPQTCRASSHSLFFKHACPSTMTFAHDSPSLMHDCSSPRELKVIFCH

SEQ ID NO: 7867 - protein, 118 aa, Glycine max
  misc_feature (6)..(7): Xaa can be any naturally occurring amino acid
  misc_feature (11)..(11): Xaa can be any naturally occurring amino acid
  misc_feature (21)..(21): Xaa can be any naturally occurring amino acid
  misc_feature (37)..(37): Xaa can be any naturally occurring amino acid
  misc_feature (43)..(43): Xaa can be any naturally occurring amino acid
  misc_feature (74)..(75): Xaa can be any naturally occurring amino acid
  misc_feature (79)..(79): Xaa can be any naturally occurring amino acid
  misc_feature (89)..(89): Xaa can be any naturally occurring amino acid
  misc_feature (94)..(94): Xaa can be any naturally occurring amino acid
  misc_feature (102)..(103): Xaa can be any naturally occurring amino acid
  misc_feature (105)..(105): Xaa can be any naturally occurring amino acid
  Coding DNA Sequence Number=SeqID_4062
AMVCIXXIQCXTSRSGFSAFXYLACVAVCSHAEVDDXMVEIVXVCTTYAVLSCTHSPLIIVFSSAVYDSCIWLXXSLIXHQRLAQRSPXVCRLXSVSSQQRXXVXIVHGSVYILSVSD

SEQ ID NO: 7868 - protein, 52 aa, Glycine max
  Coding DNA Sequence Number=SeqID_4064
SIMNVACVIVLSMTIGQVYMQFCVSLFWKTNCIGIARNEKTTCHSCIMFLKK

SEQ ID NO: 7869 - protein, 128 aa, Glycine max
  misc_feature (86)..(87): Xaa can be any naturally occurring amino acid
  misc_feature (114)..(114): Xaa can be any naturally occurring amino acid
  misc_feature (119)..(119): Xaa can be any naturally occurring amino acid
  misc_feature (128)..(128): Xaa can be any naturally occurring amino acid
  Coding DNA Sequence Number=SeqID_4066
  Gene Ontology: Cellular component=cellulose and pectin-containing cell wall
  Homolog annotation: Hit_ID=Q8L9P8; Match level="QueryCoverage=78%, HitCoverage=74%, E-value=3e-27, Identity=65%"; Hit description=RALF
  Pfam annotation: Domain name=RALF; Domain location=63-128; Score =93.7; E_value=5.9e-25; Accession=PF05498.2; Description=Rapid ALkalinization Factor (RALF)
MRGLSRNSGTAAILAIFAILAVQHLTVAADFLPLETECRGTIAECSVSAALGEEGDLFYGGGMGAEFEMDSEINRRMLSNRRYISXXALRRNSVPCSRRGASYYNCRRGAHANXPYSRXWSVITRCRX

SEQ ID NO: 7870 - protein, 153 aa, Glycine max
  misc_feature (78)..(78): Xaa can be any naturally occurring amino acid
  Coding DNA Sequence Number=SeqID_4067
ERDKHNRATCCGCCVERVHTVMAGVRSGTRQTSRQLAMRTHAGLLGASRRTKAASGGEAVETVLFAFRESAPKRIDGXRRVGARWRGGEGCGTAAGGRSAARVVGGQASSRSLLCAQNNIAKLTTSAYVLAPASTTNPLLRFPQYPITHTRTD

SEQ ID NO: 7871 - protein, 120 aa, Glycine max
  misc_feature (29)..(29): Xaa can be any naturally occurring amino acid
  misc_feature (31)..(32): Xaa can be any naturally occurring amino acid
  misc_feature (38)..(38): Xaa can be any naturally occurring amino acid
  misc_feature (51)..(51): Xaa can be any naturally occurring amino acid
  misc_feature (69)..(71): Xaa can be any naturally occurring amino acid
  misc_feature (83)..(83): Xaa can be any naturally occurring amino acid
  misc_feature (106)..(107): Xaa can be any naturally occurring amino acid
  misc_feature (110)..(110): Xaa can be any naturally occurring amino acid
  Coding DNA Sequence Number=SeqID_4069
  Gene Ontology: Mol. function=identical protein binding; Biological process=negative regulation of catalytic activity
  Homolog annotation: Hit_ID=Q9LDM8; Match level="QueryCoverage=59%, HitCoverage=9%, E-value=2e-17, Identity=66%"; Hit description =Putative subtilisin precursor
  Pfam annotation: Domain name=Subtilisin_N; Domain location=58-116; Score=12.7; E_value=0.0089; Accession=PF05922.7; Description =Subtilisin N-terminal Region
MKGNNTLLLHLFYTTLLVFLGVSSSSSTXNXXYNNTNXEELYNASTCAAEXKPASINDPHADIFEDAPXXXYNALVRNYKHGXSGFAACLLKEEANSIAQKPGVVXXFPXPILKLHTTLL

SEQ ID NO: 7872 - protein, 129 aa, Glycine max; identical to SEQ ID NO: 6059
  Coding DNA Sequence Number=SeqID_4070

SEQ ID NO: 7873 - protein, 136 aa, Glycine max
  misc_feature (7)..(7): Xaa can be any naturally occurring amino acid
  misc_feature (26)..(26): Xaa can be any naturally occurring amino acid
  misc_feature (76)..(76): Xaa can be any naturally occurring amino acid
  Coding DNA Sequence Number=SeqID_4072
  Gene Ontology: Mol. function=protein serine/threonine kinase activity; Cellular component=cAMP-dependent protein kinase complex; Biological process=protein amino acid phosphorylation
  Homolog annotation: Hit_ID=UPI0000D560D4; Match level="QueryCoverage =79%, HitCoverage=31%, E-value=5e-33, Identity=55%"; Hit description =PREDICTED: similar to CG6117-PA, isoform A
SQVTANXWWHWDLILNVGWYPPFFDXNPFGIYEKILGGRISFPSHLDPNAKDLIRKLLAADRTRRLGNLKGGAIDXKTHKWFKGVDFEALIQRRVNPPIIPEVEHEGDTNYFEKYDDPADIDDTPGDPYRGLFKDF

SEQ ID NO: 7874 - protein, 96 aa, Glycine max
  Coding DNA Sequence Number=SeqID_4073
  Gene Ontology: Mol. function=oxidoreductase activity; Cellular component=integral to membrane; Biological process=electron transport
  Homolog annotation: Hit_ID=O48922; Match level="QueryCoverage=100%, HitCoverage=18%, E-value=4e-35, Identity=77%"; Hit description =Cytochrome P450 98A2
ASLVMAEHIPWLRWMFPLEEGAFDKHGVRRDRFTRSIMTEYTEARMKFGGAKQLFVDALLTLQDMYDLIDDTITVLLSDMITAGIDTLAILSEWPL

SEQ ID NO: 7875 - protein, 256 aa, Glycine max
  Coding DNA Sequence Number=SeqID_4074
  Homolog annotation: Hit_ID=Q23R60; Match level="QueryCoverage=77%, HitCoverage=81%, E-value=2e-08, Identity=23%"; Hit description =Putative uncharacterized protein
RREMGLILCFIFFLIFDLFLDFITERSKKSNNDSSVKQETKASKTEEAITAAEPSKPAELVEKEKLVSDLQGEVTQLGEESAKYNNPSEYAKYSKMQRKMITLQRKLDEERGLLKTLADNYEATKGNDKINEESTGLIENEQPAPEASSLSDATGGLISKNTIIIKAVRIILPAILIYSLPNSAFTVQMDASYLSPLSNYLGEQKGDVYLFSRKITWIVFSFRTIGRLKKLVKGVSFGKSSGSNVEPKMQGKQKVE

SEQ ID NO: 7876 - protein, 51 aa, Glycine max
  Coding DNA Sequence Number=SeqID_4075
CLKSFILDPYRQLSDDVYVKYLIMRFVSAQKLSMLVSKSNLNFLSVKTPQN

SEQ ID NO: 7877 - protein, 86 aa, Glycine max
  misc_feature (8)..(8): Xaa can be any naturally occurring amino acid
  misc_feature (17)..(18): Xaa can be any naturally occurring amino acid
  misc_feature (37)..(37): Xaa can be any naturally occurring amino acid
  Coding DNA Sequence Number=SeqID_4077
YDAAGISXVDNTIHELXXGICRCSTCDLCLSFSLHIXYLVLLCFYVIVCVVSLFLMFLSVVVWSVCCVRPRESIVWCDLYSSLSLL

SEQ ID NO: 7878 - protein, 125 aa, Glycine max
  misc_feature (4)..(4): Xaa can be any naturally occurring amino acid
  misc_feature (12)..(12): Xaa can be any naturally occurring amino acid
  misc_feature (18)..(18): Xaa can be any naturally occurring amino acid
  misc_feature (32)..(32): Xaa can be any naturally occurring amino acid
  misc_feature (63)..(63): Xaa can be any naturally occurring amino acid
  misc_feature (102)..(102): Xaa can be any naturally occurring amino acid
  misc_feature (105)..(106): Xaa can be any naturally occurring amino acid
  misc_feature (119)..(119): Xaa can be any naturally occurring amino acid
  Coding DNA Sequence Number=SeqID_4079
YHNXIYVNYTIXSYIIRXRTPRAVDGDLAGSXRTGEHARRRLRSHNPPILLSCECDIVDRACXDRPIRRIRIVRAKAQTDATLIDKCVQASSDRSVSHVRYXASXXLIVLSLHITHVSXMHPYAD

SEQ ID NO: 7879 - protein, 181 aa, Glycine max
  misc_feature (175)..(175): Xaa can be any naturally occurring amino acid
  Coding DNA Sequence Number=SeqID_4081
  Homolog annotation: Hit_ID=Q248F8; Match level="QueryCoverage=98%, HitCoverage=81%, E-value=2e-43, Identity=46%"; Hit description =Putative uncharacterized protein
MVKLDLRSPYDAKQYPFLNQWDTDYRANFDMYQNEIDKITYQLQRSQRGFTIMGSWLYPAFHQRDFLMLDIYKRKQVIGKINQEEVETFKAINSNIAEDLNKTFNTSFYVPKAGLFSGLGLNVFAHFFNLQYSFRIGLLVVPVLTDYAIRYLDTFAYHNSLEFLSWLTEYRTARXRLEFDS

SEQ ID NO: 7880 - protein, 117 aa, Glycine max
  misc_feature (8)..(8): Xaa can be any naturally occurring amino acid
  misc_feature (18)..(18): Xaa can be any naturally occurring amino acid
  misc_feature (23)..(23): Xaa can be any naturally occurring amino acid
  misc_feature (37)..(37): Xaa can be any naturally occurring amino acid
  misc_feature (46)..(46): Xaa can be any naturally occurring amino acid
  misc_feature (51)..(51): Xaa can be any naturally occurring amino acid
  misc_feature (62)..(62): Xaa can be any naturally occurring amino acid
  misc_feature (69)..(69): Xaa can be any naturally occurring amino acid
  misc_feature (94)..(94): Xaa can be any naturally occurring amino acid
  misc_feature (107)..(107): Xaa can be any naturally occurring amino acid
  Coding DNA Sequence Number=SeqID_4082
LIESSMMXSVMTIDSDCXSYESXSSVRCMISSRSTSXIRRDSIHTXTSHSXLLSIVSLHIAXLVMSRIXSHDALCTVCNLILVTDSNICVACVXHTTMLSMCIVTSXIDITHHLTLA

SEQ ID NO: 7881 - protein, 166 aa, Glycine max
  Coding DNA Sequence Number=SeqID_4084
  Homolog annotation: Hit_ID=A7Q0F2; Match level="QueryCoverage=99%, HitCoverage=99%, E-value=2e-53, Identity=64%"; Hit description =Chromosome chr7 scaffold_42, whole genome shotgun sequence
  Pfam annotation: Domain name=DUF538; Domain location=8-148; Score =199.6; E_value=7.6e-57; Accession=PF04398.3; Description=Protein of unknown function, DUF538
MSRLPILIAACLFLYHLPSPLAAETDSPMAYSLLQSYNFPVGILPKGVVAYDLDTSTGKFHAYFKDSCSFSLVGSYQLNYKSTISGYISENKLTKLTGIKVKVLFLWLNIVEVIRNGDEMEFSVGITSANFGINEFLASPQCGCGFECKESKKETYDTSLPFVSSS

SEQ ID NO: 7882 - protein, 112 aa, Glycine max; identical to SEQ ID NO: 6068
  misc_feature (19)..(19): Xaa can be any naturally occurring amino acid
  misc_feature (56)..(56): Xaa can be any naturally occurring amino acid
  misc_feature (90)..(90): Xaa can be any naturally occurring amino acid
  Coding DNA Sequence Number=SeqID_4085

SEQ ID NO: 7883 - protein, 126 aa, Glycine max
  misc_feature (1)..(36): Xaa can be any naturally occurring amino acid
  misc_feature (71)..(71): Xaa can be any naturally occurring amino acid
  Coding DNA Sequence Number=SeqID_4087
XXXXXXXXXXXXXXXXXXXXXXXXXXXXXXXXXXXXFPVKAGQVLGGAVSAGLCVIRQWQKGEHPNGKIEXVGILYSAIKRREDITNTATWVDLARILQFAILGLRLAVSINDIFSPLLKNKNEYS

SEQ ID NO: 7884 - protein, 244 aa, Glycine max
  misc_feature (3)..(3): Xaa can be any naturally occurring amino acid
  misc_feature (11)..(11): Xaa can be any naturally occurring amino acid
  misc_feature (18)..(18): Xaa can be any naturally occurring amino acid
  misc_feature (20)..(21): Xaa can be any naturally occurring amino acid
  misc_feature (63)..(63): Xaa can be any naturally occurring amino acid
  misc_feature (87)..(87): Xaa can be any naturally occurring amino acid
  misc_feature (89)..(89): Xaa can be any naturally occurring amino acid
  misc_feature (100)..(101): Xaa can be any naturally occurring amino acid
  misc_feature (107)..(107): Xaa can be any naturally occurring amino acid
  misc_feature (132)..(132): Xaa can be any naturally occurring amino acid
  misc_feature (145)..(145): Xaa can be any naturally occurring amino acid
  misc_feature (169)..(169): Xaa can be any naturally occurring amino acid
  misc_feature (182)..(182): Xaa can be any naturally occurring amino acid
  misc_feature (203)..(203): Xaa can be any naturally occurring amino acid
  misc_feature (244)..(244): Xaa can be any naturally occurring amino acid
  Coding DNA Sequence Number=SeqID_4089
LIXYNKLIYIXGACQKDXHXXRLYNNKHRGTAPSACLLHLHISSVRNKYTPTLLVLCPRDNNXYGFSVGVVVSSCSSPLAVYVWIDXHXPPHTHHTLYYXXGRRDTXLSLTLPLYDHLSLHMIHSIPLLHHXAIAHTQQWRMCTXIALRAFTRLAVSSHQTQHLSATCXKSRHSSLSVSLSXYLTRYKDTAVVASYGRDIYYXRPSTVCCCLCVSASSCRAQYILTDCAETLYNYGASRGRRFX

SEQ ID NO: 7885 - protein, 109 aa, Glycine max
  misc_feature (25)..(25): Xaa can be any naturally occurring amino acid
  misc_feature (33)..(33): Xaa can be any naturally occurring amino acid
  misc_feature (41)..(41): Xaa can be any naturally occurring amino acid
  misc_feature (63)..(63): Xaa can be any naturally occurring amino acid
  misc_feature (82)..(82): Xaa can be any naturally occurring amino acid
  Coding DNA Sequence Number=SeqID_4091
  Homolog annotation: Hit_ID=A7QG98; Match level="QueryCoverage=97%, HitCoverage=35%, E-value=1e-31, Identity=61%"; Hit description =Chromosome undetermined scaffold_91, whole genome shotgun sequence
MLPQEPYAALDSYVAWALELPLITXKQPLRTLXIRQEWKRXTQVTKWMLTTGQGHDMRSYVTXLSAFREDDRLDEAEEFWTXLFMADMESLPRKSFEKMISIYHKRGMH

SEQ ID NO: 7886 - protein, 103 aa, Glycine max
  misc_feature (13)..(13): Xaa can be any naturally occurring amino acid
  misc_feature (37)..(38): Xaa can be any naturally occurring amino acid
  misc_feature (55)..(55): Xaa can be any naturally occurring amino acid
  misc_feature (79)..(79): Xaa can be any naturally occurring amino acid
  Coding DNA Sequence Number=SeqID_4092
RALAYPMQPPREXDLSLLVVAVLLLTTTLLIDSLSNXXTGVFIYDTTPALYLGRXSRSSLYTLSNTRDKRSTLMHERGXTHRDSIYTLPLTTETRRGSSFTIS

SEQ ID NO: 7887 - protein, 101 aa, Glycine max
  misc_feature (43)..(43): Xaa can be any naturally occurring amino acid
  Coding DNA Sequence Number=SeqID_4093
  Gene Ontology: Mol. function=structural constituent of ribosome; Cellular component=ribonucleoprotein complex; Biological process =translation
  Homolog annotation: Hit_ID=A9PAJ6; Match level="QueryCoverage=100%, HitCoverage=38%, E-value=3e-30, Identity=67%"; Hit description =Putative uncharacterized protein
AQSSPVRQICRKMREIMVNPAPASVFKELVGKFIPEMIGKEIXKAPFSIYPFQNGFFCKVKIFKAPKFDLGKLMGVHGDYPKNVGAKVDRPPDEPLAEEAT

SEQ ID NO: 7888 - protein, 108 aa, Glycine max
  misc_feature (19)..(19): Xaa can be any naturally occurring amino acid
  misc_feature (24)..(24): Xaa can be any naturally occurring amino acid
  misc_feature (50)..(50): Xaa can be any naturally occurring amino acid
  misc_feature (65)..(65): Xaa can be any naturally occurring amino acid
  misc_feature (82)..(82): Xaa can be any naturally occurring amino acid
  misc_feature (98)..(98): Xaa can be any naturally occurring amino acid
  Coding DNA Sequence Number=SeqID_4094
  Gene Ontology: Mol. function=1-deoxy-D-xylulose-5-phosphate synthase activity; Biological process=terpenoid biosynthetic process
  Homolog annotation: Hit_ID=Q6EJC9; Match level="QueryCoverage=97%, HitCoverage=14%, E-value=4e-24, Identity=57%"; Hit description=1 -deoxy-D-xylulose 5-phosphate synthase
RIEAAEVDEYARGMISGSXSSLYXELGLYYIGPGGGHNINDLFTILNKLXSTNTTIPVFIHAITXKGRRYPYAKKAFFKYHXVTKFYPPTGKQFKYNXSTQYNTTYFA

SEQ ID NO: 7889 - protein, 223 aa, Glycine max
  misc_feature (137)..(137): Xaa can be any naturally occurring amino acid
  misc_feature (142)..(143): Xaa can be any naturally occurring amino acid
  misc_feature (207)..(207): Xaa can be any naturally occurring amino acid
  misc_feature (219)..(220): Xaa can be any naturally occurring amino acid
  Coding DNA Sequence Number=SeqID_4095
LCTAQRARSVFGELFVWRGVGRLHVATCCLPSALVPPILDLSVGRGRLIRAPPCLSFFVSLCTQYSSHATRAPRAARGCWTTPPHAHRPSARPRRALGRAPACGAVARARASPSVVHIHQRVRAPAARCHAVFMFYXRSLSXXLVVLCAVWYNCREGGVRRSGASPCLSLSPCSKQTSVRSGAGGARLSERCAESLGCRVGGAGCPXRRARARIYNCLXXFAP

SEQ ID NO: 7890 - protein, 114 aa, Glycine max
  misc_feature (50)..(50): Xaa can be any naturally occurring amino acid
  misc_feature (52)..(52): Xaa can be any naturally occurring amino acid
  misc_feature (56)..(58): Xaa can be any naturally occurring amino acid
  misc_feature (65)..(65): Xaa can be any naturally occurring amino acid
  misc_feature (67)..(67): Xaa can be any naturally occurring amino acid
  misc_feature (70)..(72): Xaa can be any naturally occurring amino acid
  Coding DNA Sequence Number=SeqID_4097
  Gene Ontology: Mol. function=structural constituent of ribosome; Cellular component=ribonucleoprotein complex; Biological process =translation
  Homolog annotation: Hit_ID=O80929; Match level="QueryCoverage=56%, HitCoverage=56%, E-value=5e-22, Identity=82%"; Hit description=60S ribosomal protein L36-1
  Pfam annotation: Domain name=Ribosomal_L36e; Domain location=5-71; Score=19.8; E_value=8.6e-07; Accession=PF01158.8; Description =Ribosomal protein L36e
  Subcellular localization annotation: CTP_CleavageSite=28; ConfidenceScore=5.36e-01
MAAPQVKTGLFVGLNKGHVVTRRELAPRPNSRKGKTSKRTLFIRSLIREXAXFAPXXXRITELLXAXNRXXXLPRPNPSLPVLLSFFPLPPPPSPPPTFPSSPALLPPPSLSPP

SEQ ID NO: 7891 - protein, 122 aa, Glycine max
  misc_feature (73)..(74): Xaa can be any naturally occurring amino acid
  misc_feature (99)..(99): Xaa can be any naturally occurring amino acid
  misc_feature (101)..(101): Xaa can be any naturally occurring amino acid
  misc_feature (103)..(103): Xaa can be any naturally occurring amino acid
  misc_feature (113)..(114): Xaa can be any naturally occurring amino acid
  Coding DNA Sequence Number=SeqID_4098
TCLRCVCANIPRSHSHLFNDTFKLNTTHKHSLLDFIGTCLSFSVFFFLYFTFEIFPWSSNIVMAKSKGHPHHXXPLFPPTPMSPIAHYKGEFASGGFSXAXFXRPKSFSKGPXXVNVDKEFQ

SEQ ID NO: 7892 - protein, 95 aa, Glycine max
  Coding DNA Sequence Number=SeqID_4100
EHRGILVVSYVLQSVGWQLCPRTVYLIVDCVIAQREVICSLWTENTLCRRLLSLGQQVYCCIACDSRALYDILLCYQLVLYHPGRLSLKCAQSTY

SEQ ID NO: 7893 - protein, 123 aa, Glycine max
  Coding DNA Sequence Number=SeqID_4102
  Gene Ontology: Mol. function=nucleoside-triphosphatase activity; Cellular component=integral to membrane; Biological process=cell division
  Homolog annotation: Hit_ID=Q8LBL6; Match level="QueryCoverage=100%, HitCoverage=19%, E-value=5e-36, Identity=65%"; Hit description=Cell division protein FtsH-like protein
  Pfam annotation: Domain name=AAA; Domain location=1-122; Score=9.5; E_ value=2.7e-06; Accession=PF00004.19; Description=ATPase family associated with various cellular activities (AAA)
VGPPGTGKTLLARAVAGEAGVPFFTGSSNELVEWFDGRGAAIIIDLFNVSWKFAPSTIFFDELDASGGVRGRSWYDERDPTFNHSLTKMDGFESKMRVAGMAAPNLTEALNTDVCSPVRCSRQ

SEQ ID NO: 7894 - protein, 199 aa, Glycine max
  misc_feature (87)..(87): Xaa can be any naturally occurring amino acid
  Coding DNA Sequence Number=SeqID_4103
  Gene Ontology: Mol. function=protein-tyrosine kinase activity; Cellular component=extracellular region; Biological process =multicellular organismal development
  Homolog annotation: Hit_ID=Q8MVW7; Match level="QueryCoverage=91%, HitCoverage=42%, E-value=7e-40, Identity=36%"; Hit description=Basal body protein NBP-1
  Pfam annotation: Domain name=EGF; Domain location=12-39; Score=11.1; E_value=0.87; Accession=PF00008.17; Description=EGF-like domain
  Pfam annotation: Domain name=EGF; Domain location=126-160; Score=9.1; E_value=1.3; Accession=PF00008.17; Description=EGF-like domain
  Pfam annotation: Domain name=EGF; Domain location=44-78; Score=12.8; E_value=0.63; Accession=PF00008.17; Description=EGF-like domain
  Pfam annotation: Domain name=EGF_2; Domain location=126-160; Score =22.1; E_value=0.0021; Accession=PF07974.3; Description=EGF-like domain
  Pfam annotation: Domain name=EGF_2; Domain location=16-39; Score =16.8; E_value=0.031; Accession=PF07974.3; Description=EGF-like domain
  Pfam annotation: Domain name=EGF_2; Domain location=165-193; Score =1.5; E_value=1.9; Accession=PF07974.3; Description=EGF-like domain
  Pfam annotation: Domain name=EGF_2; Domain location=44-78; Score =26.9; E_value=7.4e-05; Accession=PF07974.3; Description=EGF-like domain
  Pfam annotation: Domain name=EGF_2; Domain location=83-121; Score =15.5; E_value=0.043; Accession=PF07974.3; Description=EGF-like domain
  Pfam annotation: Domain name=Keratin_B2; Domain location=53-188; Score=-77.3; E_value=0.096; Accession=PF01500.7; Description=Keratin, high sulfur B2 protein
  Pfam module annotation: Pfam domain module=EGF::EGF::EGF::EGF_2::EGF _2::EGF_2::EGF_2::EGF_2::Keratin_B2; Domain location=12-39::126 -160::44-78::126-160::16-39::165-193::44-78::83-121::53-188
QLRRPPPPNQTNPLACSGNGTCADYNMCTCKSGYGGLKCEHAICNGLYANDSMVCSGKGKCVLPNTCICNQGYSGQFCDTPICYNKXVHNACNYPNGTCIAPNQCQCASVNNQVLYTGAECQLPVCYGKNASDPNVCSTYGSCESPNNCVCKPGYSGLECQFITCFGKSSSSESVCNARGQCTSPNQCKCRRWLFRSRM

SEQ ID NO: 7895 - protein, 102 aa, Glycine max
  misc_feature (4)..(4): Xaa can be any naturally occurring amino acid
  misc_feature (93)..(93): Xaa can be any naturally occurring amino acid
  Coding DNA Sequence Number=SeqID_4104
VASXLVDLPYRQLSADARYTSLYVYTQRRARTRCNTHEAGYIHIKLQSSGIKHGGALSIYEASRGVDARGIHTHERTRDLVVGASIRASRTCXHPCPAYTIP

SEQ ID NO: 7896 - protein, 165 aa, Glycine max; identical to SEQ ID NO: 6104
  misc_feature (47)..(47): Xaa can be any naturally occurring amino acid
  misc_feature (137)..(137): Xaa can be any naturally occurring amino acid
  misc_feature (163)..(163): Xaa can be any naturally occurring amino acid
  Coding DNA Sequence Number=SeqID_4105

SEQ ID NO: 7897 - protein, 112 aa, Glycine max
  Coding DNA Sequence Number=SeqID_4107
VGFPRERWMWVVSSWCGAVLCGQCILSHSCTPLYDNIFMLCGWVCLVYLESVTSRRRINRYVVCRLWNVFSRSVLYKWCSLCDLAEHRVKHGIQSCRGAAARRGLHRSTPRQ

SEQ ID NO: 7898 - protein, 64 aa, Glycine max
  Coding DNA Sequence Number=SeqID_4109
  Gene Ontology: Mol. function=zinc ion binding; Cellular component =intracellular
  Homolog annotation: Hit_ID=A4Q7P3; Match level="QueryCoverage=93%, HitCoverage=7%, E-value=1e-20, Identity=76%"; Hit description=AT -rich interaction region; Zinc finger, FYVE/PHD-type
LQVYLEIPNGESFAEALHLKGIPYVIFWKNTFSCYAACHFRQAFLSVVQRKSSMTWFSFSVSMQ

SEQ ID NO: 7899 - protein, 166 aa, Glycine max
  misc_feature (9)..(10): Xaa can be any naturally occurring amino acid
  misc_feature (37)..(37): Xaa can be any naturally occurring amino acid
  misc_feature (57)..(57): Xaa can be any naturally occurring amino acid
  misc_feature (60)..(60): Xaa can be any naturally occurring amino acid
  misc_feature (70)..(70): Xaa can be any naturally occurring amino acid
  misc_feature (72)..(72): Xaa can be any naturally occurring amino acid
  misc_feature (74)..(74): Xaa can be any naturally occurring amino acid
  misc_feature (91)..(91): Xaa can be any naturally occurring amino acid
  misc_feature (110)..(110): Xaa can be any naturally occurring amino acid
  misc_feature (117)..(117): Xaa can be any naturally occurring amino acid
  misc_feature (166)..(166): Xaa can be any naturally occurring amino acid
  Coding DNA Sequence Number=SeqID_4110
CVICASMMXXCTCSLHGSDVCVVRARAAIVTVLYIKXMPIIYSSILHLYLLPTPRRXHIXTSDIYINSGXRXPXSVGWRVVRRRPCGGSEXLRVLYMLESYVSAISDKLXSSAASIXISHGVDSYHGTRRVCIMRNYVSSSSYLSIDHDDIGAWIECDEREENRLX

SEQ ID NO: 7900 - protein, 59 aa, Glycine max
  misc_feature (1)..(32): Xaa can be any naturally occurring amino acid
  misc_feature (40)..(40): Xaa can be any naturally occurring amino acid
  misc_feature (52)..(52): Xaa can be any naturally occurring amino acid
  Coding DNA Sequence Number=SeqID_4112
XXXXXXXXXXXXXXXXXXXXXXXXXXXXXXXXSPFRIEYXPQIATQIERTLXSGSACRY

SEQ ID NO: 7901 - protein, 346 aa, Glycine max
  misc_feature (325)..(325): Xaa can be any naturally occurring amino acid
  Coding DNA Sequence Number=SeqID_4114
  Homolog annotation: Hit_ID=Q23RZ2; Match level="QueryCoverage=30%, HitCoverage=79%, E-value=6e-08, Identity=29%"; Hit description=Kazal- type proteinase inhibitor 1, putative
  Pfam annotation: Domain name=NCD3G; Domain location=247-277; Score =1.3; E_value=0.064; Accession=PF07562.4; Description=Nine Cysteines Domain of family 3 GPC
MSKQAFSLLCLLLTLSALAVKVKAVSYTCDYVVRYENCPDVEQTVCSVYPGVCVSDTCQPSEYYNPCYACSDPTVMAYSLGVCGSDTGSGTPTEPSNPSNPSNNTNPSNPTDPTNSTNPTDPTNPTNPTNPTNGTDGSNGTNGTGSNPSDGGNTTEPEHELINSGGSEILAIGDDASAYVPEGSDVDDIIGIDFADQSNQEIELDSFFEYQSTSTSSNSNAAVTLRQSFYVVVYCDNIRPTSCTNDVNPVCAISCQNGVCQKTVNNICLACADTNILSYSLGRCEEENISCPSIDFATDTTTCNSFYDPVCAYPSGCTSKSCATXVTNSCGACYTTRASYFTLGPC

SEQ ID NO: 7902 - protein, 72 aa, Glycine max; identical to SEQ ID NO: 6114
  Coding DNA Sequence Number=SeqID_4115
  Subcellular localization annotation: CTP_CleavageSite=9; ConfidenceScore=5.33e-01

SEQ ID NO: 7903 - protein, 83 aa, Glycine max
  Coding DNA Sequence Number=SeqID_4117
  Gene Ontology: Mol. function=hydrolase activity, acting on ester bonds; Cellular component=cellular_component; Biological process =lipid metabolic process
  Homolog annotation: Hit_ID=Q8W0Y4; Match level="QueryCoverage=97%, HitCoverage=66%, E-value=7e-14, Identity=50%"; Hit description=Enod8- like protein
  Subcellular localization annotation: CTP_CleavageSite=51; ConfidenceScore=5.33e-01
DSVGTNFSSGASFATGGSTIIPQQTLRFSPFSLGIQYWHFLCFTPTPKFIKAQGGVFAALMPKEEYFQEALYTFDIGQNVLQG

SEQ ID NO: 7904 - protein, 177 aa, Glycine max
  misc_feature (92)..(92): Xaa can be any naturally occurring amino acid
  Coding DNA Sequence Number=SeqID_4118
  Gene Ontology: Mol. function=protein serine/threonine kinase activity; Biological process=protein amino acid phosphorylation
  Homolog annotation: Hit_ID=A7PWA8; Match level="QueryCoverage=76%, HitCoverage=25%, E-value=2e-19, Identity=43%"; Hit description =Chromosome chr8 scaffold_34, whole genome shotgun sequence
FEYFSSRVTSVGPPPKIPQQILHLQLKQLIKSMLRKNPEHRPTAAELLRHPLLQPYVLRCHNASSNVLPVYPLVNPKDKTRRSNKSSGGKDXKDKEASLVNRLERIHPIEGNGDIQISNLPNDAVTISTSAEDNLETRMADLTSYIVESCTSISGSKDGSTTSESTICSVCKEDFKS

SEQ ID NO: 7905 - protein, 94 aa, Glycine max
  misc_feature (2)..(2): Xaa can be any naturally occurring amino acid
  misc_feature (20)..(20): Xaa can be any naturally occurring amino acid
  Coding DNA Sequence Number=SeqID_4119
EXPVSYSGRVRASRSTLISXYPDRFDRCVECAYITLCISGACTIHAAATGFLTLRESLTHASFRSGTIVIVHSLTLCRSRYHLKWLYRSSLRLG

SEQ ID NO: 7906 - protein, 165 aa, Glycine max; identical to SEQ ID NO: 6119
  misc_feature (52)..(52): Xaa can be any naturally occurring amino acid
  misc_feature (67)..(67): Xaa can be any naturally occurring amino acid
  misc_feature (72)..(72): Xaa can be any naturally occurring amino acid
  misc_feature (86)..(87): Xaa can be any naturally occurring amino acid
  misc_feature (99)..(99): Xaa can be any naturally occurring amino acid
  misc_feature (106)..(106): Xaa can be any naturally occurring amino acid
  misc_feature (109)..(110): Xaa can be any naturally occurring amino acid
  Coding DNA Sequence Number=SeqID_4121

SEQ ID NO: 7907 - protein, 155 aa, Glycine max
  misc_feature (94)..(94): Xaa can be any naturally occurring amino acid
  Coding DNA Sequence Number=SeqID_4123
SLRCMRSGFVSFVLVRQRYICHRGSSRVLGRGGVRPVRLLVACVLVVILWYPAVPRASQSSFVCSDVAGAGRPTALVLRARSGLLAEFPGCDQXHFTLVARSNVSPLSYRSVSSLDSIVIPTSAPMLHTCLSAACVCYLLGCADRLLFMCTLLYC

SEQ ID NO: 7908 - protein, 342 aa, Glycine max
  Coding DNA Sequence Number=SeqID_4125
  Gene Ontology: Mol. function=nucleoside-triphosphatase activity; Cellular component=protein complex
  Homolog annotation: Hit_ID=A7P1T3; Match level="QueryCoverage=52%, HitCoverage=15%, E-value=1e-63, Identity=65%"; Hit description =Chromosome chr19 scaffold_4, whole genome shotgun sequence
SYVGPPPHGPANDKKSEIQLESFTKVPPTPNSKSLKGKSTLLLAISTFGYQILLYPHFAELCWVTSKLDEGPCADVSGPWRGWPFNSCIVRPNNSQDKVAVSCSSGGTKSREASGLVRGLIAVGLSAYRGVYKSVREVSLDVRKVLEILIEKINTKIQVGKDRYQYFRILSQVAYLEDMVNNWAYSLLSLEQDSPEHKTKVIPESGGPLNSHLTRENHQTEDEDCHLVVPVDGNDLETLEGSHKEIPSETTGYLASDDNNDNVEIIDCDDGNASSEGSLQNHSFPDNRISTTLLLQANHFIHPQVWRRTLCSGALGVFFGCTGPPLEESLRGPPPHLDNLNL

SEQ ID NO: 7909 - protein, 101 aa, Glycine max
  misc_feature (9)..(9): Xaa can be any naturally occurring amino acid
  misc_feature (48)..(48): Xaa can be any naturally occurring amino acid
  misc_feature (79)..(79): Xaa can be any naturally occurring amino acid
  Coding DNA Sequence Number=SeqID_4126
HRSDPLTSXEALEGREYMRTLCSDRVKMLYLSGLWYDITAYLYTRLLXILRSSSRTTYAQSSSDLRTVGVYVSCAKQEXIRRTESLSQWSRAVTSLLPIRV

SEQ ID NO: 7910 - protein, 46 aa, Glycine max
  Coding DNA Sequence Number=SeqID_4128
YSHNNQGLKHKIIINFFFSDYNFVNSKYILQPSKEYSIPFILYFLN

SEQ ID NO: 7911 - protein, 91 aa, Glycine max
  misc_feature (39)..(39): Xaa can be any naturally occurring amino acid
  misc_feature (56)..(56): Xaa can be any naturally occurring amino acid
  Coding DNA Sequence Number=SeqID_3697
  Gene Ontology: Mol. function=protein transporter activity; Cellular component=clathrin adaptor complex; Biological process=intracellular protein transport
  Homolog annotation: Hit_ID=A5C9L9; Match level="QueryCoverage=100%, HitCoverage=39%, E-value=1e-32, Identity=72%"; Hit description =Putative uncharacterized protein
GAASALFLLDIKGRVLIWRDYRGDVSALDAERLFTKLIXKQADPQAQDPVAHDNGXSYMCIQHSNVYLMIATRHNCNAASLLFFLHRIVYV

SEQ ID NO: 7912 - protein, 136 aa, Glycine max
  Coding DNA Sequence Number=SeqID_3698
  Subcellular localization annotation: CTP_CleavageSite=40; ConfidenceScore=5.54e-01
NLLCFVNQTHSTTKTKKTPAFSASASPTPTHHQPSVDATGAASVWQPERRERSPVAGGDTPTLQPPSAARARRHRVPAGRQRRSSSSRRGACPPSGSRGIRGVRRRLTAGTGSGCCGGLALVDAFSREVRRRQAAG

SEQ ID NO: 7913 - protein, 128 aa, Glycine max
  Coding DNA Sequence Number=SeqID_3700
LHVRRVVSCKQDGCDSTSMCLYTCSVKRSYAISHFLVAILAVPRSKLCGNINHRRSNVRGSVTSSLGYVSHCTAHAVMWYSNTLLRIRPVDHRYFHTHLPRRCVMLREGVSTTPSTLDSLDSVVHLAA

SEQ ID NO: 7914 - protein, 139 aa, Glycine max
  Coding DNA Sequence Number=SeqID_3702
  Gene Ontology: Mol. function=transferase activity, transferring glycosyl groups
  Homolog annotation: Hit_ID=A8MR93; Match level="QueryCoverage=100%, HitCoverage=27%, E-value=1e-67, Identity=83%"; Hit description =Uncharacterized protein At1g02145.3
SGCTVFTFMASYNNYPSGYALKRLHQISHPANVKGEEWVHIDTFSAMNGISRFCESAFPWRYSKEEEMVVEELQNRNFTYLVNEHPSVDGYKCLFSEEGFDRVELRQGFPPIVLVKRAKVYVHQDMKADDQLHKKWPGC

SEQ ID NO: 7915 - protein, 104 aa, Glycine max
  misc_feature (7)..(7): Xaa can be any naturally occurring amino acid
  misc_feature (23)..(23): Xaa can be any naturally occurring amino acid
  misc_feature (27)..(28): Xaa can be any naturally occurring amino acid
  misc_feature (63)..(63): Xaa can be any naturally occurring amino acid
  misc_feature (72)..(72): Xaa can be any naturally occurring amino acid
  misc_feature (74)..(74): Xaa can be any naturally occurring amino acid
  misc_feature (81)..(81): Xaa can be any naturally occurring amino acid
  misc_feature (86)..(86): Xaa can be any naturally occurring amino acid
  misc_feature (95)..(95): Xaa can be any naturally occurring amino acid
  misc_feature (98)..(99): Xaa can be any naturally occurring amino acid
  misc_feature (102)..(103): Xaa can be any naturally occurring amino acid
  Coding DNA Sequence Number=SeqID_3703
LNDMRYXIYIACRCCFARMRDTXTTPXXRLTRQRQLSICSARLYLYLLGDITYVSGCAVVCFXLLIHSSYIXSXDMLYMYXVSMSXQYHSQSTCXVQXXREXXK

SEQ ID NO: 7916 - protein, 132 aa, Glycine max
  Coding DNA Sequence Number=SeqID_3705
  Gene Ontology: Mol. function=hydrolase activity, hydrolyzing O -glycosyl compounds; Cellular component=vacuole; Biological process =carbohydrate metabolic process
  Homolog annotation: Hit_ID=O24509; Match level="QueryCoverage=99%, HitCoverage=20%, E-value=2e-58, Identity=84%"; Hit description=Acid beta-fructofuranosidase precursor
  Pfam annotation: Domain name=Glyco_hydro_32C; Domain location=55-133; Score=53.4; E_value=7.9e-13; Accession=PF08244.2; Description =Glycosyl hydrolases family 32 C termi
ELDRKTGSNLLQWPVAEIESLRLRSDEFKNLKAKPGSVVSVDIETATQLDIVAEFEIDKETLDKIPQSNEEYTCSTSGGSKQRGALGPFGLLVLADEGLSEYTPQYFYVIKGSNGNLKTFFCADQSRSAYAN

SEQ ID NO: 7917 - protein, 114 aa, Glycine max
  misc_feature (76)..(76): Xaa can be any naturally occurring amino acid
  Coding DNA Sequence Number=SeqID_3706
  Gene Ontology: Mol. function=structural constituent of ribosome; Cellular component=ribonucleoprotein complex; Biological process =translation
  Homolog annotation: Hit_ID=A9PA96; Match level="QueryCoverage=100%, HitCoverage=64%, E-value=4e-48, Identity=80%"; Hit description =Putative uncharacterized protein
  Pfam annotation: Domain name=Ribosomal_L22; Domain location=11-113; Score=70.1; E_value=7.6e-18; Accession=PF00237.9; Description =Ribosomal protein L22pL17e
EPDNPTKSCKARGADLRVHFKNTRETGFAIRKLPLVKATIYLKDVLAHKQAIPFRRFCGGVGRTAQANSILSNGEXRWPVKSLNFILDLLKNAESKADVKGLDVDALYIYHVHL

SEQ ID NO: 7918 - protein, 150 aa, Glycine max
  misc_feature (71)..(71): Xaa can be any naturally occurring amino acid
  misc_feature (133)..(134): Xaa can be any naturally occurring amino acid
  misc_feature (136)..(137): Xaa can be any naturally occurring amino acid
  misc_feature (149)..(149): Xaa can be any naturally occurring amino acid
  Coding DNA Sequence Number=SeqID_3707
  Subcellular localization annotation: CTP_CleavageSite=58; ConfidenceScore=5.05e-01
HHHTISFTSMRSTINATGDDSRTCSVGEMRLEIRPTQLQRRSSTHRVSGGFTFRYHTRSSESALHEICLVXGWGLARRRLACGARIIEHLTRTIRYTASNLALTVKIKHKKGGGVSLTLYIIMRSGCCVFVVXXFXXFWGAHYTYRINXH

SEQ ID NO: 7919 - protein, 110 aa, Glycine max
  misc_feature (88)..(88): Xaa can be any naturally occurring amino acid
  Coding DNA Sequence Number=SeqID_3709
  Gene Ontology: Mol. function=magnesium ion binding; Cellular component=integral to membrane; Biological process=photosynthesis, light harvesting
  Homolog annotation: Hit_ID=A9PGZ3; Match level="QueryCoverage=96%, HitCoverage=36%, E-value=7e-36, Identity=69%"; Hit description =Putative uncharacterized protein
  Pfam annotation: Domain name=Chloroa_b-bind; Domain location=3-80; Score=-12.6; E_value=0.00018; Accession=PF00504.12; Description =Chlorophyll A-B binding protein
NPLPPNFIGAVIPEIFFVGGAEFSRIFNGLNFEDKLLPGGPFAPLGVANDPAQAAFLKVKEIKNGRPAMFAPLGFYFPAYVPGEGPVXNLAKHFSGPFGNNLVPVISGFS

SEQ ID NO: 7920 - protein, 141 aa, Glycine max
  misc_feature (123)..(123): Xaa can be any naturally occurring amino acid
  Coding DNA Sequence Number=SeqID_3710
  Gene Ontology: Mol. function=protein domain specific binding; Cellular component=cytoplasm; Biological process=response to stress
  Homolog annotation: Hit_ID=P46077; Match level="QueryCoverage=98%, HitCoverage=52%, E-value=3e-64, Identity=88%"; Hit description=14-3 -3-like protein GF14 phi
  Pfam annotation: Domain name=14-3-3; Domain location=5-141; Score =119.8; E_value=7.8e-33; Accession=PF00244.10; Description=14-3-3 protein
MVSAREEFVYMAKLAEQAERYEEMVEFMEKVSASVDGDELTVEERNLLSVAYKNVIGARRASWRIISSIEQKEESRGNDDHVAAIRDYRGKIETELTGICEGILKLLDSRLVPAAASGDSKVXYLKMKGDYHRYLAEFKTG

SEQ ID NO: 7921 - protein, 149 aa, Glycine max
  misc_feature (18)..(19): Xaa can be any naturally occurring amino acid
  misc_feature (36)..(36): Xaa can be any naturally occurring amino acid
  misc_feature (41)..(42): Xaa can be any naturally occurring amino acid
  misc_feature (44)..(44): Xaa can be any naturally occurring amino acid
  misc_feature (54)..(55): Xaa can be any naturally occurring amino acid
  misc_feature (62)..(62): Xaa can be any naturally occurring amino acid
  misc_feature (68)..(68): Xaa can be any naturally occurring amino acid
  misc_feature (73)..(74): Xaa can be any naturally occurring amino acid
  misc_feature (77)..(77): Xaa can be any naturally occurring amino acid
  misc_feature (79)..(79): Xaa can be any naturally occurring amino acid
  misc_feature (87)..(87): Xaa can be any naturally occurring amino acid
  misc_feature (100)..(100): Xaa can be any naturally occurring amino acid
  misc_feature (102)..(102): Xaa can be any naturally occurring amino acid
  misc_feature (113)..(113): Xaa can be any naturally occurring amino acid
  misc_feature (116)..(116): Xaa can be any naturally occurring amino acid
  misc_feature (148)..(148): Xaa can be any naturally occurring amino acid
  Coding DNA Sequence Number=SeqID_3711
  Subcellular localization annotation: CTP_CleavageSite=11; ConfidenceScore=5.14e-01
LTVHITKRTAACSFATSXXTRTRLYSLLLSYSPSLXNILLXXSXVLLIFLYARXXNIVFLIXTLTSQXTTSHXXHYXRXRIPTSSTXAHSYTITNTQHIXYXSMSLILCLLMXRSXQLSGHSHAVRTLELSRRTLFSAVTEYNLRHKXK

SEQ ID NO: 7922 - protein, 122 aa, Glycine max
  misc_feature (1)..(1): Xaa can be any naturally occurring amino acid
  misc_feature (11)..(11): Xaa can be any naturally occurring amino acid
  misc_feature (24)..(25): Xaa can be any naturally occurring amino acid
  misc_feature (62)..(62): Xaa can be any naturally occurring amino acid
  misc_feature (64)..(64): Xaa can be any naturally occurring amino acid
  misc_feature (102)..(102): Xaa can be any naturally occurring amino acid
  misc_feature (108)..(108): Xaa can be any naturally occurring amino acid
  Coding DNA Sequence Number=SeqID_1521
XIQQRQGQHSXARSVISLLIHMIXXPHINRRLPTPDSHALPHCCTLALLICSTGGLTTYTVXRXRNVSRGATIYICLYRAPSSAHNSCVRLVGYRVRHSVLXLVSNTXCIGCQLCLILIYLS

SEQ ID NO: 7923 - protein, 128 aa, Glycine max; identical to SEQ ID NO: 6736
  Coding DNA Sequence Number=SeqID_1523

SEQ ID NO: 7924 - protein, 117 aa, Glycine max
  misc_feature (25)..(25): Xaa can be any naturally occurring amino acid
  misc_feature (72)..(72): Xaa can be any naturally occurring amino acid
  misc_feature (91)..(91): Xaa can be any naturally occurring amino acid
  Coding DNA Sequence Number=SeqID_1525
LLSTRVPHVARRYVCVHTHLYIYIXYVPHICAPLRAGAHDIIHGGVGARAIMSTSRYETGVGAENIDNSGDXLYPRATYIKLIMTSRRGVXRTRIMRGESIRCASIYTRIFRARCDV

SEQ ID NO: 7925 - protein, 131 aa, Glycine max
  misc_feature (22)..(22): Xaa can be any naturally occurring amino acid
  misc_feature (41)..(41): Xaa can be any naturally occurring amino acid
  misc_feature (45)..(46): Xaa can be any naturally occurring amino acid
  misc_feature (53)..(53): Xaa can be any naturally occurring amino acid
  misc_feature (67)..(67): Xaa can be any naturally occurring amino acid
  misc_feature (73)..(73): Xaa can be any naturally occurring amino acid
  misc_feature (91)..(92): Xaa can be any naturally occurring amino acid
  misc_feature (95)..(96): Xaa can be any naturally occurring amino acid
  misc_feature (103)..(103): Xaa can be any naturally occurring amino acid
  misc_feature (109)..(109): Xaa can be any naturally occurring amino acid
  misc_feature (130)..(130): Xaa can be any naturally occurring amino acid
  Coding DNA Sequence Number=SeqID_1527
PRTTSILVSHQDIHIPLRRYRXQCDISHHTHSSTIYQCDVXIMTXXLRRSGTXGHPSLMCHCANAWXCTIHHXLSALPDDAVVYVLSFTPXXPAXXIGMYVYXVILALXLQSLLHTSLTLCVYYSLLLAXT

SEQ ID NO: 7926 - protein, 123 aa, Glycine max; identical to SEQ ID NO: 6742
  misc_feature (8)..(8): Xaa can be any naturally occurring amino acid
  misc_feature (14)..(14): Xaa can be any naturally occurring amino acid
  misc_feature (28)..(28): Xaa can be any naturally occurring amino acid
  misc_feature (62)..(62): Xaa can be any naturally occurring amino acid
  misc_feature (65)..(65): Xaa can be any naturally occurring amino acid
  misc_feature (90)..(91): Xaa can be any naturally occurring amino acid
  misc_feature (95)..(95): Xaa can be any naturally occurring amino acid
  misc_feature (104)..(104): Xaa can be any naturally occurring amino acid
  Coding DNA Sequence Number=SeqID_1529

SEQ ID NO: 7927 - protein, 87 aa, Glycine max
  Coding DNA Sequence Number=SeqID_1531
PHQSIFCEITQSTSHKIISTLDKSIKESVLGAGTLHYCLLNKNTKGVAMAKDEIVRALSYCIHGRSSETSDTRCRGGSTTAAKDYQW

SEQ ID NO: 7928 - protein, 291 aa, Glycine max
  misc_feature (224)..(224): Xaa can be any naturally occurring amino acid
  Coding DNA Sequence Number=SeqID_1533
  Gene Ontology: Mol. function=methyltransferase activity; Cellular component=mitochondrion; Biological process=ubiquinone biosynthetic process
  Homolog annotation: Hit_ID=A5ACK4; Match level="QueryCoverage=89%, HitCoverage=95%, E-value=1e-107, Identity=75%"; Hit description =Putative uncharacterized protein
  Pfam annotation: Domain name=Methyltransf_11; Domain location=89-207; Score=58.3; E_value=2.7e-14; Accession=PF08241.2; Description =Methyltransferase domain
  Pfam annotation: Domain name=Methyltransf_12; Domain location=89-205; Score=32.6; E_value=1.5e-06; Accession=PF08242.2; Description =Methyltransferase domain
  Pfam annotation: Domain name=Ubie_methyltran; Domain location=35-290; Score=328.4; E_value=1.3e-95; Accession=PF01209.9; Description =ubiECOQ5 methyltransferase family
  Pfam module annotation: Pfam domain module=Methyltransf _11::Methyltransf_12::Ubie_methyltran; Domain location=89-207::89 -205::35-290
MALGTVTRRLGNKLLPALSPSPRLLHSHATSFGFKQVNEEEKARMVGDVFTSVASSYDLMNDLMSAGLHRLWKDRLVSKLNPFPGMKHLDVAGGTGDVAFRILENIHKVKLRGLRGAFQDTLEAETQIYVCDINPKMLNVGKQRASEKGFGEDGSLVWVEGNAESLSFQNDSMDGYTIAFGIRNVTHIEKVLSEAHRVLKPGGRFPFALNWSHVGIPRYLKIFXGIFFLFSVIPQHGVAGDRDSYQYLVESIRRFPSQEKFASMIADAGFQKVEYENLVGGVVAIHSGLKI

SEQ ID NO: 7929 - protein, 195 aa, Glycine max
  Coding DNA Sequence Number=SeqID_1534
  Gene Ontology: Mol. function=unfolded protein binding; Cellular component=cytoplasm; Biological process=cellular protein metabolic process
  Homolog annotation: Hit_ID=P54408; Match level="QueryCoverage=99%, HitCoverage=34%, E-value=1e-75, Identity=69%"; Hit description=T -complex protein 1 subunit gamma
  Pfam annotation: Domain name=Cpn60_TCP1; Domain location=1-191; Score= -229.6; E_value=0.00028; Accession=PF00118.14; Description=TCP-1cpn60 chaperonin family
EIQETDIGKDCGLFEISKIGDEYFTYFLECKAPKACTILLRGASKDVLNELERNLHDALAVGRNIIQNPRLVPGGGAIEMELAHRLQEKAKTIEGLQQLPLKALSYALEVIPRTLATNCGADVVRIITELRSKHAGEGGKFFGIDGNAGKIADMREANVWEPAVVKIQTFKTAIEASAMLLRIDDVVSGLKKKKK

SEQ ID NO: 7930 - protein, 185 aa, Glycine max
  misc_feature (34)..(34): Xaa can be any naturally occurring amino acid
  misc_feature (154)..(154): Xaa can be any naturally occurring amino acid
  misc_feature (169)..(169): Xaa can be any naturally occurring amino acid
  Coding DNA Sequence Number=SeqID_3713
  Subcellular localization annotation: CTP_CleavageSite=71; ConfidenceScore=5.13e-01
LCSRGFAAWLIRTDLPASHVVLTRGNLAVHTTPXLLHLSPTNTLHSTSTSLLALPPCARRTPPPPPILPPCAATSVSLPAPPVPVGSLVLRATTARRPDSERPRLCVLSLILCLIIGCRCRATPPPARYRARSPRLSYVYCLLIAGLILISHSXVGVRVAPVVVVLPPXRRDRKRHKAITLGYLL

SEQ ID NO: 7931 - protein, 61 aa, Glycine max
  misc_feature (8)..(8): Xaa can be any naturally occurring amino acid
  misc_feature (23)..(23): Xaa can be any naturally occurring amino acid
  misc_feature (26)..(26): Xaa can be any naturally occurring amino acid
  Coding DNA Sequence Number=SeqID_3715
  Gene Ontology: Mol. function=calcium ion binding; Cellular component =flagellin-based flagellum; Biological process=ciliary or flagellar motility
  Homolog annotation: Hit_ID=O82659; Match level="QueryCoverage=100%, HitCoverage=36%, E-value=2e-22, Identity=85%"; Hit description =Centrin
  Pfam annotation: Domain name=efhand; Domain location=27-55; Score =40.7; E_value=5.4e-09; Accession=PF00036.22; Description=EF hand
MSSLYRGXSRKEKPRRHHGLNQXKRXEIKEAFDLFDTDGSGTIDAKELNVAMRALGFEMTE

SEQ ID NO: 7932 - protein, 83 aa, Glycine max
  Coding DNA Sequence Number=SeqID_3716
  Subcellular localization annotation: CTP_CleavageSite=64; ConfidenceScore=5.19e-01
VVFVAKTLRCYVQGTGTVGSYSCRMLVTNLQSNPTPEFLQTLPFPSDRPQKTYQRNCGAWGLIRCTRMGAALESPSIASELAP

SEQ ID NO: 7933 - protein, 89 aa, Glycine max
  misc_feature (3)..(3): Xaa can be any naturally occurring amino acid
  misc_feature (6)..(7): Xaa can be any naturally occurring amino acid
  misc_feature (14)..(14): Xaa can be any naturally occurring amino acid
  misc_feature (27)..(27): Xaa can be any naturally occurring amino acid
  misc_feature (29)..(29): Xaa can be any naturally occurring amino acid
  misc_feature (34)..(34): Xaa can be any naturally occurring amino acid
  misc_feature (48)..(48): Xaa can be any naturally occurring amino acid
  misc_feature (57)..(58): Xaa can be any naturally occurring amino acid
  misc_feature (83)..(85): Xaa can be any naturally occurring amino acid
  misc_feature (87)..(87): Xaa can be any naturally occurring amino acid
  Coding DNA Sequence Number=SeqID_3718
LSXKAXXTKIEGGXVAIGPPEYSRIRXYXRSWPXGYLLYPCFGIPCAXKWTFQSFTXXKPFLLGACLFHDMFSQSNVKDSIIXXXDXCR

SEQ ID NO: 7934 - protein, 118 aa, Glycine max
  misc_feature (4)..(4): Xaa can be any naturally occurring amino acid
  misc_feature (109)..(109): Xaa can be any naturally occurring amino acid
  Coding DNA Sequence Number=SeqID_3720
  Subcellular localization annotation: CTP_CleavageSite=40; ConfidenceScore=5.28e-01
SGSXETTSTHSIFCLSRNSATLSIAGVIVFSHTHTPANKRCAILSVVMSRQFIFYEYFSEPRNLFTFIKSFSTVHSVLRPLCAVRHVLYVTINRGETSAYIHSPFLLRXYDTRPLCMC

SEQ ID NO: 7935 - protein, 223 aa, Glycine max
  Coding DNA Sequence Number=SeqID_37
  Gene Ontology: Mol. function=sequence-specific DNA binding; Cellular component=nucleus; Biological process=regulation of transcription, DNA-dependent
  Homolog annotation: Hit_ID=B0LUS3; Match level="QueryCoverage=86%, HitCoverage=62%, E-value=2e-44, Identity=50%"; Hit description =Transcription factor
  Pfam annotation: Domain name=WRKY; Domain location=44-106; Score =104.1; E_value=4.2e-28; Accession=PF03106.6; Description=WRKY DNA -binding domain
MYHFSMFYIIPKKYALCMEHMLLMINLLLRRKSAVSWSILSCTTDDNHVWRKYGQKGVLNSEFPRSYFRCGHKYDQGCLAKKQVQRDQENSNMYRTTYIGIHTCNATTKATHSATDLLNSDHDSEVPNVQDHHISPPSLNIKQTFPKENTPSDVTDHMLNPSMWSALKDFEPSNKPTIVPLMMETDTNNVDNVYSSQRLDMDFRVPSVHFGTDFPFDEGHFLI

SEQ ID NO: 7936 - protein, 103 aa, Glycine max
  Coding DNA Sequence Number=SeqID_38
RHRPHTIYSLVETASSSSNTTLIYTECFNITIKYPPSAQYDQAKNPRTTRNRDDADRRIMCAGGSVCGGNTSATGAGMYNRLYPCPPTLTYFALYNLICEYFN

SEQ ID NO: 7937 - protein, 142 aa, Glycine max
  misc_feature (136)..(136): Xaa can be any naturally occurring amino acid
  misc_feature (141)..(141): Xaa can be any naturally occurring amino acid
  Coding DNA Sequence Number=SeqID_40
  Gene Ontology: Mol. function=peptidyl-prolyl cis-trans isomerase activity; Biological process=protein folding
  Homolog annotation: Hit_ID=Q9SR70; Match level="QueryCoverage=82%, HitCoverage=50%, E-value=4e-46, Identity=81%"; Hit description =Peptidyl-prolyl cis-trans isomerase
  Subcellular localization annotation: CTP_CleavageSite=44; ConfidenceScore=5.64e-01
MLTMKLLHPLHHSLSSSLPLPSRRRQSKPYRCSLPSPGGERVIRSETVVSPVMVSQSFEGRRVLLGCLLSAAGGILLPDSSEAVSTSRRALRASKIPDSEFTTLPNGLKYYDIKVGNGAEAVKGSRVAVHYVAKWXGITFXT

SEQ ID NO: 7938 - protein, 64 aa, Glycine max
  Coding DNA Sequence Number=SeqID_41
  Gene Ontology: Mol. function=peptidyl-prolyl cis-trans isomerase activity; Biological process=protein folding
  Homolog annotation: Hit_ID=Q9ZVJ4; Match level="QueryCoverage=48%, HitCoverage=15%, E-value=2e-10, Identity=93%"; Hit description =Peptidyl-prolyl cis-trans isomerase
SGARPHWFRKAGKPLGYKECQFHRVIKDFMIQSGDFLKHLNNSWLPLTTFHFVVSPPLMNPNLT

SEQ ID NO: 7939 - protein, 161 aa, Glycine max; identical to SEQ ID NO: 7423
  Coding DNA Sequence Number=SeqID_42

SEQ ID NO: 7940 - protein, 113 aa, Glycine max
  misc_feature (87)..(87): Xaa can be any naturally occurring amino acid
  Coding DNA Sequence Number=SeqID_44
  Gene Ontology: Mol. function=oxidoreductase activity, acting on the CH-OH group of donors, NAD or NADP as acceptor; Cellular component =mitochondrial matrix; Biological process=malate metabolic process
  Homolog annotation: Hit_ID=A2Q1H3; Match level="QueryCoverage=77%, HitCoverage=13%, E-value=2e-33, Identity=79%"; Hit description=Malic enzyme
  Pfam annotation: Domain name=Malic_M; Domain location=3-113; Score= -105.1; E_value=9.5e-05; Accession=PF03949.5; Description=Malic enzyme, NAD binding domain
SGRVGGRVGGRVGGRVGGRVGGRVGASGSPFENVDLGNGEVGHVNQANNMYLFPGIGLGTLLSGARHITDGMLRAAAECSHISSKTXASYMTEDDVRKGILYPSIDCIRDVTA

SEQ ID NO: 7941 - protein, 156 aa, Glycine max
  misc_feature (30)..(31): Xaa can be any naturally occurring amino acid
  misc_feature (34)..(34): Xaa can be any naturally occurring amino acid
  misc_feature (36)..(37): Xaa can be any naturally occurring amino acid
  misc_feature (39)..(39): Xaa can be any naturally occurring amino acid
  misc_feature (48)..(48): Xaa can be any naturally occurring amino acid
  misc_feature (51)..(51): Xaa can be any naturally occurring amino acid
  misc_feature (82)..(82): Xaa can be any naturally occurring amino acid
  misc_feature (109)..(109): Xaa can be any naturally occurring amino acid
  misc_feature (119)..(119): Xaa can be any naturally occurring amino acid
  misc_feature (154)..(155): Xaa can be any naturally occurring amino acid
  Coding DNA Sequence Number=SeqID_45
WLCLLLFSLSLRLPTARHSPTYRHRILSLXXTQXTXXEXCIENSTRDXTTXTHDKHITHTTFSRRTETYHPQPNHNRTIDRXQTTQPSVCHSLRLILLPVFAVLSLYIXHRHSTLHYYXSSHSFHLPRAPAPYHLIIIPISSTLRLSIITPHEXXE

SEQ ID NO: 7942 - protein, 105 aa, Glycine max
  misc_feature (53)..(53): Xaa can be any naturally occurring amino acid
  Coding DNA Sequence Number=SeqID_47
  Gene Ontology: Mol. function=binding
  Homolog annotation: Hit_ID=A7PB62; Match level="QueryCoverage=99%, HitCoverage=22%, E-value=5e-17, Identity=50%"; Hit description =Chromosome chr16 scaffold_10, whole genome shotgun sequence
  Subcellular localization annotation: CTP_CleavageSite=38; ConfidenceScore=5.14e-01
YVISVRGCLTNLMKLFFAVSRVGSGSSSNVVLFLSDIMGMYFVSSILLITRSXATEYMIIITEVWSGCIQCDSYKGSVMQFLGRRALLSLLLLSAHYTSRQIDEH

SEQ ID NO: 7943 - protein, 196 aa, Glycine max
  misc_feature (35)..(36): Xaa can be any naturally occurring amino acid
  misc_feature (78)..(78): Xaa can be any naturally occurring amino acid
  misc_feature (100)..(100): Xaa can be any naturally occurring amino acid
  misc_feature (155)..(155): Xaa can be any naturally occurring amino acid
  misc_feature (186)..(186): Xaa can be any naturally occurring amino acid
  misc_feature (195)..(195): Xaa can be any naturally occurring amino acid
  Coding DNA Sequence Number=SeqID_48
ITPRRTPPPRRSTGVLVFVYRSVGCSYCCIFQLRXXPTTSAKYRAARVVWWSIINVTIYLSPSPPLVYILLYSCSPPXLFVSSLLTPSTTNTASRRRICXLLCRAHILSCAILHSASMLIERADCMCASILLSRDAPNTRARNTQPPTRGVASLXYVSRRRTLSCSGAVCLFRLYISLSIILTLRXASSRASITXR

SEQ ID NO: 7944 - protein, 101 aa, Glycine max
  Coding DNA Sequence Number=SeqID_469
  Subcellular localization annotation: CTP_CleavageSite=14; ConfidenceScore=5.17e-01
ISQPRFRSQNPKVCSQVLSPNQIGDFPFNPGYPGPPGGGRPPFSKINPNPLFLLLPLNLEPPRIIFSLAGPGTSPFSQAKGQATRFLFHSGWFPFPPNQGS

SEQ ID NO: 7945 - protein, 230 aa, Glycine max
  misc_feature (110)..(110): Xaa can be any naturally occurring amino acid
  misc_feature (118)..(118): Xaa can be any naturally occurring amino acid
  Coding DNA Sequence Number=SeqID_471
  Homolog annotation: Hit_ID=A7Q3Q9; Match level="QueryCoverage=98%, HitCoverage=36%, E-value=3e-57, Identity=54%"; Hit description =Chromosome chr13 scaffold_48, whole genome shotgun sequence
DNAKFLRRVPIEDPISLTTTLLAQNDKRKENFFHDIDYDITDTGRGSAGDYYTERLPAPTLSFLSYAEEIKAPDNSGSLMRLHGSMPDNALQKNPAEINWNLHHMIASGXMMSDSKLXSGGYISNIRAGASSNYLYATPYGLNLAAGTERRNMTTPILNTAFIYACMRERSANLRHQIIAVILNHLMPEQFAFRTCFVNMLTFVSLAGKSYCGTQQRIALSRFTGLQVQR

SEQ ID NO: 7946 - protein, 178 aa, Glycine max
  misc_feature (35)..(35): Xaa can be any naturally occurring amino acid
  misc_feature (44)..(44): Xaa can be any naturally occurring amino acid
  misc_feature (52)..(52): Xaa can be any naturally occurring amino acid
  Coding DNA Sequence Number=SeqID_472
  Gene Ontology: Mol. function=oxidoreductase activity, acting on the aldehyde or oxo group of donors, NAD or NADP as acceptor; Cellular component=mitochondrial matrix; Biological process=metabolic process
  Homolog annotation: Hit_ID=A1RMI7; Match level="QueryCoverage=100%, HitCoverage=36%, E-value=4e-71, Identity=73%"; Hit description =Succinate semialdehyde dehydrogenase
  Pfam annotation: Domain name=Aldedh; Domain location=2-178; Score= -143.3; E_value=5.1e-08; Accession=PF00171.12; Description=Aldehyde dehydrogenase family
RWFDLMMANQDDLATLMTAEQGKPLAESKGEIAYXPSFIDWFAXEGKRLYGXVIPTHQSDKRLMVLRQPIGVVAAITPWNFPAAMITRKAGPALAAGCTFVCKPAHQTPYSALAMAELGRRAGIPAGVLNIVTGMDAVAIGGEMTSNPIVRKITFTGSTGVGKKLMAQSASTLKKLSL

SEQ ID NO: 7947 - protein, 176 aa, Glycine max; identical to SEQ ID NO: 7093
  misc_feature (1)..(7): Xaa can be any naturally occurring amino acid
  Coding DNA Sequence Number=SeqID_473

SEQ ID NO: 7948 - protein, 107 aa, Glycine max
  Coding DNA Sequence Number=SeqID_475
  Subcellular localization annotation: CTP_CleavageSite=4; ConfidenceScore=5.01e-01
SDYIASHGRYRPPRISCFFSPSAPPSPHQSLHPGEISDRDGMGRRRPGSRGAREQLSRPESCTHRCCSTCPAAPAREPFMAAVQKDDVAAVGQRYAADSSEAPSRPW

SEQ ID NO: 7949 - protein, 166 aa, Glycine max
  Coding DNA Sequence Number=SeqID_477
  Gene Ontology: Mol. function=isomerase activity; Cellular component =endoplasmic reticulum; Biological process=cell redox homeostasis
  Homolog annotation: Hit_ID=UPI00005E9B04; Match level="QueryCoverage =83%, HitCoverage=27%, E-value=7e-14, Identity=30%"; Hit description =PREDICTED: similar to protein disulfide isomerase
  Pfam annotation: Domain name=Thioredoxin; Domain location=26-132; Score=53.1; E_value=9.9e-13; Accession=PF00085.10; Description =Thioredoxin
MNKLIIIFAFLIISGFAAYPYREENHIINLGDPSWGLANQEFPHGLFVYFYEPYCNPCRQMWPEIIEAAQYFATHGSKVKIAKVECHDEVNLCNAQEVRAFPTLMLYIKDRPKVEYRGSRDAQSIQKWISKVDSSYETVDSLDTLFSKFSGAILLNAESANINQAI

SEQ ID NO: 7950 - protein, 147 aa, Glycine max
  misc_feature (108)..(110): Xaa can be any naturally occurring amino acid
  Coding DNA Sequence Number=SeqID_478
  Gene Ontology: Mol. function=protein-tyrosine kinase activity; Cellular component=integral to plasma membrane; Biological process =protein amino acid phosphorylation
  Homolog annotation: Hit_ID=A7NTL7; Match level="QueryCoverage=90%, HitCoverage=18%, E-value=4e-39, Identity=59%"; Hit description =Chromosome chr18 scaffold_1, whole genome shotgun sequence
QNHVVTRSFRNSVIQRTKSPTSKTLLENFIRCDQETRTNELGFDQAKSRSYVPNWGIRDNSIPLGRTTSIPPPLCSQCQNKAPVFGKPPKRFSYKELEEATDMFSDEXXXAEGGFGVVHKGILKDGQVVAVKQLKFGGSQADLDFCK

SEQ ID NO: 7951 - protein, 111 aa, Glycine max
  misc_feature (16)..(16): Xaa can be any naturally occurring amino acid
  misc_feature (32)..(32): Xaa can be any naturally occurring amino acid
  misc_feature (57)..(57): Xaa can be any naturally occurring amino acid
  Coding DNA Sequence Number=SeqID_479
DEHRYTPYTLATAPVXEQMCMQYRDHKLYSNXSHNHMTENIHMDDRYRTRRPKIWCXLVCGGCWSLLLYNSPHKSQLRKITVRDRVMVVSSITMIIYYTTTSNRYPAPTSY

SEQ ID NO: 7952 - protein, 105 aa, Glycine max
  misc_feature (29)..(29): Xaa can be any naturally occurring amino acid
  Coding DNA Sequence Number=SeqID_3721
  Subcellular localization annotation: CTP_CleavageSite=7; ConfidenceScore=5.11e-01
RCSLEPVCSLPRSFPPSLTPFVASPAYPXDNIFHFTFTCRSRSLPFSHIVKPFKLIYAIILLFHCPRSQSHSFIQPSSSSSSSAYTSPSDTSALHYRQHCLYKHR

SEQ ID NO: 7953 - protein, 126 aa, Glycine max
  misc_feature (8)..(8): Xaa can be any naturally occurring amino acid
  misc_feature (78)..(78): Xaa can be any naturally occurring amino acid
  Coding DNA Sequence Number=SeqID_3723
  Gene Ontology: Mol. function=receptor activity; Cellular component =peroxisome; Biological process=protein import into peroxisome matrix, docking
  Homolog annotation: Hit_ID=Q93WU5; Match level="QueryCoverage=97%, HitCoverage=41%, E-value=1e-25, Identity=50%"; Hit description =Peroxisomal targeting signal 2 receptor
MPIFKTPXFNGYSVKFRPFYENRLAVATAQNFRILGDGRLHVLDLSRETSLRISELVGYDTVDVIYDGACSECHDSSXIAAVAHGFLKAHPPVPSRQTPSPIRFLPRNTPRGGFISGGITSPVPAR

SEQ ID NO: 7954 - protein, 171 aa, Glycine max
  Coding DNA Sequence Number=SeqID_3724
  Homolog annotation: Hit_ID=A0CIJ9; Match level="QueryCoverage=79%, HitCoverage=54%, E-value=2e-15, Identity=37%"; Hit description =Chromosome undetermined scaffold_19, whole genome shotgun sequence
MFYSTSGPDAFNKTAKNGQGTLIQNWQEERVLRDETGEGRTNTRSHIKKQHEDLFLKPTQELGTVYVQNNGQDQTFGRVFGRKHEPTYVSEHKDKYARKTNYQEPVFGKKHDLIQRQYLQEIRSELQSAQKSNEDLHNERYMNTHTLMNSLKRMVPLCRRKKSHERSNGKS

SEQ ID NO: 7955 - protein, 158 aa, Glycine max
  misc_feature (24)..(24): Xaa can be any naturally occurring amino acid
  misc_feature (30)..(31): Xaa can be any naturally occurring amino acid
  misc_feature (37)..(37): Xaa can be any naturally occurring amino acid
  misc_feature (41)..(41): Xaa can be any naturally occurring amino acid
  misc_feature (49)..(49): Xaa can be any naturally occurring amino acid
  misc_feature (121)..(121): Xaa can be any naturally occurring amino acid
  Coding DNA Sequence Number=SeqID_3725
  Gene Ontology: Mol. function=transketolase activity; Cellular component=cytoplasm; Biological process=metabolic process
  Homolog annotation: Hit_ID=A4BS07; Match level="QueryCoverage=93%, HitCoverage=21%, E-value=9e-49, Identity=61%"; Hit description =Transketolase
  Pfam annotation: Domain name=Transket_pyr; Domain location=16-159; Score=128.4; E_value=2e-35; Accession=PF02779.14; Description =Transketolase, pyrimidine binding domain
TGETQWRDTRRARQSKPQATRQSXQAVLDXXAPGLPXFLGXSADLTPSXNTQFKNAVTITPEDFKGNYLHYGVREFGMTAALNGMALHGGFVPYGGTFLTFSDYARNAVRLACLMNTHTIXVYTHDSIGLGEDGPTHQPVEHLASLRAMPNMTLWRAL

SEQ ID NO: 7956 - protein, 80 aa, Glycine max
  Coding DNA Sequence Number=SeqID_3726
DDGIIEGRTIYRWIVFSVFDKTLGRREARVGGSGRMTTSASYGWCRVERCVRRRCRPGSYSQKKNLDVEGVMLIRELTYE

SEQ ID NO: 7957 - protein, 153 aa, Glycine max
  misc_feature (39)..(39): Xaa can be any naturally occurring amino acid
  Coding DNA Sequence Number=SeqID_3728
SCIIYRATHTTTRLLAPIATTHTLWLTSHDATCHAHHTXHLLIVIRGAVYIVPYYIPHRLSPSFISSSFIITLSDVYYLPYSYATASRLRLIPMFQRRGVRAAFASRVFSILTSLYLLHAAHLMPSFVATTRTPDEPYRARPPSVLYPRLLHC

SEQ ID NO: 7958 - protein, 209 aa, Glycine max
  Coding DNA Sequence Number=SeqID_3730
  Gene Ontology: Mol. function=chalcone isomerase activity; Biological process=flavonoid biosynthetic process
  Homolog annotation: Hit_ID=Q9FLC7; Match level="QueryCoverage=98%, HitCoverage=100%, E-value=7e-78, Identity=73%"; Hit description =Similarity to chalcone-flavonone isomerase
  Pfam annotation: Domain name=Chalcone; Domain location=1-209; Score =67.7; E_value=4e-17; Accession=PF02431.6; Description=Chalcone -flavanone isomerase
MGTEMVMIHEVPFPPQIITSKPFSLLGQGITDIEIHFLQVKFTAIGVYLDPSDVKTHLDKWKGKTGKDLAGDDDFFDALASGEIEKVIRVVVIKEIKGAQYGVQLENSVRDRLAAEDKYEEEEENELEKVVGFFQSKYFKTHSIITYRFSAKDGICEIGFETEGKEEDKLKVENANVVGMMQKWYLSGSRGVSPSTIVSLADSLSAVLT

SEQ ID NO: 7959 - protein, 147 aa, Glycine max
  misc_feature (116)..(116): Xaa can be any naturally occurring amino acid
  Coding DNA Sequence Number=SeqID_3731
  Gene Ontology: Mol. function=transposase activity; Biological process= transposition, DNA-mediated
  Homolog annotation: Hit_ID=P03837; Match level="QueryCoverage=90%, HitCoverage=39%, E-value=2e-22, Identity=44%"; Hit description =Transposase insH for insertion sequence element IS5
GKGEKSPEKKKRFAIGSQKKGFIRSNKFTFPKGEFKKKPRQTKKKIFLPRREKILPGKKRGKVFKPFYPKVGKGGELYRWKTWLPFPGWKIWNNLTNGPMKNVLNKTPSRGWFARXSRKRALRDRPTLRIFRHRLKKNQLAPPFFPK

SEQ ID NO: 7960 - protein, 125 aa, Glycine max
  misc_feature (37)..(37): Xaa can be any naturally occurring amino acid
  misc_feature (64)..(64): Xaa can be any naturally occurring amino acid
  Coding DNA Sequence Number=SeqID_3732
PSERRAERRDEEPTNATALRKNSFGSQLCRVVCLAKXSGILRATHYDSRASALTLRRRLCRPRXAPRRGDCSCRLPSHTMTALSTHLPPTILHSLSHYCLLTILLTNFAYISYTYYVVRSVYVQS

SEQ ID NO: 7961 - protein, 115 aa, Glycine max
  misc_feature (1)..(1): Xaa can be any naturally occurring amino acid
  misc_feature (3)..(6): Xaa can be any naturally occurring amino acid
  misc_feature (10)..(10): Xaa can be any naturally occurring amino acid
  misc_feature (46)..(46): Xaa can be any naturally occurring amino acid
  Coding DNA Sequence Number=SeqID_3733
  Subcellular localization annotation: CTP_CleavageSite=18; ConfidenceScore=5.44e-01
XPXXXXSVSXSDLASRPRGNRRVYSRWSDLRLLLLSSLLSSSSARXPLFLSKTSVTYTLVLLYYSFYLILLLMHYCFSWSAIKNKLSSHHTMLPGYGSLIGMCGHVLYNFSTPRI

SEQ ID NO: 7962 - protein, 216 aa, Glycine max
  Coding DNA Sequence Number=SeqID_3735
  Gene Ontology: Mol. function=protein binding
  Homolog annotation: Hit_ID=A7QFJ2; Match level="QueryCoverage=91%, HitCoverage=91%, E-value=3e-79, Identity=68%"; Hit description =Chromosome chr8 scaffold_88, whole genome shotgun sequence
  Pfam annotation: Domain name=DUF567; Domain location=24-205; Score =281.9; E_value=1.3e-81; Accession=PF04525.3; Description=Protein of unknown function (DUF567)
  Subcellular localization annotation: CTP_CleavageSite=24; ConfidenceScore=5.13e-01
MAYPNPYPAQPYPSTSVPMPAVPTAVIGPQFCAPYPLDLAVVKKVMTLSDGNFVVTDVNGNVVFKVKGSLMTLRDRRILVDAAGNPLVTLRRKIMTAHDRWQAFRGESTEAKDLIFTLKRSSLIQFKTKLDVFLANNTKEDVCDFKVKGSWLERSCVVYAGESNNIVAQMHKKHTVQSILIGKDQFMVTVYPNIDYAFVVALIVILDEINEDEKED

SEQ ID NO: 7963 - protein, 156 aa, Glycine max
  misc_feature (42)..(42): Xaa can be any naturally occurring amino acid
  misc_feature (61)..(61): Xaa can be any naturally occurring amino acid
  misc_feature (87)..(87): Xaa can be any naturally occurring amino acid
  misc_feature (89)..(89): Xaa can be any naturally occurring amino acid
  misc_feature (144)..(144): Xaa can be any naturally occurring amino acid
  Coding DNA Sequence Number=SeqID_3736
LMISEYAPSVNAVSHYCAARASSHHDHSDCAVSFSSESSMLXMLVSRGCQIISPYGSQMLXSEHLPMRPTTSSRHDRASDVISMRIXTXSSIAMRLSAVSVSYCAMYHARDASRAPAVRRRVLASKRMKDEMFIDLLYTIRMAXLHASLSRIRTRD

SEQ ID NO: 7964 - protein, 104 aa, Glycine max
  Coding DNA Sequence Number=SeqID_3738
APSLSVVSLHGTTGTYSGHPIRYLICPATWHEASNIAVDNIRMRQTTRRKHETGIATERLGGSNSTCYYSHIYSSVGCVGLASVLLMIFNFFLSSLFISSLFLT

SEQ ID NO: 7965 - protein, 202 aa, Glycine max; identical to SEQ ID NO: 7232
  misc_feature (14)..(16): Xaa can be any naturally occurring amino acid
  misc_feature (24)..(24): Xaa can be any naturally occurring amino acid
  misc_feature (44)..(45): Xaa can be any naturally occurring amino acid
  misc_feature (69)..(70): Xaa can be any naturally occurring amino acid
  misc_feature (86)..(86): Xaa can be any naturally occurring amino acid
  misc_feature (94)..(94): Xaa can be any naturally occurring amino acid
  misc_feature (105)..(105): Xaa can be any naturally occurring amino acid
  misc_feature (109)..(109): Xaa can be any naturally occurring amino acid
  misc_feature (128)..(128): Xaa can be any naturally occurring amino acid
  misc_feature (133)..(133): Xaa can be any naturally occurring amino acid
  misc_feature (141)..(141): Xaa can be any naturally occurring amino acid
  misc_feature (146)..(146): Xaa can be any naturally occurring amino acid
  misc_feature (150)..(150): Xaa can be any naturally occurring amino acid
  misc_feature (153)..(153): Xaa can be any naturally occurring amino acid
  misc_feature (168)..(168): Xaa can be any naturally occurring amino acid
  misc_feature (170)..(170): Xaa can be any naturally occurring amino acid
  misc_feature (175)..(175): Xaa can be any naturally occurring amino acid
  misc_feature (178)..(178): Xaa can be any naturally occurring amino acid
  misc_feature (194)..(195): Xaa can be any naturally occurring amino acid
  misc_feature (202)..(202): Xaa can be any naturally occurring amino acid
  Coding DNA Sequence Number=SeqID_3740

SEQ ID NO: 7966 - protein, 111 aa, Glycine max
  misc_feature (23)..(23): Xaa can be any naturally occurring amino acid
  Coding DNA Sequence Number=SeqID_3742
YSRRVPMARIHCYGVAARRGEQXDAQQSGTSRLVGCDLTITTCSRSAPGSHVFGLILYSSLISYRFYIIVVAILFIFCGDGLSRVLDDRGCALKSGSVIIYMVSVTIKPRT

SEQ ID NO: 7967 - protein, 197 aa, Glycine max
  Coding DNA Sequence Number=SeqID_3744
TQEGTSTQNLITTWRGSRPPETTHLAHFLPPSGLRPCMFYCRPRMLTHKACETLCAQPLIDVPVYPHIFSLYPKNVLRRVDQNKHIIPPRPLDYRPPGDRQHERATRGKRVILCAPRVLMIWLRVPDNNLHNNTHPHATVIYTHLYNHVGTIKRRHATTRINKTPYYTPTRIQNQLYALLSSEIILPRIMLRETRRA

SEQ ID NO: 7968 - protein, 128 aa, Glycine max
  misc_feature (110)..(110): Xaa can be any naturally occurring amino acid
  Coding DNA Sequence Number=SeqID_3745
  Gene Ontology: Mol. function=nucleotide binding; Cellular component =plasma membrane; Biological process=small GTPase mediated signal transduction
  Homolog annotation: Hit_ID=Q9LH50; Match level="QueryCoverage=99%, HitCoverage=55%, E-value=7e-38, Identity=66%"; Hit description=GTP -binding protein-like
  Pfam annotation: Domain name=Ras; Domain location=5-84; Score=-2.0; E_ value=3.1e-09; Accession=PF00071.12; Description=Ras family
MNMRKRASFDNMATWFEELLSHADKNIVVMLIGNKCDLGTLRAVPTEDADEFAQRENLFFMETSALESTNVETGFLAILTEIHVLESKRTLTANDDADPSGISGLLKGLXIIVPSQDINSGEKKGGCC

SEQ ID NO: 7969 - protein, 236 aa, Glycine max
  misc_feature (1)..(1): Xaa can be any naturally occurring amino acid
  misc_feature (3)..(4): Xaa can be any naturally occurring amino acid
  misc_feature (9)..(10): Xaa can be any naturally occurring amino acid
  misc_feature (18)..(18): Xaa can be any naturally occurring amino acid
  misc_feature (28)..(28): Xaa can be any naturally occurring amino acid
  misc_feature (32)..(33): Xaa can be any naturally occurring amino acid
  misc_feature (36)..(39): Xaa can be any naturally occurring amino acid
  misc_feature (48)..(48): Xaa can be any naturally occurring amino acid
  misc_feature (51)..(51): Xaa can be any naturally occurring amino acid
  misc_feature (62)..(72): Xaa can be any naturally occurring amino acid
  misc_feature (74)..(74): Xaa can be any naturally occurring amino acid
  misc_feature (76)..(76): Xaa can be any naturally occurring amino acid
  misc_feature (85)..(85): Xaa can be any naturally occurring amino acid
  misc_feature (87)..(87): Xaa can be any naturally occurring amino acid
  misc_feature (90)..(90): Xaa can be any naturally occurring amino acid
  misc_feature (92)..(95): Xaa can be any naturally occurring amino acid
  misc_feature (98)..(98): Xaa can be any naturally occurring amino acid
  misc_feature (100)..(100): Xaa can be any naturally occurring amino acid
  misc_feature (104)..(104): Xaa can be any naturally occurring amino acid
  misc_feature (139)..(139): Xaa can be any naturally occurring amino acid
  misc_feature (143)..(143): Xaa can be any naturally occurring amino acid
  misc_feature (146)..(146): Xaa can be any naturally occurring amino acid
  misc_feature (148)..(149): Xaa can be any naturally occurring amino acid
  misc_feature (152)..(154): Xaa can be any naturally occurring amino acid
  misc_feature (159)..(162): Xaa can be any naturally occurring amino acid
  misc_feature (168)..(168): Xaa can be any naturally occurring amino acid
  misc_feature (172)..(172): Xaa can be any naturally occurring amino acid
  misc_feature (176)..(176): Xaa can be any naturally occurring amino acid
  misc_feature (180)..(182): Xaa can be any naturally occurring amino acid
  misc_feature (184)..(186): Xaa can be any naturally occurring amino acid
  misc_feature (188)..(188): Xaa can be any naturally occurring amino acid
  misc_feature (190)..(193): Xaa can be any naturally occurring amino acid
  misc_feature (199)..(200): Xaa can be any naturally occurring amino acid
  misc_feature (209)..(210): Xaa can be any naturally occurring amino acid
  misc_feature (213)..(213): Xaa can be any naturally occurring amino acid
  misc_feature (221)..(222): Xaa can be any naturally occurring amino acid
  misc_feature (224)..(224): Xaa can be any naturally occurring amino acid
  misc_feature (227)..(227): Xaa can be any naturally occurring amino acid
  Coding DNA Sequence Number=SeqID_3746
XRXXRFAGXXALSSEIRXGVSRQDRDYXILCXXITXXXXPARGRWGGXCAXGDRRGRGPPSXXXXXXXXXXXKXGXRARCGAVLXAXRGXAXXXXGSXRXILPXVSPGGHARGALHGGRRRRGWRRGARARKRRGERRXKEKXRDXEXXGRXXXAARLXXXXKALRRXLLRXARAXRSRXXXAXXXGXRXXXXPGENRXXVWCGCLSAXXAGXGGGGQATXXEXGAXTRGVLRRAM

SEQ ID NO: 7970 - protein, 119 aa, Glycine max
  misc_feature (37)..(37): Xaa can be any naturally occurring amino acid
  misc_feature (48)..(48): Xaa can be any naturally occurring amino acid
  misc_feature (50)..(50): Xaa can be any naturally occurring amino acid
  misc_feature (107)..(107): Xaa can be any naturally occurring amino acid
  Coding DNA Sequence Number=SeqID_3748
RTSLCFYSTIRPRQSLLIYIEISPLALYSLSLMLIVXIHPQYYHLTSXCXATRHYYMSHYLDETHLATSQHTLALLLISPHSDSTNSPTLSRYVSHLYNIEYIKLSXCIYTATIEVSQS

SEQ ID NO: 7971 - protein, 146 aa, Glycine max
  Coding DNA Sequence Number=SeqID_3750
VLPGQILTNRHTRARSTTAVDSVWLQDQRGDTHHTRLRPQASPLQTPTLYRAVHTSPVHLTSHHKHNTTATHPASRRAHYWLTQTVHLCSNHLQGCNSSTFPHHVTSAAPLWWWRCRWRSDMVSTVGRLVCGVCSRQPGWSYLILM

SEQ ID NO: 7972 - protein, 57 aa, Glycine max
  misc_feature (16)..(16): Xaa can be any naturally occurring amino acid
  Coding DNA Sequence Number=SeqID_3752
FFFFFLPILKHNGILXYLKITNKIIFYRLNQFFKNFQNWKFQMPYFYFNLVFFINSK

SEQ ID NO: 7973 - protein, 169 aa, Glycine max; identical to SEQ ID NO: 6133
  misc_feature (33)..(33): Xaa can be any naturally occurring amino acid
  Coding DNA Sequence Number=SeqID_3754

SEQ ID NO: 7974 - protein, 72 aa, Glycine max
  misc_feature (53)..(53): Xaa can be any naturally occurring amino acid
  misc_feature (55)..(56): Xaa can be any naturally occurring amino acid
  misc_feature (62)..(62): Xaa can be any naturally occurring amino acid
  Coding DNA Sequence Number=SeqID_3756
VMLGIWTWVGTFEFLRKNHLPNFGCLPILTNMPDLLWFRAHKVHGAPCVGNAXNXXSQSALXLNRNLIIRCS

SEQ ID NO: 7975 - protein, 119 aa, Glycine max
  misc_feature (21)..(21): Xaa can be any naturally occurring amino acid
  misc_feature (80)..(80): Xaa can be any naturally occurring amino acid
  misc_feature (85)..(85): Xaa can be any naturally occurring amino acid
  misc_feature (90)..(90): Xaa can be any naturally occurring amino acid
  misc_feature (94)..(94): Xaa can be any naturally occurring amino acid
  Coding DNA Sequence Number=SeqID_3757
LVSILQHTRVVCTSEVNTSIXSYHLSVSHCSAQRISNHDLHLTHCDAPAAHAQLYHSLHLLSTLYPATPVCSALFSMLIXAAIYXDITPXTVSXLYHYLCDNDSSLCLVYYLSIFVMLL

SEQ ID NO: 7976 - protein, 131 aa, Glycine max
  misc_feature (9)..(9): Xaa can be any naturally occurring amino acid
  misc_feature (11)..(11): Xaa can be any naturally occurring amino acid
  misc_feature (66)..(66): Xaa can be any naturally occurring amino acid
  misc_feature (88)..(88): Xaa can be any naturally occurring amino acid
  misc_feature (97)..(97): Xaa can be any naturally occurring amino acid
  misc_feature (106)..(106): Xaa can be any naturally occurring amino acid
  misc_feature (121)..(121): Xaa can be any naturally occurring amino acid
  misc_feature (127)..(127): Xaa can be any naturally occurring amino acid
  misc_feature (130)..(130): Xaa can be any naturally occurring amino acid
  Coding DNA Sequence Number=SeqID_3759
  Subcellular localization annotation: CTP_CleavageSite=12; ConfidenceScore=5.05e-01
TTTRSSHEXLXVANDVPSTTLRHLLSSRITLVRLYAVTQSFAVITYLPARLRGVPTIELITMTHAXLSQSHQTILVTVSHVMSVVLRXEYYHSDVVXLLLLHMSYXAAVSLDIFTLRTVCXPLLICXRRXV

SEQ ID NO: 7977 - protein, 138 aa, Glycine max
  misc_feature (127)..(127): Xaa can be any naturally occurring amino acid
  misc_feature (138)..(138): Xaa can be any naturally occurring amino acid
  Coding DNA Sequence Number=SeqID_3761
  Gene Ontology: Mol. function=binding; Cellular component=Golgi apparatus
  Homolog annotation: Hit_ID=O65551; Match level="QueryCoverage=99%, HitCoverage=4%, E-value=3e-54, Identity=81%"; Hit description =Putative uncharacterized protein F6I18.100
  Pfam annotation: Domain name=DUF1068; Domain location=1-137; Score =31.9; E_value=1e-08; Accession=PF06364.3; Description=Protein of unknown function (DUF1068)
MARRSGDCMRCLVIFAVVSALLVCGPALYWRFNKGFVGSSTRRNSVCPPCVCDCPPPVSLLGIAPGLANLSGTDCGGDDLELKQEMEKQFVDLLTEELKLREAVADEHSRHMNVTLGEAKRAASQYXKEAEKCNAATX

SEQ ID NO: 7978 - protein, 58 aa, Glycine max
  Coding DNA Sequence Number=SeqID_3762
  Gene Ontology: Mol. function=oxidoreductase activity; Biological process=electron transport
  Homolog annotation: Hit_ID=A3ARQ1; Match level="QueryCoverage=87%, HitCoverage=7%, E-value=7e-12, Identity=62%"; Hit description =Putative uncharacterized protein
RTCAAAHGPALLLYFVSRQVIHIADPAAAEECLTAHDIVSLDRPELPSAHHLPNDSPR

SEQ ID NO: 7979 - protein, 129 aa, Glycine max
  Coding DNA Sequence Number=SeqID_3763
  Homolog annotation: Hit_ID=A3AWU6; Match level="QueryCoverage=42%, HitCoverage=42%, E-value=5e-20, Identity=77%"; Hit description =Putative uncharacterized protein
  Pfam annotation: Domain name=DUF581; Domain location=4-62; Score =51.2; E_value=3.6e-12; Accession=PF04570.5; Description=Protein of unknown function (DUF581)
HENTMACAFFFDAEPGVHALDACALCTKPLARDSDIFMYRVDTPFCSDECRHEQMQLDAACARQAAARRQKQFSSGTGVRTCAPGGVRRELTGESGMLRTCLSQQDRRARRRHRPWPTDQRGVEKTRLG

SEQ ID NO: 7980 - protein, 151 aa, Glycine max
  Coding DNA Sequence Number=SeqID_3764
  Gene Ontology: Mol. function=metal ion binding; Cellular component =nucleus; Biological process=mRNA processing
  Homolog annotation: Hit_ID=A2DBJ8; Match level="QueryCoverage=99%, HitCoverage=29%, E-value=8e-13, Identity=27%"; Hit description =Putative uncharacterized protein
MEVQSENQHPITSENVEDTKRSVSKKQEAGEKSPPRSVLKSRNRNEQGGEQDTSAAKSKVTFKEGDENKGSTDRETENTEKAETRSDTQEKENPSTEEKARSPAKETEERTQEGPKRSEEKTHDEPKRSEEKTQEQPERAEEKTLTPERPK

SEQ ID NO: 7981 - protein, 93 aa, Glycine max
  Coding DNA Sequence Number=SeqID_3765
  Gene Ontology: Mol. function=acyl-CoA binding; Cellular component =cellular_component; Biological process=transport
  Homolog annotation: Hit_ID=Q39315; Match level="QueryCoverage=98%, HitCoverage=98%, E-value=3e-32, Identity=79%"; Hit description=Acyl -CoA-binding protein
  Pfam annotation: Domain name=ACBP; Domain location=3-87; Score=182.7; E_value=9.6e-52; Accession=PF00887.9; Description=Acyl CoA binding protein
MGLKEEFEEHAEEVKTLTTKPSDADLLILYGLFKQATVGPVTTSRPGMFSMKERAKWDAWKAVEAKSTDEAMSDYITKVKQLMEAAEASAAST

SEQ ID NO: 7982 - protein, 121 aa, Glycine max
  misc_feature (34)..(34): Xaa can be any naturally occurring amino acid
  misc_feature (36)..(36): Xaa can be any naturally occurring amino acid
  misc_feature (52)..(52): Xaa can be any naturally occurring amino acid
  misc_feature (54)..(54): Xaa can be any naturally occurring amino acid
  misc_feature (78)..(79): Xaa can be any naturally occurring amino acid
  misc_feature (92)..(92): Xaa can be any naturally occurring amino acid
  misc_feature (103)..(103): Xaa can be any naturally occurring amino acid
  Coding DNA Sequence Number=SeqID_3766
RVRVVSVPQCDTYQYLYISALIQCMSKIYHMLAXTXCAIVSTTTYRVTCYAXGXQCRRRLRVDLRRAASLYITLQSVXXASVAAILILYILXYSNRPRSDVTXHIHQLALGATEKRIYSVT

SEQ ID NO: 7983 - protein, 183 aa, Glycine max
  misc_feature (20)..(20): Xaa can be any naturally occurring amino acid
  misc_feature (117)..(117): Xaa can be any naturally occurring amino acid
  misc_feature (125)..(125): Xaa can be any naturally occurring amino acid
  misc_feature (158)..(158): Xaa can be any naturally occurring amino acid
  misc_feature (180)..(180): Xaa can be any naturally occurring amino acid
  Coding DNA Sequence Number=SeqID_3768
FSAIPYHSSFSNAFLSTVIXEPHLILQRHRERVDGMEMIYHHDRSFSYSGGGRDVREFESGHNSIDMLAVLRGVRRERGGTYKGAERYTRMCFAPPVALRNNVSSESRRTLVPCPNXSGMWVEDXTRTNSVLLPHYDPRCRELDLTNLSHALWYVTHXIVLRTYAYRHESLAHSAPLLTXVVS

SEQ ID NO: 7984 - protein, 112 aa, Glycine max
  misc_feature (57)..(57): Xaa can be any naturally occurring amino acid
  misc_feature (79)..(79): Xaa can be any naturally occurring amino acid
  Coding DNA Sequence Number=SeqID_3769
VSWSGNRVRASLLVRLASPMRGYCRANSAAVSALLPALHYSCDAAWWSQDNRQCSGXALWETVRAPKGALHTVVRSLTXHAGAHARRVLSSRPHVVTRCSRLRLRRVIEGVR

SEQ ID NO: 7985 - protein, 78 aa, Glycine max
  misc_feature (72)..(72): Xaa can be any naturally occurring amino acid
  Coding DNA Sequence Number=SeqID_3771
  Gene Ontology: Mol. function=transporter activity; Cellular component= membrane; Biological process=oligopeptide transport
  Homolog annotation: Hit_ID=A7Q1N5; Match level="QueryCoverage=92%, HitCoverage=12%, E-value=2e-16, Identity=62%"; Hit description =Chromosome chr7 scaffold_44, whole genome shotgun sequence
ACRVLTIADAYLGRYWTFVIASAIYLLGMCLLTLAVSLPALRPAPCAPGIADKDCQRAFVVFSGEFSSFALXIIAAGT

SEQ ID NO: 7986 - protein, 98 aa, Glycine max
  misc_feature (40)..(40): Xaa can be any naturally occurring amino acid
  Coding DNA Sequence Number=SeqID_3772
  Gene Ontology: Mol. function=hydrolase activity, acting on acid anhydrides, catalyzing transmembrane movement of substances; Cellular component=integral to membrane; Biological process =metabolic process
  Homolog annotation: Hit_ID=P22180; Match level="QueryCoverage=100%, HitCoverage=10%, E-value=2e-29, Identity=70%"; Hit description =Plasma membrane ATPase 1
PCVLTVNMAIGYHRISQQGAISEIIPSNEEMAGMNVLRRXGKGTVRLNKLSVPIFLIEVFPKGVDADTVVLMAAQASRLENQDAIDTAIVGMLADPKE

SEQ ID NO: 7987 - protein, 163 aa, Glycine max
  Coding DNA Sequence Number=SeqID_3773
  Homolog annotation: Hit_ID=Q9FY58; Match level="QueryCoverage=91%, HitCoverage=100%, E-value=2e-36, Identity=58%"; Hit description =Putative uncharacterized protein T5K6_60
  Subcellular localization annotation: CTP_CleavageSite=43; ConfidenceScore=5.54e-01
QNIFSSPYSFSFFEMYNECSSPSSARSTRSTTHRMRSPICCLGANAVVEPEAMIGPRTPRSPYEWLKSTAQELELRERCRRVKTRVKVTCRNNNCAHHNHHHHQRHQSQSYPVDFSYDALSYALNFEDDVRADEDGSFPNFTARLPASPVTKPRSARVDLISF

SEQ ID NO: 7988 - protein, 244 aa, Glycine max
  misc_feature (221)..(244): Xaa can be any naturally occurring amino acid
  Coding DNA Sequence Number=SeqID_3774
APPPLDKNLDHMAMLKDVSPISHKTDMLKGGSLFEDVSLIGRSGRSTQKGSISHIKRDASTNTEKTVESLEETPKPKKQMPQVHMFAAQKEVKKPLRNLGERKWSNDKLRNGFSKYMKTIYGENNYNDPVSLVVQTEPGYDELSGHMTSVYEERYLNLLNRELRQKNLKRYNMDNSDYHDLAFEKEILAAKYHTFAQYEEKDSSQPEQQSPSPEQTIKSAXXXXXXXXXXXXXXXXXXXXXXXX

SEQ ID NO: 7989 - protein, 495 aa, Glycine max
  misc_feature (36)..(36): Xaa can be any naturally occurring amino acid
  misc_feature (48)..(48): Xaa can be any naturally occurring amino acid
  misc_feature (81)..(81): Xaa can be any naturally occurring amino acid
  misc_feature (95)..(95): Xaa can be any naturally occurring amino acid
  misc_feature (97)..(97): Xaa can be any naturally occurring amino acid
  misc_feature (109)..(109): Xaa can be any naturally occurring amino acid
  misc_feature (119)..(119): Xaa can be any naturally occurring amino acid
  misc_feature (169)..(169): Xaa can be any naturally occurring amino acid
  misc_feature (199)..(199): Xaa can be any naturally occurring amino acid
  misc_feature (355)..(355): Xaa can be any naturally occurring amino acid
  misc_feature (392)..(392): Xaa can be any naturally occurring amino acid
  misc_feature (396)..(396): Xaa can be any naturally occurring amino acid
  misc_feature (398)..(398): Xaa can be any naturally occurring amino acid
  misc_feature (401)..(401): Xaa can be any naturally occurring amino acid
  misc_feature (429)..(429): Xaa can be any naturally occurring amino acid
  misc_feature (443)..(444): Xaa can be any naturally occurring amino acid
  misc_feature (479)..(479): Xaa can be any naturally occurring amino acid
  misc_feature (483)..(483): Xaa can be any naturally occurring amino acid
  misc_feature (492)..(492): Xaa can be any naturally occurring amino acid
  Coding DNA Sequence Number=SeqID_3776
  Subcellular localization annotation: CTP_CleavageSite=74; ConfidenceScore=5.83e-01
PLTRFVFALVALTSLSLSLCSPSSAPSSSSPLASLXSLFVLPACSVPXLLFVCSSCFYLVSVCCSCSCLACDCRLSSLAPXLFLADSLSFFSLFXCXSAAFASLMTSSXVCVASPRFPXALSLLSVAFLLFFLSFLPVSPLSLCSICASASWFSLSVLPVCAPLSASYXLSAVTSLRSSLSCSFAPHSLSLRSASFFAXRRASLCSSSFFSALVSFAFSRSPSVSFLFRFVRFLLLFCYPLSVPRFRLPRSFPSFLFLSLARSLLGSLRASLPPSRLLRLLLVFLVLFSFFPRCHCYFFSLFSLLSFSCVLLVFLSSLSCLRCWLGALVLCFSFRSPFPLSRSLVSPPPLARALXFSSLVSLLSSLLFGLLSFFSFLLRALSLSSLSFRCSXPFSXSXLLXSPSLSLFFSGAVLFFVSVSCCFFVLLVXFCFSLSSLFWGKQXXFFFFSPLFFLEPFFLPLPPRAPSSFLFSFSSFFSXDSYXFPIARPFLXKKE

SEQ ID NO: 7990 - protein, 114 aa, Glycine max
  Coding DNA Sequence Number=SeqID_3778
  Gene Ontology: Mol. function=DNA binding; Cellular component =chromosome; Biological process=DNA mediated transformation
  Homolog annotation: Hit_ID=Q9LD28; Match level="QueryCoverage=100%, HitCoverage=87%, E-value=1e-33, Identity=68%"; Hit description =Histone H2A.6
  Pfam annotation: Domain name=CBFD_NFYB_HMF; Domain location=25-89; Score=14.9; E_value=0.0068; Accession=PF00808.13; Description =Histone-like transcription factor (CBFNF-Y) and archaeal histone
  Pfam annotation: Domain name=Histone; Domain location=19-92; Score =109.7; E_value=8.6e-30; Accession=PF00125.14; Description=Core histone H2AH2BH3H4
  Pfam module annotation: Pfam domain module=CBFD_NFYB_HMF::Histone; Domain location=25-89::19-92
  Subcellular localization annotation: CTP_CleavageSite=37; ConfidenceScore=5.24e-01
MAGRGKQLGSGAAKKATSRSSKAGLQFPVGRIARFLKAGKYAERVGAGAPVYLAAVLEYLAAEVLELAGNAARDNKKTRIVPRHFQLAVRNDEELSKLLGDVTIANGGVMPNIH

SEQ ID NO: 7991 - protein, 94 aa, Glycine max
  Coding DNA Sequence Number=SeqID_3779
MLTNHHYLISVLIGLYLEPFCVTDVDKARANTKTKNNVVAACFLVRVFLVDWVVAKNGRSVVVGVCFVFVRERKRRKKQGCEALRREESAKLRK

SEQ ID NO: 7992 - protein, 148 aa, Glycine max
  Coding DNA Sequence Number=SeqID_3781
MPQLAKRKTGAQLNILGYTTTRTLERRAQVCTATATLYDRSGSIQHSAAVQYACETAVLHESTSTAASLSARRTHALITRARARRQARGQRRRIIACWQPVTPGWHTCMLPFFFFASVLHARQFGRTRSAPRARGIEREVPSQGNRTG

SEQ ID NO: 7993 - protein, 119 aa, Glycine max
  misc_feature (7)..(7): Xaa can be any naturally occurring amino acid
  misc_feature (33)..(33): Xaa can be any naturally occurring amino acid
  misc_feature (44)..(44): Xaa can be any naturally occurring amino acid
  misc_feature (53)..(53): Xaa can be any naturally occurring amino acid
  misc_feature (85)..(85): Xaa can be any naturally occurring amino acid
  misc_feature (92)..(92): Xaa can be any naturally occurring amino acid
  Coding DNA Sequence Number=SeqID_3783
RTDDTVXGERANLVKSNYDDYTTRIVYLISRRXCSLISTASTCXWDGNHYLYXIIDRGIILTRCTGSQQRPSLVSTLSMSHIAEXNRNIYAXDAHTCYPLHLRAQRGRYTHHTAAAAAQ

SEQ ID NO: 7994 - protein, 104 aa, Glycine max
  Coding DNA Sequence Number=SeqID_3785
  Gene Ontology: Mol. function=hydrogen ion transporting ATPase activity, rotational mechanism; Cellular component=cytoplasm; Biological process=protein modification process
  Homolog annotation: Hit_ID=Q9FLP6; Match level="QueryCoverage=100%, HitCoverage=100%, E-value=2e-44, Identity=86%"; Hit description =Ubiquitin-like protein SMT3-like
  Pfam annotation: Domain name=ubiquitin; Domain location=22-92; Score =42.4; E_value=1.6e-09; Accession=PF00240.13; Description=Ubiquitin family
MSATQEEDKKPGEQGGVHINLKVKGQDGNEVFFKIKRSTQLKKLMNAYCDRQSVDLNAIAFLFDGRRLRAEQTPDELDMEDGDEIDAMLHQTGGVANGMYLFCF

SEQ ID NO: 7995 - protein, 115 aa, Glycine max
  Coding DNA Sequence Number=SeqID_3786
DYFRSKVRVMKLSWAMYVCSPIEFDNICVKLEKKVYFSSLQHAWGLNLKGSSKVLHLKFHNYIGIIFVRLRALNHFQLNMVCLCYETLGIPGGQIRLTKGGGIVFFFYVFALFFA

SEQ ID NO: 7996 - protein, 160 aa, Glycine max
  misc_feature (5)..(5): Xaa can be any naturally occurring amino acid
  misc_feature (13)..(13): Xaa can be any naturally occurring amino acid
  misc_feature (35)..(35): Xaa can be any naturally occurring amino acid
  misc_feature (55)..(56): Xaa can be any naturally occurring amino acid
  misc_feature (66)..(66): Xaa can be any naturally occurring amino acid
  misc_feature (75)..(75): Xaa can be any naturally occurring amino acid
  misc_feature (123)..(123): Xaa can be any naturally occurring amino acid
  Coding DNA Sequence Number=SeqID_3788
CCARXEQLYIGVXDDVVVRRGATLYVSDCVACVQXRPCRVSSSHVARDIPTHHHXXKERGGLYTYXARTYQSRIXRSVDRFIRTRHDMTRHNSISRGERGPASECINRVGARRTLDHIQATYXADRARGLAYKKRARSLKSARAYHDGEVATYASALMRV

SEQ ID NO: 7997 - protein, 168 aa, Glycine max
  Coding DNA Sequence Number=SeqID_3790
  Gene Ontology: Mol. function=protein binding; Cellular component=cell projection; Biological process=somatic cell DNA recombination
  Homolog annotation: Hit_ID=A9UMI4; Match level="QueryCoverage=100%, HitCoverage=28%, E-value=2e-90, Identity=93%"; Hit description =Putative uncharacterized protein
EELLKPIWHAFTALDVDKCGKVSKSQLKVLSHNLCTLLNVPHDPVALEEHFGDNDLGPVSNQGYMPYLNKFILDKVQEGFNKVEFNKMCWTLCAKKHLPNTPLYISEDSAFKVWTIFNYLSEEKFPLVIVPEEIEYLLKKLTEAMGGGWQQALFEDYKVALDKKQNGL

SEQ ID NO: 7998 - protein, 103 aa, Glycine max
  misc_feature (9)..(9): Xaa can be any naturally occurring amino acid
  misc_feature (12)..(13): Xaa can be any naturally occurring amino acid
  misc_feature (27)..(27): Xaa can be any naturally occurring amino acid
  misc_feature (51)..(51): Xaa can be any naturally occurring amino acid
  misc_feature (83)..(83): Xaa can be any naturally occurring amino acid
  misc_feature (99)..(99): Xaa can be any naturally occurring amino acid
  Coding DNA Sequence Number=SeqID_3791
SSTCAQTHXSVXXESSRDDRSDIHRRXHERSTARRISDFLIEQGAALFSGXYDMRQYHVIIYRQYRAYDRCRGDEHQRLAEMXHRVAVYTYHSRHHTEXAVSV

SEQ ID NO: 7999 - protein, 96 aa, Glycine max
  misc_feature (62)..(62): Xaa can be any naturally occurring amino acid
  Coding DNA Sequence Number=SeqID_3793
  Homolog annotation: Hit_ID=Q8LDK0; Match level="QueryCoverage=100%, HitCoverage=100%, E-value=2e-28, Identity=70%"; Hit description =Putative uncharacterized protein
MALNTGIRSISKIIASSESLVSRSVSRSFHSTGAKKMSGGHGHDEPYYLHAKHMYNLDRMKXQGLKMSLGVFTAFSIGVGVPIFAVVFQQRKTASG

SEQ ID NO: 8000 - protein, 114 aa, Glycine max
  misc_feature (8)..(8): Xaa can be any naturally occurring amino acid
  misc_feature (12)..(12): Xaa can be any naturally occurring amino acid
  misc_feature (20)..(20): Xaa can be any naturally occurring amino acid
  misc_feature (77)..(77): Xaa can be any naturally occurring amino acid
  misc_feature (99)..(99): Xaa can be any naturally occurring amino acid
  Coding DNA Sequence Number=SeqID_1535
LSARRSLXTIRXSVSSAELXSTAVYRIMTHRIWYAAPRIQLHASVSIPTHGEHTLRSPSDTVICICVQTLTSTHSQXYSHIAHAPHSPLSHRPASCILXCYRHTASLTTHMLSQ

SEQ ID NO: 8001 - protein, 190 aa, Glycine max
  misc_feature (11)..(11): Xaa can be any naturally occurring amino acid
  misc_feature (145)..(145): Xaa can be any naturally occurring amino acid
  Coding DNA Sequence Number=SeqID_1537
  Gene Ontology: Mol. function=translation initiation factor activity; Cellular component=ribonucleoprotein complex; Biological process =translational initiation
  Homolog annotation: Hit_ID=A7PE69; Match level="QueryCoverage=98%, HitCoverage=96%, E-value=6e-54, Identity=60%"; Hit description =Chromosome chr11 scaffold_13, whole genome shotgun sequence
  Pfam annotation: Domain name=SUI1; Domain location=98-181; Score= -0.9; E_value=0.001; Accession=PF01253.13; Description=Translation initiation factor SUI1
TALAEKPHPVXRILYCEVCSLPPEYWKFASDFEKCKPWMIQNVPDLYPDLLTEANDNEVDKVADKLHSTAISRAADVAASSAPKQEDVTRLPVVKIKIDDNHEVVIDYGVRNKRKCISTVKGLKLFGVMLTDASMRLGKKFATGXSVLRGPTEKEQIAASGGDKLRLLGFSLRKPGPDGSTMKKFFFVEE

SEQ ID NO: 8002 - protein, 209 aa, Glycine max; identical to SEQ ID NO: 6746
  misc_feature (93)..(93): Xaa can be any naturally occurring amino acid
  misc_feature (118)..(118): Xaa can be any naturally occurring amino acid
  misc_feature (151)..(151): Xaa can be any naturally occurring amino acid
  misc_feature (199)..(199): Xaa can be any naturally occurring amino acid
  misc_feature (208)..(208): Xaa can be any naturally occurring amino acid
  Coding DNA Sequence Number=SeqID_1538

SEQ ID NO: 8003 - protein, 164 aa, Glycine max; identical to SEQ ID NO: 6749
  misc_feature (10)..(10): Xaa can be any naturally occurring amino acid
  misc_feature (22)..(23): Xaa can be any naturally occurring amino acid
  misc_feature (33)..(33): Xaa can be any naturally occurring amino acid
  misc_feature (41)..(41): Xaa can be any naturally occurring amino acid
  misc_feature (43)..(43): Xaa can be any naturally occurring amino acid
  misc_feature (45)..(45): Xaa can be any naturally occurring amino acid
  misc_feature (47)..(48): Xaa can be any naturally occurring amino acid
  misc_feature (51)..(53): Xaa can be any naturally occurring amino acid
  misc_feature (55)..(55): Xaa can be any naturally occurring amino acid
  misc_feature (57)..(62): Xaa can be any naturally occurring amino acid
  misc_feature (64)..(68): Xaa can be any naturally occurring amino acid
  misc_feature (71)..(79): Xaa can be any naturally occurring amino acid
  misc_feature (81)..(81): Xaa can be any naturally occurring amino acid
  misc_feature (83)..(83): Xaa can be any naturally occurring amino acid
  misc_feature (86)..(86): Xaa can be any naturally occurring amino acid
  misc_feature (89)..(91): Xaa can be any naturally occurring amino acid
  misc_feature (94)..(97): Xaa can be any naturally occurring amino acid
  misc_feature (99)..(117): Xaa can be any naturally occurring amino acid
  misc_feature (119)..(123): Xaa can be any naturally occurring amino acid
  misc_feature (126)..(133): Xaa can be any naturally occurring amino acid
  misc_feature (139)..(164): Xaa can be any naturally occurring amino acid
  Coding DNA Sequence Number=SeqID_1540

SEQ ID NO: 8004 - protein, 135 aa, Glycine max
  Coding DNA Sequence Number=SeqID_1542
  Gene Ontology: Cellular component=integral to membrane
  Homolog annotation: Hit_ID=A0BV64; Match level="QueryCoverage=98%, HitCoverage=14%, E-value=5e-17, Identity=32%"; Hit description =Chromosome undetermined scaffold_13, whole genome shotgun sequence
DFDYARLEGRRLVIQEHLKLYIEGVKVESAKLIREKTPAMRFFGIPPIDIETFQGNPLFYRDPGYGFQNTIFYGNEFALIIFDIVILTMWDMIFKNTFIAIFASYFTNKAFAWIRSFFGERNISQKALVDDAFLI

SEQ ID NO: 8005 - protein, 121 aa, Glycine max
  Coding DNA Sequence Number=SeqID_1543
  Homolog annotation: Hit_ID=O23263; Match level="QueryCoverage=96%, HitCoverage=100%, E-value=2e-28, Identity=58%"; Hit description =Putative uncharacterized protein dl3050c
  Pfam annotation: Domain name=RALF; Domain location=58-121; Score =19.1; E_value=0.00021; Accession=PF05498.2; Description=Rapid ALkalinization Factor (RALF)
RTSSMEYYTFSQGFAENDQERAPGKHHVKKTWVKERYESDEEDGSREEEVNQMIIKEEEDEETKGMVMSSSTMLTSKVKYLNYGALKHDTPPAASSGGGRVMPPPSNRYHRGHPKYYRCRG

SEQ ID NO: 8006 - protein, 307 aa, Glycine max
  misc_feature (13)..(13): Xaa can be any naturally occurring amino acid
  misc_feature (16)..(17): Xaa can be any naturally occurring amino acid
  misc_feature (32)..(33): Xaa can be any naturally occurring amino acid
  misc_feature (52)..(52): Xaa can be any naturally occurring amino acid
  misc_feature (61)..(62): Xaa can be any naturally occurring amino acid
  misc_feature (65)..(65): Xaa can be any naturally occurring amino acid
  misc_feature (69)..(69): Xaa can be any naturally occurring amino acid
  misc_feature (86)..(86): Xaa can be any naturally occurring amino acid
  misc_feature (101)..(101): Xaa can be any naturally occurring amino acid
  misc_feature (115)..(115): Xaa can be any naturally occurring amino acid
  misc_feature (120)..(120): Xaa can be any naturally occurring amino acid
  misc_feature (128)..(129): Xaa can be any naturally occurring amino acid
  misc_feature (142)..(142): Xaa can be any naturally occurring amino acid
  misc_feature (160)..(160): Xaa can be any naturally occurring amino acid
  misc_feature (163)..(163): Xaa can be any naturally occurring amino acid
  misc_feature (176)..(176): Xaa can be any naturally occurring amino acid
  misc_feature (180)..(180): Xaa can be any naturally occurring amino acid
  misc_feature (182)..(182): Xaa can be any naturally occurring amino acid
  misc_feature (214)..(214): Xaa can be any naturally occurring amino acid
  misc_feature (231)..(231): Xaa can be any naturally occurring amino acid
  misc_feature (233)..(233): Xaa can be any naturally occurring amino acid
  misc_feature (268)..(268): Xaa can be any naturally occurring amino acid
  misc_feature (272)..(272): Xaa can be any naturally occurring amino acid
  misc_feature (274)..(275): Xaa can be any naturally occurring amino acid
  misc_feature (289)..(289): Xaa can be any naturally occurring amino acid
  misc_feature (295)..(295): Xaa can be any naturally occurring amino acid
  misc_feature (297)..(297): Xaa can be any naturally occurring amino acid
  Coding DNA Sequence Number=SeqID_1544
SGQWSVFWWCVSXIYXXTCFLRGPYVSLSACXXSSAHHNDKTDQHNNQHHHXTPHDHPKRXXDSXVSGXLGSFRVGSSNALPSFIXLPTITITTAATDASXTSRGPTPTHEQLRXDIHHXNPPPPYKXXMTYAVTALFFFSXLCCVVGYRGDRLVYACWXCVXAAHSHLPHRDGCXLACXCXADRRPSPLPLTYRSSVFARLRLRSLSDLSRAXLIIYPISPYVTHRIPSXVXHATFVAVFSPRSSATRGCWRVLLLYSPHHTPETLXHTHXNXXEQIIFMWLAARRPXPRSLLXRXASHDVSLCDG

SEQ ID NO: 8007 - protein, 120 aa, Glycine max
  misc_feature (30)..(30): Xaa can be any naturally occurring amino acid
  misc_feature (41)..(41): Xaa can be any naturally occurring amino acid
  misc_feature (54)..(54): Xaa can be any naturally occurring amino acid
  misc_feature (72)..(72): Xaa can be any naturally occurring amino acid
  Coding DNA Sequence Number=SeqID_1546
CECESVTHLSTYFHLSHSSQSKTVSRFLIXKMRSIFVLLLXLGLFKYAFAERRXLLCSFGIEIKPLYWEVDXPHSLNYSTFKNWLESHAVVIKRILAWDHPKRLGMGHWPRWIEHGRRIY

SEQ ID NO: 8008 - protein, 126 aa, Glycine max
  misc_feature (38)..(38): Xaa can be any naturally occurring amino acid
  Coding DNA Sequence Number=SeqID_3794
YSDLLVCICILYIQLSIASTPTYTRMRTDTSILRDTRXTLSHHTRSRRYIASHTDITSTRPWLTTLYSRHMIDKLTPPSYSPCVTSTTDTLILESSITSHVTHTIAHIHTRSMHHKITLQDMIVYL

SEQ ID NO: 8009 - protein, 123 aa, Glycine max
  misc_feature (49)..(49): Xaa can be any naturally occurring amino acid
  misc_feature (77)..(77): Xaa can be any naturally occurring amino acid
  misc_feature (96)..(96): Xaa can be any naturally occurring amino acid
  Coding DNA Sequence Number=SeqID_3796
IGSYMREPAPSLSSHSNGYVCPLLARVSTQEIHRLPRAFRLGDLALVEXTNPNEAANHPIMRLLSLYLRARERRLLXLELSTDTTYDDVGICYPEXRLVSGSPCTDNMDEDGGAAVGALAHYT

SEQ ID NO: 8010 - protein, 74 aa, Glycine max
  Coding DNA Sequence Number=SeqID_3798
EMLIILPMPLISRIYDSISSSSSITIISSLTIIIIGFHHIFTIPIIIVIIRNHFSPPKCLFFFRETAAATLPVA

SEQ ID NO: 8011 - protein, 119 aa, Glycine max
  misc_feature (3)..(3): Xaa can be any naturally occurring amino acid
  misc_feature (5)..(6): Xaa can be any naturally occurring amino acid
  misc_feature (28)..(28): Xaa can be any naturally occurring amino acid
  misc_feature (37)..(37): Xaa can be any naturally occurring amino acid
  misc_feature (40)..(40): Xaa can be any naturally occurring amino acid
  misc_feature (57)..(57): Xaa can be any naturally occurring amino acid
  misc_feature (112)..(113): Xaa can be any naturally occurring amino acid
  Coding DNA Sequence Number=SeqID_3800
WFXSXXISFFFLINNSTTYKNYNNYYTXIIHLPLLNXFIXKRTARNITTNTPIPQQXLTQVHAFFNCIIILVSPLHASVTRERGPPNDQVLTYLPPPNITSPHSIFERHLNXXSPGYSR

SEQ ID NO: 8012 - protein, 169 aa, Glycine max
  misc_feature (4)..(4): Xaa can be any naturally occurring amino acid
  misc_feature (14)..(15): Xaa can be any naturally occurring amino acid
  misc_feature (26)..(26): Xaa can be any naturally occurring amino acid
  misc_feature (38)..(38): Xaa can be any naturally occurring amino acid
  misc_feature (41)..(42): Xaa can be any naturally occurring amino acid
  misc_feature (53)..(53): Xaa can be any naturally occurring amino acid
  misc_feature (61)..(61): Xaa can be any naturally occurring amino acid
  misc_feature (69)..(69): Xaa can be any naturally occurring amino acid
  misc_feature (72)..(72): Xaa can be any naturally occurring amino acid
  misc_feature (81)..(81): Xaa can be any naturally occurring amino acid
  misc_feature (113)..(113): Xaa can be any naturally occurring amino acid
  Coding DNA Sequence Number=SeqID_3802
SHHXYNTYILPSRXXTALDAQSDDVXRSPLSRVDVHMXVRXXAGALCVRARQXTPSWHVVXSLRARRDXRRXSSLYTITSXCSHLLFTHQYYISQTSCLIPLYHVVYVCIYVXCVLVVCDGTRVSVMHTSVECERLARCCMVRVVTAVTSHVSVSDYSRVIETIFTAVA

SEQ ID NO: 8013 - protein, 159 aa, Glycine max
  Coding DNA Sequence Number=SeqID_3804
  Subcellular localization annotation: CTP_CleavageSite=38; ConfidenceScore=5.28e-01
THTSLVVEHTRVPRHCSYASPSHPHTIATSVNRHTPSRKMSRSSATLSLFCICSLCVVFPLSHSYSVDCCYIFYTARRGLYKFPSYSATPISHTSRSPGYCMPKRGVATRSPLIPLSSSILFSQLASSPRPSNQSGIPHSLPTTLRVTRQSRDTTTTPI

SEQ ID NO: 8014 - protein, 149 aa, Glycine max
  misc_feature (39)..(39): Xaa can be any naturally occurring amino acid
  misc_feature (72)..(72): Xaa can be any naturally occurring amino acid
  Coding DNA Sequence Number=SeqID_3805
  Gene Ontology: Mol. function=serine-type endopeptidase activity; Cellular component=chloroplast; Biological process=proteolysis
  Homolog annotation: Hit_ID=Q9S834; Match level="QueryCoverage=81%, HitCoverage=40%, E-value=1e-52, Identity=84%"; Hit description=ATP -dependent Clp protease proteolytic subunit 5, chloroplast precursor
  Pfam annotation: Domain name=CLP_protease; Domain location=28-149; Score=53.7; E_value=6.2e-13; Accession=PF00574.13; Description=Clp protease
LCLRSEDLRVPSSPYFPAYAQGHEPPPMVQERFQSVIRXLFQYLGPRIIRCGGAVDDDMSNILVAQLLYLDXPNKDIVMYVSSPGGSVTAGMAIFDTMRHIRPDVSTVCIGLAASKGAFLLSAGTKGNDSFTMSSKGAFLLSAGTKGKR

SEQ ID NO: 8015 - protein, 104 aa, Glycine max
  Coding DNA Sequence Number=SeqID_3806
  Gene Ontology: Mol. function=cyclin-dependent protein kinase regulator activity; Cellular component=cyclin-dependent protein kinase holoenzyme complex; Biological process=regulation of cell cycle
  Homolog annotation: Hit_ID=O23249; Match level="QueryCoverage=72%, HitCoverage=85%, E-value=1e-28, Identity=81%"; Hit description =Cyclin-dependent kinases regulatory subunit 1
  Pfam annotation: Domain name=CKS; Domain location=14-88; Score=130.0; E_value=7e-36; Accession=PF01111.9; Description=Cyclin-dependent kinase regulatory subunit
IIISFPFQLVCIQLQFRLQNFHKSLDLLCTCTYRHVVLPPDTAKLLPKNRLLSENEWRAIGVQQSRGWVHYAIHRPEPHIMLFRRTLNYQQQQQENHAQNVLAK

SEQ ID NO: 8016 - protein, 297 aa, Glycine max
  Coding DNA Sequence Number=SeqID_3807
  Gene Ontology: Mol. function=transcription factor activity; Cellular component=nucleus; Biological process=regulation of transcription, DNA-dependent
  Homolog annotation: Hit_ID=Q42471; Match level="QueryCoverage=99%, HitCoverage=96%, E-value=1e-133, Identity=81%"; Hit description =CCAAT-binding factor B subunit homolog
  Pfam annotation: Domain name=CBFB_NFYA; Domain location=162-218; Score=137.6; E_value=3.4e-38; Accession=PF02045.6; Description=CCAAT- binding transcription factor (CBF-BNF-YA) subunit B
MESEDMHSKPDGGNQIVSESVHHHSINSLNPWQRAAAACNASSLVEEAGDKSIALENQNNWESTNGSKSPSHKDENGNKESPQVTSSPQQSAGDYSEKSQELVHVGVTGPPHPQLVSHTGWASSNPYQDPYYAGMMGAYPMAYVPYGGMPHSRMPLPPEVAQEPVYVNAKQYQAILRRRQARAKAELEMKLIKSRKPYLHESRHQHAMRRPRGTGGRFAKKTNTEVSQPKPGEKNNATQSPTSSHSDQPEAWNDECRKQSEEMQSSASKRREEADCSGQQWNSISSNHTSEARLAIK

SEQ ID NO: 8017 - protein, 221 aa, Glycine max
  misc_feature (14)..(14): Xaa can be any naturally occurring amino acid
  misc_feature (20)..(20): Xaa can be any naturally occurring amino acid
  misc_feature (37)..(37): Xaa can be any naturally occurring amino acid
  misc_feature (48)..(48): Xaa can be any naturally occurring amino acid
  misc_feature (67)..(67): Xaa can be any naturally occurring amino acid
  Coding DNA Sequence Number=SeqID_3808
HTRPYCSRADNLKXYASSCXADRILVRKFSVIVSVHXTPRSPQSMHQXAWSIAESTQHHTTTISSCXETLDVSVAPLLSTAAAQLVCILCARWHVVSSGVLRATSHHLSSQSYLIATKHNTASSTSRPQRTIAATVPSYNQQPRRRAGYYARDRHNCTANTVSGALSPSYTTCHARKASAPTSSGLTHHIANSNAPPLSDIRTNTRITSHLILVRRFCIDI

SEQ ID NO: 8018 - protein, 160 aa, Glycine max
  misc_feature (11)..(11): Xaa can be any naturally occurring amino acid
  misc_feature (60)..(60): Xaa can be any naturally occurring amino acid
  misc_feature (101)..(101): Xaa can be any naturally occurring amino acid
  misc_feature (133)..(133): Xaa can be any naturally occurring amino acid
  misc_feature (142)..(142): Xaa can be any naturally occurring amino acid
  misc_feature (151)..(151): Xaa can be any naturally occurring amino acid
  Coding DNA Sequence Number=SeqID_3810
PIDASTYLLQXDSAYLASQYMSVRVRRTQSRALLSIDIIFYYIFHTTYTSVHWHSKVYIXSKYDEHTLTHIPNIYYTLLTRLYIITHHTLDIYIRLDHRLXPISIISINMTISTYMILRSVCHTHPVRDTLTXRAVDQHTLXYYADNDAQXPGCQTIYRV

SEQ ID NO: 8019 - protein, 50 aa, Glycine max
  Coding DNA Sequence Number=SeqID_3812
WLHIRNIIIFTRVGMIIRTNLNHSHSLPVNLSWNVFLQGPVHIIPSNNDQ

SEQ ID NO: 8020 - protein, 104 aa, Glycine max
  misc_feature (3)..(3): Xaa can be any naturally occurring amino acid
  misc_feature (10)..(10): Xaa can be any naturally occurring amino acid
  misc_feature (18)..(18): Xaa can be any naturally occurring amino acid
  misc_feature (20)..(22): Xaa can be any naturally occurring amino acid
  misc_feature (24)..(24): Xaa can be any naturally occurring amino acid
  misc_feature (26)..(26): Xaa can be any naturally occurring amino acid
  misc_feature (28)..(29): Xaa can be any naturally occurring amino acid
  misc_feature (31)..(31): Xaa can be any naturally occurring amino acid
  misc_feature (40)..(41): Xaa can be any naturally occurring amino acid
  misc_feature (49)..(49): Xaa can be any naturally occurring amino acid
  misc_feature (51)..(54): Xaa can be any naturally occurring amino acid
  misc_feature (57)..(58): Xaa can be any naturally occurring amino acid
  misc_feature (61)..(61): Xaa can be any naturally occurring amino acid
  misc_feature (70)..(70): Xaa can be any naturally occurring amino acid
  misc_feature (75)..(75): Xaa can be any naturally occurring amino acid
  misc_feature (79)..(80): Xaa can be any naturally occurring amino acid
  misc_feature (84)..(84): Xaa can be any naturally occurring amino acid
  misc_feature (93)..(94): Xaa can be any naturally occurring amino acid
  misc_feature (101)..(101): Xaa can be any naturally occurring amino acid
  Coding DNA Sequence Number=SeqID_3814
GGXWWVVGDXCSSRGYEXTXXXPXCXPXXQXSAVSYLLVXXSNCEEPLXHXXXXLSXXSLXDLYDTYTLXRHTRXGQIXXIYRXRAFDLISVXXSYYLDYXRYS

SEQ ID NO: 8021 - protein, 146 aa, Glycine max
  Coding DNA Sequence Number=SeqID_3816
LSVRLLLLYVTLHTSICRWHTTRRHVGWCVGVGVIGGQRDYINLRTMERACEEYSVDSWAGVAGLLSVRAGLDVVSGLHLWFYRVVSRVRRSSIDDNFPAALCFLFCIPASVSGCECLLRGGAQLAKSVCFYFSFFILSIGVKSGR

SEQ ID NO: 8022 - protein, 111 aa, Glycine max
  misc_feature (39)..(39): Xaa can be any naturally occurring amino acid
  Coding DNA Sequence Number=SeqID_3817
AVTHTLTTCLFINSVVGEKSNSRIRYVPYTPQTILAHHXPSLPSHQTVRVYDILKMKTDMEKYERVKPCPSYTQYMLDDSPLSPTPVSRSQLYPLYHISTQDATPSPSPTS

SEQ ID NO: 8023 - protein, 80 aa, Glycine max
  misc_feature (36)..(36): Xaa can be any naturally occurring amino acid
  misc_feature (38)..(38): Xaa can be any naturally occurring amino acid
  misc_feature (40)..(40): Xaa can be any naturally occurring amino acid
  misc_feature (55)..(55): Xaa can be any naturally occurring amino acid
  Coding DNA Sequence Number=SeqID_3819
KTIVPSSLCIVGFVNLPSILESMEIHWFCPDLAAIXPXPXAHAPVGLRSRSGCHXCRCRDVAVRAGHRASRSGKSVLITC

SEQ ID NO: 8024 - protein, 138 aa, Glycine max
  Coding DNA Sequence Number=SeqID_3821
  Gene Ontology: Mol. function=translation initiation factor activity; Cellular component=multi-eIF complex; Biological process =translational initiation
  Homolog annotation: Hit_ID=Q9FFT6; Match level="QueryCoverage=78%, HitCoverage=96%, E-value=1e-50, Identity=90%"; Hit description =Translation initiation factor-like protein
  Pfam annotation: Domain name=SUI1; Domain location=24-105; Score =136.8; E_value=6e-38; Accession=PF01253.13; Description=Translation initiation factor SUI1
MVELDIQVPLAYDPFAEAQDTDAPGTKEYIHVRIQQRNGKKSLTTVQGLKKEYSYEKILKDLKKDFCCNGNVVQDKVLGKIIQLQGDQRKKVSHFLVQTGIAKKDQIKDPRVLEFGSFGFIFLFYMRIILCDRSSLEV

SEQ ID NO: 8025 - protein, 118 aa, Glycine max
  misc_feature (64)..(64): Xaa can be any naturally occurring amino acid
  misc_feature (105)..(105): Xaa can be any naturally occurring amino acid
  Coding DNA Sequence Number=SeqID_3822
  Gene Ontology: Mol. function=nucleic acid binding; Cellular component= spliceosome; Biological process=nuclear mRNA splicing, via spliceosome
  Homolog annotation: Hit_ID=A5AMC2; Match level="QueryCoverage=98%, HitCoverage=13%, E-value=4e-42, Identity=73%"; Hit description =Putative uncharacterized protein
GTPRDAHWEDRHLLRSGAVRGTDVQTEFDDDDQHKVVLLVHDTEPTFLDGRFVFTKQANPIMPXTDPTSDLDIISHTGSTLVREIHEKLTINQSRQRLRELAGSXLDDILGVEKTAEH

SEQ ID NO: 8026 - protein, 154 aa, Glycine max
  misc_feature (10)..(10): Xaa can be any naturally occurring amino acid
  misc_feature (13)..(14): Xaa can be any naturally occurring amino acid
  misc_feature (62)..(62): Xaa can be any naturally occurring amino acid
  misc_feature (71)..(71): Xaa can be any naturally occurring amino acid
  misc_feature (103)..(103): Xaa can be any naturally occurring amino acid
  Coding DNA Sequence Number=SeqID_3823
TYTWVSPPRXCQXXVQGVDNCLINILLLNLLTRVSPYHGSVDHMLHSLPHLNSLSRSPLTPXLILSRIPSXPYTPLPIANRLDRVLSSRRPARRGHTHKSCWXRAKSRADLGRANTPCIISSRTSYTSYTHPPPARVTVPSFVPLTHHPILHYM

SEQ ID NO: 8027 - protein, 137 aa, Glycine max
  misc_feature (5)..(5): Xaa can be any naturally occurring amino acid
  misc_feature (103)..(103): Xaa can be any naturally occurring amino acid
  Coding DNA Sequence Number=SeqID_3825
RYASXASSLDLDEESQHTRRPRPRVPLSLLCTLSIYIMIINILDCAGRRLLCHMLSHRALSHSICSSTTAPCPHVMYPALITLRRLSVTRSVLFACISILYNXLRYYGGVSPVGAWVVMTLAAVREFSSPAALSFSS

SEQ ID NO: 8028 - protein, 115 aa, Glycine max
  misc_feature (14)..(15): Xaa can be any naturally occurring amino acid
  misc_feature (19)..(25): Xaa can be any naturally occurring amino acid
  misc_feature (29)..(31): Xaa can be any naturally occurring amino acid
  misc_feature (43)..(43): Xaa can be any naturally occurring amino acid
  misc_feature (51)..(51): Xaa can be any naturally occurring amino acid
  misc_feature (61)..(61): Xaa can be any naturally occurring amino acid
  misc_feature (77)..(78): Xaa can be any naturally occurring amino acid
  misc_feature (82)..(82): Xaa can be any naturally occurring amino acid
  Coding DNA Sequence Number=SeqID_3827
GFVMFVVCWCCCCXXYMEXXXXXXXYYCXXXGRERERKHKSLXYISSPARXSGRASLLHIXNSPWSITPTRRDFARXXQFPXSPSVYSLTHSLHLDTTASLSTHITHTLIPTRYS

SEQ ID NO: 8029 - protein, 78 aa, Glycine max
  misc_feature (1)..(37): Xaa can be any naturally occurring amino acid
  misc_feature (39)..(39): Xaa can be any naturally occurring amino acid
  misc_feature (63)..(63): Xaa can be any naturally occurring amino acid
  misc_feature (70)..(70): Xaa can be any naturally occurring amino acid
  Coding DNA Sequence Number=SeqID_3829
XXXXXXXXXXXXXXXXXXXXXXXXXXXXXXXXXXXXXFXFVRGSFFKIGPAYPVHSWRYKEIXRVGRLSXNHPGVLQF

SEQ ID NO: 8030 - protein, 87 aa, Glycine max
  Coding DNA Sequence Number=SeqID_3831
KTQPVPWFLMAFYIWPTSGYISLEWLIFCVPSNAVLAIGIIPVTAIVHKVLASHVLIRSLFTRRVFICLSIITVVLVGITSGVSAES

SEQ ID NO: 8031 - protein, 101 aa, Glycine max
  misc_feature (3)..(3): Xaa can be any naturally occurring amino acid
  misc_feature (11)..(11): Xaa can be any naturally occurring amino acid
  misc_feature (34)..(34): Xaa can be any naturally occurring amino acid
  misc_feature (63)..(63): Xaa can be any naturally occurring amino acid
  Coding DNA Sequence Number=SeqID_3833
  Subcellular localization annotation: CTP_CleavageSite=46; ConfidenceScore=5.37e-01
VPXPVVAESAXPHPQLPSSSISAVMHSPMVSLRXHPPYLNPLVAFPAAAVAEAAARRSRRETXKKEKKSDLAMSKKKSYEMSDVESWYEKKKIALPSHLIF

SEQ ID NO: 8032 - protein, 122 aa, Glycine max
  misc_feature (83)..(83): Xaa can be any naturally occurring amino acid
  Coding DNA Sequence Number=SeqID_3835
  Gene Ontology: Cellular component=extracellular region
  Homolog annotation: Hit_ID=A2XAD5; Match level="QueryCoverage=98%, HitCoverage=67%, E-value=4e-31, Identity=59%"; Hit description =Putative uncharacterized protein
MAMEYTSRRWLAAVAAIVLLSCAPALAATAGRKLLQIQISQAQQYVVPQNHMRAIHEQRPLKWSSGLADQAERWAARFKGNCXAASAAMPGGVNVFRGFGEAGKAWQPSDAVAAWAEQANYF

SEQ ID NO: 8033 - protein, 174 aa, Glycine max
  Coding DNA Sequence Number=SeqID_3836
  Subcellular localization annotation: CTP_CleavageSite=88; ConfidenceScore=5.43e-01
RRPGAGPASEIRSPPPSFRRFRRGGALWGSTTAPPGGPALSAGGAVISVSASRGATATAVPPATGCFSAAPPPWTMLSKEEAASFACSCFAAFSWRHLDNLFMVAPPQKKPQLLPKRRGPLPRLAGGLLVLHVFDITERKKPSSRLLCGAPRGGGGRGGGGRGIARNAGGLEGG

SEQ ID NO: 8034 - protein, 103 aa, Glycine max
  misc_feature (36)..(36): Xaa can be any naturally occurring amino acid
  misc_feature (47)..(47): Xaa can be any naturally occurring amino acid
  misc_feature (76)..(76): Xaa can be any naturally occurring amino acid
  misc_feature (99)..(99): Xaa can be any naturally occurring amino acid
  Coding DNA Sequence Number=SeqID_3838
VVVRRDVVCLLSRCGHHHRLKRGDIHAHRDILCVGXLASVIFKRHLXLQELWHNHIWRSRGAERNDLHFAISLGAXPTFSRYILQAYHDQCTCASDSRXTESE

SEQ ID NO: 8035 - protein, 112 aa, Glycine max; identical to SEQ ID NO: 7424
  misc_feature (14)..(14): Xaa can be any naturally occurring amino acid
  misc_feature (50)..(51): Xaa can be any naturally occurring amino acid
  misc_feature (55)..(55): Xaa can be any naturally occurring amino acid
  misc_feature (60)..(60): Xaa can be any naturally occurring amino acid
  misc_feature (73)..(73): Xaa can be any naturally occurring amino acid
  misc_feature (75)..(75): Xaa can be any naturally occurring amino acid
  misc_feature (81)..(81): Xaa can be any naturally occurring amino acid
  Coding DNA Sequence Number=SeqID_3840

SEQ ID NO: 8036 - protein, 84 aa, Glycine max
  Coding DNA Sequence Number=SeqID_481
WGAAGCPRSKCGMSYLCHNIFYRRKCREVSFLLLWPVRWTCSCDIMDILQSVHLIVFTPFSSHKMSIRTLTLSPLDYTLIEQLC

SEQ ID NO: 8037 - protein, 159 aa, Glycine max
  misc_feature (18)..(18): Xaa can be any naturally occurring amino acid
  misc_feature (107)..(107): Xaa can be any naturally occurring amino acid
  Coding DNA Sequence Number=SeqID_483
TILVMTYKARELYRHDPXATSGRISRLLLHITDTSCMLTPDTCIVHDIVDHTPEKSHSTTICVTVDLLTYDVIHNYETMEIVYMSRDKGDDHTFLILHRLSQLFSSXWMMDNHKSLIWRWIMLYGRISVITDDQYIIQHRHAGMRRGVSHGILALSADN

SEQ ID NO: 8038 - protein, 199 aa, Glycine max
  misc_feature (140)..(140): Xaa can be any naturally occurring amino acid
  misc_feature (154)..(154): Xaa can be any naturally occurring amino acid
  misc_feature (157)..(157): Xaa can be any naturally occurring amino acid
  misc_feature (161)..(162): Xaa can be any naturally occurring amino acid
  misc_feature (167)..(168): Xaa can be any naturally occurring amino acid
  misc_feature (172)..(173): Xaa can be any naturally occurring amino acid
  misc_feature (176)..(176): Xaa can be any naturally occurring amino acid
  misc_feature (178)..(178): Xaa can be any naturally occurring amino acid
  misc_feature (181)..(181): Xaa can be any naturally occurring amino acid
  misc_feature (183)..(184): Xaa can be any naturally occurring amino acid
  misc_feature (186)..(187): Xaa can be any naturally occurring amino acid
  misc_feature (190)..(190): Xaa can be any naturally occurring amino acid
  misc_feature (193)..(194): Xaa can be any naturally occurring amino acid
  misc_feature (197)..(199): Xaa can be any naturally occurring amino acid
  Coding DNA Sequence Number=SeqID_485
  Pfam annotation: Domain name=N_methyl; Domain location=6-29; Score =38.5; E_value=2.3e-08; Accession=PF07963.3; Description=Prokaryotic N-terminal methylation motif
GFDMKKAFTLIELLVVIAIIAILAAILFPVFAQAKLAAKKTTCVSNLKQMGTSTMLYTSDYDDAYYPHRFNCRNAANAFITCPDYLDASNNLKPEAKMLSGGAEQRYYWVYLLQPYTKNYGLFLSPANSNGFVPGATSAXTCSGAGCQGTVTVXRQXRPNXXYLTRXXVSDXXVTXNXTVXVXXSXXVWXQSXXWAXXX

SEQ ID NO: 8039 - protein, 159 aa, Glycine max
  misc_feature (15)..(15): Xaa can be any naturally occurring amino acid
  Coding DNA Sequence Number=SeqID_487
  Gene Ontology: Mol. function=methionine adenosyltransferase activity; Cellular component=cytoplasm; Biological process=one-carbon compound metabolic process
  Homolog annotation: Hit_ID=P23686; Match level="QueryCoverage=100%, HitCoverage=40%, E-value=5e-32, Identity=47%"; Hit description=S -adenosylmethionine synthetase 1
  Pfam annotation: Domain name=S-AdoMet_synt_C; Domain location=14-156; Score=122.2; E_value=1.5e-33; Accession=PF02773.6; Description=S -adenosylmethionine synthetase, C-te
KTLFPLDPFGEFVFXGAHGVIGFSGRKIFFATYGGWGGHGGGAFSGKGLPTGDRGGASTVRQAAKSIVVNGLCRRAILQMSYTTGGPQPLFVFFYPYGPGEIPVKGIPCILRGRFVFRPGTISPTPYFKRGGKGRFLRSVAYGHFGGDEPGFSREEGKP

SEQ ID NO: 8040 - protein, 77 aa, Glycine max
  Coding DNA Sequence Number=SeqID_488
  Gene Ontology: Mol. function=hydrolase activity; Cellular component =cytoplasm
  Homolog annotation: Hit_ID=Q45NN8; Match level="QueryCoverage=88%, HitCoverage=39%, E-value=4e-21, Identity=72%"; Hit description =Hydroxyacylglutathione hydrolase
CHHGRDHAGGNEKIKQLVPGIKVYGSLIDNVIGCTDKVENGDKESLGADIYILCLHTPCLENSSTRYYLFATNVRRQ

SEQ ID NO: 8041 - protein, 137 aa, Glycine max
  Coding DNA Sequence Number=SeqID_489
IPLLLRFGSAWAVLSRLHVFFRVRKKKKKKKKKKKKKKKKTKKKKKKKKKKKKKKLGGGPFKGPNFPSPAFQRFIFFLGPPPSISWAGFYNRGDGKTPGLPHFIPLAPIPLFPGGGIRKKAPPIPLSKNWPTLMGNG

SEQ ID NO: 8042 - protein, 138 aa, Glycine max
  misc_feature (124)..(124): Xaa can be any naturally occurring amino acid
  misc_feature (127)..(127): Xaa can be any naturally occurring amino acid
  Coding DNA Sequence Number=SeqID_490
  Gene Ontology: Mol. function=structural constituent of ribosome; Cellular component=ribonucleoprotein complex; Biological process =translation
  Homolog annotation: Hit_ID=Q9SKZ3; Match level="QueryCoverage=84%, HitCoverage=80%, E-value=3e-55, Identity=89%"; Hit description=40S ribosomal protein S12-2
  Pfam annotation: Domain name=Ribosomal_L7Ae; Domain location=31-126; Score=117.7; E_value=3.5e-32; Accession=PF01248.16; Description =Ribosomal protein L7AeL30eS12eGadd45 family
MSGDEAAAAPAVVPPVAEAAAAIPEDMDLLTALELTLRKARAHGGVVRGLHESAKLIEKRSAQLCVLAEDCNQPDYVKLVKALCADHNINLLTVPSAKTLGEWAGLCKIDSEGNARKVVGCSCXVVXDYGEETTALNI

SEQ ID NO: 8043 - protein, 117 aa, Glycine max
  misc_feature (2)..(2): Xaa can be any naturally occurring amino acid
  misc_feature (4)..(4): Xaa can be any naturally occurring amino acid
  misc_feature (14)..(14): Xaa can be any naturally occurring amino acid
  misc_feature (29)..(29): Xaa can be any naturally occurring amino acid
  misc_feature (32)..(33): Xaa can be any naturally occurring amino acid
  misc_feature (52)..(52): Xaa can be any naturally occurring amino acid
  misc_feature (66)..(66): Xaa can be any naturally occurring amino acid
  misc_feature (69)..(69): Xaa can be any naturally occurring amino acid
  misc_feature (85)..(85): Xaa can be any naturally occurring amino acid
  misc_feature (87)..(89): Xaa can be any naturally occurring amino acid
  misc_feature (91)..(93): Xaa can be any naturally occurring amino acid
  misc_feature (116)..(116): Xaa can be any naturally occurring amino acid
  Coding DNA Sequence Number=SeqID_491
FXLXRIVHSSRLPXHRSVAHLQTQDHKRXYYXXTYTTICTMCIYNTHDIYSXSYYDRKSTTQERGXLAXTHTLLHTHDYIHNQRXPXXXKXXXHSHADITHARLTYSHKLGTDRRXS

SEQ ID NO: 8044 - protein, 185 aa, Glycine max
  misc_feature (66)..(66): Xaa can be any naturally occurring amino acid
  misc_feature (74)..(74): Xaa can be any naturally occurring amino acid
  misc_feature (176)..(176): Xaa can be any naturally occurring amino acid
  Coding DNA Sequence Number=SeqID_3841
  Homolog annotation: Hit_ID=Q68EC6; Match level="QueryCoverage=91%, HitCoverage=24%, E-value=4e-50, Identity=60%"; Hit description=ARE1 -like protein
CTRTYAYNCARASSRVNFLTERAWDIDNEGHAGYMDATNMVLSAHFRAYVPALETLRLHIAPYHDXLGVETFSXGLFIRPREPLNNRSAALALGDRINILQDIAEPALLPHIAQARSHRHPYEVLFTSLQKLLMDTATSECDPCHDFFGQESISSELCPGPFRVIDEHFKSILPNXYDAICLMLM

SEQ ID NO: 8045 - protein, 131 aa, Glycine max
  misc_feature (2)..(2): Xaa can be any naturally occurring amino acid
  misc_feature (16)..(16): Xaa can be any naturally occurring amino acid
  misc_feature (18)..(18): Xaa can be any naturally occurring amino acid
  misc_feature (23)..(23): Xaa can be any naturally occurring amino acid
  misc_feature (36)..(36): Xaa can be any naturally occurring amino acid
  misc_feature (83)..(83): Xaa can be any naturally occurring amino acid
  Coding DNA Sequence Number=SeqID_3842
QXTRACRATPTSFCLXSXYLCAXSDAEYRARLHIPXCFLRTLHKRTDHYVKGTRMCVIDNDTRDKGSEAPPCAIRLEERATRXSAQLRLASGTAAYRPYVQDVSPYTSLDDSIYSSSPRTAPLCNDARRIR

SEQ ID NO: 8046 - protein, 181 aa, Glycine max
  misc_feature (9)..(9): Xaa can be any naturally occurring amino acid
  misc_feature (27)..(27): Xaa can be any naturally occurring amino acid
  misc_feature (69)..(69): Xaa can be any naturally occurring amino acid
  misc_feature (76)..(76): Xaa can be any naturally occurring amino acid
  misc_feature (90)..(91): Xaa can be any naturally occurring amino acid
  misc_feature (99)..(99): Xaa can be any naturally occurring amino acid
  misc_feature (104)..(104): Xaa can be any naturally occurring amino acid
  misc_feature (121)..(121): Xaa can be any naturally occurring amino acid
  misc_feature (149)..(149): Xaa can be any naturally occurring amino acid
  misc_feature (157)..(157): Xaa can be any naturally occurring amino acid
  misc_feature (159)..(160): Xaa can be any naturally occurring amino acid
  misc_feature (165)..(165): Xaa can be any naturally occurring amino acid
  misc_feature (178)..(178): Xaa can be any naturally occurring amino acid
  Coding DNA Sequence Number=SeqID_3844
  Subcellular localization annotation: CTP_CleavageSite=39; ConfidenceScore=5.16e-01
SYTLCLPRXALPWHHRARSPRPIAYTXYSPRYTVTMPMLASTLSYVLCRLALLTRTITGRTCRLWYLVXALYVYTXPAPRRAEPITVCCXXRCRLISLXSLGFXTYGVVSCSPASLIRQLXHGTSYNDLLCAGQLTRDSHSARHRERVXCAVSCTMXKXXRSVDXVRVYETSTQSRCXLRS

SEQ ID NO: 8047 - protein, 148 aa, Glycine max
  Coding DNA Sequence Number=SeqID_3846
FTIQPRLLSPSCVRDDVLRTDVLKSYCIYQIFTLSKKMISLNTDRAHPVRVSSSRYGGASPIICLFVIYALLVHIWYLCHVLACILHRHVITTVMPYAAPRSPSCLSPRVVSISYEIQSTWTHTHPNSTSCSCAVRQTRSSPIAELTR

SEQ ID NO: 8048 - protein, 76 aa, Glycine max
  misc_feature (10)..(10): Xaa can be any naturally occurring amino acid
  Coding DNA Sequence Number=SeqID_3848
  Gene Ontology: Mol. function=ligase activity, forming aminoacyl-tRNA and related compounds; Cellular component=cytoplasm; Biological process=alanyl-tRNA aminoacylation
  Homolog annotation: Hit_ID=A7P8L7; Match level="QueryCoverage=88%, HitCoverage=7%, E-value=4e-15, Identity=62%"; Hit description =Chromosome chr3 scaffold_8, whole genome shotgun sequence
  Pfam annotation: Domain name=tRNA_SAD; Domain location=1-40; Score =15.3; E_value=0.0074; Accession=PF07973.4; Description=Threonyl and Alanyl tRNA synthetase second a
EVAGVSVELXCGTYVTNTFEIRGFNIISELGIAFGMRYIEAVYEDGFIAYINGRDFYFKHLCSTVRVSIMILVSLS

SEQ ID NO: 8049 - protein, 151 aa, Glycine max
  misc_feature (4)..(4): Xaa can be any naturally occurring amino acid
  misc_feature (24)..(24): Xaa can be any naturally occurring amino acid
  misc_feature (27)..(27): Xaa can be any naturally occurring amino acid
  misc_feature (29)..(30): Xaa can be any naturally occurring amino acid
  misc_feature (32)..(32): Xaa can be any naturally occurring amino acid
  misc_feature (37)..(37): Xaa can be any naturally occurring amino acid
  misc_feature (43)..(43): Xaa can be any naturally occurring amino acid
  misc_feature (47)..(47): Xaa can be any naturally occurring amino acid
  misc_feature (49)..(49): Xaa can be any naturally occurring amino acid
  misc_feature (51)..(51): Xaa can be any naturally occurring amino acid
  misc_feature (56)..(56): Xaa can be any naturally occurring amino acid
  misc_feature (60)..(60): Xaa can be any naturally occurring amino acid
  misc_feature (62)..(63): Xaa can be any naturally occurring amino acid
  misc_feature (72)..(72): Xaa can be any naturally occurring amino acid
  misc_feature (74)..(75): Xaa can be any naturally occurring amino acid
  misc_feature (79)..(79): Xaa can be any naturally occurring amino acid
  misc_feature (91)..(91): Xaa can be any naturally occurring amino acid
  misc_feature (97)..(98): Xaa can be any naturally occurring amino acid
  misc_feature (104)..(104): Xaa can be any naturally occurring amino acid
  misc_feature (106)..(106): Xaa can be any naturally occurring amino acid
  misc_feature (112)..(112): Xaa can be any naturally occurring amino acid
  misc_feature (119)..(119): Xaa can be any naturally occurring amino acid
  misc_feature (121)..(121): Xaa can be any naturally occurring amino acid
  misc_feature (130)..(130): Xaa can be any naturally occurring amino acid
  misc_feature (133)..(133): Xaa can be any naturally occurring amino acid
  misc_feature (139)..(140): Xaa can be any naturally occurring amino acid
  misc_feature (146)..(146): Xaa can be any naturally occurring amino acid
  misc_feature (151)..(151): Xaa can be any naturally occurring amino acid
  Coding DNA Sequence Number=SeqID_3849
IPIXTQANPKKLIEIYRNYLPFHXMKXVXXTXLAGLXEFDLTXKASXAXLXVKTNXASNXYXXSQAYNLLVXCXXYMIXGDDGAPSRDCCXSVNAEXXSAPPQXSXWLHVSXFSTEKTXLXFLLENKAHXLPXSMRRSXXGRIMSXQKTNX

SEQ ID NO: 8050 - protein, 195 aa, Glycine max
  misc_feature (10)..(10): Xaa can be any naturally occurring amino acid
  misc_feature (41)..(41): Xaa can be any naturally occurring amino acid
  misc_feature (194)..(194): Xaa can be any naturally occurring amino acid
  Coding DNA Sequence Number=SeqID_3851
  Subcellular localization annotation: CTP_CleavageSite=15; ConfidenceScore=5.14e-01
NKTTKTFWCXNQTVSTSTPSSVVCTIRCLEMYNAYTQLSGXNKTTCASLLLLLDSSVLQQLRHNSVPHSIHARVYMDSHTKHIHLRVGIRHYTHYQPQLGYFCGERAKRGCESAPPAATYIMCTYCAEDILLNCVVDRISSHQSLFPARESWCVHLPARICTAPACIPSYGVTRFLLCVISNHTMHVITMAWSXC

SEQ ID NO: 8051 - protein, 106 aa, Glycine max
  misc_feature (73)..(73): Xaa can be any naturally occurring amino acid
  misc_feature (100)..(100): Xaa can be any naturally occurring amino acid
  Coding DNA Sequence Number=SeqID_3853
  Subcellular localization annotation: CTP_CleavageSite=58; ConfidenceScore=5.21e-01
RSNAMELASLIDQTDACVQSTPPLSYTRCESVCRMRVASRYLSLTFNTSVSRVIWVVRCSCDESSDAHSSAAXVILRVCTDRQPRAAGSSIAYCAATSDXRTCSRR

SEQ ID NO: 8052 - protein, 132 aa, Glycine max
  Coding DNA Sequence Number=SeqID_3855
  Gene Ontology: Mol. function=superoxide dismutase activity; Cellular component=cytoplasm; Biological process=superoxide metabolic process
  Homolog annotation: Hit_ID=Q6W5R8; Match level="QueryCoverage=100%, HitCoverage=86%, E-value=2e-57, Identity=80%"; Hit description =Superoxide dismutase [Cu-Zn]
  Pfam annotation: Domain name=Sod_Cu; Domain location=3-132; Score =270.7; E_value=3.1e-78; Accession=PF00080.10; Description=Copperzinc superoxide dismutase (SODC)
MPVKAVCVLIGETVKGTVNFEQSADGAPVQVSGELSGLAKGLHGFHVHEFGDNTNGCTSAGPHFNPLGKEHGAPTDAVRHAGDLGNVEAGADGVAKINISDKMISLSGPNSIIGRTVVVHADPDDLGKGGHE

SEQ ID NO: 8053 - protein, 389 aa, Glycine max
  misc_feature (193)..(193): Xaa can be any naturally occurring amino acid
  Coding DNA Sequence Number=SeqID_3856
  Gene Ontology: Mol. function=serine-type endopeptidase activity; Biological process=sporulation
  Homolog annotation: Hit_ID=A8FF07; Match level="QueryCoverage=100%, HitCoverage=91%, E-value=0.0, Identity=96%"; Hit description=Stage IV sporulation S55 family serine peptidase
  Pfam annotation: Domain name=PDZ; Domain location=72-153; Score=41.3; E_value=3.5e-09; Accession=PF00595.14; Description=PDZ domain (Also known as DHR or GLGF)
  Pfam annotation: Domain name=Peptidase_S55; Domain location=166-383; Score=548.7; E_value=6.3e-162; Accession=PF05580.3; Description =SpoIVB peptidase S55
  Pfam module annotation: Pfam domain module=PDZ::Peptidase_S55; Domain location=72-153::166-383
ISIPTNVAVFEKQKHSIDTSIEASANASSPAFSLSEKKNRLDITGQKAGKAEIVYDFKGFPIKKTKVDVLPELKVIPGGQSIGVKLHSVGVLVVGFHQITTADGKKSPGEAAGIQSGDMIIEINGQKMEKMNDLTPFIQKAGKTGETLRLLVKRDHKTFQTTLTPAKDASEGIYRIGLYIRDSAAGIGTMTFXEPSSKKYGALGHVISDMDTKKPIVVDNGEIVRSTVTSIEKGTGGNPGEKLARFSSERKTIGDISRNSPFGIFGTLTEKLENHIADKPLPVALSNEVKEGPAEILTVVDHDKVEKFDIKIVSTTPQKFPATKGMVLKVTDERLLSKTGGIVQGMSGSPIIQNGKVIGAVTHVFVNDPTSGYGVHIEWMLSEAGIDLY

SEQ ID NO: 8054 - protein, 140 aa, Glycine max
  misc_feature (44)..(44): Xaa can be any naturally occurring amino acid
  misc_feature (79)..(79): Xaa can be any naturally occurring amino acid
  misc_feature (100)..(100): Xaa can be any naturally occurring amino acid
  Coding DNA Sequence Number=SeqID_3857
RTSVGLKYTHEDVYEQLHIYNILTVAPQYELDGSQIVVSVRLLXQLEQRCGGRSGTREVRARRSLSSPRCAAGGRRQLXARTHSHIVMTGRVVETMSYDXPRRVCVTNSNQALLDYTQGMRRMYARCDEHDPNVLCTLRG

SEQ ID NO: 8055 - protein, 388 aa, Glycine max
  misc_feature (184)..(184): Xaa can be any naturally occurring amino acid
  Coding DNA Sequence Number=SeqID_3859
  Gene Ontology: Mol. function=hydrolase activity; Cellular component =endoplasmic reticulum; Biological process=proteolysis
  Homolog annotation: Hit_ID=A7NT12; Match level="QueryCoverage=89%, HitCoverage=92%, E-value=1e-172, Identity=83%"; Hit description =Chromosome chr18 scaffold_1, whole genome shotgun sequence
  Pfam annotation: Domain name=Abhydrolase_1; Domain location=117-366; Score=60.5; E_value=5.8e-15; Accession=PF00561.10; Description =alphabeta hydrolase fold
  Pfam annotation: Domain name=Thioesterase; Domain location=91-368; Score=-44.5; E_value=0.05; Accession=PF00975.10; Description =Thioesterase domain
  Pfam module annotation: Pfam domain module=Abhydrolase_1::Thioesterase ; Domain location=117-366::91-368
MAEEITKNDVGVTSKTTRSSSRFWPRWIPTSTDHIIAAEKRLLSVVKTGYVQEHVNIGSGPPGSKVRWFRSSSNEPRFINTVTFDSKPHSPTLVMIHGYAASQGFFFRNFDALASRFRVIAVDQLGWGGSSRPDFTCKSTEETEAWFIDSFEEWRKAKNLSNFILLGHSFGGYVAAKYALKHPXEHVQHLILVGSAGFSSESDAKSEWITRFRATWKGAVLNHLWESNFTPQKLVRGLGPWGPNIVRKYTSARFGTHSTGEILTEEESTLLTDYVYHTLAAKASGELCLKYIFSFGAFARMPLLLSASEWKVPTTFMYGFQDWMNYQGAQEARKHMKVPCEIIRIPQGGHFAFIDNPTAFHSAVFYACRRFLTPDPDNESLPKGLTSA

SEQ ID NO: 8056 - protein, 78 aa, Glycine max
  Coding DNA Sequence Number=SeqID_3860
LEWLLAVHECQPSACVYIKKKTIGFVFSIYNNQQTCNIITLPQKKSPELPKGCILTKLTTNSMYINSMTNTNQYVLME

SEQ ID NO: 8057 - protein, 39 aa, Glycine max
  Coding DNA Sequence Number=SeqID_3862
LPRSDDRSFQSIAQLHDSTQPIKVNNSDIYVIYSPTRAS

SEQ ID NO: 8058 - protein, 137 aa, Glycine max
  misc_feature (64)..(64): Xaa can be any naturally occurring amino acid
  Coding DNA Sequence Number=SeqID_3864
SAPLIPPPFCAYRATAPRYCMLHCNYGAGLAPMRGTWSGRPVRGGHQVEYGAAARARSPHAHPXSHISPSPLLFCYVLLTRGQEDASVIEYRLVFAGHSLFTTCGTTPSPVPLDHKPHCLICCYLLDHARTTIRLDD

SEQ ID NO: 8059 - protein, 114 aa, Glycine max
  misc_feature (3)..(3): Xaa can be any naturally occurring amino acid
  misc_feature (57)..(57): Xaa can be any naturally occurring amino acid
  misc_feature (65)..(65): Xaa can be any naturally occurring amino acid
  Coding DNA Sequence Number=SeqID_3865
VDXRYRRPTRGVHTTHTLLACDSATLSYLWRRLRFYLCIRRAGQNRYRTQDAEDQPXVTPRKRPXVKRAIICSECTDIYLSPMPARAQRYRSASIVTLEHVRTRGRILSPLDVI

SEQ ID NO: 8060 - protein, 66 aa, Glycine max
  Coding DNA Sequence Number=SeqID_3867
GAVSLAVFALFAIVAADTRILPFHGVHAPHWPPWANLSMPVPSSKSPCPKGSLREKARHFSMSASA

SEQ ID NO: 8061 - protein, 150 aa, Glycine max
  misc_feature (53)..(53): Xaa can be any naturally occurring amino acid
  Coding DNA Sequence Number=SeqID_3869
  Gene Ontology: Mol. function=structural constituent of ribosome; Cellular component=ribonucleoprotein complex; Biological process =translation
  Homolog annotation: Hit_ID=Q4GXU8; Match level="QueryCoverage=86%, HitCoverage=48%, E-value=1e-65, Identity=94%"; Hit description =Ribosomal protein S3Ae
  Pfam annotation: Domain name=Ribosomal_S3Ae; Domain location=12-150; Score=236.3; E_value=6.7e-68; Accession=PF01015.8; Description =Ribosomal S3Ae family
MAVGKNKGLSKGGKKGVKKKIVDPFTRKDWYDVKAPSMFTTRQIGKTLVNRTXGTKIASEGLKHRVFEVSLADLQNDNDAERSFRKFRLIAEDVQGRNVLTNFHGMDLTTDKLRSMVKKWQILIEANVDVKTTDGYLLRVFCIGFTNKDH

SEQ ID NO: 8062 - protein, 109 aa, Glycine max
  misc_feature (81)..(81): Xaa can be any naturally occurring amino acid
  Coding DNA Sequence Number=SeqID_3870
CDARAPHNITVSGVRVPRTAHIIDITLVVPSVLRGRFVAAGYMILNDIIYTSTTRATRSFYTLVRCLSARGALYIKYTTYXTALSMICTCGAARNPCALYILLYMAYIY

SEQ ID NO: 8063 - protein, 144 aa, Glycine max
  misc_feature (95)..(95): Xaa can be any naturally occurring amino acid
  misc_feature (100)..(100): Xaa can be any naturally occurring amino acid
  misc_feature (103)..(103): Xaa can be any naturally occurring amino acid
  misc_feature (127)..(127): Xaa can be any naturally occurring amino acid
  misc_feature (136)..(136): Xaa can be any naturally occurring amino acid
  Coding DNA Sequence Number=SeqID_3872
  Gene Ontology: Mol. function=transcription factor activity; Cellular component=nucleus; Biological process=regulation of transcription from RNA polymerase II promoter
  Homolog annotation: Hit_ID=UPI00015B5EFD; Match level="QueryCoverage =100%, HitCoverage=100%, E-value=2e-73, Identity=86%"; Hit description=PREDICTED: similar to G10 protein
  Pfam annotation: Domain name=G10; Domain location=1-144; Score=363.6; E_value=3.3e-106; Accession=PF01125.8; Description=G10 protein
MPKVRRSKKSPPEGWELIEPTLEELEQKMREAETEPHEGKRKVESLWPIFKIHHQKSRYIYDLFYRRKAISRELYEYCLNENIADKNLIAKWKKXGYENXCCXRCIQARDTNFGTSCICRVPKAKLXEGRIVECIXCGCRGCSG

SEQ ID NO: 8064 - protein, 107 aa, Glycine max
  misc_feature (25)..(25): Xaa can be any naturally occurring amino acid
  misc_feature (41)..(41): Xaa can be any naturally occurring amino acid
  misc_feature (67)..(67): Xaa can be any naturally occurring amino acid
  misc_feature (87)..(87): Xaa can be any naturally occurring amino acid
  misc_feature (97)..(97): Xaa can be any naturally occurring amino acid
  Coding DNA Sequence Number=SeqID_3873
HNTREELGGHVGALHHNLSGLELNXLLCGFLQPKLYITIHXPVYRRASYSIDWYTAHQWCAHRAITXTCAPYLRGHGYHDIYISMIXKYILTNHPDXHLSASASYAR

SEQ ID NO: 8065 - protein, 129 aa, Glycine max
  Coding DNA Sequence Number=SeqID_3875
  Gene Ontology: Mol. function=structural constituent of ribosome; Cellular component=ribonucleoprotein complex; Biological process =translation
  Homolog annotation: Hit_ID=A9PH37; Match level="QueryCoverage=53%, HitCoverage=100%, E-value=2e-30, Identity=95%"; Hit description =Putative uncharacterized protein
  Pfam annotation: Domain name=Ribosomal_L38e; Domain location=62-129; Score=159.8; E_value=7.4e-45; Accession=PF01781.8; Description =Ribosomal L38e protein family
  Subcellular localization annotation: CTP_CleavageSite=23; ConfidenceScore=5.19e-01
MSFTLYEAMQVTRPPRPLFRPKRASPTLGNVFRLVVVIGCLLMKEVLTMVPDRAAVAQTTMPKQIHEIKDFLLTARRKDARSVKIKRSRDVVKFKVRCSKCLYTLCVFDPEKADKLKQSLPPGLSVQDL

SEQ ID NO: 8066 - protein, 141 aa, Glycine max
  misc_feature (20)..(20): Xaa can be any naturally occurring amino acid
  misc_feature (133)..(133): Xaa can be any naturally occurring amino acid
  Coding DNA Sequence Number=SeqID_3876
  Gene Ontology: Mol. function=oxidoreductase activity; Cellular component=chloroplast; Biological process=electron transport
  Homolog annotation: Hit_ID=A7QNI7; Match level="QueryCoverage=99%, HitCoverage=28%, E-value=7e-44, Identity=65%"; Hit description =Chromosome chr2 scaffold_132, whole genome shotgun sequence
  Pfam annotation: Domain name=Pyr_redox_2; Domain location=3-129; Score=-42.5; E_value=0.032; Accession=PF07992.4; Description =Pyridine nucleotide-disulphide oxidoreduc
AEAAAAGRGWKLDTALICPXDHLVQRRGTPLLARRSDELYTKSVVEILLGAFITNSYTGSNAHATAVKLVHGSLVEADTGIIGIGAKPAVTTFERVALNTEVVGIQVEGQFRTSTPGIFAVGDVASFPLKTYXRISLVEHV

SEQ ID NO: 8067 - protein, 82 aa, Glycine max
  Coding DNA Sequence Number=SeqID_3877
SIIVRMSWMGPASHSGIDHALGKETSLRIEGINLKHHEQNVGHLTGLHISHQLHQHMKWKKIERAQSKEKEVGLHSTEAGLS

SEQ ID NO: 8068 - protein, 100 aa, Glycine max
  Coding DNA Sequence Number=SeqID_3879
HSCSCFPTSNNLTIFEKLGFLDISIAFCLLELLVHIIQLKTEFVNSISFGKSFFIFIIIKLRRLSFFSSFGSYFFTINSIRIFFHLNRTASLSISYLFFF

SEQ ID NO: 8069 - protein, 374 aa, Glycine max
  Coding DNA Sequence Number=SeqID_3881
  Gene Ontology: Mol. function=protein serine/threonine kinase activity; Cellular component=endoplasmic reticulum membrane; Biological process=protein amino acid phosphorylation
  Homolog annotation: Hit_ID=Q84X95; Match level="QueryCoverage=85%, HitCoverage=99%, E-value=1e-152, Identity=84%"; Hit description =Putative 3-ketoacyl-CoA reductase 2
  Pfam annotation: Domain name=adh_short; Domain location=108-281; Score=58.5; E_value=2.3e-14; Accession=PF00106.15; Description=short chain dehydrogenase
MTEGSPPESPLQGEQKGGNPLWGGQRGSGRKEGRRSLAPKCGSLSSVIVELKISKTMDLCTYFKSQPSWLLLLFALGSLQLLKFTLSLLNSLYIYFLRPAKNLRRYGSWAIITGPTDGIGKAFAFQLARKGLNLVLVARNPDKLRDVSESIRSKHSNVEIKTVVMDFSGDIDDGVRRIKETIEGLEVGILINNAGMSYPYAKYFHEVDEELLGNLLKINVEGTTKVTQAVLGNMLKRKRGAIVNMGSGAAALIPSYPFYSVYAGAKTYVDQFTRCLHVEYKKSGIDVQCQVPLYVATKMTSIRRASFLVASPEGYAKAALRFVGYEARCTPYWPHALMGYVVSALPESVFESFNIKRCLQIRKKGMLKDSRKKE

SEQ ID NO: 8070 - protein, 164 aa, Glycine max
  misc_feature (7)..(7): Xaa can be any naturally occurring amino acid
  misc_feature (89)..(89): Xaa can be any naturally occurring amino acid
  misc_feature (107)..(107): Xaa can be any naturally occurring amino acid
  Coding DNA Sequence Number=SeqID_3882
  Gene Ontology: Mol. function=metal ion binding; Cellular component =plasma membrane; Biological process=cytokinin metabolic process
  Homolog annotation: Hit_ID=A9PF57; Match level="QueryCoverage=78%, HitCoverage=34%, E-value=2e-30, Identity=53%"; Hit description =Putative uncharacterized protein
FGTSTKXTSENKDASKKEAAFALAALMEIPIQYRITQNLQIANENPTSHQRKRPLPPPKEVIDRDNAVLAVPHVPNFESVEPSAPAAVXSVCPICLTNPKDMAFGCXVHTTCKECGVDIYLPCPYVARQGNLQLPLLLHFDFGFGDFSFCLTLRFIYIACYCLV

SEQ ID NO: 8071 - protein, 98 aa, Glycine max
  Coding DNA Sequence Number=SeqID_3883
  Subcellular localization annotation: CTP_CleavageSite=17; ConfidenceScore=5.13e-01
HPNFIANYCHILCSSACSQAASGQTPCCFSLSIHLSRPSPLVNRNLGISSLYLLGRHQPYGPDEMSIPQYSGCTPDRGTSPRVRPSAADRVRCEDKQG

SEQ ID NO: 8072 - protein, 269 aa, Glycine max
  misc_feature (165)..(165): Xaa can be any naturally occurring amino acid
  misc_feature (182)..(182): Xaa can be any naturally occurring amino acid
  misc_feature (237)..(237): Xaa can be any naturally occurring amino acid
  Coding DNA Sequence Number=SeqID_3885
  Subcellular localization annotation: CTP_CleavageSite=77; ConfidenceScore=5.24e-01
SHTSQDPLSHSRNPFLLFLLSMVTLAYHSSPSIPLSLSTPTIASPIYNPPPPLFFFLLICLYIFVSSYLIYTVIHIPTSLLSSFHLFIHFFFILSPPSLPSLFPLSLYIHLSSSPHQYPPSHPNHSLPPSMRSAHPVLNHIYYQRSPFTLVFSPYHHTSFFLLAXTCYTNYGLLTLVPIYSXVTFIRYLLYLSSHTSTYLIYILIVFLHIPLTHLPYLRIPSFSHYLIHTPLPINHXISHPPSISTSISISSSPHARSYHLPTIYYTHT

SEQ ID NO: 8073 - protein, 76 aa, Glycine max
  Coding DNA Sequence Number=SeqID_3887
  Subcellular localization annotation: CTP_CleavageSite=17; ConfidenceScore=5.08e-01
KNSMVSGAGSQLIFGCLSPSVGGRPELCIYVITFGVFFGYFVSCPMFFFFFFFLFLIETNNTSIRLNSKNHCKILK

SEQ ID NO: 8074 - protein, 132 aa, Glycine max
  misc_feature (60)..(60): Xaa can be any naturally occurring amino acid
  misc_feature (105)..(105): Xaa can be any naturally occurring amino acid
  Coding DNA Sequence Number=SeqID_3889
  Homolog annotation: Hit_ID=Q6AV43; Match level="QueryCoverage=58%, HitCoverage=36%, E-value=2e-19, Identity=67%"; Hit description =Putative uncharacterized protein OSJNBb0101N11.18
YIFPTLLVDGGPFGPTFQRFPLCGGHLGILALWPTHFVFINRRPLPCLLLPRGRISDVSXFQAKKLFLWVSVSGIVALSEEGTLDLQVDFVSEEFSASLFDRVPXCGDSHGAQLRGVAGFIQELDLLPVAEA

SEQ ID NO: 8075 - protein, 177 aa, Glycine max
  misc_feature (117)..(117): Xaa can be any naturally occurring amino acid
  Coding DNA Sequence Number=SeqID_3890
  Gene Ontology: Mol. function=ribonuclease H activity; Cellular component=nucleus; Biological process=regulation of transcription, DNA-dependent
  Homolog annotation: Hit_ID=Q3E8M5; Match level="QueryCoverage=86%, HitCoverage=24%, E-value=6e-24, Identity=41%"; Hit description =Uncharacterized protein At5g36905.1
SQVVSKKQIMIKWMPPDQRWYKLNSDGLKVGDSGGTGYGGLIRDENGRWVVGFVRNLGIASAYVAKSWGVLEGVTLARQRGIDFLEINVDSKVVADGLKGDKQGCLEGWTIVGAIRXMVSGLEQVKISHIYREANQCADLHVNHARTQRGGFDDFGASYRAVDPSCCLWILVEKLLM

SEQ ID NO: 8076 - protein, 90 aa, Glycine max
  misc_feature (61)..(61): Xaa can be any naturally occurring amino acid
  Coding DNA Sequence Number=SeqID_3891
QRLSCLYYYRRLFYSRQCSIISMLASLRATLVTINEASTTSNQHTYATRQTSRRITRIYLXQHHITRHYHTSDHCTGATRIQSLSPSSSP

SEQ ID NO: 8077 - protein, 151 aa, Glycine max
  Coding DNA Sequence Number=SeqID_3893
KFRNWKIVVRVLMMGKKKPQKTKELSVAIAEASSTIDEKEQHEVQVQPQPQAPRKRCTPPKRGGELEQSQQQNGQLIQQGRVQGTQSSMEKPTTYQEQGTSSLSLTLTTQPEDLLLSTADSSTTHVRPTTHSHQPLLIILSPLLPSLPPFP

SEQ ID NO: 8078 - protein, 107 aa, Glycine max
  misc_feature (58)..(58): Xaa can be any naturally occurring amino acid
  Coding DNA Sequence Number=SeqID_1548
  Subcellular localization annotation: CTP_CleavageSite=19; ConfidenceScore=5.18e-01
LAQLSASSLQTAQQPRCISASYTSMYLDRNVNSVPYAQHLTYCVRPSRARSLRMTYIXYASYARDSMYFCLIYIGVIYLHRSPGAPPPSQSYTTPHAAHAAASVHGE

SEQ ID NO: 8079 - protein, 103 aa, Glycine max
  misc_feature (33)..(33): Xaa can be any naturally occurring amino acid
  misc_feature (42)..(43): Xaa can be any naturally occurring amino acid
  misc_feature (60)..(60): Xaa can be any naturally occurring amino acid
  misc_feature (76)..(77): Xaa can be any naturally occurring amino acid
  misc_feature (100)..(100): Xaa can be any naturally occurring amino acid
  Coding DNA Sequence Number=SeqID_145
LYLSRNLPDTHAHISISTHDSDHILDSSLQTRXRERHIHDEXXKQTPHTMSEDSHGVWSXHLIEYTLPHTLTLEEXXEAVRTSSKCPREPHEPRIHRAVXVLK

SEQ ID NO: 8080 - protein, 185 aa, Glycine max
  misc_feature (12)..(12): Xaa can be any naturally occurring amino acid
  misc_feature (48)..(48): Xaa can be any naturally occurring amino acid
  misc_feature (95)..(95): Xaa can be any naturally occurring amino acid
  misc_feature (100)..(100): Xaa can be any naturally occurring amino acid
  misc_feature (125)..(125): Xaa can be any naturally occurring amino acid
  Coding DNA Sequence Number=SeqID_147
  Gene Ontology: Mol. function=manganese ion binding; Cellular component=oxygen evolving complex; Biological process=photosystem II stabilization
  Homolog annotation: Hit_ID=P14226; Match level="QueryCoverage=100%, HitCoverage=55%, E-value=4e-40, Identity=50%"; Hit description =Oxygen-evolving enhancer protein 1, chloroplast precursor
  Pfam annotation: Domain name=MSP; Domain location=87-185; Score= -112.5; E_value=0.0015; Accession=PF01716.9; Description=Manganese -stabilising protein  photosystem II polypeptide
STYMRPTQVEQXNPVQHNYTKYIHKAFDFESDEAQKDTSSLHADLKDXEHKRVYANKIARYTLATLCPRCLWEQDAEGVPNKLSFDEIQSKNYLXVNETXTVYQCPTIDGGLNSLDLKPKKYTDXKVFLDPTSFTCKAKRGAKNATIEFQNTELMTRLTYTLDDIDVPYEESSDGTVKCEENDGI

SEQ ID NO: 8081 - protein, 92 aa, Glycine max; identical to SEQ ID NO: 7527
  misc_feature (11)..(11): Xaa can be any naturally occurring amino acid
  misc_feature (17)..(17): Xaa can be any naturally occurring amino acid
  misc_feature (27)..(27): Xaa can be any naturally occurring amino acid
  misc_feature (56)..(56): Xaa can be any naturally occurring amino acid
  misc_feature (78)..(78): Xaa can be any naturally occurring amino acid
  Coding DNA Sequence Number=SeqID_148

SEQ ID NO: 8082 - protein, 189 aa, Glycine max; identical to SEQ ID NO: 7529
  misc_feature (27)..(27): Xaa can be any naturally occurring amino acid
  misc_feature (50)..(50): Xaa can be any naturally occurring amino acid
  Coding DNA Sequence Number=SeqID_150

SEQ ID NO: 8083 - protein, 122 aa, Glycine max; identical to SEQ ID NO: 7530
  misc_feature (20)..(20): Xaa can be any naturally occurring amino acid
  misc_feature (24)..(24): Xaa can be any naturally occurring amino acid
  misc_feature (27)..(27): Xaa can be any naturally occurring amino acid
  misc_feature (69)..(69): Xaa can be any naturally occurring amino acid
  misc_feature (73)..(73): Xaa can be any naturally occurring amino acid
  Coding DNA Sequence Number=SeqID_152
  Subcellular localization annotation: CTP_CleavageSite=37; ConfidenceScore=5.49e-01

SEQ ID NO: 8084 - protein, 99 aa, Glycine max
  Coding DNA Sequence Number=SeqID_154
PWNNYPGRVLIKNLFRQGQRARCPLFLKGNLSIVGAQPNLGINCPQASLERNSTWMLPGRDIINLSHPSPSGFYQLPFVAAGELYLEGIFHPSPGSFLS

SEQ ID NO: 8085 - protein, 167 aa, Glycine max
  misc_feature (31)..(31): Xaa can be any naturally occurring amino acid
  misc_feature (36)..(36): Xaa can be any naturally occurring amino acid
  misc_feature (102)..(102): Xaa can be any naturally occurring amino acid
  misc_feature (112)..(112): Xaa can be any naturally occurring amino acid
  misc_feature (136)..(138): Xaa can be any naturally occurring amino acid
  misc_feature (146)..(146): Xaa can be any naturally occurring amino acid
  misc_feature (148)..(149): Xaa can be any naturally occurring amino acid
  misc_feature (154)..(154): Xaa can be any naturally occurring amino acid
  misc_feature (157)..(157): Xaa can be any naturally occurring amino acid
  Coding DNA Sequence Number=SeqID_156
  Subcellular localization annotation: CTP_CleavageSite=12; ConfidenceScore=5.08e-01
KHTTTITATRPSVAAPTTYASRSITTHDTNXPPASXLGHTPRHELNKLHQLLLFESTLCQFLVCLSSLCDDPLLPRLFLLTIHHAPIPAVETHTTPVLVCGXAPRLTPHTGXLAHPTAITIEEAGRVTRAHRPNPXXXLFSLIRCXLXXGRRRXACXGLRRALLSRE

SEQ ID NO: 8086 - protein, 92 aa, Glycine max
  misc_feature (4)..(4): Xaa can be any naturally occurring amino acid
  misc_feature (9)..(9): Xaa can be any naturally occurring amino acid
  misc_feature (12)..(12): Xaa can be any naturally occurring amino acid
  misc_feature (48)..(48): Xaa can be any naturally occurring amino acid
  misc_feature (70)..(70): Xaa can be any naturally occurring amino acid
  misc_feature (76)..(76): Xaa can be any naturally occurring amino acid
  Coding DNA Sequence Number=SeqID_3895
FGGXAGDSXAPXHIKLTPHIRWRLYLYVCVSVCTTEFLITSTHDSYIXGGCPRAARHRHAHATRGRRPLXPIRGEXHAKTGRGQYKDCKRYI

SEQ ID NO: 8087 - protein, 105 aa, Glycine max
  misc_feature (29)..(29): Xaa can be any naturally occurring amino acid
  misc_feature (56)..(56): Xaa can be any naturally occurring amino acid
  misc_feature (69)..(69): Xaa can be any naturally occurring amino acid
  misc_feature (86)..(86): Xaa can be any naturally occurring amino acid
  Coding DNA Sequence Number=SeqID_3897
EERKRWECFMSEEYFDYVSVIMSGAFARXLDDGRLWPEIGEEREERRPLRGEYTPXSPRGTSGAIRNSXWEETGRDAPITPGPAFXPRALADSTNCSWPRTRFFR

SEQ ID NO: 8088 - protein, 107 aa, Glycine max; identical to SEQ ID NO: 6237
  misc_feature (7)..(7): Xaa can be any naturally occurring amino acid
  misc_feature (92)..(92): Xaa can be any naturally occurring amino acid
  Coding DNA Sequence Number=SeqID_3899

SEQ ID NO: 8089 - protein, 96 aa, Glycine max
  Coding DNA Sequence Number=SeqID_3901
SGKETGSDSLSHTVDSSHLDNITTTYLTSYSGAGSNLITVISGGNLQELAQILRLNQTKLKMTEGLEQSGNRVSEENLPGSNSTVPVETEKEDAAA

SEQ ID NO: 8090 - protein, 114 aa, Glycine max
  misc_feature (72)..(72): Xaa can be any naturally occurring amino acid
  Coding DNA Sequence Number=SeqID_3903
LIRNNKLNCITLLLSESTARPSLPSLLFASIHLNIKSGDAANPTHDRSANPSFSNLKTENLSPNTRETTLHXAPFTFNQSRREQIDYTSSRHNTLSIIHTQPEFIQTPRPTTSP

SEQ ID NO: 8091 - protein, 118 aa, Glycine max
  misc_feature (6)..(10): Xaa can be any naturally occurring amino acid
  misc_feature (12)..(22): Xaa can be any naturally occurring amino acid
  misc_feature (26)..(26): Xaa can be any naturally occurring amino acid
  misc_feature (28)..(29): Xaa can be any naturally occurring amino acid
  misc_feature (31)..(31): Xaa can be any naturally occurring amino acid
  misc_feature (35)..(35): Xaa can be any naturally occurring amino acid
  misc_feature (44)..(46): Xaa can be any naturally occurring amino acid
  misc_feature (61)..(61): Xaa can be any naturally occurring amino acid
  misc_feature (63)..(68): Xaa can be any naturally occurring amino acid
  misc_feature (73)..(73): Xaa can be any naturally occurring amino acid
  misc_feature (82)..(82): Xaa can be any naturally occurring amino acid
  misc_feature (86)..(86): Xaa can be any naturally occurring amino acid
  misc_feature (88)..(89): Xaa can be any naturally occurring amino acid
  misc_feature (94)..(99): Xaa can be any naturally occurring amino acid
  misc_feature (101)..(101): Xaa can be any naturally occurring amino acid
  misc_feature (104)..(106): Xaa can be any naturally occurring amino acid
  misc_feature (111)..(112): Xaa can be any naturally occurring amino acid
  Coding DNA Sequence Number=SeqID_3905
  Subcellular localization annotation: CTP_CleavageSite=69; ConfidenceScore=5.30e-01
GGGGPXXXXXWXXXXXXXXXXXVFLXLXXPXLSPXSVLALSRAXXXRSLLSLLLAVSRPTXHXXXXXXRATTXGAQAHRRLXCTYXTXXFSSVXXXXXXSXSAXXXLTTYXXILCDYS

SEQ ID NO: 8092 - protein, 133 aa, Glycine max
  misc_feature (58)..(58): Xaa can be any naturally occurring amino acid
  misc_feature (98)..(99): Xaa can be any naturally occurring amino acid
  Coding DNA Sequence Number=SeqID_3907
ESGDRIECNRDSRHDSRLSRPMLLTVPSDLTRGSSRDLASSHIPIQCRARPLTAPLPXPTACAQLMSDHSSIIAFVLVSFLSNDSLCISSITSHPLGXXRATTTRTLTDVSALWVQYIRDVVGGVRYSSHSTR

SEQ ID NO: 8093 - protein, 115 aa, Glycine max
  misc_feature (50)..(50): Xaa can be any naturally occurring amino acid
  misc_feature (90)..(91): Xaa can be any naturally occurring amino acid
  misc_feature (93)..(94): Xaa can be any naturally occurring amino acid
  Coding DNA Sequence Number=SeqID_3909
TTNMANEYHRKREFMGDYATMKKLLLLVMHGSDSDEYHQMLIPFSWSDKXSCYGSRGLAQSSLGVKDGCVQQMQAHTRVLLEGWDRQLQXXWXXNTTTTPAYLRLLRTSGYTGNS

SEQ ID NO: 8094 - protein, 135 aa, Glycine max
  Coding DNA Sequence Number=SeqID_3911
  Gene Ontology: Mol. function=phosphogluconate dehydrogenase (decarboxylating) activity; Cellular component=mitochondrion; Biological process=valine metabolic process
  Homolog annotation: Hit_ID=Q9SUC0; Match level="QueryCoverage=65%, HitCoverage=25%, E-value=4e-14, Identity=45%"; Hit description =Probable 3-hydroxyisobutyrate dehydrogenase, mitochondrial precursor
SFANFCLIFRRCGFALVSYFIRTISSSEDAPRQLRTVIFISPVQSWWQTRNTSIKAGCRLAVHDMNSDVLEMFSQMGVPTKKTPYEVSEASDVVITMLPNSAHVSMAISSKRHSPTCESITSFVASISFIVLQQF

SEQ ID NO: 8095 - protein, 93 aa, Glycine max
  Coding DNA Sequence Number=SeqID_3912
  Subcellular localization annotation: CTP_CleavageSite=50; ConfidenceScore=5.35e-01
SFYSHSHLSHTPPPFIHQPPAYILSCTFSNLISALCARGVYVCRRLTLLRWQMIASLLFCKKSRTFIIEYALSLIHTIPTTRPYTILLVSATA

SEQ ID NO: 8096 - protein, 103 aa, Glycine max
  Coding DNA Sequence Number=SeqID_3481
SLTTLSNSTYQVYTSPLLLNNKKIYPDSRRLIDALIILSPPRPLLNFPSPSLSLLYIRLTIRNCEYQRSIFPLLLIYLQLTVLHIKITNHKVDEMKIYRMQYN

SEQ ID NO: 8097 - protein, 284 aa, Glycine max
  Coding DNA Sequence Number=SeqID_3483
RRRTHSSNIGEMTHFRPICLMPLSVSNNADRIVSVPPIRQKNAKKDILKIYKPIKTKFRKKLTSVRRRSAFVIFQAIKPLLNAGKLLTGGDATKQATISKPLLAKVNNKTEATQDTSDMFETGDSPEELRNDHQTHTGRSQKNTKTVQTRKTSAKCCDSTKTTRSNREKMLQEKEDFQLAKMLQECIGTTDAPSRYSLRSRNKSSVSSLSSTSSSQELFHSKGYAVGATPKFKKTMPFADSTTTTKDLVGRSQRNNGNTNDKFSDFSFQKLTRSRRIAMTMSGV

SEQ ID NO: 8098 - protein, 167 aa, Glycine max
  Coding DNA Sequence Number=SeqID_3485
  Subcellular localization annotation: CTP_CleavageSite=39; ConfidenceScore=5.08e-01
RAHTPPALPPSGNIDLPTLVPPPIPIRLPAPPAPITFSTAMYTPTIRHPSIARCIWEPTPNTQTHTPAYGKHTVETADRRRSSRSPWAEKIQTPRPQESRITLLLPFPLLPFVGKTPLHDANNLSLLKNPHVTVPTLQILHLVLVAPPQFPLFNALGARALLSSSFP

SEQ ID NO: 8099 - protein, 116 aa, Glycine max
  misc_feature (1)..(1): Xaa can be any naturally occurring amino acid
  misc_feature (81)..(81): Xaa can be any naturally occurring amino acid
  Coding DNA Sequence Number=SeqID_3487
XRSWSIIVVPTSSDHTLHARIELASQRIRRMMHTRTQEEINDDARRGSMGRRGMWVSEMRIDLSQCCEETPSGSRYTIRYXPRGLVSVHHAIFPDAPPPPTLARGVRCRLTIYLSV

SEQ ID NO: 8100 - protein, 172 aa, Glycine max
  Coding DNA Sequence Number=SeqID_3489
  Gene Ontology: Mol. function=binding; Cellular component=Golgi apparatus
  Homolog annotation: Hit_ID=O65551; Match level="QueryCoverage=100%, HitCoverage=5%, E-value=1e-78, Identity=85%"; Hit description =Putative uncharacterized protein F6I18.100
  Pfam annotation: Domain name=DUF1068; Domain location=1-173; Score =148.9; E_value=1.4e-41; Accession=PF06364.3; Description=Protein of unknown function (DUF1068)
MARRSGDCMRCLVIFAVVSALVVCGPALYWRFNKGFVGSTRKSSVCPPCVCDCPPPVSLLEIAPGLANLTVTDCGGDDPELKQEMEKQFVDLLTEELKLQEAVADEHSRHMNVTLLEAKRVASQYQKEAEKCNAATEICESARERAEALLIKERKITALWEKRARQSGWEGE

SEQ ID NO: 8101 - protein, 84 aa, Glycine max
  misc_feature (24)..(24): Xaa can be any naturally occurring amino acid
  Coding DNA Sequence Number=SeqID_3490
  Gene Ontology: Mol. function=protein phosphatase type 2A regulator activity; Cellular component=protein phosphatase type 2A complex; Biological process=signal transduction
  Homolog annotation: Hit_ID=A5BED9; Match level="QueryCoverage=92%, HitCoverage=15%, E-value=9e-20, Identity=64%"; Hit description =Putative uncharacterized protein
VVLPIIFEALEKNIHSQAVNSLVXGLTLNVRKMFVEMVAELFDECQRQFDEREAIARALEVQRELNWKRLAEAASQNRVDMVAP

SEQ ID NO: 8102 - protein, 121 aa, Glycine max
  Coding DNA Sequence Number=SeqID_3491
  Gene Ontology: Mol. function=phosphopantetheine binding; Cellular component=mitochondrial respiratory chain; Biological process=fatty acid biosynthetic process
  Homolog annotation: Hit_ID=O80800; Match level="QueryCoverage=99%, HitCoverage=99%, E-value=2e-43, Identity=75%"; Hit description=Acyl carrier protein
  Pfam annotation: Domain name=PP-binding; Domain location=47-114; Score=66.3; E_value=1.1e-16; Accession=PF00550.15; Description =Phosphopantetheine attachment site
  Subcellular localization annotation: CTP_CleavageSite=12; ConfidenceScore=5.07e-01
MAARNALLRYLRVNVNPSPALPSSSVLLRRFSEEVRGSFLDKSDVTDRVISVVKNFQRVDPSKVTPKAHFINDLGLDSLDNVEVVMALEEEFGFEIPDNDADKIQSVDLAVDFIASHPQAT

SEQ ID NO: 8103 - protein, 138 aa, Glycine max; identical to SEQ ID NO: 7048
  misc_feature (25)..(25): Xaa can be any naturally occurring amino acid
  misc_feature (73)..(73): Xaa can be any naturally occurring amino acid
  misc_feature (137)..(137): Xaa can be any naturally occurring amino acid
  Coding DNA Sequence Number=SeqID_3492

SEQ ID NO: 8104 - protein, 145 aa, Glycine max
  misc_feature (1)..(1): Xaa can be any naturally occurring amino acid
  misc_feature (4)..(4): Xaa can be any naturally occurring amino acid
  misc_feature (38)..(38): Xaa can be any naturally occurring amino acid
  misc_feature (46)..(46): Xaa can be any naturally occurring amino acid
  misc_feature (65)..(65): Xaa can be any naturally occurring amino acid
  misc_feature (87)..(87): Xaa can be any naturally occurring amino acid
  misc_feature (141)..(141): Xaa can be any naturally occurring amino acid
  Coding DNA Sequence Number=SeqID_3493
XGDXGVVYQYSYSITDYLHLPSSLSFHLLYLMFLYPGXFLCSVLTXLCSACLLLFSTRPISTLYXESLYHAATCIGLQLTIARHSHXMSRSTLCLYSTDSFDCLISYTLYIYQLHARINYRPIMHPSLTSHTPHTHLHIIXSLSL

SEQ ID NO: 8105 - protein, 86 aa, Glycine max
  Coding DNA Sequence Number=SeqID_3495
PTIEEATSLYPAPSRRQKRMSPRSGQRGGERRGEGDGSFRSKKMDEKNLLLKFAQRVLDRGWPEEEDDGEHRHLRISNPLLPPRLS

SEQ ID NO: 8106 - protein, 140 aa, Glycine max
  misc_feature (3)..(3): Xaa can be any naturally occurring amino acid
  misc_feature (15)..(15): Xaa can be any naturally occurring amino acid
  misc_feature (17)..(17): Xaa can be any naturally occurring amino acid
  misc_feature (23)..(23): Xaa can be any naturally occurring amino acid
  misc_feature (60)..(60): Xaa can be any naturally occurring amino acid
  misc_feature (96)..(96): Xaa can be any naturally occurring amino acid
  misc_feature (99)..(99): Xaa can be any naturally occurring amino acid
  misc_feature (117)..(117): Xaa can be any naturally occurring amino acid
  misc_feature (119)..(119): Xaa can be any naturally occurring amino acid
  misc_feature (123)..(123): Xaa can be any naturally occurring amino acid
  misc_feature (131)..(131): Xaa can be any naturally occurring amino acid
  misc_feature (140)..(140): Xaa can be any naturally occurring amino acid
  Coding DNA Sequence Number=SeqID_3497
  Subcellular localization annotation: CTP_CleavageSite=91; ConfidenceScore=5.09e-01
HGXCISSSIISIYLXYXYIVLSXFVLVCSTSYIDSIFTVSVSLLDFVQSSPLRFVSCMCXRLRLARPTPLLACATLLFCCCLLIDSLRPTSADEVXRLXSRHSVTYVVQAQINHMLXRXSHAXLRTQSPAXATSAVLYHX

SEQ ID NO: 8107 - protein, 153 aa, Glycine max
  misc_feature (13)..(13): Xaa can be any naturally occurring amino acid
  misc_feature (22)..(22): Xaa can be any naturally occurring amino acid
  misc_feature (55)..(55): Xaa can be any naturally occurring amino acid
  misc_feature (62)..(62): Xaa can be any naturally occurring amino acid
  misc_feature (73)..(73): Xaa can be any naturally occurring amino acid
  misc_feature (109)..(109): Xaa can be any naturally occurring amino acid
  misc_feature (113)..(113): Xaa can be any naturally occurring amino acid
  misc_feature (119)..(121): Xaa can be any naturally occurring amino acid
  misc_feature (129)..(129): Xaa can be any naturally occurring amino acid
  misc_feature (140)..(140): Xaa can be any naturally occurring amino acid
  Coding DNA Sequence Number=SeqID_3499
RVRAARGAVRCTXPVSWCGVGXHCDGRDILLSADSLCCCIIIFGLRGARRQTSEXAVASSLXTHACRSICTVXYLIRTDVYRMPRADTPVRRALYRMSMEACAGWRCAXTSHXQQQTHXXXRAVTHTDXRCALRGLCHVXDCLTVCSHASRER

SEQ ID NO: 8108 - protein, 191 aa, Glycine max
  Coding DNA Sequence Number=SeqID_3501
  Pfam annotation: Domain name=NUDIX; Domain location=6-137; Score=8.9; E_value=0.019; Accession=PF00293.18; Description=NUDIX domain
IMGRAYVDTTVIVIKRAENGESQFLFVEKKQWPKLPVWELPSEEVIMGEKIEDAAKRAVYKQANVEIKLEGVFTLRHTSQMLGSVRAIIVASPIDPNTIKTTKNGEPLEVKWVSLFELDSLPHFYVEEVSYIRQIAAGAQIHPLSVITESEYSLGRPTKFLSMLTSPWWYATLGFVIGIIARNAIKISITS

SEQ ID NO: 8109 - protein, 90 aa, Glycine max
  Coding DNA Sequence Number=SeqID_3503
KSIRKKKKINSTAKPTPDFLTVTDKSDFLGFATEALSTAVKCMHPHQHVRVSAHTGGAGFPPVRLGGRVPDRCETHGFRILATFETSRRR

SEQ ID NO: 8110 - protein, 115 aa, Glycine max
  misc_feature (42)..(42): Xaa can be any naturally occurring amino acid
  Coding DNA Sequence Number=SeqID_3505
  Homolog annotation: Hit_ID=A5C9A3; Match level="QueryCoverage=93%, HitCoverage=24%, E-value=1e-36, Identity=69%"; Hit description =Putative uncharacterized protein
TNALHAPTFSTSTAKRENSPREMTRVQTPNLPGLSDDLAVTXMIRVPRIEHRKLHLVYKRWRHLLSEDFFYSLMKSLGMAEEWLYVIKADRAGRISVHAFDPIYQLWQPLTPVPG

SEQ ID NO: 8111 - protein, 145 aa, Glycine max
  Coding DNA Sequence Number=SeqID_3506
  Subcellular localization annotation: CTP_CleavageSite=72; ConfidenceScore=5.27e-01
NPKKKKKKKKKKKKKKKKKKKKKKKKKKKKKKKKKKKFPGPGGPPNFKGGPPRGGPPFLAPLGGGKFRFVLKGGKRGSGGKMFSPPNSPKKKGRKEKGETRGGQKGGQTPFKGGGAPGPFPGGKTGGNPAYREPAPGGEGAMWGG

SEQ ID NO: 8112 - protein, 133 aa, Glycine max
  misc_feature (27)..(27): Xaa can be any naturally occurring amino acid
  misc_feature (46)..(46): Xaa can be any naturally occurring amino acid
  misc_feature (93)..(93): Xaa can be any naturally occurring amino acid
  misc_feature (115)..(115): Xaa can be any naturally occurring amino acid
  Coding DNA Sequence Number=SeqID_3508
CATRVCRGVLRSIRSLCAIPSVHSYCXTFRLSLHQCHDYIRCLRIXVCIFSLRDHIFISLLCGRYIRHIPVRRTRAAACVYSYTMTQQYVVWXRYASYSMQQVPRLSYYQHGVSXRTIPRPVCVQQYSGGRRT

SEQ ID NO: 8113 - protein, 156 aa, Glycine max
  misc_feature (35)..(35): Xaa can be any naturally occurring amino acid
  misc_feature (111)..(111): Xaa can be any naturally occurring amino acid
  misc_feature (116)..(116): Xaa can be any naturally occurring amino acid
  misc_feature (131)..(131): Xaa can be any naturally occurring amino acid
  Coding DNA Sequence Number=SeqID_3510
  Gene Ontology: Biological process=regulation of signal transduction
  Homolog annotation: Hit_ID=A7QF26; Match level="QueryCoverage=88%, HitCoverage=34%, E-value=8e-42, Identity=59%"; Hit description =Chromosome chr16 scaffold_86, whole genome shotgun sequence
ALTHLHHLSYHFQNSIHTPITCATFAQDVLEGRTXASQEHNHKHQPLIFRPTSLINRNITTEREKMAAQVFQPSHKMPTMSIEEARLKEMEIINKWQEKNVKLIKEVNSSXHNDRXSKLKQDDNNENDDTXQDKTRAWDDWENDNPRWAGDHTTTP

SEQ ID NO: 8114 - protein, 139 aa, Glycine max
  misc_feature (79)..(79): Xaa can be any naturally occurring amino acid
  misc_feature (101)..(101): Xaa can be any naturally occurring amino acid
  misc_feature (121)..(121): Xaa can be any naturally occurring amino acid
  Coding DNA Sequence Number=SeqID_3511
  Gene Ontology: Mol. function=hydrolase activity, acting on glycosyl bonds; Biological process=cell wall organization and biogenesis
  Homolog annotation: Hit_ID=Q84LI7; Match level="QueryCoverage=96%, HitCoverage=28%, E-value=1e-40, Identity=62%"; Hit description =Polygalacturonase-like protein
IIYLHGEFRWHQFHRKKLKCTWPYLIESIFSNNIQISNLTVLNSTLWNVHTVYSIYSFVQGITILVSVTSSTTDGINPXSCSYVIIKDCYIISGDVCLAVXVVWDDFPIKFCCATQLLMIXRLTCISPYSAPIALGSEM

SEQ ID NO: 8115 - protein, 141 aa, Glycine max
  Coding DNA Sequence Number=SeqID_3512
ILTSSLTVNLSLNIMENFEDSEFFNAIASSLATAQRDFDEYAEHFDDEPEQEDLGDFLMNHNLGDEEPLTPEEKEDILHGLKRLPPQYLKGMWNVVTGLIQTPEDEEQSPTLKLRQLDSYLKRKTNIIFQEEQPGQQDDDE

SEQ ID NO: 8116 - protein, 93 aa, Glycine max
  misc_feature (18)..(18): Xaa can be any naturally occurring amino acid
  misc_feature (43)..(45): Xaa can be any naturally occurring amino acid
  misc_feature (59)..(59): Xaa can be any naturally occurring amino acid
  Coding DNA Sequence Number=SeqID_3514
  Homolog annotation: Hit_ID=A7QSN0; Match level="QueryCoverage=100%, HitCoverage=31%, E-value=7e-28, Identity=71%"; Hit description =Chromosome undetermined scaffold_161, whole genome shotgun sequence
LNQMRAAVCICDMVTVAXTVESLVVPELDKKSFSPDPGNFEDXXXARHFIDSLQDEVRXVKRVPKRISRKSEYSTLKMPPVSWSNEKYYLEQV

SEQ ID NO: 8117 - protein, 188 aa, Glycine max
  misc_feature (78)..(79): Xaa can be any naturally occurring amino acid
  misc_feature (103)..(103): Xaa can be any naturally occurring amino acid
  misc_feature (109)..(109): Xaa can be any naturally occurring amino acid
  Coding DNA Sequence Number=SeqID_3515
RGTLYSTRCSHSVCGPSERRAVVVKAETRFTRQLDSSCGAIRVRLTLVRPHTITIMCVIRSRFVRRALPHVELGDSSXXSRPALTTCIKSTIAVSAEPIHRVXVYSYHXGRSRTRHFNTYSAGESITGAQSSSVAERVVATNVDRTGGLVVCVSVHLHRYKSPGPPTLDRGCICRDYAYSLCKQYWST

SEQ ID NO: 8118 - protein, 179 aa, Glycine max
  misc_feature (167)..(167): Xaa can be any naturally occurring amino acid
  misc_feature (174)..(174): Xaa can be any naturally occurring amino acid
  Coding DNA Sequence Number=SeqID_3517
  Homolog annotation: Hit_ID=Q0UCU1; Match level="QueryCoverage=100%, HitCoverage=18%, E-value=7e-58, Identity=62%"; Hit description =Putative uncharacterized protein
LWKLMLNWLSHLRQADFILVCCHSQGVPVAISLMAKLIQLGCLSPNARIGLCAMAGINLGPFLDYKSRLFGGSALELFDFCDNSSKVSRTYAQSLDICLRHGVRVSYVGSLDDQLVSLESSLHAPLSHPYVNRGLFVDGRLHAPNFLTHLVIFAIKLRKTRESLIRXLIRELSXSFAGS

SEQ ID NO: 8119 - protein, 82 aa, Glycine max
  Coding DNA Sequence Number=SeqID_3518
  Gene Ontology: Mol. function=structural constituent of ribosome; Cellular component=ribonucleoprotein complex; Biological process =translation
  Homolog annotation: Hit_ID=Q9SF35; Match level="QueryCoverage=97%, HitCoverage=56%, E-value=7e-33, Identity=83%"; Hit description=40S ribosomal protein S23-1
  Pfam annotation: Domain name=Ribosomal_S12; Domain location=1-83; Score=74.5; E_value=3.5e-19; Accession=PF00164.15; Description =Ribosomal protein S12
HEPNSAIRKCARVQLIKNGKKIAAFVPNDGCLNYIEENDKVLIAGFKQKGHTINNIPKIRFKVVKISNISLLALFKEKKEKR

SEQ ID NO: 8120 - protein, 138 aa, Glycine max
  Coding DNA Sequence Number=SeqID_3519
  Gene Ontology: Mol. function=ATP-dependent helicase activity; Cellular component=intracellular; Biological process=cellular metabolic process
  Homolog annotation: Hit_ID=A2XTM9; Match level="QueryCoverage=99%, HitCoverage=5%, E-value=4e-36, Identity=60%"; Hit description =Putative uncharacterized protein
  Pfam annotation: Domain name=HRDC; Domain location=18-88; Score=74.7; E_value=2.9e-19; Accession=PF00570.13; Description=HRDC domain
SQVNKTVQRQSEMDENFSSLLYETLRILRSQIAEGTAGCGVHHIFKNETLKEISTRIPRTKEELLEINGIGKVKLNKYGDRVLATIEEFLNQFPNGSKRSSSSGGSNEQNEAVKKRRGFPAIHTSGNGNDFEERTVQS

SEQ ID NO: 8121 - protein, 113 aa, Glycine max
  Coding DNA Sequence Number=SeqID_3520
  Subcellular localization annotation: CTP_CleavageSite=62; ConfidenceScore=5.84e-01
PLTLPPTALPTARPPSAPAVSPPSSGFTFFSFWFTWRRLFACLCLFSLLYFLLLFFYVFWFSSPPRPPPSPSPTRAPPPAPAPTPHLFFFLFFFFLLVMKSRQYTHKKKEKHK

SEQ ID NO: 8122 - protein, 136 aa, Glycine max
  misc_feature (53)..(53): Xaa can be any naturally occurring amino acid
  misc_feature (63)..(63): Xaa can be any naturally occurring amino acid
  misc_feature (68)..(68): Xaa can be any naturally occurring amino acid
  misc_feature (71)..(71): Xaa can be any naturally occurring amino acid
  misc_feature (97)..(97): Xaa can be any naturally occurring amino acid
  misc_feature (107)..(107): Xaa can be any naturally occurring amino acid
  misc_feature (110)..(110): Xaa can be any naturally occurring amino acid
  misc_feature (120)..(120): Xaa can be any naturally occurring amino acid
  Coding DNA Sequence Number=SeqID_3522
YSTDKCRAREDIACNVYLHSLSRPFLTSRLDTYIVKPASCEYTVYEYRRCAAXINRRWRRTSXDNDVXCGXRGIAARAAPMILHIFIVSCALRIEIXIVSSERRHAXWRXRQCHLCDDVXVCYRLPSARGDIASAV

SEQ ID NO: 8123 - protein, 152 aa, Glycine max; identical to SEQ ID NO: 7070
  misc_feature (125)..(127): Xaa can be any naturally occurring amino acid
  misc_feature (129)..(129): Xaa can be any naturally occurring amino acid
  misc_feature (140)..(140): Xaa can be any naturally occurring amino acid
  misc_feature (142)..(143): Xaa can be any naturally occurring amino acid
  misc_feature (146)..(146): Xaa can be any naturally occurring amino acid
  Coding DNA Sequence Number=SeqID_3524

SEQ ID NO: 8124 - protein, 149 aa, Glycine max
  misc_feature (89)..(89): Xaa can be any naturally occurring amino acid
  Coding DNA Sequence Number=SeqID_3526
  Gene Ontology: Mol. function=unfolded protein binding; Cellular component=cytoplasm; Biological process=cellular protein metabolic process
  Homolog annotation: Hit_ID=A7VJA5; Match level="QueryCoverage=100%, HitCoverage=27%, E-value=2e-58, Identity=81%"; Hit description=Group II-chaperonin delta-subunit
RGSNQHVLNEVERSLPHALCVVRCLVAKRFLLPGGGAPEIELSRQVGAWVKVLPRMEGYCVRAFPGALEVIPYPLAENGGLTPLAGVFXLRNRQAQGEINAGINVRKGLITNILEENVVQPLLVSPSAIPLATKCVRMILKIYFFVTVR

SEQ ID NO: 8125 - protein, 138 aa, Glycine max
  Coding DNA Sequence Number=SeqID_3527
  Subcellular localization annotation: CTP_CleavageSite=68; ConfidenceScore=5.57e-01
FFFFFPFFFFFFFFFFFGFFFFFFFFAPGMSNYLKNALGMGNYIKNVPIGLNTQTFKGGWGILSNTLEVEQKKNLSLMDLQKKIPPTKNPFSSLKQMPKPPNLGWKIKKTTFTLHFKKKVGGGCQAPENTGQHYIHTP

SEQ ID NO: 8126 - protein, 111 aa, Glycine max
  Coding DNA Sequence Number=SeqID_493
SYRIYHYLQTFHDGPRNYWGFTPTPASSENNIDAIVSPEAAFSDYQPEIRDERRGDVREDSGVLRGVQATDCGYRLGDRRHLKRSLRYSSSAHPLEALRLLIDRLLRTTTC

SEQ ID NO: 8127 - protein, 126 aa, Glycine max
  misc_feature (34)..(34): Xaa can be any naturally occurring amino acid
  misc_feature (61)..(61): Xaa can be any naturally occurring amino acid
  misc_feature (70)..(70): Xaa can be any naturally occurring amino acid
  Coding DNA Sequence Number=SeqID_495
  Homolog annotation: Hit_ID=Q9LZA5; Match level="QueryCoverage=97%, HitCoverage=17%, E-value=3e-27, Identity=52%"; Hit description =Maturase-like protein
PWRFPQLRHIRNQLPPELVDAYDKFQEQVDQHFXPLKARKATRGKKKEEVKEERGTKLFKXEPVEDFDKXLCMKVEAPEILDADIIKWYAGTEKHESTKREVIKHFSKDLRVYDMNGNHEVHFPTE

SEQ ID NO: 8128 - protein, 120 aa, Glycine max
  misc_feature (71)..(71): Xaa can be any naturally occurring amino acid
  Coding DNA Sequence Number=SeqID_496
  Gene Ontology: Mol. function=calcium ion binding; Cellular component =oxygen evolving complex; Biological process=photosynthesis
  Homolog annotation: Hit_ID=A7R221; Match level="QueryCoverage=96%, HitCoverage=50%, E-value=1e-33, Identity=66%"; Hit description =Chromosome undetermined scaffold_394, whole genome shotgun sequence
  Pfam annotation: Domain name=PsbQ; Domain location=1-117; Score=9.9; E_value=5.4e-06; Accession=PF05757.2; Description=Oxygen evolving enhancer protein 3 (PsbQ)
PIIYGRPPPPSGGLPETLNSDEQKILKLPLKDRFFLQPLSPIDAAKRAKESPKEMVVFINLIEKKALPYVXNDLLLRAEYLGLDLNTVIAANPKDDKKSLDELSGNLFQYIRYLDLTEKI

SEQ ID NO: 8129 - protein, 142 aa, Glycine max
  Coding DNA Sequence Number=SeqID_497
  Gene Ontology: Mol. function=cytochrome-c oxidase activity; Cellular component=mitochondrion; Biological process=electron transport
  Homolog annotation: Hit_ID=Q8LCP1; Match level="QueryCoverage=79%, HitCoverage=54%, E-value=3e-38, Identity=66%"; Hit description =Cytochrome c oxidase subunit, putative
  Pfam annotation: Domain name=COX6B; Domain location=69-141; Score =133.8; E_value=5e-37; Accession=PF02297.7; Description=Cytochrome oxidase c subunit VIb
RLALECCCVLSPPEDSLSLPRSSSFSRPMAEAVSAQTPSLSEQYHLENEVKQVKESPEESSEEETTDEITLETAPADFRFPTTNQTRHCFTRYIEYHRCVAAKGDDAPECDKFAKFYRSLCPSEWVDRWNEQRENGTFPGPL

SEQ ID NO: 8130 - protein, 117 aa, Glycine max
  Coding DNA Sequence Number=SeqID_498
  Subcellular localization annotation: CTP_CleavageSite=13; ConfidenceScore=5.60e-01
KSGSHLFQVSFPSQSSSSTMIFDRRMCDGVPFLSYHLPLFFLLPFSFPNTASFHTSTMPFISHLPLLSETKREREMQNKQGRGLINLCGGVGCHCSMVIVVNTQNLKKKEEDGESGR

SEQ ID NO: 8131 - protein, 146 aa, Glycine max
  Coding DNA Sequence Number=SeqID_500
  Gene Ontology: Mol. function=structural constituent of ribosome; Cellular component=ribonucleoprotein complex; Biological process =translation
  Homolog annotation: Hit_ID=Q9SCM3; Match level="QueryCoverage=67%, HitCoverage=35%, E-value=7e-46, Identity=91%"; Hit description=40S ribosomal protein S2-4
  Pfam annotation: Domain name=Ribosomal_S5; Domain location=94-146; Score=86.4; E_value=9.3e-23; Accession=PF00333.10; Description =Ribosomal protein S5, N-terminal domain
MAERGGERGAERGGDRGGFGRGFGGGRGDRGGRGGPRGRGGRRGGRPTEEEKWTPVTKLGRLVQAGKIQKLEQIYLHSLPVKEYQIIDLLVGPTLKDEVMKIMPVQKQTRAGQRTRFKAFVVVGDTNGHVGLGVKCSKEVATAIRG

SEQ ID NO: 8132 - protein, 89 aa, Glycine max
  misc_feature (65)..(65): Xaa can be any naturally occurring amino acid
  misc_feature (70)..(70): Xaa can be any naturally occurring amino acid
  Coding DNA Sequence Number=SeqID_501
  Gene Ontology: Mol. function=oxidoreductase activity, acting on paired donors, with oxidation of a pair of donors resulting in the reduction of molecular oxygen to two molecules of water; Cellular component=integral to ...
  Gene Ontology: Cellular component=membrane; Biological process=lipid metabolic process
  Homolog annotation: Hit_ID=A2Q4Q7; Match level="QueryCoverage=98%, HitCoverage=26%, E-value=9e-28, Identity=62%"; Hit description=Fatty acid desaturase; Peptidase M, neutral zinc metallopeptidases, zinc -binding site
VGGGMHPMAGHFISEHYEINPDHQTYSYYRPRNYLTWRAVYHNEHHDCPRVHANRLHHGKEIRPXNMIIXPYYRSKTRIIYMYIIDRTH

SEQ ID NO: 8133 - protein, 187 aa, Glycine max
  misc_feature (1)..(1): Xaa can be any naturally occurring amino acid
  misc_feature (69)..(69): Xaa can be any naturally occurring amino acid
  Coding DNA Sequence Number=SeqID_502
XVWEKKRGDTNRREKIWGSLIKMGGQHKSGGNITRVVWLWGRVNKYMGGDKMVVRQNIRRGYKGGGNTXRAKQISPTSSLSSADMCASNKKLGVDIKYSFSPLFPLLYIFSLRGREHTLRGVLNSLVGCACQYVCAPQKNPPTTTPNIYVCVVSINNTPVLFGANNSLLSLLSPCACTYRRLPVPVL

SEQ ID NO: 8134 - protein, 99 aa, Glycine max
  misc_feature (20)..(20): Xaa can be any naturally occurring amino acid
  misc_feature (33)..(33): Xaa can be any naturally occurring amino acid
  misc_feature (52)..(52): Xaa can be any naturally occurring amino acid
  misc_feature (55)..(55): Xaa can be any naturally occurring amino acid
  Coding DNA Sequence Number=SeqID_504
FHLRSWAIICTLARVRLSQXSVHCTRVRHVHTXAAYIFILISTSSICARYDXTQXVSLASVSAIRLVRFNDLYDELDVVYRRCREYITATDIVREMACM

SEQ ID NO: 8135 - protein, 178 aa, Glycine max
  misc_feature (151)..(151): Xaa can be any naturally occurring amino acid
  Coding DNA Sequence Number=SeqID_3529
  Homolog annotation: Hit_ID=A0BUU6; Match level="QueryCoverage=78%, HitCoverage=14%, E-value=3e-07, Identity=23%"; Hit description =Chromosome undetermined scaffold_13, whole genome shotgun sequence
ERNNLLADEVEKLQTKLRIIEDDHARAAESLKSDFNVRLSELERENQKTRSKFENREREHEAEIKSLKSQSEELARILESVTAEREEYLRKYGELSLQEQGFKSREVILQELQGTVERLQKEADRYQTELADTERRYRAQVDDLRSESNRXAELNKELKEELQTIKEDPSRRNGAIYQ

SEQ ID NO: 8136 - protein, 155 aa, Glycine max; identical to SEQ ID NO: 7071
  misc_feature (123)..(123): Xaa can be any naturally occurring amino acid
  Coding DNA Sequence Number=SeqID_3530
  Subcellular localization annotation: CTP_CleavageSite=83; ConfidenceScore=5.41e-01

SEQ ID NO: 8137 - protein, 112 aa, Glycine max
  misc_feature (5)..(5): Xaa can be any naturally occurring amino acid
  misc_feature (8)..(8): Xaa can be any naturally occurring amino acid
  misc_feature (14)..(14): Xaa can be any naturally occurring amino acid
  misc_feature (16)..(16): Xaa can be any naturally occurring amino acid
  misc_feature (27)..(27): Xaa can be any naturally occurring amino acid
  misc_feature (56)..(56): Xaa can be any naturally occurring amino acid
  misc_feature (73)..(73): Xaa can be any naturally occurring amino acid
  Coding DNA Sequence Number=SeqID_3532
  Gene Ontology: Mol. function=catalytic activity; Biological process =trehalose biosynthetic process
  Homolog annotation: Hit_ID=A5AY88; Match level="QueryCoverage=85%, HitCoverage=11%, E-value=4e-34, Identity=72%"; Hit description =Putative uncharacterized protein
KNNQXNPXNINPLXNXMDSALEMADSXLDLLHQKHYKYVTTHKFSYWARSFLQDLXRTCSDHVRRRSWGIGFXLSFRIVALYPNFKNLSMEHIVSAYKRTSTITILLYYYGT

SEQ ID NO: 8138 - protein, 709 aa, Glycine max
  misc_feature (1)..(4): Xaa can be any naturally occurring amino acid
  misc_feature (6)..(9): Xaa can be any naturally occurring amino acid
  misc_feature (11)..(14): Xaa can be any naturally occurring amino acid
  misc_feature (21)..(22): Xaa can be any naturally occurring amino acid
  misc_feature (25)..(25): Xaa can be any naturally occurring amino acid
  misc_feature (27)..(28): Xaa can be any naturally occurring amino acid
  misc_feature (30)..(30): Xaa can be any naturally occurring amino acid
  misc_feature (32)..(32): Xaa can be any naturally occurring amino acid
  misc_feature (35)..(36): Xaa can be any naturally occurring amino acid
  misc_feature (39)..(39): Xaa can be any naturally occurring amino acid
  misc_feature (41)..(41): Xaa can be any naturally occurring amino acid
  misc_feature (43)..(44): Xaa can be any naturally occurring amino acid
  misc_feature (47)..(47): Xaa can be any naturally occurring amino acid
  misc_feature (52)..(53): Xaa can be any naturally occurring amino acid
  misc_feature (56)..(61): Xaa can be any naturally occurring amino acid
  misc_feature (64)..(64): Xaa can be any naturally occurring amino acid
  misc_feature (69)..(69): Xaa can be any naturally occurring amino acid
  misc_feature (72)..(74): Xaa can be any naturally occurring amino acid
  misc_feature (78)..(78): Xaa can be any naturally occurring amino acid
  misc_feature (81)..(84): Xaa can be any naturally occurring amino acid
  misc_feature (86)..(86): Xaa can be any naturally occurring amino acid
  misc_feature (91)..(92): Xaa can be any naturally occurring amino acid
  misc_feature (97)..(99): Xaa can be any naturally occurring amino acid
  misc_feature (102)..(103): Xaa can be any naturally occurring amino acid
  misc_feature (107)..(108): Xaa can be any naturally occurring amino acid
  misc_feature (114)..(114): Xaa can be any naturally occurring amino acid
  misc_feature (118)..(118): Xaa can be any naturally occurring amino acid
  misc_feature (126)..(128): Xaa can be any naturally occurring amino acid
  misc_feature (133)..(135): Xaa can be any naturally occurring amino acid
  misc_feature (139)..(139): Xaa can be any naturally occurring amino acid
  misc_feature (141)..(141): Xaa can be any naturally occurring amino acid
  misc_feature (145)..(145): Xaa can be any naturally occurring amino acid
  misc_feature (148)..(148): Xaa can be any naturally occurring amino acid
  misc_feature (152)..(152): Xaa can be any naturally occurring amino acid
  misc_feature (154)..(154): Xaa can be any naturally occurring amino acid
  misc_feature (156)..(156): Xaa can be any naturally occurring amino acid
  misc_feature (159)..(159): Xaa can be any naturally occurring amino acid
  misc_feature (161)..(161): Xaa can be any naturally occurring amino acid
  misc_feature (164)..(164): Xaa can be any naturally occurring amino acid
  misc_feature (166)..(170): Xaa can be any naturally occurring amino acid
  misc_feature (178)..(179): Xaa can be any naturally occurring amino acid
  misc_feature (185)..(186): Xaa can be any naturally occurring amino acid
  misc_feature (189)..(189): Xaa can be any naturally occurring amino acid
  misc_feature (191)..(191): Xaa can be any naturally occurring amino acid
  misc_feature (197)..(197): Xaa can be any naturally occurring amino acid
  misc_feature (202)..(202): Xaa can be any naturally occurring amino acid
  misc_feature (208)..(208): Xaa can be any naturally occurring amino acid
  misc_feature (211)..(213): Xaa can be any naturally occurring amino acid
  misc_feature (215)..(215): Xaa can be any naturally occurring amino acid
  misc_feature (217)..(217): Xaa can be any naturally occurring amino acid
  misc_feature (219)..(220): Xaa can be any naturally occurring amino acid
  misc_feature (226)..(228): Xaa can be any naturally occurring amino acid
  misc_feature (230)..(231): Xaa can be any naturally occurring amino acid
  misc_feature (236)..(236): Xaa can be any naturally occurring amino acid
  misc_feature (238)..(239): Xaa can be any naturally occurring amino acid
  misc_feature (241)..(241): Xaa can be any naturally occurring amino acid
  misc_feature (244)..(244): Xaa can be any naturally occurring amino acid
  misc_feature (246)..(246): Xaa can be any naturally occurring amino acid
  misc_feature (250)..(250): Xaa can be any naturally occurring amino acid
  misc_feature (253)..(254): Xaa can be any naturally occurring amino acid
  misc_feature (258)..(258): Xaa can be any naturally occurring amino acid
  misc_feature (261)..(261): Xaa can be any naturally occurring amino acid
  misc_feature (266)..(266): Xaa can be any naturally occurring amino acid
  misc_feature (271)..(272): Xaa can be any naturally occurring amino acid
  misc_feature (274)..(275): Xaa can be any naturally occurring amino acid
  misc_feature (277)..(277): Xaa can be any naturally occurring amino acid
  misc_feature (283)..(283): Xaa can be any naturally occurring amino acid
  misc_feature (288)..(288): Xaa can be any naturally occurring amino acid
  misc_feature (290)..(290): Xaa can be any naturally occurring amino acid
  misc_feature (294)..(299): Xaa can be any naturally occurring amino acid
  misc_feature (305)..(306): Xaa can be any naturally occurring amino acid
  misc_feature (311)..(311): Xaa can be any naturally occurring amino acid
  misc_feature (314)..(314): Xaa can be any naturally occurring amino acid
  misc_feature (321)..(322): Xaa can be any naturally occurring amino acid
  misc_feature (328)..(328): Xaa can be any naturally occurring amino acid
  misc_feature (332)..(332): Xaa can be any naturally occurring amino acid
  misc_feature (334)..(334): Xaa can be any naturally occurring amino acid
  misc_feature (344)..(344): Xaa can be any naturally occurring amino acid
  misc_feature (348)..(348): Xaa can be any naturally occurring amino acid
  misc_feature (354)..(354): Xaa can be any naturally occurring amino acid
  misc_feature (356)..(356): Xaa can be any naturally occurring amino acid
  misc_feature (358)..(358): Xaa can be any naturally occurring amino acid
  misc_feature (362)..(362): Xaa can be any naturally occurring amino acid
  misc_feature (372)..(372): Xaa can be any naturally occurring amino acid
  misc_feature (380)..(380): Xaa can be any naturally occurring amino acid
  misc_feature (382)..(382): Xaa can be any naturally occurring amino acid
  misc_feature (384)..(384): Xaa can be any naturally occurring amino acid
  misc_feature (400)..(400): Xaa can be any naturally occurring amino acid
  misc_feature (406)..(406): Xaa can be any naturally occurring amino acid
  misc_feature (413)..(414): Xaa can be any naturally occurring amino acid
  misc_feature (416)..(417): Xaa can be any naturally occurring amino acid
  misc_feature (419)..(419): Xaa can be any naturally occurring amino acid
  misc_feature (427)..(428): Xaa can be any naturally occurring amino acid
  misc_feature (439)..(439): Xaa can be any naturally occurring amino acid
  misc_feature (447)..(449): Xaa can be any naturally occurring amino acid
  misc_feature (453)..(453): Xaa can be any naturally occurring amino acid
  misc_feature (456)..(456): Xaa can be any naturally occurring amino acid
  misc_feature (465)..(466): Xaa can be any naturally occurring amino acid
  misc_feature (471)..(473): Xaa can be any naturally occurring amino acid
  misc_feature (486)..(486): Xaa can be any naturally occurring amino acid
  misc_feature (488)..(488): Xaa can be any naturally occurring amino acid
  misc_feature (494)..(495): Xaa can be any naturally occurring amino acid
  misc_feature (497)..(497): Xaa can be any naturally occurring amino acid
  misc_feature (506)..(506): Xaa can be any naturally occurring amino acid
  misc_feature (515)..(515): Xaa can be any naturally occurring amino acid
  misc_feature (526)..(527): Xaa can be any naturally occurring amino acid
  misc_feature (529)..(529): Xaa can be any naturally occurring amino acid
  misc_feature (531)..(531): Xaa can be any naturally occurring amino acid
  misc_feature (533)..(533): Xaa can be any naturally occurring amino acid
  misc_feature (540)..(541): Xaa can be any naturally occurring amino acid
  misc_feature (546)..(546): Xaa can be any naturally occurring amino acid
  misc_feature (550)..(550): Xaa can be any naturally occurring amino acid
  misc_feature (552)..(552): Xaa can be any naturally occurring amino acid
  misc_feature (556)..(556): Xaa can be any naturally occurring amino acid
  misc_feature (565)..(565): Xaa can be any naturally occurring amino acid
  misc_feature (586)..(586): Xaa can be any naturally occurring amino acid
  misc_feature (597)..(597): Xaa can be any naturally occurring amino acid
  misc_feature (604)..(604): Xaa can be any naturally occurring amino acid
  misc_feature (651)..(651): Xaa can be any naturally occurring amino acid
  misc_feature (653)..(653): Xaa can be any naturally occurring amino acid
  misc_feature (673)..(673): Xaa can be any naturally occurring amino acid
  misc_feature (692)..(692): Xaa can be any naturally occurring amino acid
  Coding DNA Sequence Number=SeqID_3533
  Subcellular localization annotation: CTP_CleavageSite=87; ConfidenceScore=5.10e-01
XXXXTXXXXPXXXXHISASLXXAQXSXXTXSXTLXXLHXTXHXXHSXLSATXXTSXXXXXXLHXTRRTXYTXXXNTHXPTXXXXTXRAHTXXATRTXXXIAXXLASXXHIRLHXTPLXSLPYFKHXXXATRTXXXTHPXTXPTQXLPXHSRXLXHXRRXRXDSXDXXXXXAPSTPSHXXRRALLXXRIXAXRAARAXTTVTXTSDTLXHYXXXTXTXYXXFYVHSXXXTXXPTHTXPXXLXTPXTXLSIXTRXXRSRXAPXLRASXQLMTXXTXXHXTHLSPXHTTLXTXLSPXXXXXXPLVISXXRAHVXHNXTTLITLXXDHTRYXHSLXYXLTRPHLYYTXLSLXLRLIIXHXLXHSMXAHYHSQHASXTHTRLTLXHXSXLRAHGTRMTHFLPQHXLLRTTXHSADSTXXTXXYXELPHSPPXXQGHHDSSRSLXRPSSSHRXXXTPRXALXPLPTPLSQXXPRATXXXDTHTSHRTTPTHXHXTPPLSXXPXLYDHSHLRXTLTYSHATXHPHAYPLIYLXXQXQXRXPRHTTTXXTQAHXYTQXRXTEHXLTQSHARHXRRTTSTTRTHQTLSTLSLHAXHLTHTHTPHTXPAHHTIXSHISSSHSPHTHTAPSQHHAPTNRLSYHNLHSHSTTRLVSHAPTPHXPXHLLHRPEPTPRRPRDTQRQXRSRTSRIRTHHHAPRRHPXPRARVASTCPSSISITP

SEQ ID NO: 8139 - protein, 144 aa, Glycine max
  misc_feature (14)..(14): Xaa can be any naturally occurring amino acid
  misc_feature (24)..(24): Xaa can be any naturally occurring amino acid
  misc_feature (40)..(40): Xaa can be any naturally occurring amino acid
  misc_feature (63)..(63): Xaa can be any naturally occurring amino acid
  misc_feature (89)..(89): Xaa can be any naturally occurring amino acid
  misc_feature (94)..(94): Xaa can be any naturally occurring amino acid
  misc_feature (132)..(132): Xaa can be any naturally occurring amino acid
  misc_feature (136)..(136): Xaa can be any naturally occurring amino acid
  misc_feature (144)..(144): Xaa can be any naturally occurring amino acid
  Coding DNA Sequence Number=SeqID_3535
GYLINGEIISRLSXPLLGSLMSVXLHDYGRGASLVRERHXIYQMLKTPSYNTHLLRTLTCYNXYLVHPHAISDSATHVSLDSSASCVRXDVFVXYASGLTSSIILTIPDGIVMVVLRPSGRYSLVMTQIRLXTDVXAVPLRQQX

SEQ ID NO: 8140 - protein, 127 aa, Glycine max
  misc_feature (93)..(93): Xaa can be any naturally occurring amino acid
  Coding DNA Sequence Number=SeqID_3537
  Gene Ontology: Mol. function=peptidase activity; Biological process =proteolysis
  Homolog annotation: Hit_ID=A7PI42; Match level="QueryCoverage=62%, HitCoverage=8%, E-value=3e-14, Identity=49%"; Hit description =Chromosome chr13 scaffold_17, whole genome shotgun sequence
THLIFPLFTYPNIKATLTPDRLAGPIKLPTIILKLTTPILFSPSIFITLPATLICGMVRFDTNPGGTPELLGNFMIAAFIASLLSLTLVYLLXYVHLSGAKMAIILPTSLLSILSLALVLTRVYSPF

SEQ ID NO: 8141 - protein, 106 aa, Glycine max
  Coding DNA Sequence Number=SeqID_3538
  Gene Ontology: Mol. function=structural constituent of ribosome; Cellular component=ribonucleoprotein complex; Biological process =translation
  Homolog annotation: Hit_ID=P34788; Match level="QueryCoverage=100%, HitCoverage=69%, E-value=6e-53, Identity=97%"; Hit description=40S ribosomal protein S18
  Pfam annotation: Domain name=Ribosomal_S13; Domain location=14-106; Score=138.1; E_value=2.5e-38; Accession=PF00416.12; Description =Ribosomal protein S13S18
MSLVANDEFQHILRVLNTNVDGKQKIMFALTSIKGIGRRLANIVCKKADVDMNKRAGELSAAEIDNLMTIVANPKQYKIPDWFLNRQKDYKDGKYSQVVSNALDMK

SEQ ID NO: 8142 - protein, 145 aa, Glycine max; identical to SEQ ID NO: 7092
  misc_feature (14)..(14): Xaa can be any naturally occurring amino acid
  misc_feature (48)..(48): Xaa can be any naturally occurring amino acid
  misc_feature (52)..(52): Xaa can be any naturally occurring amino acid
  misc_feature (98)..(98): Xaa can be any naturally occurring amino acid
  misc_feature (108)..(108): Xaa can be any naturally occurring amino acid
  misc_feature (143)..(143): Xaa can be any naturally occurring amino acid
  Coding DNA Sequence Number=SeqID_3539

SEQ ID NO: 8143 - protein, 130 aa, Glycine max
  Coding DNA Sequence Number=SeqID_3541
PHQTRTRGEVNEIDRWAGRSFTGGRGGGMAVGGSGSYLAYGIRCFMCGAKMEMDKINPRAPSGRYIARNVQQQLVDASRSVADHRCLICGVRPPARSVGVRRGYTGHYRARVIEGRLNQYLCKYVRHSGE

SEQ ID NO: 8144 - protein, 143 aa, Glycine max
  misc_feature (3)..(3): Xaa can be any naturally occurring amino acid
  misc_feature (5)..(5): Xaa can be any naturally occurring amino acid
  misc_feature (7)..(7): Xaa can be any naturally occurring amino acid
  misc_feature (26)..(27): Xaa can be any naturally occurring amino acid
  misc_feature (36)..(38): Xaa can be any naturally occurring amino acid
  misc_feature (45)..(45): Xaa can be any naturally occurring amino acid
  misc_feature (48)..(48): Xaa can be any naturally occurring amino acid
  misc_feature (58)..(58): Xaa can be any naturally occurring amino acid
  misc_feature (70)..(70): Xaa can be any naturally occurring amino acid
  misc_feature (140)..(140): Xaa can be any naturally occurring amino acid
  Coding DNA Sequence Number=SeqID_3543
RRXTXYXAIRLPLDGHISTCSVVEHXXYVEYHDQLXXXRVVSGVXVSXTYMSVSFVRXLITSPIDVLCIXTLLCTQWSCSLIIWSVLSALVASSTTRAEILSMTSHAFSSNPLLDHTRLYDTSQPTCADPVSVSSALIYXTTP

SEQ ID NO: 8145 - protein, 163 aa, Glycine max
  misc_feature (45)..(45): Xaa can be any naturally occurring amino acid
  misc_feature (130)..(130): Xaa can be any naturally occurring amino acid
  misc_feature (152)..(152): Xaa can be any naturally occurring amino acid
  Coding DNA Sequence Number=SeqID_3545
  Gene Ontology: Mol. function=nucleotide binding; Cellular component =cytoplasm; Biological process=response to stress
  Homolog annotation: Hit_ID=Q9AQZ5; Match level="QueryCoverage=92%, HitCoverage=18%, E-value=1e-40, Identity=59%"; Hit description =Putative heat shock protein
MLHASCKMHCGNKGQLKGSHLECPRGDFDRVCATTCAAQFRAEYXIEAFQNANACLRLRAACDKLKNVLSATPEAPSNIECLMDDKDAKCFIKRDELEQLNLSILERVKGPLEKALAEAGLTVKHEHMVXEGAGSGSRVPHFFIILTEVVNXESRRTMNAIEC

SEQ ID NO: 8146 - protein, 105 aa, Glycine max
  misc_feature (52)..(52): Xaa can be any naturally occurring amino acid
  misc_feature (79)..(79): Xaa can be any naturally occurring amino acid
  Coding DNA Sequence Number=SeqID_3546
TLHHTATDSAREAWRVGANSADTCMQSGSCARHTIVSRRIAVRRGLDVVVCXTSHTTSMNTTTVDILSRRANGDTYAQXNRVRPFTARVDLYSERGSRVGTCPLV

SEQ ID NO: 8147 - protein, 447 aa, Glycine max
  Coding DNA Sequence Number=SeqID_3548
MRELSNNPEESHLTIKKNDYILMVADNLSMGDIKTAGIIFVAVYILIYVLLLVWAHFKDQQKQTYSSKVSSDQSYTQSQITMPRRPNFRAMQIDITSDTLDFTNQSVRMNFEDQKDISAILQSADKDGFSVISPMHRPDSMSVSPLHQGGKKTKFNLLRTPPRSFQKIDLDATSPSAIVTGQEETMTTNKDEPAPSKEDTTKDDAITRKEMSHIIEDLTKDDEFLNQSSKKRRPVKAKKEGKAAKITKNRQTVKTKFLKLLSQRHAIWSTVQRMSRIFPRYKRISLLYFLFSCNLFIMTISFINSSIFEFLPWQLLKLSACTWILFITFSWLSSVSKEGLKEAKTMEDFQSTLATLEKEAKYKDIAVHVIIGLFSVCALSQYALFITVKRQYTLQWIAYSVLLFIIQMVFFDALWELIIAYLYTKAYDSKGMKRLYRRLNSIRFWRV

SEQ ID NO: 8148 - protein, 162 aa, Glycine max
  Coding DNA Sequence Number=SeqID_3550
RNNFYDVIIRSNTPLAHNNSKALRCSLGGTKSTQAPHGGDGDPRAGSGSAAAEAAVDARYRSNPDRSRTADAAAAAAEGTHRIREAAAAEGTLHEAVRMGNPVGVEGKEIRTLGEGGIRVIFSGNCSLDLFSEFVRGKSSNSNHSPHRTLSRNEKHPGSSWR

SEQ ID NO: 8149 - protein, 113 aa, Glycine max
  misc_feature (51)..(51): Xaa can be any naturally occurring amino acid
  misc_feature (58)..(58): Xaa can be any naturally occurring amino acid
  misc_feature (64)..(64): Xaa can be any naturally occurring amino acid
  misc_feature (105)..(106): Xaa can be any naturally occurring amino acid
  Coding DNA Sequence Number=SeqID_3552
QIERCYVVVYVCMYNHYHTQRAQQTRQHKHNHNCISHSICGGVVWLFDISXYVRIYFXFMSNFXISHFTTPSTHIKYYLFWGVGVCGLYLLFLCHIFLSLKYAGXXLIYNTKP

SEQ ID NO: 8150 - protein, 189 aa, Glycine max
  misc_feature (14)..(14): Xaa can be any naturally occurring amino acid
  Coding DNA Sequence Number=SeqID_3553
  Subcellular localization annotation: CTP_CleavageSite=78; ConfidenceScore=5.16e-01
LIVWSLGCQVRAYXIGVGWRHVNVLHTSACGTARSGTVVARAGAACACGVAVLRAVSCCFRSGCACCLGASRARFTCVAATARLASYASAPASLVLRDSDVAACARARDQHSTPLHDRLRLLVRVQLARSRGSVLRWTASLVMRALRRASSRCDASSLQMPTPLRVAPCACRVRVPTVLCVCCVSRPSA

SEQ ID NO: 8151 - protein, 134 aa, Glycine max
  Coding DNA Sequence Number=SeqID_3555
LDSYDDARPIVATRSMPIGLGTLALTLSVVQAQDECNVVRCLQDILGGGVPTLGAADMQPHAVLALSSSRLIHTLGFTKVQVAGRKGIRVKQGYTGGMRKGKSLRRCTWSCAAEEKAISRNASCDICATVWFLL

SEQ ID NO: 8152 - protein, 199 aa, Glycine max
  misc_feature (68)..(68): Xaa can be any naturally occurring amino acid
  Coding DNA Sequence Number=SeqID_3557
TPESANHRRVYLSLLHCTTLPCHHIVREPGRARARESMAAPKLATLALAVLLAGNGGGSPAGGRAGMXSLHRVQNAECGPALPPNGGGHCPPRGGGGGIPKPGWKRQKKPPDRRKIGGWPQKRAPNGRKGRGELNLPRPPPLFQKRGGGPPAKKKPPPRVYAHPINLRGGGPLAPPRKKKNFLALAKKKKKKGPGIFKK

SEQ ID NO: 8153 - protein, 99 aa, Glycine max
  misc_feature (22)..(22): Xaa can be any naturally occurring amino acid
  Coding DNA Sequence Number=SeqID_3559
RAYCDDEAEIPTDDPRYTCSPXPFATTRHSPPRSLPSLLGEPHVVIIAACLGAPPCYFLTLSSALQPYMHSHCRSRDSLLASCDARDEQYACIPCCVWY

SEQ ID NO: 8154 - protein, 65 aa, Glycine max
  Coding DNA Sequence Number=SeqID_3561
SSCRWRANHSRYSEYHRLCQQPFVHCTRKRNRPSHHQHLRLACSRRRVLIYCILSCGIRIVHKLL

SEQ ID NO: 8155 - protein, 148 aa, Glycine max
  misc_feature (26)..(26): Xaa can be any naturally occurring amino acid
  Coding DNA Sequence Number=SeqID_3563
  Gene Ontology: Mol. function=P-P-bond-hydrolysis-driven protein transmembrane transporter activity; Cellular component=chloroplast inner membrane; Biological process=intracellular protein transport
  Homolog annotation: Hit_ID=A7QQS1; Match level="QueryCoverage=99%, HitCoverage=49%, E-value=3e-31, Identity=51%"; Hit description =Chromosome undetermined scaffold_144, whole genome shotgun sequence
  Pfam annotation: Domain name=Tic22; Domain location=1-144; Score= -79.7; E_value=0.023; Accession=PF04278.3; Description=Tic22-like family
PWARIAHPWGGRPMAMTVEAIDERLXGIPVYALSNASEEFLLVSGSSCRKNLGLFCFNKDDAKALLNHVTLIDPHARQGSKVGPVALNNVMQLKASGVAVILIPEFSQVKNALPETEKSGFASRGYLCGAVFQVLLPTIESLSYPVYY

SEQ ID NO: 8156 - protein, 104 aa, Glycine max
  misc_feature (91)..(92): Xaa can be any naturally occurring amino acid
  misc_feature (94)..(96): Xaa can be any naturally occurring amino acid
  Coding DNA Sequence Number=SeqID_1549
QCLPLKHVLLMICPKCTTLLCVPFHGTLLSPAALFLVSPPLLLPSSKVLLGLQCSCHQCHPEQQSLRALPLSSSSCLLCCRDAMFRSPIKXXEXXXAGRVSNCK

SEQ ID NO: 8157 - protein, 136 aa, Glycine max
  misc_feature (134)..(134): Xaa can be any naturally occurring amino acid
  Coding DNA Sequence Number=SeqID_1551
  Gene Ontology: Mol. function=serine O-acetyltransferase activity; Cellular component=cytoplasm; Biological process=cysteine biosynthetic process from serine
  Homolog annotation: Hit_ID=Q42538; Match level="QueryCoverage=100%, HitCoverage=44%, E-value=8e-31, Identity=56%"; Hit description =Serine acetyltransferase 5
  Pfam annotation: Domain name=SATase_N; Domain location=43-136; Score =149.8; E_value=7.6e-42; Accession=PF06426.4; Description=Serine acetyltransferase, N-terminal
MPPAGELQHQSPSKDKQPTDTQSAEAAAAAIAAAAADAEAAGLWTQIKAEARRDAEAEPALASYLYSTILSHSSLERSISFHLGNKLCSSTLLSTLLYDLFLNTFTSDPSLRNATVADLRAARVRDPACISFSXCL

SEQ ID NO: 8158 - protein, 124 aa, Glycine max
  Coding DNA Sequence Number=SeqID_1552
  Gene Ontology: Mol. function=transcription factor activity; Cellular component=transcription factor complex; Biological process =regulation of transcription, DNA-dependent
  Homolog annotation: Hit_ID=Q84VA0; Match level="QueryCoverage=54%, HitCoverage=17%, E-value=2e-18, Identity=70%"; Hit description=E2F dimerization factor
  Subcellular localization annotation: CTP_CleavageSite=36; ConfidenceScore=5.74e-01
MVSSARSSGGMAHSASNSAGSAGSPSGGIGPGNGVAAAAATTSASASTPASGSTVARRLNDLEIQGDDAPSSQPAASKKKKKGTRVVGPDKGNRGLRQFSMKVCEKVEGKGRTTYNEVADELVA

SEQ ID NO: 8159 - protein, 127 aa, Glycine max
  misc_feature (2)..(2): Xaa can be any naturally occurring amino acid
  misc_feature (45)..(45): Xaa can be any naturally occurring amino acid
  misc_feature (59)..(59): Xaa can be any naturally occurring amino acid
  misc_feature (63)..(63): Xaa can be any naturally occurring amino acid
  Coding DNA Sequence Number=SeqID_1553
AXQRGSYSPQRACEGRERSVLFSPSWAVSLPHTTARVPQDTRTIXGRFALTTPTCFTPXPTIXTSEARVPYTQHESERSGSSACSIAPASRPEAVVFFARVFARSFWTLVTTLRLPHSSRIEHLRAG

SEQ ID NO: 8160 - protein, 125 aa, Glycine max; identical to SEQ ID NO: 6759
  misc_feature (4)..(5): Xaa can be any naturally occurring amino acid
  misc_feature (14)..(14): Xaa can be any naturally occurring amino acid
  misc_feature (38)..(39): Xaa can be any naturally occurring amino acid
  misc_feature (56)..(57): Xaa can be any naturally occurring amino acid
  misc_feature (60)..(60): Xaa can be any naturally occurring amino acid
  misc_feature (66)..(66): Xaa can be any naturally occurring amino acid
  misc_feature (74)..(74): Xaa can be any naturally occurring amino acid
  misc_feature (87)..(87): Xaa can be any naturally occurring amino acid
  misc_feature (95)..(95): Xaa can be any naturally occurring amino acid
  Coding DNA Sequence Number=SeqID_1555

SEQ ID NO: 8161 - protein, 93 aa, Glycine max; identical to SEQ ID NO: 6456
  misc_feature (1)..(3): Xaa can be any naturally occurring amino acid
  misc_feature (20)..(21): Xaa can be any naturally occurring amino acid
  misc_feature (28)..(29): Xaa can be any naturally occurring amino acid
  misc_feature (37)..(39): Xaa can be any naturally occurring amino acid
  misc_feature (42)..(42): Xaa can be any naturally occurring amino acid
  misc_feature (62)..(62): Xaa can be any naturally occurring amino acid
  misc_feature (87)..(87): Xaa can be any naturally occurring amino acid
  misc_feature (91)..(92): Xaa can be any naturally occurring amino acid
  Coding DNA Sequence Number=SeqID_1557

SEQ ID NO: 8162 - protein, 256 aa, Glycine max
  misc_feature (229)..(229): Xaa can be any naturally occurring amino acid
  misc_feature (253)..(253): Xaa can be any naturally occurring amino acid
  Coding DNA Sequence Number=SeqID_1559
KRALVCGTSGLTFQEISSSNCKYNPTTEDMRFILGTVQVGSANRSSVVVGDVGEVARKFLRRGEHGHVVGVRHLTHLSHGDACDNLPLVLLDHGLVLIDNHIDLGHRAVSASAERRPLLLLAHILGVHPCEALARSFYFPPGQPLPPPAHQTQPDYSPPPDTASPVELAVKSLPHKATRPLVLGIPGFMPYTGFESQIISLSALGCYNRSSDASHENLGQHIYSQQTNXCILLLQTGGHFITIRRITLSRLQXHRP

SEQ ID NO: 8163 - protein, 86 aa, Glycine max
  misc_feature (40)..(40): Xaa can be any naturally occurring amino acid
  Coding DNA Sequence Number=SeqID_1560
  Gene Ontology: Mol. function=calmodulin binding; Cellular component =membrane fraction; Biological process=cell cycle
  Homolog annotation: Hit_ID=UPI0000E469DF; Match level="QueryCoverage =100%, HitCoverage=10%, E-value=3e-32, Identity=75%"; Hit description= PREDICTED: similar to Striatin-3 (Cell-cycle autoantigen SG2NA) (S/G2 antigen)
  Pfam annotation: Domain name=WD40; Domain location=1-39; Score=48.9; E_value=1.8e-11; Accession=PF00400.22; Description=WD domain, G-beta repeat
  Pfam annotation: Domain name=WD40; Domain location=48-86; Score=12.6; E_value=0.89; Accession=PF00400.22; Description=WD domain, G-beta repeat
  Pfam module annotation: Pfam domain module=WD40::WD40; Domain location=1-39::48-86
GECIHEMVAHLDEVTSVACDPNGLHLLTGSHDCSVRLWNXLDSRTCVQEITSHREKFDEAIFDVTFHPSKPFFASAGADALAKVFI

SEQ ID NO: 8164 - protein, 154 aa, Glycine max
  Coding DNA Sequence Number=SeqID_3564
DGRRNKATPIGAHFCVCLSRNLKPDQGVLCGSLTIYGFAFVIRLARIYVVGKTQIVVVVRSPTPNQTTLALLYIRSISRPLHPIRLRKCSCHSRDASCLIPEPGDCTRPPCTLCSLLLRSRTVYTAARHFVSVARYYILCRSLRPATRTICVWW

SEQ ID NO: 8165 - protein, 184 aa, Glycine max
  misc_feature (100)..(100): Xaa can be any naturally occurring amino acid
  misc_feature (130)..(130): Xaa can be any naturally occurring amino acid
  misc_feature (140)..(140): Xaa can be any naturally occurring amino acid
  Coding DNA Sequence Number=SeqID_3565
  Gene Ontology: Mol. function=oxidoreductase activity, acting on single donors with incorporation of molecular oxygen, incorporation of two atoms of oxygen; Cellular component=cytoplasm; Biological process=fatty acid biosynthetic process
  Homolog annotation: Hit_ID=P27480; Match level="QueryCoverage=100%, HitCoverage=21%, E-value=6e-71, Identity=67%"; Hit description =Lipoxygenase 1
  Pfam annotation: Domain name=Lipoxygenase; Domain location=1-183; Score=-289.6; E_value=9.4e-06; Accession=PF00305.9; Description =Lipoxygenase
DSLYMNALALQSRVNSNGVIERSLLPGYYSLEMSSAVYKSWVFTDQSLPADLIKRGMAIDDPCAHHGLILVIEDYPYAADGLKIWDAIHTWVKNYVSLSXPTYDAFQKDSELLAWWKEAVVTGHGDWKDXSWCPKLNTAXDFVHICSIVMWIAASLHASLNYGLYLYGGVILNRTTITRRCLSE

SEQ ID NO: 8166 - protein, 106 aa, Glycine max
  Coding DNA Sequence Number=SeqID_3566
  Gene Ontology: Mol. function=zinc ion binding; Cellular component =intracellular; Biological process=regulation of transcription
  Homolog annotation: Hit_ID=A9PEF7; Match level="QueryCoverage=100%, HitCoverage=100%, E-value=2e-41, Identity=75%"; Hit description =Putative uncharacterized protein
  Pfam annotation: Domain name=DUF1909; Domain location=17-78; Score= -6.9; E_value=0.04; Accession=PF08927.1; Description=Domain of unknown function (DUF1909)
  Pfam annotation: Domain name=zf-C2H2; Domain location=47-70; Score =16.6; E_value=0.096; Accession=PF00096.16; Description=Zinc finger, C2H2 type
  Pfam module annotation: Pfam domain module=DUF1909::zf-C2H2; Domain location=17-78::47-70
MTGKAKPKKHTAKELQAKADAALTNRGGGKAGLADRTGKEKGGHAKYECPHCKITAPDLKTMQIHHESKHPKLPYEEPKNLHEALGAAAPESSSKPKPGIRGSLKK

SEQ ID NO: 8167 - protein, 119 aa, Glycine max
  misc_feature (11)..(11): Xaa can be any naturally occurring amino acid
  misc_feature (20)..(20): Xaa can be any naturally occurring amino acid
  misc_feature (63)..(63): Xaa can be any naturally occurring amino acid
  misc_feature (97)..(97): Xaa can be any naturally occurring amino acid
  Coding DNA Sequence Number=SeqID_3567
  Gene Ontology: Mol. function=guanyl-nucleotide exchange factor activity
  Homolog annotation: Hit_ID=A7PDN1; Match level="QueryCoverage=100%, HitCoverage=6%, E-value=1e-27, Identity=57%"; Hit description =Chromosome chr11 scaffold_13, whole genome shotgun sequence
WLTYLCDAHHXMQSCSYTAXFPIAFSFEKTQGLVSINNGVWSKDHVSALQKICPMVSNYITSXASPTEVETYGASKLTVDLPVKYLQLANKLFSQYXTFSFFSSILELEIPFTKTLRLY

SEQ ID NO: 8168 - protein, 200 aa, Glycine max
  Coding DNA Sequence Number=SeqID_3568
  Subcellular localization annotation: CTP_CleavageSite=49; ConfidenceScore=5.21e-01
AVVARRRASLVVRQYPAWRVSAHSVLPGGSTPRHVSRTDAALVPFPRARDRVLGSSYIPFLVGEITVLSRVGLCSLAPQPARVPSVELSLSSPWRRPIVPPPPGAIPLPFSSQADSIGSPTISFIHSGCSHASRFTCNSHFVVEAARHAPRPAPAASPLHPRAPVRESRQRALRHSPQAQCFVSSGRARAGTRAAAAGGR

SEQ ID NO: 8169 - protein, 110 aa, Glycine max
  misc_feature (4)..(4): Xaa can be any naturally occurring amino acid
  misc_feature (7)..(9): Xaa can be any naturally occurring amino acid
  misc_feature (11)..(11): Xaa can be any naturally occurring amino acid
  misc_feature (14)..(14): Xaa can be any naturally occurring amino acid
  misc_feature (21)..(21): Xaa can be any naturally occurring amino acid
  misc_feature (30)..(30): Xaa can be any naturally occurring amino acid
  misc_feature (51)..(51): Xaa can be any naturally occurring amino acid
  misc_feature (73)..(73): Xaa can be any naturally occurring amino acid
  misc_feature (79)..(79): Xaa can be any naturally occurring amino acid
  misc_feature (95)..(95): Xaa can be any naturally occurring amino acid
  misc_feature (98)..(98): Xaa can be any naturally occurring amino acid
  misc_feature (110)..(110): Xaa can be any naturally occurring amino acid
  Coding DNA Sequence Number=SeqID_3570
  Subcellular localization annotation: CTP_CleavageSite=30; ConfidenceScore=5.08e-01
CFFXVFXXXFXSFXSYIFSLXLRRGLCHIXHSSKNCCNSFLPLPHVNSHTXLRALSPIARIATSSTTYILRLXYPHTFXLYSSLLRCSRTPRVSXIEXDCRSVVQMRVLX

SEQ ID NO: 8170 - protein, 95 aa, Glycine max
  misc_feature (9)..(9): Xaa can be any naturally occurring amino acid
  misc_feature (32)..(32): Xaa can be any naturally occurring amino acid
  Coding DNA Sequence Number=SeqID_3572
HYPLHMEHXKAVLRGLMLWYHQCLLRQITIDXTKSHECVKSMTLHPYPSQYARSTMFYLHSQYSTSHSSPGKYIHEISIHVSELHTRSRYLVLGI

SEQ ID NO: 8171 - protein, 139 aa, Glycine max
  misc_feature (55)..(55): Xaa can be any naturally occurring amino acid
  misc_feature (90)..(90): Xaa can be any naturally occurring amino acid
  misc_feature (113)..(113): Xaa can be any naturally occurring amino acid
  misc_feature (117)..(117): Xaa can be any naturally occurring amino acid
  misc_feature (120)..(120): Xaa can be any naturally occurring amino acid
  misc_feature (122)..(122): Xaa can be any naturally occurring amino acid
  misc_feature (130)..(130): Xaa can be any naturally occurring amino acid
  Coding DNA Sequence Number=SeqID_3574
HEPRAHAQHTAREPRARALHMRRHKQRHTRFCSARDASLAGWGTSVFYCLDFILXFLSLIVVLWSKAIIARAEQLISCSRCVVGGEVCLXLCSLSLQWGRSSRTRTRQRAPRXANKXRGXIXAPHTKKKXPPHTHNPHK

SEQ ID NO: 8172 - protein, 149 aa, Glycine max
  misc_feature (42)..(42): Xaa can be any naturally occurring amino acid
  Coding DNA Sequence Number=SeqID_3576
  Subcellular localization annotation: CTP_CleavageSite=24; ConfidenceScore=5.23e-01
PPLPITSTHRQLIPAQGSRTYTTRSSSLPPPFSSVVHYTAFXCLHVLYVAVIATDKHLFITPTYTHHPHSSTPISLSIAPLTHSLSYDTSPRAVDRIAISIVPLCNESSPSPSSDTPCSREVSAISTISTLFAATRYVYSMYCALIFAT

SEQ ID NO: 8173 - protein, 118 aa, Glycine max
  misc_feature (1)..(1): Xaa can be any naturally occurring amino acid
  misc_feature (25)..(25): Xaa can be any naturally occurring amino acid
  misc_feature (43)..(44): Xaa can be any naturally occurring amino acid
  misc_feature (46)..(47): Xaa can be any naturally occurring amino acid
  misc_feature (49)..(50): Xaa can be any naturally occurring amino acid
  misc_feature (60)..(61): Xaa can be any naturally occurring amino acid
  misc_feature (64)..(64): Xaa can be any naturally occurring amino acid
  misc_feature (67)..(67): Xaa can be any naturally occurring amino acid
  misc_feature (76)..(77): Xaa can be any naturally occurring amino acid
  misc_feature (80)..(84): Xaa can be any naturally occurring amino acid
  misc_feature (90)..(90): Xaa can be any naturally occurring amino acid
  misc_feature (95)..(95): Xaa can be any naturally occurring amino acid
  misc_feature (99)..(99): Xaa can be any naturally occurring amino acid
  misc_feature (102)..(103): Xaa can be any naturally occurring amino acid
  misc_feature (107)..(109): Xaa can be any naturally occurring amino acid
  misc_feature (113)..(113): Xaa can be any naturally occurring amino acid
  Coding DNA Sequence Number=SeqID_3577
XIIDDYYVTYMLYLFINCVRPNIAXVAGISETVRSEGRGKKGXXGXXIXXSARAARRPPXXPPXPPXRTQRPAARXXGRXXXXXGRGRDXEEREXENTXKEXXREKXXXEGHXPPPPP

SEQ ID NO: 8174 - protein, 154 aa, Glycine max
  misc_feature (92)..(92): Xaa can be any naturally occurring amino acid
  Coding DNA Sequence Number=SeqID_3579
  Homolog annotation: Hit_ID=A7PEL3; Match level="QueryCoverage=97%, HitCoverage=50%, E-value=2e-11, Identity=38%"; Hit description =Chromosome chr11 scaffold_13, whole genome shotgun sequence
VVKQLKVVLMSEALEEVVPSMKGGCEEEGLNLEATELRLGLPGCESPEREGVFKSVVVSGAKRGFSDAIDGNWNGVGSEKMPLPCFLNSKGXCSGSVVLPSLSLSLQQTGPNNQLLWVLLFPGNCSPSPNPYMRLAPNSCSAAKAQVGEWPPIR

SEQ ID NO: 8175 - protein, 50 aa, Glycine max
  Coding DNA Sequence Number=SeqID_3580
CSVHDVKLLRDRKVITVEKERTDKGKKKKIMSNKDLMNLFLSITEEFPRG

SEQ ID NO: 8176 - protein, 137 aa, Glycine max
  misc_feature (77)..(77): Xaa can be any naturally occurring amino acid
  misc_feature (122)..(122): Xaa can be any naturally occurring amino acid
  Coding DNA Sequence Number=SeqID_3582
  Gene Ontology: Cellular component=membrane; Biological process=Golgi organization and biogenesis
  Homolog annotation: Hit_ID=A7PHF8; Match level="QueryCoverage=80%, HitCoverage=14%, E-value=1e-32, Identity=63%"; Hit description =Chromosome chr17 scaffold_16, whole genome shotgun sequence
LTNPLSIANHTHTNPGESKTADPIPAPPRSATELFSDPLDTHPLWFKPASFLSPDFDSESYISELLTLFPFYTLRSXLNSYLSFLNHDLIYLINRDYSDFVNLITKLVDIDAVVVRMQSPLXELRYMIEQFIGSVKV

SEQ ID NO: 8177 - protein, 168 aa, Glycine max; identical to SEQ ID NO: 7121
  misc_feature (22)..(22): Xaa can be any naturally occurring amino acid
  misc_feature (35)..(35): Xaa can be any naturally occurring amino acid
  misc_feature (42)..(42): Xaa can be any naturally occurring amino acid
  misc_feature (52)..(52): Xaa can be any naturally occurring amino acid
  misc_feature (61)..(62): Xaa can be any naturally occurring amino acid
  misc_feature (89)..(89): Xaa can be any naturally occurring amino acid
  misc_feature (112)..(112): Xaa can be any naturally occurring amino acid
  misc_feature (116)..(116): Xaa can be any naturally occurring amino acid
  misc_feature (120)..(120): Xaa can be any naturally occurring amino acid
  misc_feature (122)..(122): Xaa can be any naturally occurring amino acid
  misc_feature (134)..(135): Xaa can be any naturally occurring amino acid
  misc_feature (138)..(138): Xaa can be any naturally occurring amino acid
  misc_feature (168)..(168): Xaa can be any naturally occurring amino acid
  Coding DNA Sequence Number=SeqID_3583

SEQ ID NO: 8178 - protein, 136 aa, Glycine max
  Coding DNA Sequence Number=SeqID_3585
  Homolog annotation: Hit_ID=Q9LU63; Match level="QueryCoverage=100%, HitCoverage=64%, E-value=2e-49, Identity=74%"; Hit description =Arabidopsis thaliana genomic DNA, chromosome 5, P1 clone:MWD22
  Subcellular localization annotation: CTP_CleavageSite=22; ConfidenceScore=5.51e-01
MATTTSSPPCHISVSFLRQLPPCTTVQFFGFSPTQRKLGGLTVARNNLAQDFLGDFGARDPYPAEIASQFGDKVLGPQSTEHKILIPNASVLSLSQLECSPVSPSQAPLSPDEAKTLLHKVLGWSIVEDEAGGLKI

SEQ ID NO: 8179 - protein, 61 aa, Glycine max
  Coding DNA Sequence Number=SeqID_3586
  Subcellular localization annotation: CTP_CleavageSite=34; ConfidenceScore=5.24e-01
GSFIVLCLVANGLQASDSEKLSTPKKSVSYASVRVVLVMSEPVRIVFIGLLRVFIFVVSEI

SEQ ID NO: 8180 - protein, 57 aa, Glycine max
  misc_feature (30)..(31): Xaa can be any naturally occurring amino acid
  Coding DNA Sequence Number=SeqID_3587
ATEAHQQRPLEGFSGCPSVTELLTILGLSXXSLLSNEVWSAPSINGLEDLITTTASS

SEQ ID NO: 8181 - protein, 115 aa, Glycine max
  misc_feature (74)..(74): Xaa can be any naturally occurring amino acid
  misc_feature (92)..(92): Xaa can be any naturally occurring amino acid
  misc_feature (106)..(107): Xaa can be any naturally occurring amino acid
  misc_feature (111)..(111): Xaa can be any naturally occurring amino acid
  Coding DNA Sequence Number=SeqID_3589
VLYIYTTNTRPIGRHAVSMRQRSRIICIALLLSRLIIYELHIICPIVRVRPHTCTTSIYRGYVGTWTGILITLXSHISLCLCSHALICDLTXNRISTPFRSVYARXXAFLXVGRR

SEQ ID NO: 8182 - protein, 109 aa, Glycine max
  misc_feature (29)..(29): Xaa can be any naturally occurring amino acid
  misc_feature (42)..(43): Xaa can be any naturally occurring amino acid
  misc_feature (65)..(65): Xaa can be any naturally occurring amino acid
  misc_feature (69)..(69): Xaa can be any naturally occurring amino acid
  misc_feature (73)..(74): Xaa can be any naturally occurring amino acid
  misc_feature (76)..(76): Xaa can be any naturally occurring amino acid
  misc_feature (101)..(101): Xaa can be any naturally occurring amino acid
  misc_feature (104)..(104): Xaa can be any naturally occurring amino acid
  Coding DNA Sequence Number=SeqID_3591
NPHNIIEHPSSYPNSYMSELKHFHSTPSXVIKRHGMLPVIPXXNTLYPPCCRRRGCAPPLCPRPXFRGXDPLXXAXRPQPVSHPSRQHNKHDATKHFAPPXFAXTKKKH

SEQ ID NO: 8183 - protein, 85 aa, Glycine max
  misc_feature (1)..(1): Xaa can be any naturally occurring amino acid
  misc_feature (14)..(14): Xaa can be any naturally occurring amino acid
  misc_feature (82)..(83): Xaa can be any naturally occurring amino acid
  Coding DNA Sequence Number=SeqID_3593
XQLNTKKDLLFTTXITSKICVKAPHHALWALYKLLASYPLIHTGSWSKSYIGKILISNDPLPAAISYIYSYTQTISSCDSNXXDA

SEQ ID NO: 8184 - protein, 153 aa, Glycine max
  Coding DNA Sequence Number=SeqID_3594
AQAAGLEARRRRPQHARGRPEPEGQLQINFAVVLCHLRHSGARALLCLAHVRARLGLRRRRLSPLLLGCQRLAVVFNTVVVAAAGRRLLVATVALGPGRRRGGGGRALEAGAASGRDAERGGRAVDAVLGDTADAVGRQEAGVRGGLVGGDLG

SEQ ID NO: 8185 - protein, 131 aa, Glycine max
  misc_feature (15)..(15): Xaa can be any naturally occurring amino acid
  misc_feature (17)..(17): Xaa can be any naturally occurring amino acid
  misc_feature (23)..(23): Xaa can be any naturally occurring amino acid
  misc_feature (29)..(29): Xaa can be any naturally occurring amino acid
  misc_feature (50)..(50): Xaa can be any naturally occurring amino acid
  misc_feature (60)..(60): Xaa can be any naturally occurring amino acid
  misc_feature (91)..(91): Xaa can be any naturally occurring amino acid
  misc_feature (97)..(97): Xaa can be any naturally occurring amino acid
  misc_feature (101)..(101): Xaa can be any naturally occurring amino acid
  misc_feature (113)..(113): Xaa can be any naturally occurring amino acid
  misc_feature (121)..(121): Xaa can be any naturally occurring amino acid
  Coding DNA Sequence Number=SeqID_3596
CTLLHSVCRRMQITXYXLSPNEXIFLTLXVRSPQPTVCIVSYASDLCDSXLQSVELCIGXTHSRQVYGLYHDDCSVITQETPHTMEAQYAXGARLLXLRRXVRKHRQHLSESXKKSQQSYXASRRMHASLT

SEQ ID NO: 8186 - protein, 124 aa, Glycine max
  Coding DNA Sequence Number=SeqID_3598
TNNTTPVSNNTTNTTSNNTNGNVALSADQIQGQDVQNALNYGSTQVVQLGQKSGKIPTDTYNITQVASVLKKKQPAGANYNCTVTLKSAANVTVTTNFNVFSNSTSNAMILKAYSYQVAGIKKN

SEQ ID NO: 8187 - protein, 99 aa, Glycine max
  misc_feature (1)..(1): Xaa can be any naturally occurring amino acid
  misc_feature (37)..(37): Xaa can be any naturally occurring amino acid
  misc_feature (52)..(52): Xaa can be any naturally occurring amino acid
  misc_feature (55)..(55): Xaa can be any naturally occurring amino acid
  Coding DNA Sequence Number=SeqID_3600
XRDIRPPPTLREYQYVMEAREHSPTTSHYTSIAYSEXTTLHERPQNESRDRXNNXSVNRYRDTRSLRLSIMHHTHKEALYSLYSFSIVLARAPPCVREI

SEQ ID NO: 8188 - protein, 119 aa, Glycine max
  misc_feature (24)..(24): Xaa can be any naturally occurring amino acid
  misc_feature (35)..(35): Xaa can be any naturally occurring amino acid
  misc_feature (59)..(59): Xaa can be any naturally occurring amino acid
  misc_feature (75)..(75): Xaa can be any naturally occurring amino acid
  misc_feature (83)..(83): Xaa can be any naturally occurring amino acid
  misc_feature (111)..(112): Xaa can be any naturally occurring amino acid
  Coding DNA Sequence Number=SeqID_3601
HMTLPLSTGSYPPCIADADTPHAXTRTAAALHPYXQYAIVIYATLRTLTCPRSHDTLLXHAPTCTISIESDMLYXDVLTHTSXIYIRRSSPNYYTSRDRQYVTHLSTSLVXXHIGTLRY

SEQ ID NO: 8189 - protein, 141 aa, Glycine max
  Coding DNA Sequence Number=SeqID_3603
  Gene Ontology: Mol. function=protein binding; Biological process =determination of adult life span
  Homolog annotation: Hit_ID=A1E385; Match level="QueryCoverage=58%, HitCoverage=37%, E-value=1e-13, Identity=39%"; Hit description=25 kDa small heat shock protein
  Pfam annotation: Domain name=HSP20; Domain location=41-140; Score =18.0; E_value=6.5e-05; Accession=PF00011.11; Description=Hsp20alpha crystallin family
MAQRPYFFEEHFPASYHLTFAPPVQRHAGALNYPREDLDKMAHMDKDGYHLYVDVKEYEPDEISVRTIDETIIVEGRQKKRAGSNALPRHFVRHFRLPEHYDSEDVFSAISDDKILEIRALPAHMKRCRPHIAPTTTEEKK

SEQ ID NO: 8190 - protein, 151 aa, Glycine max
  Coding DNA Sequence Number=SeqID_3604
YYTEYISVTTRGVKLCGGKQRGITLQQSAQNMLRQIVAIFTYMAFGANHVPTLAHISCFSNVCGIIWPNFYFVTLALSPRVKNTSILGQSLSTSCSHLAKTMGIHIGKRGSVGVKNGQKRALRVKRVRHQSPTPPTRLYKIIKIKPRPLCG

SEQ ID NO: 8191 - protein, 165 aa, Glycine max
  misc_feature (20)..(20): Xaa can be any naturally occurring amino acid
  misc_feature (41)..(41): Xaa can be any naturally occurring amino acid
  misc_feature (67)..(67): Xaa can be any naturally occurring amino acid
  misc_feature (69)..(71): Xaa can be any naturally occurring amino acid
  misc_feature (133)..(133): Xaa can be any naturally occurring amino acid
  misc_feature (138)..(138): Xaa can be any naturally occurring amino acid
  misc_feature (141)..(141): Xaa can be any naturally occurring amino acid
  Coding DNA Sequence Number=SeqID_3606
IILQDGEAPSANLELRPILXRRILRCESYCMDWRCTHARLXGGAAAPTPTRECWTTSHSKTISPHDXSXXXTPSPTHPAPSLILLSLQIVCSTSPLSLLTLSRLCFAVISSCLALRVIIVVGDDELVCKLMVXLCTLXHSXVYYLSHRCLLSISCVWNHTISRYL

SEQ ID NO: 8192 - protein, 158 aa, Glycine max
  misc_feature (14)..(14): Xaa can be any naturally occurring amino acid
  misc_feature (55)..(55): Xaa can be any naturally occurring amino acid
  misc_feature (148)..(148): Xaa can be any naturally occurring amino acid
  Coding DNA Sequence Number=SeqID_3608
  Subcellular localization annotation: CTP_CleavageSite=68; ConfidenceScore=5.13e-01
YCGPRAHTQTTCAXHHTRTVVARLVRRAERSVQHRERQHRRPLPQRPSEPRHSRXLSRARPRRPPAARCATSATGDARVPASPVTGGAAGGHSYGEWYHGCGTSTHNTHTHRLHCGQDRVHEVHTISYVYAEREKTQSTGSRVSVEGXRRPSPPRPGR

SEQ ID NO: 8193 - protein, 51 aa, Glycine max
  Coding DNA Sequence Number=SeqID_3610
  Gene Ontology: Mol. function=nucleotide binding; Cellular component =myosin complex; Biological process=protein amino acid phosphorylation
  Homolog annotation: Hit_ID=UPI000034F472; Match level="QueryCoverage =92%, HitCoverage=3%, E-value=1e-18, Identity=89%"; Hit description =XIC (Myosin-like protein XIC); motor/ protein binding
DSICMFPKSTHETFANKLYQTFKNHKRFIKPKLSRTDFTIAHYAGEVRLIS

SEQ ID NO: 8194 - protein, 137 aa, Glycine max
  misc_feature (18)..(18): Xaa can be any naturally occurring amino acid
  misc_feature (133)..(133): Xaa can be any naturally occurring amino acid
  Coding DNA Sequence Number=SeqID_3611
ASRLGSTNSGRREVHEEXMKRSSGNKLSTYHIHWRTRDPSCLHLPQRRAAALPRPRTDKSSMNGRRTAFSFSYRAALVSYGPEDVLPEPPSRRTRILRTATQEVGEKTQNKRESIRDTARDERPAGGSPDHRXTRHV

SEQ ID NO: 8195 - protein, 115 aa, Glycine max
  misc_feature (48)..(48): Xaa can be any naturally occurring amino acid
  Coding DNA Sequence Number=SeqID_3613
  Homolog annotation: Hit_ID=A5C6X3; Match level="QueryCoverage=74%, HitCoverage=21%, E-value=9e-17, Identity=52%"; Hit description =Putative uncharacterized protein
NKNPKPSLCCHTHQIYTTTSKFKNYVSLAMSDSDPKTRPRPGPWPPAXPDAKAMPPASWAKKTGFKPKFSGEANASDSGQISLQPKPREPDTNVDLEAGRLRHPHGPPSLPRIRS

SEQ ID NO: 8196 - protein, 131 aa, Glycine max
  misc_feature (66)..(67): Xaa can be any naturally occurring amino acid
  misc_feature (87)..(87): Xaa can be any naturally occurring amino acid
  misc_feature (92)..(92): Xaa can be any naturally occurring amino acid
  misc_feature (126)..(126): Xaa can be any naturally occurring amino acid
  Coding DNA Sequence Number=SeqID_3614
LLSPAASLSRRVDLASSEHMYMNITITASVYYSEYICRLSPTQRQRFDATSSHACRSLVAHGYATXXRRVSDNSSLWLDEDGRMRVXTRDKXTRTTLTEMYDVSWTFSRPMSHSYWRLCLQPAEAXAPDLD

SEQ ID NO: 8197 - protein, 143 aa, Glycine max
  misc_feature (35)..(35): Xaa can be any naturally occurring amino acid
  misc_feature (92)..(92): Xaa can be any naturally occurring amino acid
  misc_feature (107)..(107): Xaa can be any naturally occurring amino acid
  misc_feature (110)..(110): Xaa can be any naturally occurring amino acid
  misc_feature (127)..(128): Xaa can be any naturally occurring amino acid
  Coding DNA Sequence Number=SeqID_3616
SDPCMRSCILLTHRSHTSSIPISLHIDYTLHWLTXHTLIVYPECWTDSYLRRQRRARCSDVYVDAIIRATMHLTLRHDELRSLALSCDLRRXVSCLMARVCHRECTXLHXITMRIRCASHYVLPLFXXDTSRSYSTGSHATHC

SEQ ID NO: 8198 - protein, 144 aa, Glycine max
  Coding DNA Sequence Number=SeqID_3618
KSSLDEEHFRSRHLFHKKESSSSEEEHPFSKQGHRDDILSAHEHSLFPHFNEDYSSFDDDHRLRTRSRSLRLKANFLVERETELGEGGIILNLENSLLSGEFGRFIREVFGGFFNPRAHFQPPEITVFFFGLRAKIRPLLRANL

SEQ ID NO: 8199 - protein, 131 aa, Glycine max
  misc_feature (28)..(28): Xaa can be any naturally occurring amino acid
  misc_feature (30)..(30): Xaa can be any naturally occurring amino acid
  misc_feature (35)..(35): Xaa can be any naturally occurring amino acid
  misc_feature (47)..(47): Xaa can be any naturally occurring amino acid
  misc_feature (57)..(57): Xaa can be any naturally occurring amino acid
  misc_feature (59)..(59): Xaa can be any naturally occurring amino acid
  misc_feature (84)..(84): Xaa can be any naturally occurring amino acid
  misc_feature (91)..(91): Xaa can be any naturally occurring amino acid
  misc_feature (109)..(109): Xaa can be any naturally occurring amino acid
  misc_feature (116)..(116): Xaa can be any naturally occurring amino acid
  Coding DNA Sequence Number=SeqID_3620
GVHRVSLTATPCNDSLCRACAEERCANXRXTTRTXTYCRSVTPDRYXTSCSSHHRPXPXHAHRRSRVSITPSSHDDAYAHSNLXQLLLLHXVQSYARSEVLVYSYCYNXALANILXSISYTMADYRRCNEQ

SEQ ID NO: 8200 - protein, 174 aa, Glycine max
  misc_feature (2)..(2): Xaa can be any naturally occurring amino acid
  misc_feature (4)..(4): Xaa can be any naturally occurring amino acid
  misc_feature (15)..(15): Xaa can be any naturally occurring amino acid
  misc_feature (17)..(17): Xaa can be any naturally occurring amino acid
  misc_feature (32)..(32): Xaa can be any naturally occurring amino acid
  misc_feature (89)..(89): Xaa can be any naturally occurring amino acid
  Coding DNA Sequence Number=SeqID_3622
DXKXRFGKLGDENQXLXNIISEMSREREALFXRCAELEELNNTVRVLQEKVKILIDENERLNDIIVDKDRALDGLRSRCAELERMQKDXGDAQAKLALLLTEKERLSREIEERRREAEQWRNKHAEIEGRNANLNREVEKTKRSSNNYENKVNYLVGENERLNEHMNEKKKKKK

SEQ ID NO: 8201 - protein, 123 aa, Glycine max
  Coding DNA Sequence Number=SeqID_3624
DKKLVLPPRCLLTKVSFFFPEFSIFPPHVRDFFLNSKNILFTKKRFLPPFFYNVWGGKQNYRNRSLIQFHTSPKESNFNCKKKFFHFVYSKENFLISLKKKKKKKKKKKKKKKKKKKRKKKKK

SEQ ID NO: 8202 - protein, 117 aa, Glycine max
  misc_feature (2)..(3): Xaa can be any naturally occurring amino acid
  misc_feature (5)..(5): Xaa can be any naturally occurring amino acid
  misc_feature (14)..(14): Xaa can be any naturally occurring amino acid
  misc_feature (38)..(38): Xaa can be any naturally occurring amino acid
  misc_feature (41)..(41): Xaa can be any naturally occurring amino acid
  misc_feature (51)..(51): Xaa can be any naturally occurring amino acid
  misc_feature (59)..(59): Xaa can be any naturally occurring amino acid
  misc_feature (65)..(65): Xaa can be any naturally occurring amino acid
  misc_feature (71)..(71): Xaa can be any naturally occurring amino acid
  misc_feature (74)..(74): Xaa can be any naturally occurring amino acid
  misc_feature (86)..(86): Xaa can be any naturally occurring amino acid
  misc_feature (104)..(104): Xaa can be any naturally occurring amino acid
  Coding DNA Sequence Number=SeqID_3625
SXXTXARTMRDYTXEHPPPSSRSTTLRCRGEGLAAQPXHTXLYMYRSNNGXLYISHHLXQTHLHXLHLITXPHXNTLPHYVVTVVXTPSHSSCTTTNSRHDNRXYKHMTSLSDTQIR

SEQ ID NO: 8203 - protein, 70 aa, Glycine max
  Coding DNA Sequence Number=SeqID_3627
  Subcellular localization annotation: CTP_CleavageSite=42; ConfidenceScore=5.09e-01
HHLIINLHLTLKKKRRNFLIQPPLSLLFSLRDLFSSSLLAPLVNKKSGVSLESYTPTFPLEKFSNFIQQV

SEQ ID NO: 8204 - protein, 54 aa, Glycine max
  misc_feature (32)..(32): Xaa can be any naturally occurring amino acid
  misc_feature (38)..(39): Xaa can be any naturally occurring amino acid
  Coding DNA Sequence Number=SeqID_3629
LYESYILSKNYGIGRIFSAPILFLGLTGSYKXFWSFGXXDSRWFGYLLYLFIGT

SEQ ID NO: 8205 - protein, 205 aa, Glycine max
  Coding DNA Sequence Number=SeqID_3631
  Subcellular localization annotation: CTP_CleavageSite=29; ConfidenceScore=5.12e-01
GWGVYGCGASGSWARVLLCSFGSGGPSPRAVAASAGCLIARVVEVPNHLLFGVGGGEKWSEGMWGVADVQVFFLGPWGRGGRGWEAHPLAWGFGRPCGGCVGFAVPTHGVGGGGTFALQVLCCQGLGGAFPCVRRGASQRRRGVVVRVLFAHRRQFLAAVPSLGGRRHGEAPAPREESAVVASLGGLGVRPVRGFPWPGRPEGSG

SEQ ID NO: 8206 - protein, 186 aa, Glycine max
  misc_feature (9)..(9): Xaa can be any naturally occurring amino acid
  misc_feature (67)..(67): Xaa can be any naturally occurring amino acid
  misc_feature (89)..(89): Xaa can be any naturally occurring amino acid
  misc_feature (134)..(134): Xaa can be any naturally occurring amino acid
  misc_feature (137)..(137): Xaa can be any naturally occurring amino acid
  misc_feature (167)..(167): Xaa can be any naturally occurring amino acid
  misc_feature (181)..(182): Xaa can be any naturally occurring amino acid
  Coding DNA Sequence Number=SeqID_3633
  Subcellular localization annotation: CTP_CleavageSite=55; ConfidenceScore=5.37e-01
RHTNSVPTXHRPLHPNNASHPFSLCTYSLALSLLSRRRAPRPHRNLCCVSHHACPASAVCCISYSHXLISFCKSHTRHVDHYTYIQHTXTHVLTISTALLTPAHRSTTQRTSRVLERVQYLNYLVNKLIYCAHXVSXTIHTIFYLFSAPHTHYRNSRIRIAGASSPXSARTAAPSDGRRTXXALNI

SEQ ID NO: 8207 - protein, 194 aa, Glycine max
  Coding DNA Sequence Number=SeqID_3635
  Gene Ontology: Mol. function=guanylate kinase activity; Cellular component=cytoplasm; Biological process=purine nucleotide metabolic process
  Homolog annotation: Hit_ID=A8FD33; Match level="QueryCoverage=100%, HitCoverage=95%, E-value=1e-105, Identity=99%"; Hit description =Guanylate kinase
  Pfam annotation: Domain name=Guanylate_kin; Domain location=41-145; Score=167.0; E_value=4.9e-47; Accession=PF00625.11; Description =Guanylate kinase
MKERGLLIVLSGPSGVGKGTVRQAIFSQEDTKFEYSISVTTRKPREGERNGVDYFFKTREEFEHMIENKKLLEWAEYVGNYYGTPVDYVEQTLSEGKDVFLEIEVQGALQVREAFPEGLFIFLAPPSLSELQNRIITRGTESEELIRNRMAAAKEEIEMMDAYDYVVENDDVELACERIKAIVLAEHLRRDRVA

SEQ ID NO: 8208 - protein, 403 aa, Glycine max
  misc_feature (17)..(17): Xaa can be any naturally occurring amino acid
  misc_feature (40)..(40): Xaa can be any naturally occurring amino acid
  misc_feature (68)..(68): Xaa can be any naturally occurring amino acid
  misc_feature (77)..(77): Xaa can be any naturally occurring amino acid
  misc_feature (116)..(116): Xaa can be any naturally occurring amino acid
  misc_feature (122)..(122): Xaa can be any naturally occurring amino acid
  misc_feature (213)..(213): Xaa can be any naturally occurring amino acid
  misc_feature (238)..(238): Xaa can be any naturally occurring amino acid
  misc_feature (359)..(359): Xaa can be any naturally occurring amino acid
  Coding DNA Sequence Number=SeqID_3636
  Subcellular localization annotation: CTP_CleavageSite=45; ConfidenceScore=5.39e-01
VLSLALSLYRARLVSLXRPLSATFCSSRVYSSLCYLPARXPVCVCLDAPRSLAQSSVPISWLSRVHRXFVLLLSVFXSSSPLPHLCLVPPLVYRPRVDFYFLACVGSCLFLLYCYXTLVFSXRRCYIYSRALVLTLAFTDALYLAPSLVGYDFVRSLLARRCVPVYAACLLSCSHRVFVYFLARCPFLVVFFSVLFVLHLAFSTICCSSLSFXSPSVLPATSSSAAPHPRAPAPARGXSLLSCLFCPVRCLSVFSVFSCSGAFVPLFSLPSLFAAPPPSLFVCPSRAADSRLYVFLWFLCACVFSALRPFRPRVSYHSYLSSPGRSKSVPVVGRVLSLRSLPSLLLPACPLVVQRVSRXASCPFLGKALQPCVSCLTGVSSRSRCVLFLSSSLSYCYLFFLFF

SEQ ID NO: 8209 - protein, 236 aa, Glycine max
  misc_feature (28)..(28): Xaa can be any naturally occurring amino acid
  misc_feature (77)..(77): Xaa can be any naturally occurring amino acid
  misc_feature (87)..(87): Xaa can be any naturally occurring amino acid
  misc_feature (94)..(94): Xaa can be any naturally occurring amino acid
  misc_feature (99)..(99): Xaa can be any naturally occurring amino acid
  misc_feature (107)..(107): Xaa can be any naturally occurring amino acid
  misc_feature (121)..(121): Xaa can be any naturally occurring amino acid
  misc_feature (151)..(151): Xaa can be any naturally occurring amino acid
  misc_feature (165)..(165): Xaa can be any naturally occurring amino acid
  misc_feature (195)..(195): Xaa can be any naturally occurring amino acid
  misc_feature (208)..(208): Xaa can be any naturally occurring amino acid
  misc_feature (227)..(227): Xaa can be any naturally occurring amino acid
  misc_feature (229)..(229): Xaa can be any naturally occurring amino acid
  Coding DNA Sequence Number=SeqID_3637
ATDTQTRMTRAMSESRAVLYSVSVSARXLQHASLTHRFKCESLGVGSLVSLLRDVGVCDTQHSVSNTCKSDTHRSLXLRLAVCVVWXQSRVSCXISLQXSIHFTPRXKTHHRRVASSLASXARVAYTVNMSCSDYISTRHPQTPMLRMNIXRGHVDWLARLYECXRSRRIAESYLRRSPHPAHSPRKYTSGAPLXECLGALLVTRPLXRVCASCCRARAVLYIHTHXDXSRMRVPV

SEQ ID NO: 8210 - protein, 158 aa, Glycine max
  misc_feature (3)..(4): Xaa can be any naturally occurring amino acid
  misc_feature (10)..(11): Xaa can be any naturally occurring amino acid
  misc_feature (18)..(18): Xaa can be any naturally occurring amino acid
  misc_feature (22)..(22): Xaa can be any naturally occurring amino acid
  misc_feature (26)..(26): Xaa can be any naturally occurring amino acid
  misc_feature (34)..(34): Xaa can be any naturally occurring amino acid
  misc_feature (60)..(60): Xaa can be any naturally occurring amino acid
  misc_feature (66)..(66): Xaa can be any naturally occurring amino acid
  misc_feature (70)..(70): Xaa can be any naturally occurring amino acid
  Coding DNA Sequence Number=SeqID_3639
CGXXCVVGCXXLLDLCIXLSRXPPRXAAPPHYIXRAPPLVLQRQESHLAGRRAMDVIITXFSCLSXPFTXPRGEIKSKRVEMNIYFLPTPPLQRILIIRRALSSASYFSLPKSFILHYRTTRKRRTHSPNIDGDRLYMSSTCLSRASIQRRRGRVAGL

SEQ ID NO: 8211 - protein, 81 aa, Glycine max
  Coding DNA Sequence Number=SeqID_3641
HVKIFRSEVKTQTGSDAVLQRPCYISFAKQVWELIPWLFNSSLAESFGKGQETSHLRINLQGFRQGPISFQGCLCYQELQN

SEQ ID NO: 8212 - protein, 195 aa, Glycine max
  misc_feature (1)..(1): Xaa can be any naturally occurring amino acid
  misc_feature (23)..(23): Xaa can be any naturally occurring amino acid
  misc_feature (33)..(33): Xaa can be any naturally occurring amino acid
  misc_feature (38)..(38): Xaa can be any naturally occurring amino acid
  misc_feature (57)..(58): Xaa can be any naturally occurring amino acid
  misc_feature (66)..(66): Xaa can be any naturally occurring amino acid
  misc_feature (72)..(72): Xaa can be any naturally occurring amino acid
  misc_feature (88)..(88): Xaa can be any naturally occurring amino acid
  misc_feature (131)..(131): Xaa can be any naturally occurring amino acid
  misc_feature (167)..(167): Xaa can be any naturally occurring amino acid
  misc_feature (185)..(185): Xaa can be any naturally occurring amino acid
  Coding DNA Sequence Number=SeqID_3643
  Subcellular localization annotation: CTP_CleavageSite=41; ConfidenceScore=5.05e-01
XCDAPQSIAVYTCAVVRATRRRXYSLCSIETHXSSMSXRVYASSRRVARTRDRVMYXXRVPERYTXYRYVSXSSPTQRRHSDMSAAVXALSRHATRTHSTHRLIHATPHAYIGETASATSLPMHRHTAGRXNVNAAMTSMRVVCRRRVRVRDVYCASTTTHSRARSXPSSSAGDTDTGRARDTRXSIYVEARVCA

SEQ ID NO: 8213 - protein, 128 aa, Glycine max
  misc_feature (9)..(9): Xaa can be any naturally occurring amino acid
  misc_feature (21)..(22): Xaa can be any naturally occurring amino acid
  misc_feature (29)..(29): Xaa can be any naturally occurring amino acid
  misc_feature (34)..(36): Xaa can be any naturally occurring amino acid
  misc_feature (41)..(41): Xaa can be any naturally occurring amino acid
  misc_feature (51)..(54): Xaa can be any naturally occurring amino acid
  misc_feature (60)..(60): Xaa can be any naturally occurring amino acid
  misc_feature (80)..(80): Xaa can be any naturally occurring amino acid
  misc_feature (95)..(95): Xaa can be any naturally occurring amino acid
  misc_feature (99)..(100): Xaa can be any naturally occurring amino acid
  misc_feature (107)..(108): Xaa can be any naturally occurring amino acid
  misc_feature (110)..(113): Xaa can be any naturally occurring amino acid
  misc_feature (115)..(119): Xaa can be any naturally occurring amino acid
  misc_feature (122)..(122): Xaa can be any naturally occurring amino acid
  misc_feature (124)..(125): Xaa can be any naturally occurring amino acid
  Coding DNA Sequence Number=SeqID_3645
MLSQYAMLXASRDRRVVRATXXQSTRTRXEKRRXXXSLAYXFRRLAASHHXXXXPPRDAXPVPVFAAGRTRKHHTYSQSXTPHPTGHSTIHTLAXHSYXXSTACGAXXRXXXXKXXXXXIYXNXXCDM

SEQ ID NO: 8214 - protein, 54 aa, Glycine max
  misc_feature (15)..(15): Xaa can be any naturally occurring amino acid
  misc_feature (29)..(29): Xaa can be any naturally occurring amino acid
  misc_feature (42)..(42): Xaa can be any naturally occurring amino acid
  misc_feature (45)..(45): Xaa can be any naturally occurring amino acid
  Coding DNA Sequence Number=SeqID_3647
LVVSPMTCFSSSIAXSIFRFHYAHIFYAXFGILCAWYRIGLXNTXKLTLFLFFY

SEQ ID NO: 8215 - protein, 93 aa, Glycine max
  Coding DNA Sequence Number=SeqID_505
  Homolog annotation: Hit_ID=P82629; Match level="QueryCoverage=62%, HitCoverage=54%, E-value=4e-08, Identity=47%"; Hit description =Protein SCRL10 precursor
  Pfam annotation: Domain name=SCRL; Domain location=24-89; Score=-0.1; E_value=0.026; Accession=PF06876.3; Description=Plant self -incompatibility response (SCRL
KHLCWSKYHHEAKKHSSYCVGFVALISHTYGEIRFCPKEMTLDGSCPLGTSGQSCFLEFLDRLGASAMPMNCSCKDDRTKNKRLCTCNVVCRT

SEQ ID NO: 8216 - protein, 140 aa, Glycine max
  misc_feature (7)..(7): Xaa can be any naturally occurring amino acid
  misc_feature (22)..(23): Xaa can be any naturally occurring amino acid
  misc_feature (26)..(26): Xaa can be any naturally occurring amino acid
  misc_feature (57)..(57): Xaa can be any naturally occurring amino acid
  misc_feature (59)..(59): Xaa can be any naturally occurring amino acid
  misc_feature (66)..(66): Xaa can be any naturally occurring amino acid
  misc_feature (70)..(70): Xaa can be any naturally occurring amino acid
  misc_feature (78)..(78): Xaa can be any naturally occurring amino acid
  misc_feature (86)..(87): Xaa can be any naturally occurring amino acid
  misc_feature (91)..(91): Xaa can be any naturally occurring amino acid
  misc_feature (116)..(117): Xaa can be any naturally occurring amino acid
  misc_feature (126)..(126): Xaa can be any naturally occurring amino acid
  Coding DNA Sequence Number=SeqID_506
  Subcellular localization annotation: CTP_CleavageSite=49; ConfidenceScore=5.50e-01
VVHSPSXYHVTTSQIVPRFTSXXSLXTPSRHMIFACSRAPRPPLPHNCRLNLYISLXSXYVAPRRXRRLXAPSRVYLXLHSCTIAXXIRTXIECTPLSLQIQLFNRTRAYRHVCSXXSRPTTRHLXELAIYDIRTILFLD

SEQ ID NO: 8217 - protein, 137 aa, Glycine max
  misc_feature (80)..(80): Xaa can be any naturally occurring amino acid
  Coding DNA Sequence Number=SeqID_508
  Gene Ontology: Mol. function=DNA-3-methyladenine glycosylase I activity; Biological process=base-excision repair
  Pfam annotation: Domain name=Adenine_glyco; Domain location=55-138; Score=-80.9; E_value=0.00079; Accession=PF03352.4; Description =Methyladenine glycosylase
ASQVVTVEYRVFSSGKRALRRSLSNTSSSLRRNMTEERDEKADDCFSDDRKRCAWIAPKSDQSCIAFHNEEWGVPVHDDXLLSLPVVLPELSWKYIRFKRQSFRKFFKEFDSIPTSELTNKKREHPLRRCYHPHYYP

SEQ ID NO: 8218 - protein, 106 aa, Glycine max; identical to SEQ ID NO: 7119
  misc_feature (4)..(4): Xaa can be any naturally occurring amino acid
  misc_feature (6)..(6): Xaa can be any naturally occurring amino acid
  misc_feature (21)..(22): Xaa can be any naturally occurring amino acid
  misc_feature (39)..(40): Xaa can be any naturally occurring amino acid
  misc_feature (45)..(45): Xaa can be any naturally occurring amino acid
  misc_feature (49)..(49): Xaa can be any naturally occurring amino acid
  misc_feature (58)..(58): Xaa can be any naturally occurring amino acid
  misc_feature (60)..(60): Xaa can be any naturally occurring amino acid
  misc_feature (73)..(75): Xaa can be any naturally occurring amino acid
  misc_feature (90)..(92): Xaa can be any naturally occurring amino acid
  misc_feature (94)..(94): Xaa can be any naturally occurring amino acid
  misc_feature (96)..(96): Xaa can be any naturally occurring amino acid
  Coding DNA Sequence Number=SeqID_509
  Subcellular localization annotation: CTP_CleavageSite=45; ConfidenceScore=5.12e-01

SEQ ID NO: 8219 - protein, 137 aa, Glycine max; identical to SEQ ID NO: 7123
  Coding DNA Sequence Number=SeqID_511

SEQ ID NO: 8220 - protein, 92 aa, Glycine max
  misc_feature (32)..(32): Xaa can be any naturally occurring amino acid
  misc_feature (35)..(35): Xaa can be any naturally occurring amino acid
  Coding DNA Sequence Number=SeqID_513
  Subcellular localization annotation: CTP_CleavageSite=49; ConfidenceScore=5.53e-01
QVSSNIQKHVVRARPPRITRHNITVTRVIGPXSTXRGNRLRPTRTPPTYAVLVSTLHAATSSSLPVSNSGTAGTSARLTPRVAWPHEIHAHT

SEQ ID NO: 8221 - protein, 101 aa, Glycine max
  Coding DNA Sequence Number=SeqID_515
  Homolog annotation: Hit_ID=A9LLE9; Match level="QueryCoverage=100%, HitCoverage=94%, E-value=2e-26, Identity=56%"; Hit description =Spiral1
MGRGNSCGGGQSSLNYLFGGGDAPPAEPTNRTAAPAPAAVTATAATSTTVEPAKINKEIPAGIKTPVNNYARAEGQNTGNFITDRPSTKVHAAPGGGSSLD

SEQ ID NO: 8222 - protein, 105 aa, Glycine max
  misc_feature (65)..(65): Xaa can be any naturally occurring amino acid
  Coding DNA Sequence Number=SeqID_516
  Subcellular localization annotation: CTP_CleavageSite=24; ConfidenceScore=5.06e-01
CVYYTLTRVRVLPTPLFGTSSLVSNSNAPSVNCVVPLGCSLLVEFGGYAHPALLCLPHISDCVKXSLILHNICADASTREPRTASSAYCDATRRYCVTCHSLHSD

SEQ ID NO: 8223 - protein, 78 aa, Glycine max
  misc_feature (7)..(7): Xaa can be any naturally occurring amino acid
  misc_feature (9)..(9): Xaa can be any naturally occurring amino acid
  misc_feature (13)..(13): Xaa can be any naturally occurring amino acid
  misc_feature (69)..(69): Xaa can be any naturally occurring amino acid
  Coding DNA Sequence Number=SeqID_3649
RMVCDFXFXPIPXATDFPFVMVVGWIYSVCPPPPLHTLREGGAAPLQGAKCEAARDPSYVRDRYAEVGXVIDCIVSKE

SEQ ID NO: 8224 - protein, 176 aa, Glycine max
  misc_feature (80)..(80): Xaa can be any naturally occurring amino acid
  misc_feature (95)..(95): Xaa can be any naturally occurring amino acid
  misc_feature (104)..(104): Xaa can be any naturally occurring amino acid
  misc_feature (116)..(116): Xaa can be any naturally occurring amino acid
  misc_feature (132)..(132): Xaa can be any naturally occurring amino acid
  misc_feature (146)..(146): Xaa can be any naturally occurring amino acid
  Coding DNA Sequence Number=SeqID_3651
  Gene Ontology: Mol. function=magnesium ion binding; Cellular component=chloroplast; Biological process=photosynthesis, light harvesting
  Homolog annotation: Hit_ID=Q9XF73; Match level="QueryCoverage=67%, HitCoverage=41%, E-value=6e-38, Identity=70%"; Hit description =Putative chlorophyll a/b-binding protein
  Pfam annotation: Domain name=Chloroa_b-bind; Domain location=68-176; Score=3.1; E_value=1.3e-05; Accession=PF00504.12; Description =Chlorophyll A-B binding protein
MVLSSPIIVLDKGRRISGLQSAPKIVANGLTHRRILPIILSEALTQRSRIGHWPSNEPKYLEAHYHGEPPSYLTGEVPRXYCWDTAGLSADPETXFAKNGELEXIHSRRAMLGALXGCVIPEVLVRNRVKYXQAVWFEAGSQIFTXGGLDYLGKRNVIHDPSILSIWATLHILMGA

SEQ ID NO: 8225 - protein, 96 aa, Glycine max
  Coding DNA Sequence Number=SeqID_3652
GGGFVYFYICGCVERVAQYHNKWHNIGGGAYVIILRAYRIMHRAGGWEGNSRFISAPWGSHLVMVSARLSVRNTRQGRGGYGGESAGAFVGGVGGH

SEQ ID NO: 8226 - protein, 117 aa, Glycine max
  misc_feature (86)..(86): Xaa can be any naturally occurring amino acid
  Coding DNA Sequence Number=SeqID_3654
HAIKYVVDIVSLTCSLTESIARIESGLHPSCSLTSHHCVHKRIHYCQVTIRISYILHSRTHLSLRDLHISTSPSFMYCHSPECVCXATLATTPERCAVLSQASPARLSATLLVILSM

SEQ ID NO: 8227 - protein, 170 aa, Glycine max
  misc_feature (61)..(61): Xaa can be any naturally occurring amino acid
  misc_feature (139)..(139): Xaa can be any naturally occurring amino acid
  Coding DNA Sequence Number=SeqID_3656
  Gene Ontology: Mol. function=phosphatidate phosphatase activity; Cellular component=membrane; Biological process=plant-type hypersensitive response
  Homolog annotation: Hit_ID=Q9FVL1; Match level="QueryCoverage=99%, HitCoverage=52%, E-value=1e-68, Identity=75%"; Hit description =Phosphatidic acid phosphatase beta
MPEDQLNRHTIRSHGAKVARTHMHDWLILLLLAIIDGILNVIEPFHRFVGQGRMSDLRYPXLKANTIPFWAGPIVAILLPLAVFLVYYFIRKDVYDLHHAIMGLLFSVLITAVMTDAIKDAVGRPRPDFFWRCFPDGKXVFDPVTSNVLCTENKDVIKERHKNFPSKHTC

SEQ ID NO: 8228 - protein, 91 aa, Glycine max
  Coding DNA Sequence Number=SeqID_3657
  Homolog annotation: Hit_ID=A9P8A9; Match level="QueryCoverage=93%, HitCoverage=93%, E-value=2e-35, Identity=78%"; Hit description =Putative uncharacterized protein
MGFIMEFAENLVLRLMEDPEVRDRKAREHIYEMHERCKKIKEMWALPIRPYGFWTFERHNAQLRWDPQISQVAGRRDPYDDLLKDHPSSSN

SEQ ID NO: 8229 - protein, 128 aa, Glycine max
  Coding DNA Sequence Number=SeqID_3658
GYNNLMFATIYQNSKFILELRIGWDGVSITPLMVNPAPSDSAHWVLLGIFLIYDIVTLFLCLIIKKQDTAADSGAFESLIRKSSGVMCIYMLGHFVLFISVLTHNWHWDAISFDLSLQDVRLSPKPPN

SEQ ID NO: 8230 - protein, 142 aa, Glycine max
  misc_feature (9)..(9): Xaa can be any naturally occurring amino acid
  misc_feature (32)..(32): Xaa can be any naturally occurring amino acid
  misc_feature (55)..(55): Xaa can be any naturally occurring amino acid
  misc_feature (65)..(65): Xaa can be any naturally occurring amino acid
  Coding DNA Sequence Number=SeqID_3660
  Gene Ontology: Mol. function=prolyl aminopeptidase activity; Cellular component=cytoplasm; Biological process=proteolysis
  Homolog annotation: Hit_ID=A7QGY3; Match level="QueryCoverage=99%, HitCoverage=42%, E-value=2e-49, Identity=69%"; Hit description =Proline iminopeptidase
QLNKNIYPXIEPYSTRVLKVSDLHTIDCEQSXNPTGHAVVVIHGGPGGGTSTSNXGTLLDPDCYXIGLCDQRSAGKSTPHACLEQNTTWDLIDDIEKLREHLEIPEWQVFGGSWGSTLALAYSQSHPDKDTGMILTGIILLG

SEQ ID NO: 8231 - protein, 118 aa, Glycine max
  misc_feature (11)..(11): Xaa can be any naturally occurring amino acid
  Coding DNA Sequence Number=SeqID_3661
  Gene Ontology: Mol. function=structural constituent of ribosome; Cellular component=ribonucleoprotein complex; Biological process =translation
  Homolog annotation: Hit_ID=Q9XH45; Match level="QueryCoverage=100%, HitCoverage=61%, E-value=3e-50, Identity=85%"; Hit description=40S ribosomal protein S7
  Pfam annotation: Domain name=Ribosomal_S7e; Domain location=6-118; Score=52.5; E_value=1.4e-12; Accession=PF01251.8; Description =Ribosomal protein S7e
MFSAQNKIKKXKNAAPTECEEQVAQALFDLENTNQELKSELKDLYINQAVNMDIAGNRKAIVIYVPFRLRKAFRKIHPRLVRELEKKFSGKDVIFVATRRIMRPPKKGAAVQRPRNRT

SEQ ID NO: 8232 - protein, 87 aa, Glycine max
  Coding DNA Sequence Number=SeqID_3662
EKFYRTYKRVVERPKSFNMQVIYILMNLCTYLLVFLSILCIYRSSLCRGSDMHPSSYYHTILPLQRYVDMNLHTCNCTVLLLYEPFI

SEQ ID NO: 8233 - protein, 123 aa, Glycine max
  Coding DNA Sequence Number=SeqID_3664
  Gene Ontology: Mol. function=isomerase activity; Cellular component =endoplasmic reticulum; Biological process=cell redox homeostasis
  Homolog annotation: Hit_ID=Q9GPH2; Match level="QueryCoverage=77%, HitCoverage=19%, E-value=2e-12, Identity=37%"; Hit description =Protein disulfide isomerase
  Pfam annotation: Domain name=Thioredoxin; Domain location=13-86; Score=7.2; E_value=5.4e-05; Accession=PF00085.10; Description =Thioredoxin
SSQLRRPPPPRYSKKLKPEWKKLHEILTTENSKVKTAKVEAYDEKKLAEEYGIEGYPNIKLFIKGQPVDYHGLRVAENIHEFVERQLKSPLTEVNDPQVIENKLKAIRMDCSFDRSRSQSSSS

SEQ ID NO: 8234 - protein, 480 aa, Glycine max
  Coding DNA Sequence Number=SeqID_1561
  Gene Ontology: Mol. function=ATP-dependent helicase activity; Cellular component=nuclear pore; Biological process=intracellular protein transport across a membrane
  Homolog annotation: Hit_ID=Q4HY71; Match level="QueryCoverage=96%, HitCoverage=94%, E-value=4e-55, Identity=31%"; Hit description=ATP -dependent RNA helicase DBP5
  Pfam annotation: Domain name=DEAD; Domain location=89-253; Score =70.0; E_value=7.7e-18; Accession=PF00270.19; Description=DEADDEAH box helicase
  Pfam annotation: Domain name=Helicase_C; Domain location=326-411; Score=78.0; E_value=3.1e-20; Accession=PF00271.21; Description =Helicase conserved C-terminal domain
  Pfam module annotation: Pfam domain module=DEAD::Helicase_C; Domain location=89-253::326-411
MENKPEEVKANQEGETETVENVEATKHVELDEGKDEQIECDDKENNTQLSSNDLQYLLADKEWKDAIVNFPETEKIISRLIELGFAKPSKIQSKTVPFALAKKDVGIIAQSHNGSGKTLGFVLPAVLRIDATKPLMKSQTTFLPQAILIAPNAELCSQIVKIAELVAQPFKDIKVSGGRTPAHLIVKTSQSLVSAISKKEIDLANADVLIVDEADDQLKGDTALRLLQIVSKLPKGAGLFFFSATFTKEAIDYMNQFFAKLSLKFVLRYMLKTDELKLDGIEQYSRKCDPNGKADYIAKLLDKLEVDTQAIIFSNTKNFALRVSNELKSKGHNVGLLMGGLMPQERSEILNSFRESKIKVLITTNLLARGFDQRSIGLVINLDVPRHFGAENNKADCETYLYRVGRTGRFGDVGLAINLYSKEDEKDLIDQVEKFYTVEIKDLSKESGDNEFDLINDKLGKVVKINSKKREENREKIVKS

SEQ ID NO: 8235 - protein, 74 aa, Glycine max
  Coding DNA Sequence Number=SeqID_1562
NRRSRRAIALSLVNTDQEITRPHIRGASCSVTHLCLSAACLGSMPSMREMATYPSIVSSARTLHLYKDIGLLIK

SEQ ID NO: 8236 - protein, 155 aa, Glycine max
  misc_feature (93)..(93): Xaa can be any naturally occurring amino acid
  Coding DNA Sequence Number=SeqID_1564
  Homolog annotation: Hit_ID=A2XXD3; Match level="QueryCoverage=86%, HitCoverage=12%, E-value=1e-25, Identity=49%"; Hit description =Putative uncharacterized protein
DPRVPEEQWRVLIAYWNTEKAKARSAAGKACRAKSTYITKTGSKSFARIFEEESRSGDPALENPESPEDDYAPAMGAKRRASARTYTPAPSPXDLQERSDPQAARAKRKAGDEVSTPRKKVVVTEESRPKNSQENAVLEAARAKRKAEDEAAALR

SEQ ID NO: 8237 - protein, 142 aa, Glycine max
  Coding DNA Sequence Number=SeqID_1565
  Gene Ontology: Mol. function=protein transporter activity; Cellular component=mitochondrial inner membrane; Biological process=protein transport
  Homolog annotation: Hit_ID=A2Q4T7; Match level="QueryCoverage=47%, HitCoverage=42%, E-value=9e-20, Identity=70%"; Hit description =Mitochondrial import inner membrane translocase, subunit Tim17/22
MEDDSPATNTVKGAVTGLAAGTIWGTIVATWYDVPRVERHVALPGLVRTLKMCASYGVTFVAAEGPYIRRTRTRHTQPKEKRLPVTGPILQTSDFPTTNGPRASRRELPISDPPNLPRPKPWPSTFLALPARPVRLPPPPFA

SEQ ID NO: 8238 - protein, 116 aa, Glycine max
  misc_feature (16)..(16): Xaa can be any naturally occurring amino acid
  misc_feature (23)..(23): Xaa can be any naturally occurring amino acid
  misc_feature (73)..(73): Xaa can be any naturally occurring amino acid
  misc_feature (76)..(76): Xaa can be any naturally occurring amino acid
  misc_feature (93)..(93): Xaa can be any naturally occurring amino acid
  Coding DNA Sequence Number=SeqID_1566
WRDYAVRSGARICITXERGGGIXSTNLISTIHHSYESRTPWVVLRTTHTPLFYHQYITLTIIQLHLVIDRSPXPSXLAPFIYHNHYLQYHITXSNTATYMSETDLLVARSLPACDH

SEQ ID NO: 8239 - protein, 109 aa, Glycine max
  Coding DNA Sequence Number=SeqID_1568
  Homolog annotation: Hit_ID=Q8LEQ7; Match level="QueryCoverage=65%, HitCoverage=74%, E-value=3e-23, Identity=73%"; Hit description =Putative uncharacterized protein
  Subcellular localization annotation: CTP_CleavageSite=93; ConfidenceScore=5.43e-01
KNERLIEGQISKVQCQPPESVFRSAASRASAAASRFSTGPKPTPSSSRPAFRMPKQSPLSNRIFRSPVELSCCVETMLPYHTATASALLNSMLSASRRGWIVEGLDETR

SEQ ID NO: 8240 - protein, 384 aa, Glycine max
  misc_feature (311)..(311): Xaa can be any naturally occurring amino acid
  misc_feature (355)..(355): Xaa can be any naturally occurring amino acid
  Coding DNA Sequence Number=SeqID_1569
  Gene Ontology: Mol. function=oxidoreductase activity; Cellular component=peroxisome; Biological process=metabolic process
  Homolog annotation: Hit_ID=Q4ZJ73; Match level="QueryCoverage=100%, HitCoverage=96%, E-value=1e-169, Identity=75%"; Hit description=12 -oxophytodienoate reductase
  Pfam annotation: Domain name=Oxidored_FMN; Domain location=12-363; Score=276.0; E_value=7.4e-80; Accession=PF00724.10; Description =NADH:flavin oxidoreductase  NADH oxidas
  Subcellular localization annotation: CTP_CleavageSite=44; ConfidenceScore=5.35e-01
MADNATTQGSNTLFSPYKMAKFNLSHRVVLAPMTRCRALNWIPQAALAEYYAQRSTPGGFLISEGTLISPTAPGFPHVPGIYSDEQVEAWRNIVDAVHAKGSIIFCQLWHVGRASHPVYQPGGAPPISSTSKPISARWRILLPDGSYGVYPEPRALTTSEISEIVHHYRQAAINAIRAGFDGIEIHGAHGYLIDQFLKDAINDRTDEYGGSLENRCRFLMQVVEAVVSAIGAERVAIRISPAIDFNDAFDSDPLGLGLAVIERLNNLQKELGTKLTYLHVTQPRYTAYGQTESGRPGSEKEEAHLMHNLRXAYEGTYMCSGGSTMKLVMEAVAESHADLVSYGLLFISHSDYGLXLMLHAPLTKFNRMTFYTEDPVIGYTDYPF

SEQ ID NO: 8241 - protein, 107 aa, Glycine max
  misc_feature (2)..(3): Xaa can be any naturally occurring amino acid
  misc_feature (6)..(6): Xaa can be any naturally occurring amino acid
  misc_feature (9)..(9): Xaa can be any naturally occurring amino acid
  misc_feature (13)..(13): Xaa can be any naturally occurring amino acid
  misc_feature (22)..(22): Xaa can be any naturally occurring amino acid
  misc_feature (36)..(36): Xaa can be any naturally occurring amino acid
  misc_feature (42)..(42): Xaa can be any naturally occurring amino acid
  misc_feature (66)..(66): Xaa can be any naturally occurring amino acid
  misc_feature (76)..(76): Xaa can be any naturally occurring amino acid
  misc_feature (81)..(81): Xaa can be any naturally occurring amino acid
  misc_feature (83)..(83): Xaa can be any naturally occurring amino acid
  misc_feature (86)..(86): Xaa can be any naturally occurring amino acid
  misc_feature (88)..(88): Xaa can be any naturally occurring amino acid
  misc_feature (96)..(96): Xaa can be any naturally occurring amino acid
  misc_feature (98)..(99): Xaa can be any naturally occurring amino acid
  Coding DNA Sequence Number=SeqID_1570
  Subcellular localization annotation: CTP_CleavageSite=23; ConfidenceScore=5.05e-01
VXXLSXTSXVLTXVCADTHASXVASNSRPATHAITXCEFLRXTLALMYSYALHILRRRTASALLQXVVSTFVLCTXHSVVXLXDIXCXHLSSYASXIXXCALRSLRG

SEQ ID NO: 8242 - protein, 380 aa, Glycine max
  misc_feature (30)..(30): Xaa can be any naturally occurring amino acid
  misc_feature (38)..(38): Xaa can be any naturally occurring amino acid
  misc_feature (250)..(250): Xaa can be any naturally occurring amino acid
  misc_feature (261)..(261): Xaa can be any naturally occurring amino acid
  Coding DNA Sequence Number=SeqID_3665
  Homolog annotation: Hit_ID=Q5JZR1; Match level="QueryCoverage=96%, HitCoverage=99%, E-value=1e-146, Identity=74%"; Hit description=N -rich protein
ICFQSLQSEIPWTTYNSNDFWKFSDRLEAXSGLANSVXLHDYSIWSKSYSSKRPDQRRNFDVKGSDFNNSSKPFDDDFNDGWKITNSNGPLFSMPHNNNTHTLEVGGFNKGGIYSNTNTTSSLYPNLNNNTLGGFNKGIYSNTTSSPYLNLNNNNNNNNHLNNNLNSNNLKGYKTFFKGEDQFHTPKSAKKNSSNNNNKKHGDNTNNNEATKTAAEKKFKTLPPSESLPKNETIGGYIFVCNNDTMAREXLKGQLFGLPPXRYRDSVRTINSRVAPFFLYNYSTHQLHGIFEAASFGGSNIDPTAWEDKKCPGESRFPAQVQVITRKVCEPLEEDSFRPILHHYDGPKFRLELSVPEALSLLDIFANQNSFDDIFKVIPA

SEQ ID NO: 8243 - protein, 130 aa, Glycine max
  misc_feature (21)..(21): Xaa can be any naturally occurring amino acid
  misc_feature (82)..(82): Xaa can be any naturally occurring amino acid
  Coding DNA Sequence Number=SeqID_3666
RPRPRLTHCAIACLDIYIALXSVGGTNHAQQPRLGHTLYCTLYRASVRRHRATARTTTQRDVGSHVHAMTLNIFSRTIPLSXSYHHSSYTIPHISCALDPYVLCAYDLAREAMTRGTHILRARHTIHTRR

SEQ ID NO: 8244 - protein, 123 aa, Glycine max
  misc_feature (110)..(110): Xaa can be any naturally occurring amino acid
  Coding DNA Sequence Number=SeqID_3668
  Gene Ontology: Mol. function=nucleic acid binding; Cellular component= mitochondrion; Biological process=response to stress
  Homolog annotation: Hit_ID=A5B074; Match level="QueryCoverage=90%, HitCoverage=40%, E-value=2e-39, Identity=66%"; Hit description =Putative uncharacterized protein
  Pfam annotation: Domain name=RRM_1; Domain location=46-117; Score =99.9; E_value=7.8e-27; Accession=PF00076.12; Description=RNA recognition motif. (a.k.a. RRM, R
  Subcellular localization annotation: CTP_CleavageSite=39; ConfidenceScore=5.47e-01
MVSAMAFLNKIGNLVKNSAVKHINQDFSVSTPSLFQAIRSMSSAKLFVGGISYSTDDMSLRESFARYGEVIDVKVIMDRETGRSRGFGFITFATSEDASSAIQGMDGQDXHGRRILSVFRANF

SEQ ID NO: 8245 - protein, 183 aa, Glycine max
  misc_feature (52)..(53): Xaa can be any naturally occurring amino acid
  misc_feature (56)..(56): Xaa can be any naturally occurring amino acid
  misc_feature (62)..(62): Xaa can be any naturally occurring amino acid
  Coding DNA Sequence Number=SeqID_3669
  Gene Ontology: Mol. function=hydrolase activity, hydrolyzing O -glycosyl compounds; Cellular component=cell wall; Biological process= carbohydrate metabolic process
  Homolog annotation: Hit_ID=O65734; Match level="QueryCoverage=43%, HitCoverage=26%, E-value=2e-26, Identity=70%"; Hit description =Xyloglucan endotransglucosylase/hydrolase
VRKIEKVENRFFVDDVPITVFKNSKDLGVKFPFDQPMKIYNSLWNADDWPQXXGLXTTDCSXAPFIPGYKGFHVDVCKLSTDPLDSETQPLSSALLPNPQPQTLPSDATTSSSPHILPSSPFSPDPTSLPSNPTPYTPPIPPPLNSFHLTFSPPYRFIPYPSPTSTPSSHLSLSPPLRFFTFL

SEQ ID NO: 8246 - protein, 108 aa, Glycine max
  misc_feature (46)..(46): Xaa can be any naturally occurring amino acid
  misc_feature (68)..(68): Xaa can be any naturally occurring amino acid
  misc_feature (88)..(88): Xaa can be any naturally occurring amino acid
  misc_feature (102)..(102): Xaa can be any naturally occurring amino acid
  Coding DNA Sequence Number=SeqID_3670
VVAEARGGAGASGEETAWTDFRCNINPSTKPPIVRQFVISVNYFIXFTLSSIYSRYTPTTLVSLYLSXVDDLSRPVLSYSFLSFLAHXPLSSPHYPCVDIVXRDYIII

SEQ ID NO: 8247 - protein, 142 aa, Glycine max
  Coding DNA Sequence Number=SeqID_3672
  Gene Ontology: Mol. function=2 iron, 2 sulfur cluster binding; Cellular component=chloroplast; Biological process=electron transport
  Homolog annotation: Hit_ID=A5B3C7; Match level="QueryCoverage=95%, HitCoverage=88%, E-value=8e-34, Identity=49%"; Hit description =Putative uncharacterized protein
  Pfam annotation: Domain name=Fer2; Domain location=62-138; Score =58.3; E_value=2.6e-14; Accession=PF00111.17; Description=2Fe-2S iron- sulfur cluster binding domain
  Subcellular localization annotation: CTP_CleavageSite=52; ConfidenceScore=5.84e-01
MATLFFNHCPFQTASKNPSLVAPIVKCPSSLRSVKSVSRSFGLKSASSFKVPAMAFFKVKLIGPDGTKNEFEAPADTFILNPPKRAGVELPYSCRGGACSPCAGKIVFGFVGQSDGSFLDGNPLKEGFVFTWVSYPTADCVI

SEQ ID NO: 8248 - protein, 205 aa, Glycine max
  misc_feature (142)..(142): Xaa can be any naturally occurring amino acid
  misc_feature (149)..(149): Xaa can be any naturally occurring amino acid
  Coding DNA Sequence Number=SeqID_3673
  Gene Ontology: Mol. function=transferase activity, transferring phosphorus-containing groups; Cellular component=membrane; Biological process=peptidyl-histidine phosphorylation
  Homolog annotation: Hit_ID=A4ZPP2; Match level="QueryCoverage=100%, HitCoverage=32%, E-value=1e-51, Identity=56%"; Hit description =Ethylene receptor
  Pfam annotation: Domain name=HATPase_c; Domain location=28-159; Score= 39.8; E_value=9.6e-09; Accession=PF02518.16; Description=Histidine kinase-, DNA gyrase B-, and HSP90-like ATPase
ELIKPIPSVKKLPITLILPSDLPTDAIGDEKRLTQTLLNAVGSAGKLTKEGYGTIRVSVAKPKSIQDRRPPQLNTASIDDHSYILVQLKDSGCGISPQEISHLFTKFVQTLNEPSLPSRGTCLGLAILEILLDLIERHISIXTDGPNKXITRTYMIKLQILNYPYPYDHQATDRSQPYREHVLLSRCIPLIIYQDDTICVTRHTR

SEQ ID NO: 8249 - protein, 220 aa, Glycine max
  misc_feature (12)..(12): Xaa can be any naturally occurring amino acid
  misc_feature (32)..(32): Xaa can be any naturally occurring amino acid
  misc_feature (58)..(58): Xaa can be any naturally occurring amino acid
  misc_feature (98)..(98): Xaa can be any naturally occurring amino acid
  misc_feature (116)..(116): Xaa can be any naturally occurring amino acid
  misc_feature (134)..(134): Xaa can be any naturally occurring amino acid
  misc_feature (167)..(167): Xaa can be any naturally occurring amino acid
  misc_feature (184)..(184): Xaa can be any naturally occurring amino acid
  misc_feature (218)..(218): Xaa can be any naturally occurring amino acid
  Coding DNA Sequence Number=SeqID_3674
NYHALCRCFGCXPHRHTTRLHYLTAIIGFSTXLSPRVSTELSSMYTCASLADHLNSSXCARVLLTATRRLLLNTHLTLAAHRVHSCVSTMLLARMCLXTSVLALFYIYHVASRLSXALIIICIRYALLSLSAIXRRNAIWLLFLSSFSRCDDSLRCGPCIYCAHTHXASDARRRSSASSHTTTXTRRATCMVGRICYISSSAVLLARDDWSTRVIRYXCI

SEQ ID NO: 8250 - protein, 114 aa, Glycine max
  Coding DNA Sequence Number=SeqID_3676
  Subcellular localization annotation: CTP_CleavageSite=21; ConfidenceScore=5.04e-01
GMVVGTPRHPPPIKETQRKVMGSGRNTTKTTFASITSHRYFREWVHSFLFFLLYGGGWLIVLFLDTRTLGVSAGYELGAPCWCVWFALLVDGVYLLCRLWRLVVYNQINMKERN

SEQ ID NO: 8251 - protein, 477 aa, Glycine max
  Coding DNA Sequence Number=SeqID_3678
LHYIKLISEVMSLLPPQSYAYPGRLNHHQIYEVDGYEVPNYNGNPLLNSPYLTPHSYPHSPYVPKHLHPKQARHQSGSRLSAGGPPSYSSPFKSASKHILPPGPVYDHQAPVYYGGPHPGHHYHRSFDAQSPYDMGPMPPRGYYPVYTEFDDDPYYGSGRAQSGGLNAEKAIEEIGKIRDLRRAFEDLKAPRDLLDRLQGLKSKGNLGLIAKYDRKKPRKNRKYDDSFESSFAATEQTGSEDSFETDRTEQKIAYVQNYPVVPVNYNGGYALAIVSQPTSPLVLSENQLIAVEPNQIQQVNYPIPVQTTARKTYRAPEKYIPEQKTYQRGKGSQERSMMSIEEDLDKKSVRSDDLNKSKDMLIFGNDAMLNDILGSRRRLRRITTPKKLTHAQHVMQLVEASGNSTHKIPPRTQARKETLEEILIRNRVDEADMKVLKRTLKDVLYQPANLRESQDILESSFTNNNNNASVTKVTQK

SEQ ID NO: 8252 - protein, 123 aa, Glycine max
  Coding DNA Sequence Number=SeqID_3680
  Gene Ontology: Mol. function=rRNA binding; Cellular component =intracellular; Biological process=ribosome biogenesis and assembly
  Homolog annotation: Hit_ID=Q1KUZ1; Match level="QueryCoverage=86%, HitCoverage=58%, E-value=2e-46, Identity=85%"; Hit description =Putative uncharacterized protein
  Pfam annotation: Domain name=Ribosomal_S4; Domain location=1-106; Score=30.7; E_value=5.4e-06; Accession=PF00163.9; Description =Ribosomal protein S4S9 N-terminal domain
MRKLKNHEKKVLKKVNFLEWKREGGHRETLITGRYHMGGRDDYKKYSGLCRMVQKLTNVLKQMDATDPFRIQMTDMLLEKLYNMGVIPTRKSLALTDRLSVSSFCRRRLSTVLVHLKYAEHLT

SEQ ID NO: 8253 - protein, 172 aa, Glycine max
  misc_feature (1)..(1): Xaa can be any naturally occurring amino acid
  misc_feature (4)..(6): Xaa can be any naturally occurring amino acid
  misc_feature (26)..(26): Xaa can be any naturally occurring amino acid
  misc_feature (34)..(35): Xaa can be any naturally occurring amino acid
  misc_feature (37)..(47): Xaa can be any naturally occurring amino acid
  misc_feature (49)..(59): Xaa can be any naturally occurring amino acid
  misc_feature (61)..(71): Xaa can be any naturally occurring amino acid
  misc_feature (73)..(73): Xaa can be any naturally occurring amino acid
  misc_feature (76)..(76): Xaa can be any naturally occurring amino acid
  misc_feature (79)..(80): Xaa can be any naturally occurring amino acid
  misc_feature (82)..(86): Xaa can be any naturally occurring amino acid
  misc_feature (90)..(92): Xaa can be any naturally occurring amino acid
  misc_feature (96)..(96): Xaa can be any naturally occurring amino acid
  misc_feature (98)..(98): Xaa can be any naturally occurring amino acid
  misc_feature (106)..(106): Xaa can be any naturally occurring amino acid
  misc_feature (108)..(109): Xaa can be any naturally occurring amino acid
  misc_feature (111)..(111): Xaa can be any naturally occurring amino acid
  misc_feature (113)..(113): Xaa can be any naturally occurring amino acid
  misc_feature (115)..(116): Xaa can be any naturally occurring amino acid
  misc_feature (118)..(121): Xaa can be any naturally occurring amino acid
  misc_feature (123)..(124): Xaa can be any naturally occurring amino acid
  misc_feature (127)..(127): Xaa can be any naturally occurring amino acid
  misc_feature (130)..(130): Xaa can be any naturally occurring amino acid
  misc_feature (132)..(133): Xaa can be any naturally occurring amino acid
  misc_feature (136)..(138): Xaa can be any naturally occurring amino acid
  misc_feature (141)..(142): Xaa can be any naturally occurring amino acid
  misc_feature (147)..(147): Xaa can be any naturally occurring amino acid
  misc_feature (150)..(150): Xaa can be any naturally occurring amino acid
  misc_feature (156)..(157): Xaa can be any naturally occurring amino acid
  misc_feature (159)..(159): Xaa can be any naturally occurring amino acid
  misc_feature (163)..(163): Xaa can be any naturally occurring amino acid
  Coding DNA Sequence Number=SeqID_3681
  Subcellular localization annotation: CTP_CleavageSite=11; ConfidenceScore=5.06e-01
XDTXXXYHTHRVMHSTTIHTPTHTLXLFLFSLFXXFXXXXXXXXXXXFXXXXXXXXXXXFXXXXXXXXXXXPXAPXPSXXRXXXXXDFSXXXYIIXTXLHLYFSPXYXXGXNXGXXMXXXXPXXCVXQPXGXXGGXXXSFXXYLYLXYFXSIPSQXXRXLTCXYTHQTHSHN

SEQ ID NO: 8254 - protein, 145 aa, Glycine max
  misc_feature (1)..(1): Xaa can be any naturally occurring amino acid
  misc_feature (6)..(6): Xaa can be any naturally occurring amino acid
  misc_feature (9)..(9): Xaa can be any naturally occurring amino acid
  misc_feature (13)..(13): Xaa can be any naturally occurring amino acid
  misc_feature (18)..(18): Xaa can be any naturally occurring amino acid
  misc_feature (21)..(21): Xaa can be any naturally occurring amino acid
  misc_feature (23)..(23): Xaa can be any naturally occurring amino acid
  misc_feature (34)..(34): Xaa can be any naturally occurring amino acid
  misc_feature (39)..(39): Xaa can be any naturally occurring amino acid
  misc_feature (42)..(42): Xaa can be any naturally occurring amino acid
  misc_feature (47)..(47): Xaa can be any naturally occurring amino acid
  misc_feature (51)..(51): Xaa can be any naturally occurring amino acid
  misc_feature (55)..(55): Xaa can be any naturally occurring amino acid
  misc_feature (106)..(106): Xaa can be any naturally occurring amino acid
  misc_feature (114)..(114): Xaa can be any naturally occurring amino acid
  misc_feature (117)..(117): Xaa can be any naturally occurring amino acid
  misc_feature (121)..(121): Xaa can be any naturally occurring amino acid
  Coding DNA Sequence Number=SeqID_3683
  Subcellular localization annotation: CTP_CleavageSite=43; ConfidenceScore=5.45e-01
XIYRDXTGXAGTXTNLSXSVXRXGTSSGPIGQRXGFLMXTRXVASLXQQLXIRLXSNCCTPLKQRQWPWNPFSGDLCTDCATQISCFFGCFKGEFHFGWSTAFHFXVIIVAIFXDLXKLLXGLDRILRTRKRWQWRLRPKRGKLL

SEQ ID NO: 8255 - protein, 66 aa, Glycine max
  Coding DNA Sequence Number=SeqID_3685
  Gene Ontology: Mol. function=transcription factor activity; Cellular component=nucleus; Biological process=regulation of transcription, DNA-dependent
  Homolog annotation: Hit_ID=A3AN33; Match level="QueryCoverage=81%, HitCoverage=7%, E-value=1e-20, Identity=85%"; Hit description =Putative uncharacterized protein
TRGLRFCLLVFSGCLGGYDVEEKAARAYDLAALKYWGTSTHVNFPVEDYREELEEMKNMTRQEYVA

SEQ ID NO: 8256 - protein, 135 aa, Glycine max
  misc_feature (60)..(60): Xaa can be any naturally occurring amino acid
  misc_feature (71)..(73): Xaa can be any naturally occurring amino acid
  Coding DNA Sequence Number=SeqID_3686
  Gene Ontology: Mol. function=sequence-specific DNA binding; Cellular component=cytoplasm; Biological process=regulation of transcription, DNA-dependent
  Homolog annotation: Hit_ID=Q8S4Q2; Match level="QueryCoverage=87%, HitCoverage=88%, E-value=5e-41, Identity=71%"; Hit description =Ethylene-responsive transciptional coactivator-like protein
  Pfam annotation: Domain name=HTH_3; Domain location=78-132; Score =56.4; E_value=1e-13; Accession=PF01381.12; Description=Helix-turn -helix
  Pfam annotation: Domain name=MBF1; Domain location=14-70; Score=25.4; E_value=0.00018; Accession=PF08523.1; Description=Multiprotein bridging factor 1
  Pfam module annotation: Pfam domain module=HTH_3::MBF1; Domain location=78-132::14-70
FVNDCQLINRESINQGFLHKPKHKAQDLRIPKAVNQALRSGAEVLTVKKFYASEREEAGXGTKPAALKRVXXXVRHAIQKARLEKKMSQAELAKQINERTQVVQEYENGKALPNQAVLAKMERVLGVKLRGKIGK

SEQ ID NO: 8257 - protein, 214 aa, Glycine max
  misc_feature (106)..(106): Xaa can be any naturally occurring amino acid
  misc_feature (152)..(152): Xaa can be any naturally occurring amino acid
  Coding DNA Sequence Number=SeqID_3687
  Subcellular localization annotation: CTP_CleavageSite=37; ConfidenceScore=5.66e-01
RARVLRAARHITPRNPRATRGKRSARVCCRRNTPCCVASSARTQYTSAQRSVWRDARSSYRSARRDQYIPVASRNERVSLTTYCTLATTSVHHLSAHLYNSPPSYXYGRERGEHRWTSSLNPRLSAGHASDYVVLTLRHSTPHPSIYLHPAXSVSPSARGLCRLSDDIIYVDACDGAASPRLTRRSHCARRDIKICHMQTQGVAATRVGKLQIV

SEQ ID NO: 8258 - protein, 145 aa, Glycine max
  misc_feature (35)..(35): Xaa can be any naturally occurring amino acid
  misc_feature (115)..(115): Xaa can be any naturally occurring amino acid
  Coding DNA Sequence Number=SeqID_3689
  Gene Ontology: Cellular component=exocyst; Biological process =exocytosis
  Homolog annotation: Hit_ID=Q3SC81; Match level="QueryCoverage=95%, HitCoverage=67%, E-value=3e-23, Identity=44%"; Hit description=ACI49
ESIFSSDYNSGVRSQFLFSLQRLTESAQILLAEFXSTIQKGTSKPAVNGGGVHSLTIQTMNYAAVLGDYLNMLSDIFPRNVLPPHKSSCVPECYLYSPQSDYSTSTPALTAHFTXLILGLLYELYSDTRHVQNVSLSYVFLSDNL

SEQ ID NO: 8259 - protein, 55 aa, Glycine max
  Coding DNA Sequence Number=SeqID_3690
  Homolog annotation: Hit_ID=Q9M3G7; Match level="QueryCoverage=94%, HitCoverage=1%, E-value=4e-08, Identity=51%"; Hit description =Serine/threonine-protein kinase ATM
LLHEIPVLQLEEHVFTESNKLMKSIQVVLNCLNELRIRHVMERFSFTTDTRKQLQ

SEQ ID NO: 8260 - protein, 112 aa, Glycine max
  misc_feature (42)..(42): Xaa can be any naturally occurring amino acid
  misc_feature (53)..(53): Xaa can be any naturally occurring amino acid
  misc_feature (55)..(55): Xaa can be any naturally occurring amino acid
  misc_feature (60)..(60): Xaa can be any naturally occurring amino acid
  misc_feature (65)..(65): Xaa can be any naturally occurring amino acid
  misc_feature (91)..(91): Xaa can be any naturally occurring amino acid
  misc_feature (93)..(93): Xaa can be any naturally occurring amino acid
  Coding DNA Sequence Number=SeqID_3691
RNRCVPCMIRASIYHIHVRYDGVTYVWIHHHDAQSYDYLVCXMRPRCAAVSPXTXLVDYXDVASXSPRALIETDSCDAPWRSSELDEMILXVXTTRCAAAAYHTTIDVLIST

SEQ ID NO: 8261 - protein, 81 aa, Glycine max
  Coding DNA Sequence Number=SeqID_3693
FCLFLSNLYRVSSLVTLSACAPIEFHRVNVQVFPDRYLMPSCKTNFRSWKLCYLKSQIRCSSLRILTMNLTQSLNDAMKNN

SEQ ID NO: 8262 - protein, 124 aa, Glycine max
  misc_feature (8)..(8): Xaa can be any naturally occurring amino acid
  misc_feature (37)..(37): Xaa can be any naturally occurring amino acid
  misc_feature (39)..(40): Xaa can be any naturally occurring amino acid
  misc_feature (44)..(44): Xaa can be any naturally occurring amino acid
  misc_feature (53)..(53): Xaa can be any naturally occurring amino acid
  misc_feature (107)..(107): Xaa can be any naturally occurring amino acid
  misc_feature (114)..(114): Xaa can be any naturally occurring amino acid
  misc_feature (124)..(124): Xaa can be any naturally occurring amino acid
  Coding DNA Sequence Number=SeqID_3695
  Subcellular localization annotation: CTP_CleavageSite=18; ConfidenceScore=5.20e-01
VVAFVLWXVSGAVSANARHAARRRRAHRSLHSPLGRXVXXSRLXERERSGSSXVYHRYECRSDTTHSTDAPPRRSDTLTDGGCVLTSLPLGACRAFGRSRRCPATSXRGPRAPXVKARRRAEGX

SEQ ID NO: 8263 - protein, 106 aa, Glycine max
  misc_feature (80)..(80): Xaa can be any naturally occurring amino acid
  misc_feature (95)..(95): Xaa can be any naturally occurring amino acid
  Coding DNA Sequence Number=SeqID_5197
  Homolog annotation: Hit_ID=A7PTL6; Match level="QueryCoverage=97%, HitCoverage=59%, E-value=2e-32, Identity=66%"; Hit description =Chromosome undetermined scaffold_30, whole genome shotgun sequence
  Pfam annotation: Domain name=DUF788; Domain location=2-106; Score =31.1; E_value=5.9e-07; Accession=PF05620.2; Description=Protein of unknown function (DUF788)
DRSHIYGLHQIIIACNDIYVLLRMLVFHSSLTCKHWIALIATSLAYVIPYQHLAKIATPAYAEDGELVYGGSDMSTGGVXGYLHDLIYITCFGQXMSIDSGKFWYT

SEQ ID NO: 8264 - protein, 206 aa, Glycine max
  Coding DNA Sequence Number=SeqID_5198
PRSHNKSTQRTAAHMRCVRIEYMRHSLILGCTRSHDSVVVLRCGVDLSVAPSFAAINSAHAPHYLIRISALFDSVAGSIVKWLLHHSRSQHRVVDIYVAVDIDMTPTDTYNRLTIITPRRRHILVRRALRHVLYFNLFQLYHASVPLIHAAYTTTHTAYYEQYTRLLATNKLYECYVKYIHAPILPTERRIIYNYYRATNIRIGRY

SEQ ID NO: 8265 - protein, 128 aa, Glycine max
  Coding DNA Sequence Number=SeqID_5200
ELAGHTIGRYLWVLSNAATAEPIEIIAYEVTWARGELAVFLCSLGRVYAASRGSLLRALYPLMVNIATEDYCSYGRCFSVIQEIFIECQLPGFKISFLALVKGRFAIHITQCAVGLDPSSTSLDVSYP

SEQ ID NO: 8266 - protein, 300 aa, Glycine max
  Coding DNA Sequence Number=SeqID_5202
  Gene Ontology: Mol. function=small conjugating protein ligase activity; Cellular component=cytosol; Biological process=regulation of protein metabolic process
  Homolog annotation: Hit_ID=A0D3T4; Match level="QueryCoverage=51%, HitCoverage=74%, E-value=3e-55, Identity=64%"; Hit description =Ubiquitin carrier protein
  Pfam annotation: Domain name=UQ_con; Domain location=14-152; Score =148.1; E_value=2.4e-41; Accession=PF00179.16; Description=Ubiquitin -conjugating enzyme
MNSGFPIHPRVIQVIQKQVTELVKRPPDCIQYALNESDFLDIQADIIGPVGTPYAGGVFRCKLVLSGEFPKVPPKGFFLTKMFHPNVSEKGEICVNTLKKDWDPANWSLKHIFEVIRCLLIVPFPESALNEEAGKAFMEDYEEYAKHARLITELYALPKEKPTZGPASSPTLQEKPGMDISFENTQSESPIKVFPVPTMSASFNPGNQLMKDKATESMFGFGFKAERPEEVLMTVTNSLNTNPMSPLDEGMLKKPGSVPFSGISGIGSGIQVNLNPNANLNGNLSAKKENDDKKKWRKRI

SEQ ID NO: 8267 - protein, 106 aa, Glycine max
  Coding DNA Sequence Number=SeqID_5203
  Gene Ontology: Mol. function=structural constituent of ribosome; Cellular component=ribonucleoprotein complex; Biological process =translation
  Homolog annotation: Hit_ID=Q8LFH7; Match level="QueryCoverage=87%, HitCoverage=97%, E-value=1e-46, Identity=95%"; Hit description=60S ribosomal protein L37-1
  Pfam annotation: Domain name=Ribosomal_L37e; Domain location=13-66; Score=131.6; E_value=2.2e-36; Accession=PF01907.9; Description =Ribosomal protein L37e
  Subcellular localization annotation: CTP_CleavageSite=32; ConfidenceScore=5.40e-01
SLFLTRIHPLQLTKGTGSFGKRRNKSHTLCVRCGRRSFHIQKSRCSACAYPAARKRTYNWSVKAIRRKTTGTGRMRYLRNVPRRFKTGFREGTEAKPRNKAAASSA

SEQ ID NO: 8268 - protein, 142 aa, Glycine max
  misc_feature (127)..(127): Xaa can be any naturally occurring amino acid
  Coding DNA Sequence Number=SeqID_5204
  Gene Ontology: Mol. function=unfolded protein binding; Cellular component=cytoplasm; Biological process=cellular protein metabolic process
  Homolog annotation: Hit_ID=O04450; Match level="QueryCoverage=83%, HitCoverage=22%, E-value=2e-18, Identity=47%"; Hit description=T -complex protein 1 subunit epsilon
MCEPNPGLRRTWAHCAARRVDSSDESTGDGPMSGARLESGDLVIARVIHLIRSGLGYDMAFRMDAEHTERVGNKFEFDEFNLEPFIQTCMSTLSYKIGNRCKRSWGGIAAKGVIAVADLARKDGNLXDLIKVKGKLGVKLED

SEQ ID NO: 8269 - protein, 181 aa, Glycine max
  misc_feature (164)..(164): Xaa can be any naturally occurring amino acid
  Coding DNA Sequence Number=SeqID_5205
  Gene Ontology: Mol. function=transferase activity, transferring glycosyl groups; Cellular component=endoplasmic reticulum; Biological process=embryonic development ending in birth or egg hatching
  Homolog annotation: Hit_ID=A8MQD8; Match level="QueryCoverage=100%, HitCoverage=96%, E-value=1e-77, Identity=81%"; Hit description =Uncharacterized protein At5g10780.2
  Pfam annotation: Domain name=DUF1077; Domain location=17-173; Score =300.2; E_value=3.9e-87; Accession=PF06417.2; Description=Protein of unknown function (DUF1077)
AVMGAGRRWAVDFSDQSTVPSSRDILDPPGFSRVSPEQDDSATSRQKKDAEANWKLQKAWEVAQSPFKNLMMMGFMMWMAGNTVHLFSIGITFSALWQPLSALQSVGKVFEPFKDNKVELLMPKLVFLALNLGGLALGIWKLNTLGLLPTHASDWVSSLPPPQXLNTLAEDLLSTDEHVSL

SEQ ID NO: 8270 - protein, 105 aa, Glycine max; identical to SEQ ID NO: 8146
  misc_feature (52)..(52): Xaa can be any naturally occurring amino acid
  misc_feature (79)..(79): Xaa can be any naturally occurring amino acid
  Coding DNA Sequence Number=SeqID_5206

SEQ ID NO: 8271 - protein, 175 aa, Glycine max
  Coding DNA Sequence Number=SeqID_5208
PAPQGAIFCLREQPLAIDLNFGEGGKIFSRYLFLVGARFPHQANVLGLGGPKAPRGFPWSYEVFNVFSFSFPYPSAPPPDVVGFACTNEAVQGSICFLEGGGFSFSPVSGANGDNSPLPGGGVLYYNGGGGVIFFKSTPPGFGGFSFSVPVPNRKGKTLKKKKKKKKKKKKKKIM

SEQ ID NO: 8272 - protein, 182 aa, Glycine max
  misc_feature (84)..(84): Xaa can be any naturally occurring amino acid
  misc_feature (168)..(168): Xaa can be any naturally occurring amino acid
  Coding DNA Sequence Number=SeqID_5425
  Gene Ontology: Mol. function=protein kinase CK2 regulator activity; Cellular component=protein kinase CK2 complex; Biological process =Wnt receptor signaling pathway
  Homolog annotation: Hit_ID=P40228; Match level="QueryCoverage=78%, HitCoverage=47%, E-value=4e-43, Identity=65%"; Hit description =Casein kinase II subunit beta
  Pfam annotation: Domain name=CK_II_beta; Domain location=81-182; Score=47.1; E_value=4.2e-14; Accession=PF01214.9; Description=Casein kinase II regulatory subunit
SLRDIDLLVFACQKAVSGDTYTTLSLDDDRSSYSLLATDWDSRSASVTAPISKKSNAFDEESETDREESDVSGSDRDDTYWILXFCNLRGNEFLCEDDDDYIQDDFKLCGLSSLVPYYDHALDLILDVESYHGDMFTAEQSELIESAAEMLYGLSHARYIWTSKRMAXECLDQSENYDFGRC

SEQ ID NO: 8273 - protein, 68 aa, Glycine max
  misc_feature (8)..(8): Xaa can be any naturally occurring amino acid
  misc_feature (16)..(16): Xaa can be any naturally occurring amino acid
  misc_feature (20)..(21): Xaa can be any naturally occurring amino acid
  misc_feature (25)..(25): Xaa can be any naturally occurring amino acid
  misc_feature (29)..(29): Xaa can be any naturally occurring amino acid
  misc_feature (31)..(32): Xaa can be any naturally occurring amino acid
  misc_feature (51)..(52): Xaa can be any naturally occurring amino acid
  misc_feature (67)..(67): Xaa can be any naturally occurring amino acid
  Coding DNA Sequence Number=SeqID_5426
LHIFLSFXCSVIVAIXQAPXXHDTXPLPXGXXASLSYTTHTHISCLDRLIXXFLLLSSCRQLQKWNXI

SEQ ID NO: 8274 - protein, 177 aa, Glycine max
  misc_feature (71)..(71): Xaa can be any naturally occurring amino acid
  Coding DNA Sequence Number=SeqID_5428
  Gene Ontology: Mol. function=RNA polymerase II transcription factor activity; Cellular component=transcription factor TFIID complex; Biological process=transcription initiation from RNA polymerase II promoter
  Homolog annotation: Hit_ID=Q6JAE2; Match level="QueryCoverage=79%, HitCoverage=35%, E-value=6e-20, Identity=43%"; Hit description=TATA -box-binding protein
  Pfam annotation: Domain name=TBP; Domain location=66-142; Score=-6.7; E_value=0.005; Accession=PF00352.12; Description=Transcription factor TFIID (or TATA-binding protein, TBP)
  Subcellular localization annotation: CTP_CleavageSite=34; ConfidenceScore=5.39e-01
TRLAARIIRIRGPPATALVFASRNMVGSGAWRVPQSAGAACMFPWCFLKLGSPAVSRAFLPQDAAGSCVAXFPLRLEGPAWSHGACSGFHPLRFPGPRARWVQPKPALLVFLAGAGALAGPRGSGDSYSAVEGFYPVRSEFRTALRGAPRPCVLELAWCGLVAGRPEIEISVIWIEF

SEQ ID NO: 8275 - protein, 218 aa, Glycine max
  misc_feature (1)..(1): Xaa can be any naturally occurring amino acid
  misc_feature (5)..(7): Xaa can be any naturally occurring amino acid
  misc_feature (9)..(9): Xaa can be any naturally occurring amino acid
  misc_feature (13)..(13): Xaa can be any naturally occurring amino acid
  misc_feature (39)..(40): Xaa can be any naturally occurring amino acid
  misc_feature (49)..(50): Xaa can be any naturally occurring amino acid
  misc_feature (58)..(58): Xaa can be any naturally occurring amino acid
  misc_feature (65)..(65): Xaa can be any naturally occurring amino acid
  misc_feature (71)..(71): Xaa can be any naturally occurring amino acid
  misc_feature (81)..(81): Xaa can be any naturally occurring amino acid
  misc_feature (86)..(86): Xaa can be any naturally occurring amino acid
  misc_feature (96)..(96): Xaa can be any naturally occurring amino acid
  misc_feature (100)..(100): Xaa can be any naturally occurring amino acid
  misc_feature (103)..(103): Xaa can be any naturally occurring amino acid
  misc_feature (114)..(114): Xaa can be any naturally occurring amino acid
  misc_feature (116)..(116): Xaa can be any naturally occurring amino acid
  misc_feature (126)..(127): Xaa can be any naturally occurring amino acid
  misc_feature (131)..(131): Xaa can be any naturally occurring amino acid
  misc_feature (139)..(140): Xaa can be any naturally occurring amino acid
  misc_feature (146)..(146): Xaa can be any naturally occurring amino acid
  misc_feature (153)..(153): Xaa can be any naturally occurring amino acid
  misc_feature (158)..(158): Xaa can be any naturally occurring amino acid
  misc_feature (161)..(162): Xaa can be any naturally occurring amino acid
  misc_feature (182)..(182): Xaa can be any naturally occurring amino acid
  misc_feature (184)..(185): Xaa can be any naturally occurring amino acid
  misc_feature (202)..(202): Xaa can be any naturally occurring amino acid
  misc_feature (217)..(217): Xaa can be any naturally occurring amino acid
  Coding DNA Sequence Number=SeqID_5429
XETRXXXAXVDSXVRCRESQRRQRWCGLLRRRPRRFLFXXEGFRAYAVXXRSALPSPXVERAWRXASDRCXVSLSSPAKQXLVWRXTLVPCTSLRXRDRXRKXIFHPHPSQVIXSXREFSSGRIYXXRVAXLSERKPVXXHTVVLXSPLLRVXRRRAXEEXXPALRAAKAHNHVSRGSLYVXSXXYLYMDTNTGENSASQLXSARVIYAAYVVRGMXR

SEQ ID NO: 8276 - protein, 58 aa, Glycine max
  Coding DNA Sequence Number=SeqID_5431
  Gene Ontology: Mol. function=binding
  Homolog annotation: Hit_ID=A7Q5U9; Match level="QueryCoverage=75%, HitCoverage=4%, E-value=6e-11, Identity=81%"; Hit description =Chromosome chr14 scaffold_54, whole genome shotgun sequence
MAFMAVLESDLRALSAEARRRYPTVKDGAEHAILKVTLRRSCFISLQCFSTASGFSSL

SEQ ID NO: 8277 - protein, 103 aa, Glycine max; identical to SEQ ID NO: 7998
  misc_feature (9)..(9): Xaa can be any naturally occurring amino acid
  misc_feature (12)..(13): Xaa can be any naturally occurring amino acid
  misc_feature (27)..(27): Xaa can be any naturally occurring amino acid
  misc_feature (51)..(51): Xaa can be any naturally occurring amino acid
  misc_feature (83)..(83): Xaa can be any naturally occurring amino acid
  misc_feature (99)..(99): Xaa can be any naturally occurring amino acid
  Coding DNA Sequence Number=SeqID_5432

SEQ ID NO: 8278 - protein, 111 aa, Glycine max
  misc_feature (74)..(74): Xaa can be any naturally occurring amino acid
  Coding DNA Sequence Number=SeqID_5434
LGPPQDKYQLASGVARPRPGFWHVCCYRRCGAASEWLCLCSLPFLLVCYGCSPAIPCLTWSVSTNQRFSLLTCXRGYVAYVLQNTLSVLSGMRNSSTLARRAVAHASVSLV

SEQ ID NO: 8279 - protein, 303 aa, Glycine max
  misc_feature (286)..(286): Xaa can be any naturally occurring amino acid
  Coding DNA Sequence Number=SeqID_5436
  Gene Ontology: Mol. function=selenium binding; Cellular component =extracellular space; Biological process=metabolic process
  Homolog annotation: Hit_ID=Q67XT4; Match level="QueryCoverage=96%, HitCoverage=46%, E-value=1e-137, Identity=80%"; Hit description=MRNA, partial cds, clone: RAFL25-27-N17
  Pfam annotation: Domain name=UPF0061; Domain location=29-303; Score= -154.7; E_value=6.4e-07; Accession=PF02696.5; Description =Uncharacterized ACR, YdiUUPF0061 family
MDQSSGLNLEDLKWDHSFVRELPGDPRRDSFPREVLHACYTQVSPSVQVHNPQLVAFSQPVADLLDLDHKEFQRPDFPLFFSGATPLVGALPYAQCYGGHQFGMWAGQLGDGRAMTLGEILNSNSERWELQLKGAGKTPYSRFADGLAVLRSSVREFLCSEAMHHLGIPTTRALSLVTTGNLVTRDMFYDGNPKEEPGAIVCRVAQSFLRFGSYQIHASRSDEDLGLVRVLADYAIRHHFPHIQNMSKSDSLSFCTGDEDHSVVDLTSDKYAAWVVEIAERTGSLXARWHGVGLTHSVLTTLT

SEQ ID NO: 8280 - protein, 165 aa, Glycine max
  misc_feature (112)..(112): Xaa can be any naturally occurring amino acid
  misc_feature (116)..(116): Xaa can be any naturally occurring amino acid
  Coding DNA Sequence Number=SeqID_5437
THVHYETTPHPFEHSHSAKLNNLMAVPPLSITLPLSHILALYPALSSPLTLLSHRLLPLQHNTPRRHLTARPPYNTSGTVHSLSRLSHTHGTPLGSLPHSYLLLATVTTLEXRIHXIIQTFDRFCLVIHVLYVYLCICTPISAFFFLQCSLSFDLTATLISLHLT

SEQ ID NO: 8281 - protein, 104 aa, Glycine max
  misc_feature (40)..(40): Xaa can be any naturally occurring amino acid
  Coding DNA Sequence Number=SeqID_5439
EAPAPGCGWVGDRHYKYIRDVGGVWSILHSGVCIMRKLVXSLFFLFLALILLLSISPSTTHQPHSLHNLILDSSGARHLYFTIYISMLGILRGDTTSAPQQTNE

SEQ ID NO: 8282 - protein, 106 aa, Glycine max
  Coding DNA Sequence Number=SeqID_5441
  Homolog annotation: Hit_ID=Q9FHH5; Match level="QueryCoverage=100%, HitCoverage=72%, E-value=2e-36, Identity=70%"; Hit description =Arabidopsis thaliana genomic DNA, chromosome 5, P1 clone:MRI1
MEGRQYYPPRETVDGNRTTMGGPHSPWHSPVPYLFGGLAAMLGLIAFALLILGCSYWRLSGYFDGEENQSRDSDLEAGDMKPDTAVKAVALPEKFLVIMAGDVNPT

SEQ ID NO: 8283 - protein, 225 aa, Glycine max
  misc_feature (138)..(138): Xaa can be any naturally occurring amino acid
  Coding DNA Sequence Number=SeqID_5442
  Gene Ontology: Mol. function=nucleic acid binding; Cellular component= lysosome; Biological process=lipid metabolic process
  Homolog annotation: Hit_ID=A2Y3B1; Match level="QueryCoverage=99%, HitCoverage=99%, E-value=2e-80, Identity=68%"; Hit description =Putative uncharacterized protein
  Pfam annotation: Domain name=SapB_1; Domain location=131-170; Score =14.0; E_value=0.026; Accession=PF05184.5; Description=Saposin-like type B, region 1
  Pfam annotation: Domain name=SapB_1; Domain location=45-83; Score =21.4; E_value=0.0033; Accession=PF05184.5; Description=Saposin-like type B, region 1
  Pfam annotation: Domain name=SapB_2; Domain location=173-207; Score =20.5; E_value=0.0061; Accession=PF03489.7; Description=Saposin-like type B, region 2
  Pfam annotation: Domain name=SapB_2; Domain location=86-119; Score =16.7; E_value=0.038; Accession=PF03489.7; Description=Saposin-like type B, region 2
  Pfam module annotation: Pfam domain module=SapB_1::SapB_1::SapB _2::SapB_2; Domain location=131-170::45-83::173-207::86-119
MGSRVFALFITGVVLLGSRILALDHTVVEKRLNENTVSLTTKGSPQLCQLCEQFATETLFYLKENETRIEIIDTLHQACLKFHSLKLECTKLVDYYAALFFAQIDSLSPEEFCVSASLCEEVTYIRLPGHEHACTLCXHEVVDEIRTGLEDPEMELKIIEILLKGCNNTESFVQKCKKMIIQNAPLILEDIKKFLEKRDFCDSIRVCGGKIARPPGGGLRGLSTV

SEQ ID NO: 8284 - protein, 94 aa, Glycine max
  misc_feature (4)..(4): Xaa can be any naturally occurring amino acid
  misc_feature (19)..(19): Xaa can be any naturally occurring amino acid
  misc_feature (41)..(41): Xaa can be any naturally occurring amino acid
  misc_feature (48)..(48): Xaa can be any naturally occurring amino acid
  misc_feature (50)..(52): Xaa can be any naturally occurring amino acid
  misc_feature (89)..(89): Xaa can be any naturally occurring amino acid
  Coding DNA Sequence Number=SeqID_5443
IDTXAIYRATITTRERPAXRRRLESGASRNAALRRCRSRSXSGRMEQXAXXXKELPNKPFKNIMYKAQSQVLTYSLSKTTNHMDTITLXRTPTH

SEQ ID NO: 8285 - protein, 119 aa, Glycine max; identical to SEQ ID NO: 8011
  misc_feature (3)..(3): Xaa can be any naturally occurring amino acid
  misc_feature (5)..(6): Xaa can be any naturally occurring amino acid
  misc_feature (28)..(28): Xaa can be any naturally occurring amino acid
  misc_feature (37)..(37): Xaa can be any naturally occurring amino acid
  misc_feature (40)..(40): Xaa can be any naturally occurring amino acid
  misc_feature (57)..(57): Xaa can be any naturally occurring amino acid
  misc_feature (112)..(113): Xaa can be any naturally occurring amino acid
  Coding DNA Sequence Number=SeqID_5445

SEQ ID NO: 8286 - protein, 195 aa, Glycine max
  Coding DNA Sequence Number=SeqID_5447
  Gene Ontology: Mol. function=nucleotide binding; Biological process =small GTPase mediated signal transduction
  Homolog annotation: Hit_ID=Q54T92; Match level="QueryCoverage=98%, HitCoverage=7%, E-value=1e-16, Identity=29%"; Hit description=Rab GTPase domain-containing protein
  Pfam annotation: Domain name=TPR_2; Domain location=129-162; Score =17.6; E_value=0.048; Accession=PF07719.7; Description=Tetratricopepti de repeat
  Pfam annotation: Domain name=TPR_2; Domain location=9-42; Score=8.0; E_value=3; Accession=PF07719.7; Description=Tetratricopeptide repeat
  Pfam annotation: Domain name=TPR_2; Domain location=96-128; Score =0.6; E_value=25; Accession=PF07719.7; Description=Tetratricopeptide repeat
  Pfam module annotation: Pfam domain module=TPR_2::TPR_2::TPR_2; Domain location=129-162::9-42::96-128
MGIMNDAQGSFYFYKGISCKNTKDISTAIHFFSLAIEKYQLALTSTPNSNHILRNIAVSLVRLIELQKLSGSTSPPLGGLGALPSSANGIEETAPHNGEMTVAFSLDDPQVQEAMRYFNRALEAEPKDPCTLYHYAKFLWQCDRLDKAEKVFLKCLEAEPNYIVALEDYGNFLLAFRKDDLGSQFIARAQKLRKL

SEQ ID NO: 8287 - protein, 182 aa, Glycine max
  misc_feature (2)..(3): Xaa can be any naturally occurring amino acid
  misc_feature (5)..(9): Xaa can be any naturally occurring amino acid
  misc_feature (12)..(14): Xaa can be any naturally occurring amino acid
  misc_feature (25)..(25): Xaa can be any naturally occurring amino acid
  misc_feature (27)..(27): Xaa can be any naturally occurring amino acid
  misc_feature (36)..(36): Xaa can be any naturally occurring amino acid
  misc_feature (46)..(46): Xaa can be any naturally occurring amino acid
  misc_feature (53)..(53): Xaa can be any naturally occurring amino acid
  misc_feature (57)..(57): Xaa can be any naturally occurring amino acid
  misc_feature (59)..(60): Xaa can be any naturally occurring amino acid
  misc_feature (69)..(76): Xaa can be any naturally occurring amino acid
  misc_feature (78)..(78): Xaa can be any naturally occurring amino acid
  misc_feature (83)..(83): Xaa can be any naturally occurring amino acid
  misc_feature (98)..(98): Xaa can be any naturally occurring amino acid
  misc_feature (131)..(131): Xaa can be any naturally occurring amino acid
  misc_feature (135)..(135): Xaa can be any naturally occurring amino acid
  misc_feature (140)..(140): Xaa can be any naturally occurring amino acid
  misc_feature (152)..(152): Xaa can be any naturally occurring amino acid
  misc_feature (171)..(171): Xaa can be any naturally occurring amino acid
  Coding DNA Sequence Number=SeqID_5448
  Subcellular localization annotation: CTP_CleavageSite=91; ConfidenceScore=5.43e-01
FXXFXXXXXPFXXXTFLCVSTPLMXLXIPLPSLSLXSLIHISVVAXFSSRSMXGSVXRXXLMPNLRIGXXXXXXXXWXSVRCXSNLFVSISVSLSACXILFYVCLSLSMSICVYLYVYVSLCMYLCMYMCXCISXSLYVXVSLCVYVYMYVXVYLCVYVCVCDVVSGCVCXCMSHSCLSVCL

SEQ ID NO: 8288 - protein, 100 aa, Glycine max
  misc_feature (47)..(47): Xaa can be any naturally occurring amino acid
  Coding DNA Sequence Number=SeqID_5449
HRESETLNSLSTYLGRFDVIRSYNDFLIVALTLVCVQRGRFRHLWCXSALLHVYFWEKRIYIHPGRWKSRKLVIVGTNIFVRFTQNGVCIFMRNNYIVIL

SEQ ID NO: 8289 - protein, 163 aa, Glycine max
  misc_feature (5)..(7): Xaa can be any naturally occurring amino acid
  misc_feature (9)..(9): Xaa can be any naturally occurring amino acid
  misc_feature (16)..(16): Xaa can be any naturally occurring amino acid
  misc_feature (50)..(50): Xaa can be any naturally occurring amino acid
  Coding DNA Sequence Number=SeqID_5451
GADRXXXRXEGQRRPXARGRPVNPLRKEVQFPRGCNAGGIRARSEKTGVXHVIMPRLTPLEDASKSAADHEAEAARHAAAAEEKKRHEEMEEDARKRRAGDEDDYASDDGEGARQPASAGRQAYGFARDRSRSGMVRALLLAVAVALVVFKHNKVGTGGGKGV

SEQ ID NO: 8290 - protein, 134 aa, Glycine max
  misc_feature (2)..(2): Xaa can be any naturally occurring amino acid
  misc_feature (6)..(6): Xaa can be any naturally occurring amino acid
  misc_feature (15)..(15): Xaa can be any naturally occurring amino acid
  misc_feature (17)..(18): Xaa can be any naturally occurring amino acid
  misc_feature (44)..(44): Xaa can be any naturally occurring amino acid
  misc_feature (93)..(93): Xaa can be any naturally occurring amino acid
  misc_feature (106)..(106): Xaa can be any naturally occurring amino acid
  misc_feature (117)..(117): Xaa can be any naturally occurring amino acid
  misc_feature (121)..(121): Xaa can be any naturally occurring amino acid
  misc_feature (125)..(125): Xaa can be any naturally occurring amino acid
  Coding DNA Sequence Number=SeqID_5453
DXVVSXSRLVSVSAXAXXCQCYTLDYLRDAFPQVHDVRVTPSLXSLTCYRRLTIAPMTLSASILYLSSVLHASRSHTIHSCSWVATFVSRMLXAMWHDAYWLDRDXRHIVYSLTRLXARSXAHRXARGPRAITR

SEQ ID NO: 8291 - protein, 110 aa, Glycine max
  misc_feature (2)..(2): Xaa can be any naturally occurring amino acid
  misc_feature (18)..(18): Xaa can be any naturally occurring amino acid
  misc_feature (99)..(99): Xaa can be any naturally occurring amino acid
  Coding DNA Sequence Number=SeqID_5455
GXVSNTWLHVLTGTRFMXVAGWSDIFALSREGKVFKCDLEEDKAEIVEELSTKNITEIVAGFNHLIAMEENGDVTYIQEGLGDKLKFLESNKALSIAAXGTQSIVVTRDL

SEQ ID NO: 8292 - protein, 111 aa, Glycine max; identical to SEQ ID NO: 8022
  misc_feature (39)..(39): Xaa can be any naturally occurring amino acid
  Coding DNA Sequence Number=SeqID_5457

SEQ ID NO: 8293 - protein, 246 aa, Glycine max
  misc_feature (200)..(200): Xaa can be any naturally occurring amino acid
  misc_feature (214)..(214): Xaa can be any naturally occurring amino acid
  misc_feature (218)..(218): Xaa can be any naturally occurring amino acid
  misc_feature (230)..(230): Xaa can be any naturally occurring amino acid
  Coding DNA Sequence Number=SeqID_5459
  Gene Ontology: Mol. function=binding
  Homolog annotation: Hit_ID=A2Q4U5; Match level="QueryCoverage=100%, HitCoverage=52%, E-value=1e-105, Identity=67%"; Hit description =Tubulin binding cofactor C
  Pfam annotation: Domain name=TBCC; Domain location=57-127; Score =24.5; E_value=7.3e-07; Accession=PF07986.2; Description=Tubulin binding cofactor C
  Subcellular localization annotation: CTP_CleavageSite=31; ConfidenceScore=5.16e-01
RTSSKENGPASASDQDVAMTDACTTSVNKVSTSTRSASFIEGISKSSYVKHASDIKGSSVKVLNCHESAIYILAPLRYATVYGCSDATVVIGAVGKVAPYNTFYSQLEEHMNEVGIVPTVNRWDEPLALGMVDPHDSLSHPAGVSEVQAESATRVDPDQFTNFVIPSWLGAESTGATKDNPFTLPDAYMASQHKNHKNLXDIKQLLRETSLQEXRKRXLSSTLHIYFKDXLYTVKNIHQLYYLHNN

SEQ ID NO: 8294 - protein, 186 aa, Glycine max
  misc_feature (12)..(12): Xaa can be any naturally occurring amino acid
  misc_feature (58)..(58): Xaa can be any naturally occurring amino acid
  misc_feature (74)..(74): Xaa can be any naturally occurring amino acid
  misc_feature (77)..(77): Xaa can be any naturally occurring amino acid
  Coding DNA Sequence Number=SeqID_5460
STCPARRNISTXEPLLSERGRPRLFFRDNISLPGVRNQRNPTNHSGRAPSLLSHNPGXSLLHLLSFLVSYSFLXPTXCPGLPPRTYSTTLWRFSLATPARSPLGNYSECEDRSPQPPTPSILYFIQYADLPLSFSPTRFPLLPYWRVTTIPPHPLNNDPPAVTCLARCFSNLDTHPQRVTTIDFHL

SEQ ID NO: 8295 - protein, 93 aa, Glycine max
  misc_feature (24)..(24): Xaa can be any naturally occurring amino acid
  misc_feature (47)..(47): Xaa can be any naturally occurring amino acid
  misc_feature (52)..(53): Xaa can be any naturally occurring amino acid
  misc_feature (56)..(56): Xaa can be any naturally occurring amino acid
  misc_feature (62)..(63): Xaa can be any naturally occurring amino acid
  misc_feature (66)..(66): Xaa can be any naturally occurring amino acid
  Coding DNA Sequence Number=SeqID_5461
SRRVCGEVPETVLSLIEFRSCRCXCYDLRNIMLCFSTIYFIIYYACXVVVVXXLIXYIIFLXXHYXLLNHTPTTHKLLITLQTSSIRYTDYHQ

SEQ ID NO: 8296 - protein, 109 aa, Glycine max
  Coding DNA Sequence Number=SeqID_5463
IKLTTIMQHFLRRDERPSWQSYWLIFFITKKGNMKTGNEKRLINGTRQGTTHGRANPINPMNGPNFHDPGRAQKTCGGYKNHKISPHLEGGGPKPNPTRVGPSPEGAPF

SEQ ID NO: 8297 - protein, 153 aa, Glycine max
  misc_feature (139)..(139): Xaa can be any naturally occurring amino acid
  misc_feature (149)..(149): Xaa can be any naturally occurring amino acid
  Coding DNA Sequence Number=SeqID_5464
  Subcellular localization annotation: CTP_CleavageSite=39; ConfidenceScore=5.72e-01
PLSPSSTSPRFPSIWSSPVRNRCAPSSNPVATAVPPPPRVARELHLRRLRPLREPSRPQLRRTIGIEFFSAFSHRRIIAGFFAVSSSSTTPAPPLACPHHHYPETAGDPQFDYGVDDPSFLLEQPDAGAQEPDATVDDXSYYTGGAYYXMQPA

SEQ ID NO: 8298 - protein, 65 aa, Glycine max
  Coding DNA Sequence Number=SeqID_5466
RRVVDVFNEVPVERGTHYVACNAQCHHSQTKPNHNATAIHSHLSLFQTMLRGCGAQREKEREIAV

SEQ ID NO: 8299 - protein, 87 aa, Glycine max; identical to SEQ ID NO: 8030
  Coding DNA Sequence Number=SeqID_5467

SEQ ID NO: 8300 - protein, 120 aa, Glycine max
  Coding DNA Sequence Number=SeqID_5469
MCVPRTIIRLHALAPCDLFSAGSPTGARALPEGGHRPSQHCVPPTSWCTVMPTSFDAACAYLATSTEACPLHPRLRVVPLPAVRGTPDCRVLYSMHMPSIYLAQDLQEDTSLPSSTCRLC

SEQ ID NO: 8301 - protein, 195 aa, Glycine max
  misc_feature (8)..(8): Xaa can be any naturally occurring amino acid
  Coding DNA Sequence Number=SeqID_5471
  Subcellular localization annotation: CTP_CleavageSite=40; ConfidenceScore=5.18e-01
CAHVWHSXLNRYVPPALVSAVSRSTLYVTHSVTISSRVPEASAVGVHHLWQMRTLHSRVKRIPSRPPSPSPQSSVADKRPSVGAMRSERIQAPLRPPAFCASFCCCVLLFLPFLSCVCVCSQPSSSQDRRQPTCDPRSPPPAAAFHLSTLYLSSSITSLPGSHDYTDSQTQPCDNISDMSNRQHTPTPDHKGAAP

SEQ ID NO: 8302 - protein, 105 aa, Glycine max
  misc_feature (4)..(4): Xaa can be any naturally occurring amino acid
  misc_feature (33)..(33): Xaa can be any naturally occurring amino acid
  misc_feature (74)..(75): Xaa can be any naturally occurring amino acid
  misc_feature (94)..(94): Xaa can be any naturally occurring amino acid
  Coding DNA Sequence Number=SeqID_5473
YIWXRSRAHIIDHSLAACASAHTTDMPLHSSTXVITDSTLSYAYICRSCMLKEKTHCRTQISSTQNTHYTHVYXXRTESHIDSVESPRACADMXIQLCDFTSIAV

SEQ ID NO: 8303 - protein, 102 aa, Glycine max
  misc_feature (25)..(25): Xaa can be any naturally occurring amino acid
  misc_feature (100)..(100): Xaa can be any naturally occurring amino acid
  Coding DNA Sequence Number=SeqID_5475
FSSVTTKPLFIASCVLPMCILYYDXYLTPHTPHTLLVIYYRMLVCRLWFVLLTMHNLSHILSVTSLLLDTDRASNILSLRLVQMMIVSIVHTVTSYTTAXAY

SEQ ID NO: 8304 - protein, 170 aa, Glycine max
  misc_feature (126)..(126): Xaa can be any naturally occurring amino acid
  Coding DNA Sequence Number=SeqID_5477
LAPRYEPLPEEVTHFELVLQYAVMPPICNECGVNTLFVVSLQRESRRISYQVLPCEDVHSVNYYFAYEARGGISTSYRSYTACQLAAELMHGARYFLRLEPPPMCLCARWMDSKFRQRHQRECRHXLRHDKQYTRIHVEQPPRNTAFAAVVLHPGSDLEYRCAAILIWPR

SEQ ID NO: 8305 - protein, 181 aa, Glycine max; identical to SEQ ID NO: 8046
  misc_feature (9)..(9): Xaa can be any naturally occurring amino acid
  misc_feature (27)..(27): Xaa can be any naturally occurring amino acid
  misc_feature (69)..(69): Xaa can be any naturally occurring amino acid
  misc_feature (76)..(76): Xaa can be any naturally occurring amino acid
  misc_feature (90)..(91): Xaa can be any naturally occurring amino acid
  misc_feature (99)..(99): Xaa can be any naturally occurring amino acid
  misc_feature (104)..(104): Xaa can be any naturally occurring amino acid
  misc_feature (121)..(121): Xaa can be any naturally occurring amino acid
  misc_feature (149)..(149): Xaa can be any naturally occurring amino acid
  misc_feature (157)..(157): Xaa can be any naturally occurring amino acid
  misc_feature (159)..(160): Xaa can be any naturally occurring amino acid
  misc_feature (165)..(165): Xaa can be any naturally occurring amino acid
  misc_feature (178)..(178): Xaa can be any naturally occurring amino acid
  Coding DNA Sequence Number=SeqID_5479
  Subcellular localization annotation: CTP_CleavageSite=39; ConfidenceScore=5.16e-01

SEQ ID NO: 8306 - protein, 94 aa, Glycine max
  misc_feature (88)..(89): Xaa can be any naturally occurring amino acid
  Coding DNA Sequence Number=SeqID_5481
APPPFYIKRMQDRLNDYKRSSLDFSESGSGEKDYRSRGYSKESSVEDPYSPEGKAYSPDVHSLEGSLKPTPKSTLREVNTLASKGKKXXIILKD

SEQ ID NO: 8307 - protein, 172 aa, Glycine max
  misc_feature (18)..(18): Xaa can be any naturally occurring amino acid
  misc_feature (25)..(25): Xaa can be any naturally occurring amino acid
  misc_feature (28)..(28): Xaa can be any naturally occurring amino acid
  misc_feature (35)..(35): Xaa can be any naturally occurring amino acid
  misc_feature (105)..(105): Xaa can be any naturally occurring amino acid
  misc_feature (114)..(115): Xaa can be any naturally occurring amino acid
  misc_feature (135)..(136): Xaa can be any naturally occurring amino acid
  misc_feature (146)..(147): Xaa can be any naturally occurring amino acid
  Coding DNA Sequence Number=SeqID_5483
AYLLLNVSRFSRSSTYRXAARLYVXCKXDVFCHIXTLCDHTSTLPPTTRTYVELHVHPRSRQSSSLHQRRCTDSATRAADRDQHQPSPSARHNISQYYITTDTSXSYGGVCVYXXLLLSCVTVLRYEFTVASHTXXTQIILLYYSXXGCATALTLRVDKQRRRSHLEQVRAP

SEQ ID NO: 8308 - protein, 184 aa, Glycine max
  misc_feature (162)..(162): Xaa can be any naturally occurring amino acid
  Coding DNA Sequence Number=SeqID_517
  Homolog annotation: Hit_ID=Q23A15; Match level="QueryCoverage=85%, HitCoverage=33%, E-value=4e-09, Identity=27%"; Hit description =Putative uncharacterized protein
MSYPKKHPVNVNPKAKASQPQPTNSRLTEEKREKLLAIQEREQLKGLLVNKFLEKYGKEKKANQDYVNKQVNEFMKNEKLTEENLKKLEQKIKDGTGAKGPVSQKADDTKSQISTHSKQQNESNIHQVGQGQYAHHHEHDDAVSVTSSTKPKSVYAQGDSDXEWATMLKYDTELYKKEKTLEKV

SEQ ID NO: 8309 - protein, 95 aa, Glycine max; identical to SEQ ID NO: 7848
  misc_feature (29)..(29): Xaa can be any naturally occurring amino acid
  misc_feature (42)..(42): Xaa can be any naturally occurring amino acid
  misc_feature (46)..(46): Xaa can be any naturally occurring amino acid
  misc_feature (58)..(58): Xaa can be any naturally occurring amino acid
  Coding DNA Sequence Number=SeqID_518
  Subcellular localization annotation: CTP_CleavageSite=38; ConfidenceScore=5.09e-01

SEQ ID NO: 8310 - protein, 222 aa, Glycine max
  misc_feature (2)..(3): Xaa can be any naturally occurring amino acid
  misc_feature (9)..(9): Xaa can be any naturally occurring amino acid
  misc_feature (59)..(59): Xaa can be any naturally occurring amino acid
  misc_feature (64)..(64): Xaa can be any naturally occurring amino acid
  misc_feature (69)..(69): Xaa can be any naturally occurring amino acid
  misc_feature (89)..(89): Xaa can be any naturally occurring amino acid
  misc_feature (106)..(106): Xaa can be any naturally occurring amino acid
  misc_feature (110)..(110): Xaa can be any naturally occurring amino acid
  misc_feature (124)..(124): Xaa can be any naturally occurring amino acid
  misc_feature (141)..(141): Xaa can be any naturally occurring amino acid
  misc_feature (150)..(150): Xaa can be any naturally occurring amino acid
  misc_feature (165)..(165): Xaa can be any naturally occurring amino acid
  misc_feature (175)..(175): Xaa can be any naturally occurring amino acid
  misc_feature (186)..(186): Xaa can be any naturally occurring amino acid
  misc_feature (192)..(192): Xaa can be any naturally occurring amino acid
  misc_feature (206)..(209): Xaa can be any naturally occurring amino acid
  misc_feature (211)..(211): Xaa can be any naturally occurring amino acid
  Coding DNA Sequence Number=SeqID_520
CXXYSVESXFRESRSREDVEGSERRGAGDSIASVIERHVASVREQRCYSGRWSVASREXQCAAXEETTXGTTSVRRYELRDVRIEGEAXSRGVRLPTAASPMHRPXPAPXDDTNAHTHRLRDIXRTDALRVRRGATDTTHXHHHYTQTVXSRILELSVGGARGDXWSAQHRVIPXDISHHTSTTSXTPHLSXRHASRARSCERAEXXXXDXLSSYIYTYTQL

SEQ ID NO: 8311 - protein, 93 aa, Glycine max; identical to SEQ ID NO: 7132
  misc_feature (2)..(2): Xaa can be any naturally occurring amino acid
  misc_feature (66)..(66): Xaa can be any naturally occurring amino acid
  Coding DNA Sequence Number=SeqID_522

SEQ ID NO: 8312 - protein, 57 aa, Glycine max
  misc_feature (34)..(34): Xaa can be any naturally occurring amino acid
  Coding DNA Sequence Number=SeqID_1572
  Gene Ontology: Mol. function=sugar binding
  Homolog annotation: Hit_ID=A9PGH1; Match level="QueryCoverage=98%, HitCoverage=21%, E-value=5e-18, Identity=58%"; Hit description =Putative uncharacterized protein
VRLIPYKPDYLDESILWTESRDLGDGHRAIRMVXDGTTIVLWDWNKGDNQQWKILPY

SEQ ID NO: 8313 - protein, 89 aa, Glycine max
  misc_feature (40)..(40): Xaa can be any naturally occurring amino acid
  Coding DNA Sequence Number=SeqID_1573
  Gene Ontology: Mol. function=glycerone kinase activity; Biological process=glycerol metabolic process
  Homolog annotation: Hit_ID=Q9LSH1; Match level="QueryCoverage=70%, HitCoverage=10%, E-value=3e-16, Identity=66%"; Hit description =Dihydroxyacetone/glycerone kinase-like protein
  Subcellular localization annotation: CTP_CleavageSite=46; ConfidenceScore=5.19e-01
WETFSPFKSYFSLFRGISHSQLSMAPVSKYAATNAGYRSXLNALIPASSVLEEKLNSGDDPCTAFVLSSEAALAGAQSTVDMQAQVTTY

SEQ ID NO: 8314 - protein, 74 aa, Glycine max
  misc_feature (1)..(3): Xaa can be any naturally occurring amino acid
  misc_feature (9)..(12): Xaa can be any naturally occurring amino acid
  misc_feature (24)..(25): Xaa can be any naturally occurring amino acid
  misc_feature (29)..(30): Xaa can be any naturally occurring amino acid
  misc_feature (35)..(37): Xaa can be any naturally occurring amino acid
  misc_feature (39)..(40): Xaa can be any naturally occurring amino acid
  misc_feature (43)..(43): Xaa can be any naturally occurring amino acid
  Coding DNA Sequence Number=SeqID_1574
XXXIRSEKXXXXLPWVGLSLTHLXXGPRXXSGGPXXXVXXLIXSIQYNIVIMQYMDGYILLVYNYLIYRLTILI

SEQ ID NO: 8315 - protein, 263 aa, Glycine max
  Coding DNA Sequence Number=SeqID_1576
  Gene Ontology: Mol. function=hydrolase activity, hydrolyzing O -glycosyl compounds; Cellular component=extracellular region; Biological process=cell wall organization and biogenesis
  Homolog annotation: Hit_ID=A9PG28; Match level="QueryCoverage=100%, HitCoverage=57%, E-value=1e-90, Identity=64%"; Hit description =Putative uncharacterized protein
  Pfam annotation: Domain name=Glyco_hydro_17; Domain location=5-263; Score=105.1; E_value=2.2e-28; Accession=PF00332.9; Description =Glycosyl hydrolases family 17
SQSFIGVNYGQVADNLPAPEDTASLLKSTTIGKVRLYGADPAIIKALANSGIGIVIGASNGDIASLAGDPNAATQWVNANVLPYYPASNITLITVGNEILTLADQGLKSQLVPAMRNVQNALGAASLGGKIRVSTGHSMAVFIFSDPPSTGLFNPVLQDTLKQLVALLKDNKSTLTMNPYPFFTYQNDPKSETLGFCLFQANSRRINSSHEKLVPNMFNAQDYAVHSALNAKTFADPEIVADYTGHPLRAAHNALEPGYANGR

SEQ ID NO: 8316 - protein, 63 aa, Glycine max
  misc_feature (34)..(34): Xaa can be any naturally occurring amino acid
  Coding DNA Sequence Number=SeqID_1577
  Gene Ontology: Mol. function=nucleic acid binding; Cellular component= intracellular
  Homolog annotation: Hit_ID=A7PAZ3; Match level="QueryCoverage=95%, HitCoverage=6%, E-value=2e-16, Identity=68%"; Hit description =Chromosome chr16 scaffold_10, whole genome shotgun sequence
LFYKQQYLEVVQKVYDMRGPQVPVLTNLSNINAXEKAKENDVPMPKIEHNVTLIVWLPEADIQ

SEQ ID NO: 8317 - protein, 107 aa, Glycine max
  misc_feature (2)..(2): Xaa can be any naturally occurring amino acid
  misc_feature (27)..(27): Xaa can be any naturally occurring amino acid
  misc_feature (29)..(29): Xaa can be any naturally occurring amino acid
  misc_feature (53)..(54): Xaa can be any naturally occurring amino acid
  misc_feature (61)..(61): Xaa can be any naturally occurring amino acid
  misc_feature (72)..(73): Xaa can be any naturally occurring amino acid
  misc_feature (90)..(90): Xaa can be any naturally occurring amino acid
  misc_feature (97)..(97): Xaa can be any naturally occurring amino acid
  misc_feature (104)..(104): Xaa can be any naturally occurring amino acid
  misc_feature (106)..(106): Xaa can be any naturally occurring amino acid
  Coding DNA Sequence Number=SeqID_1578
SXAYRCTVLGIRQRTGSRGSVSHRTIXVXRLFSLLRNYIYRQILPQTIHSPYXXITASTYXYLALTAPRSLXXFSVHSHHTVIVRNLCHXTRSEALXAMARLYXDXK

SEQ ID NO: 8318 - protein, 113 aa, Glycine max
  Coding DNA Sequence Number=SeqID_1580
  Homolog annotation: Hit_ID=A7R0V1; Match level="QueryCoverage=58%, HitCoverage=20%, E-value=4e-08, Identity=46%"; Hit description =Chromosome undetermined scaffold_324, whole genome shotgun sequence
FRESIQDGSVLMDCLILPDKADIPDGLDKSTASVVRVSSVVMRKLSGLQTTESLGAPALKINPDSYSIAVLLLGTALILAFPLTKGFIKTKLNARGTLSAIAPSERNTNSGEV

SEQ ID NO: 8319 - protein, 148 aa, Glycine max
  misc_feature (16)..(16): Xaa can be any naturally occurring amino acid
  misc_feature (34)..(34): Xaa can be any naturally occurring amino acid
  misc_feature (46)..(46): Xaa can be any naturally occurring amino acid
  misc_feature (71)..(71): Xaa can be any naturally occurring amino acid
  misc_feature (74)..(74): Xaa can be any naturally occurring amino acid
  misc_feature (78)..(78): Xaa can be any naturally occurring amino acid
  misc_feature (113)..(113): Xaa can be any naturally occurring amino acid
  Coding DNA Sequence Number=SeqID_1581
VLHYLVYMACRSRIYXTNNRIVATSLTSLNLSYXHSSSDEDNNWCXIESDRDDQLSVSTVKCFRHSHHVAXSDXAHRXDRLSRFALVEMCRRTISMSTTSYIYISVVRMSLGXCTRNDHTINHAIFMTYNIRRSPLAIISAHKRMPLL

SEQ ID NO: 8320 - protein, 154 aa, Glycine max
  Coding DNA Sequence Number=SeqID_524
  Gene Ontology: Mol. function=oxidoreductase activity; Cellular component=endoplasmic reticulum; Biological process=metabolic process
  Homolog annotation: Hit_ID=Q9LX23; Match level="QueryCoverage=100%, HitCoverage=58%, E-value=7e-72, Identity=80%"; Hit description =Putative uncharacterized protein T31P16_40
  Pfam annotation: Domain name=KR; Domain location=8-151; Score=-97.2; E_value=0.1; Accession=PF08659.1; Description=KR domain
  Pfam annotation: Domain name=adh_short; Domain location=8-154; Score =47.5; E_value=4.6e-11; Accession=PF00106.15; Description=short chain dehydrogenase
  Pfam module annotation: Pfam domain module=KR::adh_short; Domain location=8-151::8-154
MENGDESPVVLIMGCSQGGIGHALAREFSDKGCRVVATSRSRSTMTDLEQDPRLFVQELDVQSEQSVSKVMSNVIDKFGQIDVLVNNAGVQCVGPLAEIPMSAVENTFNTNVFGSMRMTQAVVPHMVSKKKGKIVNVGSITVMAPGPWAGVYTA

SEQ ID NO: 8321 - protein, 112 aa, Glycine max
  misc_feature (5)..(16): Xaa can be any naturally occurring amino acid
  misc_feature (22)..(23): Xaa can be any naturally occurring amino acid
  misc_feature (25)..(26): Xaa can be any naturally occurring amino acid
  misc_feature (61)..(61): Xaa can be any naturally occurring amino acid
  misc_feature (81)..(81): Xaa can be any naturally occurring amino acid
  misc_feature (97)..(97): Xaa can be any naturally occurring amino acid
  Coding DNA Sequence Number=SeqID_525
VGVLXXXXXXXXXXXXPIFLSXXAXXAWVHGHEKSSRMSYVVCLEWCEREKSPAPHAHDSXTLHPRLYTQLSLITAHLHPXHVICYNLTCRPHHPPXRPRQQIIRAVYPYSH

SEQ ID NO: 8322 - protein, 137 aa, Glycine max
  misc_feature (15)..(15): Xaa can be any naturally occurring amino acid
  misc_feature (70)..(70): Xaa can be any naturally occurring amino acid
  misc_feature (76)..(76): Xaa can be any naturally occurring amino acid
  Coding DNA Sequence Number=SeqID_527
RRRVQRTYAFTRQHXRLIEFLFMIVRVTTAAIRDTRCLNDRHRGYDNDTLCVVISSSEQQYVLESYELVXSVGRCXVLTVSGITLTIFTTTTLRRDTSYVVVEIVMSLRSSARHATCEDRRGRQQRYLRCYSVHLTV

SEQ ID NO: 8323 - protein, 114 aa, Glycine max
  misc_feature (33)..(33): Xaa can be any naturally occurring amino acid
  misc_feature (107)..(107): Xaa can be any naturally occurring amino acid
  Coding DNA Sequence Number=SeqID_5485
  Gene Ontology: Mol. function=protein binding; Cellular component =fibrillar center; Biological process=translation
  Homolog annotation: Hit_ID=Q56XB4; Match level="QueryCoverage=100%, HitCoverage=21%, E-value=4e-40, Identity=73%"; Hit description =Putative uncharacterized protein
GTTPNFRPRLGKNPSWVHLYRQHSAEKNVYEIXHQMYESSFQTLSERLFKDTPWPSVDAVAHCRDNDHVFCLLYREMWFRHLYARLTPTLRQRIDSWDNYCSLFQVXLHGVVNM

SEQ ID NO: 8324 - protein, 117 aa, Glycine max
  misc_feature (5)..(5): Xaa can be any naturally occurring amino acid
  misc_feature (10)..(10): Xaa can be any naturally occurring amino acid
  misc_feature (28)..(28): Xaa can be any naturally occurring amino acid
  misc_feature (53)..(53): Xaa can be any naturally occurring amino acid
  misc_feature (62)..(62): Xaa can be any naturally occurring amino acid
  misc_feature (89)..(89): Xaa can be any naturally occurring amino acid
  Coding DNA Sequence Number=SeqID_5486
YSRCXHRAMXKTCYTICNNSKIHIHISXCTTRLSRTRLNDNHTIATHRLVSRXVMYVRTISXIAQSMRYLTAVIRPLPSHSYIRHMMRXICRFILWPMVLLIAGITCVACSISLCVS

SEQ ID NO: 8325 - protein, 94 aa, Glycine max
  Coding DNA Sequence Number=SeqID_5488
  Subcellular localization annotation: CTP_CleavageSite=31; ConfidenceScore=5.20e-01
GKFFFFFFWGPQFDFFKWKFPKFFLNSRVFQGFELWALIALCEPPLGVFPPESFPLCPFFFFDGATIGCLGHFRGQELEFSLLVAFRTRKLLPC

SEQ ID NO: 8326 - protein, 200 aa, Glycine max
  Coding DNA Sequence Number=SeqID_5490
  Homolog annotation: Hit_ID=Q550Y3; Match level="QueryCoverage=84%, HitCoverage=66%, E-value=2e-08, Identity=25%"; Hit description =Putative uncharacterized protein
RHGTNSYSDTARDFQEYISAYEETGEGYTPEARGRISELLSDLKERYEDLKQAAKQKYHYWTDRAEDIKEEDKSKALTIYNEARGRYYESKERLKAEFDYLNGKLTEAEYNAKVILKREDDRRRNVFGRAADAVKHGYENIKHNIQTGTEETVRRYEEAARTAQIEREKLKDVVREDYEALKHKIKEGVHGSHETNDGEL

SEQ ID NO: 8327 - protein, 83 aa, Glycine max; identical to SEQ ID NO: 6895
  Coding DNA Sequence Number=SeqID_5491

SEQ ID NO: 8328 - protein, 161 aa, Glycine max
  misc_feature (88)..(88): Xaa can be any naturally occurring amino acid
  misc_feature (117)..(117): Xaa can be any naturally occurring amino acid
  Coding DNA Sequence Number=SeqID_5493
  Gene Ontology: Mol. function=protein dimerization activity
  Homolog annotation: Hit_ID=A2Y203; Match level="QueryCoverage=45%, HitCoverage=79%, E-value=2e-10, Identity=50%"; Hit description =Putative uncharacterized protein
MAKGGRGDSLRGLMFECAGLISAPPGGEFERYRHGWGCEPRVCYWKAGILKAGRNRYGGGAHARKKNSEEGGGGAEALHGFLQEFSDXTKAFWVDRHPTAHLFLKMLLVIRGVLLDXENYNSNELLNEMANVMYPKFQKYWINPNIVLLIAAVLDPSMKTV

SEQ ID NO: 8329 - protein, 177 aa, Glycine max
  misc_feature (43)..(43): Xaa can be any naturally occurring amino acid
  misc_feature (104)..(104): Xaa can be any naturally occurring amino acid
  misc_feature (138)..(138): Xaa can be any naturally occurring amino acid
  misc_feature (146)..(146): Xaa can be any naturally occurring amino acid
  Coding DNA Sequence Number=SeqID_5494
  Gene Ontology: Mol. function=24-methylenesterol C-methyltransferase activity; Cellular component=integral to membrane; Biological process=steroid biosynthetic process
  Homolog annotation: Hit_ID=Q39227; Match level="QueryCoverage=100%, HitCoverage=45%, E-value=1e-37, Identity=55%"; Hit description=24 -methylenesterol C-methyltransferase 2
EQKGKRATDLSGGSISAEKVQDNYKQYWSFFRRPKENRDPPTXVPDFVDHLLQFLVTDIYRVGAGGQSFHFLPHPSPGKIPTAEAHAPSNEEDGLSISFEAIAXQQKFLDVGLRRGAGPHAGPSSAHFPRRTWVGITXINEYPVNXAMMHNKKAGLDSLCEVMCWNLFKMPFVDSSF

SEQ ID NO: 8330 - protein, 464 aa, Glycine max
  misc_feature (51)..(51): Xaa can be any naturally occurring amino acid
  Coding DNA Sequence Number=SeqID_5495
  Gene Ontology: Mol. function=aminoacyl-tRNA ligase activity; Cellular component=cytoplasm; Biological process=tRNA aminoacylation for protein translation
  Homolog annotation: Hit_ID=A2Q1N3; Match level="QueryCoverage=99%, HitCoverage=74%, E-value=1e-176, Identity=69%"; Hit description =Lysyl-tRNA synthetase
  Pfam annotation: Domain name=tRNA-synt_2; Domain location=242-452; Score=72.8; E_value=2.1e-19; Accession=PF00152.11; Description=tRNA synthetases class II (D, K and N)
  Pfam annotation: Domain name=tRNA_anti; Domain location=120-201; Score=53.8; E_value=6e-13; Accession=PF01336.15; Description=OB-fold nucleic acid binding domain
  Pfam module annotation: Pfam domain module=tRNA-synt_2::tRNA_anti; Domain location=242-452::120-201
MEVPSEAPSTGIAAETISKNALKRELKNKQKEEERKRKEEDKAKKAAECRXAKDNKSAPADEDDMDPTQYLENRLKYLAVQKAEGNNPYPHKFFVTMSLDQYIKEYGGLSNGQHLEDVSVSMAGRIMHKRTSGSKLVFYDLHSGGFKVQVMADASKSDLDEAEFSKFHSNVKRGDIVGITGFPGKSKKGELSIFPKTFVLLSHCLHMMPRQKSAAAADNANLKKNPWVPGSTRNPETYILKDQETRYRLRHLDLMLNPEVREIFKTRSKIISYIRRFLDDLDFLEVETPMMNMIAGGAAARPFVTHHNDLNMRLFMRIAPELYLKELVVGGLDRVYEIGKQFRNEGIDLTHNPEFTTCEFYMAYKDYNDLMDITEQMLSGMVKELTKGSYKIKYHADGIDKKLIEIDFTLAFRMNDMIDELLNVPPLCIHKVILSLEHTHSIKLSYFPDLTRCVRPGLTTGLLV

SEQ ID NO: 8331 - protein, 94 aa, Glycine max
  misc_feature (5)..(5): Xaa can be any naturally occurring amino acid
  misc_feature (63)..(64): Xaa can be any naturally occurring amino acid
  misc_feature (81)..(81): Xaa can be any naturally occurring amino acid
  Coding DNA Sequence Number=SeqID_5496
SYDSXCRIIEVTQERAQIRASISVLHIYIDIRTSSPIHHKYPIVDRYTYESTDPSLALHSSSXXESVIYSYLCICTIYWIXDIAMRSVLYDVFA

SEQ ID NO: 8332 - protein, 116 aa, Glycine max
  Coding DNA Sequence Number=SeqID_5497
  Subcellular localization annotation: CTP_CleavageSite=63; ConfidenceScore=5.83e-01
LSLCIAMRAPTPSASLILTTPKPSSLSLNLTRTCSSARSPLLHCSFLSSPSHLSSPSSVSGISRLYFPSRYLFFFHFHSVPSLIIIWVVLNFDFLGEFPLYLVSHGFVYFFFVAKC

SEQ ID NO: 8333 - protein, 114 aa, Glycine max; identical to SEQ ID NO: 8059
  misc_feature (3)..(3): Xaa can be any naturally occurring amino acid
  misc_feature (57)..(57): Xaa can be any naturally occurring amino acid
  misc_feature (65)..(65): Xaa can be any naturally occurring amino acid
  Coding DNA Sequence Number=SeqID_5499

SEQ ID NO: 8334 - protein, 155 aa, Glycine max
  misc_feature (22)..(22): Xaa can be any naturally occurring amino acid
  misc_feature (30)..(30): Xaa can be any naturally occurring amino acid
  Coding DNA Sequence Number=SeqID_5501
  Gene Ontology: Mol. function=hydrolase activity, hydrolyzing O -glycosyl compounds; Cellular component=anchored to membrane; Biological process=carbohydrate metabolic process
  Homolog annotation: Hit_ID=Q4ZGK1; Match level="QueryCoverage=99%, HitCoverage=40%, E-value=1e-38, Identity=55%"; Hit description=Beta -1,3-glucanase 1
TIYYAKHSGFCASSQTGLEIGXGYPTGICXHMSPNPDHALNCVKENGQPFLPDTRIRGIAVCNEFLGGGDYYLWGELLGAGANMYNAAARLHLYQLDQMSTANSFAVSSHAYPSSCGQYDDNVKLFMKPLLELFQHIGSPFCDNAYPFLFHARDP

SEQ ID NO: 8335 - protein, 138 aa, Glycine max
  misc_feature (70)..(70): Xaa can be any naturally occurring amino acid
  misc_feature (89)..(89): Xaa can be any naturally occurring amino acid
  misc_feature (110)..(110): Xaa can be any naturally occurring amino acid
  misc_feature (112)..(112): Xaa can be any naturally occurring amino acid
  Coding DNA Sequence Number=SeqID_5502
MRVGPDLHTDSPCNIGIIVPPFALALYPHKHTQVFPPSAYVAAACPVPKFCSGDLSPLCQRLASLTILTXGNIIPPNFNSCRCVNTRPXIPATHYRQRAVSHLSRRREAXSXKEITPIMCLAVSPTSYNNECLQRYLQ

SEQ ID NO: 8336 - protein, 103 aa, Glycine max
  Coding DNA Sequence Number=SeqID_5504
  Gene Ontology: Mol. function=protein binding; Cellular component=RCAF complex; Biological process=female meiosis chromosome segregation
  Homolog annotation: Hit_ID=P59259; Match level="QueryCoverage=79%, HitCoverage=79%, E-value=4e-39, Identity=100%"; Hit description =Histone H4
  Pfam annotation: Domain name=CBFD_NFYB_HMF; Domain location=28-91; Score=5.0; E_value=0.055; Accession=PF00808.13; Description=Histone -like transcription factor (CBFNF-Y) and archaeal histone
  Pfam annotation: Domain name=Histone; Domain location=25-94; Score =68.8; E_value=1.8e-17; Accession=PF00125.14; Description=Core histone H2AH2BH3H4
  Pfam annotation: Domain name=TAF; Domain location=28-92; Score=-6.7; E_value=0.024; Accession=PF02969.8; Description=TATA box binding protein associated factor (TAF)
  Pfam module annotation: Pfam domain module=CBFD_NFYB_HMF::Histone::TAF ; Domain location=28-91::25-94::28-92
MSGRGKGGKGLGKGGAKRHRKVLRDNIQGITKPAIRRLARRGGVKRISGLIYEETRGVLKIFLENVIRDAVTYTEHARRKTVTAMDVVYALKRQGRTLYGFGG

SEQ ID NO: 8337 - protein, 107 aa, Glycine max; identical to SEQ ID NO: 8064
  misc_feature (25)..(25): Xaa can be any naturally occurring amino acid
  misc_feature (41)..(41): Xaa can be any naturally occurring amino acid
  misc_feature (67)..(67): Xaa can be any naturally occurring amino acid
  misc_feature (87)..(87): Xaa can be any naturally occurring amino acid
  misc_feature (97)..(97): Xaa can be any naturally occurring amino acid
  Coding DNA Sequence Number=SeqID_5505

SEQ ID NO: 8338 - protein, 125 aa, Glycine max
  Coding DNA Sequence Number=SeqID_5507
  Subcellular localization annotation: CTP_CleavageSite=72; ConfidenceScore=5.69e-01
PRTTLQPINTTSSRTLNSPTNHKTSTEQSGTTSKGRLVCGSGLLGDMAAQLARRFSERPAHRGNAAGSTSPRSSAFEPCIPRRRNATAWQRTRCRSHRLPACMCYSRPPSAPPWPGRAARTGRPP

SEQ ID NO: 8339 - protein, 155 aa, Glycine max
  misc_feature (2)..(2): Xaa can be any naturally occurring amino acid
  Coding DNA Sequence Number=SeqID_5509
CXCPHQYRALAKRHQMLTKTSPYQSQIHSYGLMVPKLLVQRGNWCFFWTKKPFQKRGKKIWKAYSHIGPKIPTLFGDLAPRPWKKPQKKFGFPKKGGSQPRCEKKIAYIGRKGGKKNPKAVVFPPPPHFGVKKRCFFFWGGGDKKKEGGGSSSFF

SEQ ID NO: 8340 - protein, 95 aa, Glycine max
  misc_feature (42)..(42): Xaa can be any naturally occurring amino acid
  Coding DNA Sequence Number=SeqID_5510
  Subcellular localization annotation: CTP_CleavageSite=71; ConfidenceScore=5.02e-01
LACCVLFSCLFIYYYMLVTPSRSLLSTQRPQLAYYSLTVCEXTSALVSSLHQLSRSLACRWEGCRVFLVALASPATATTQESATHPTHRVVERRR

SEQ ID NO: 8341 - protein, 94 aa, Glycine max
  misc_feature (64)..(64): Xaa can be any naturally occurring amino acid
  Coding DNA Sequence Number=SeqID_5512
  Gene Ontology: Mol. function=hydrogen ion transporting ATP synthase activity, rotational mechanism; Cellular component=proton -transporting two-sector ATPase complex; Biological process=ATP synthesis coupled proton transport
  Homolog annotation: Hit_ID=Q1HR38; Match level="QueryCoverage=96%, HitCoverage=90%, E-value=1e-25, Identity=60%"; Hit description =Mitochondrial F1F0-ATP synthase subunit g/ATP20
  Pfam annotation: Domain name=ATP-synt_G; Domain location=2-92; Score =87.8; E_value=3.5e-23; Accession=PF04718.5; Description =Mitochondrial ATP synthase g subunit
MALVKSIVSTVRPNLMTFLKFAKVELTPPTPGDIPAISRGFGDIVSAAKTGRWKQLTVKEAWLXNGLVFTEVTCWFWIGEVIGKRNMIGYDVQV

SEQ ID NO: 8342 - protein, 131 aa, Glycine max
  misc_feature (21)..(21): Xaa can be any naturally occurring amino acid
  misc_feature (35)..(35): Xaa can be any naturally occurring amino acid
  Coding DNA Sequence Number=SeqID_5513
SIGTRKSMTAQIYFSSGRLCXDRSRERERSETTIXPITTALTLNLHHAARRGLGGWARSVGSVRSTSECSFGLIVDVRLPAQCYVCLLTQLADSERIVAPEEGGDRVPWRGSDRVNCTYPFCVVSCVRPRV

SEQ ID NO: 8343 - protein, 226 aa, Glycine max
  misc_feature (4)..(4): Xaa can be any naturally occurring amino acid
  misc_feature (6)..(16): Xaa can be any naturally occurring amino acid
  misc_feature (32)..(32): Xaa can be any naturally occurring amino acid
  misc_feature (34)..(34): Xaa can be any naturally occurring amino acid
  misc_feature (47)..(47): Xaa can be any naturally occurring amino acid
  misc_feature (49)..(49): Xaa can be any naturally occurring amino acid
  misc_feature (53)..(53): Xaa can be any naturally occurring amino acid
  misc_feature (60)..(61): Xaa can be any naturally occurring amino acid
  misc_feature (66)..(66): Xaa can be any naturally occurring amino acid
  misc_feature (68)..(68): Xaa can be any naturally occurring amino acid
  misc_feature (71)..(72): Xaa can be any naturally occurring amino acid
  misc_feature (80)..(80): Xaa can be any naturally occurring amino acid
  misc_feature (86)..(86): Xaa can be any naturally occurring amino acid
  misc_feature (92)..(92): Xaa can be any naturally occurring amino acid
  misc_feature (102)..(104): Xaa can be any naturally occurring amino acid
  misc_feature (120)..(120): Xaa can be any naturally occurring amino acid
  misc_feature (126)..(126): Xaa can be any naturally occurring amino acid
  misc_feature (130)..(132): Xaa can be any naturally occurring amino acid
  misc_feature (152)..(152): Xaa can be any naturally occurring amino acid
  misc_feature (156)..(157): Xaa can be any naturally occurring amino acid
  misc_feature (162)..(162): Xaa can be any naturally occurring amino acid
  misc_feature (169)..(169): Xaa can be any naturally occurring amino acid
  misc_feature (173)..(173): Xaa can be any naturally occurring amino acid
  misc_feature (184)..(186): Xaa can be any naturally occurring amino acid
  misc_feature (203)..(203): Xaa can be any naturally occurring amino acid
  misc_feature (212)..(212): Xaa can be any naturally occurring amino acid
  misc_feature (220)..(220): Xaa can be any naturally occurring amino acid
  Coding DNA Sequence Number=SeqID_5515
  Subcellular localization annotation: CTP_CleavageSite=42; ConfidenceScore=5.03e-01
FFFXPXXXXXXXXXXXGCVSSFALCVLLFCLXVXLPRSFLLCLSGSXHXPFSXYSLDVLXXFCGSXLXLIXXLFSMCVSXVWLCLXCAALRXYSARCRCALXXXTPRATSSSTPHKTTRXSTTLDXRERXXXCHSATAHTHGGASHSSEIDXYSHXXSASTXEGCAPDXGSGXRRGATPDSLDXXXSAVLVASYCRSGFRRRXYYISLVTLXISGAARTXLTLTTA

SEQ ID NO: 8344 - protein, 130 aa, Glycine max
  misc_feature (3)..(3): Xaa can be any naturally occurring amino acid
  misc_feature (9)..(9): Xaa can be any naturally occurring amino acid
  misc_feature (32)..(33): Xaa can be any naturally occurring amino acid
  misc_feature (43)..(43): Xaa can be any naturally occurring amino acid
  misc_feature (62)..(63): Xaa can be any naturally occurring amino acid
  misc_feature (97)..(97): Xaa can be any naturally occurring amino acid
  misc_feature (110)..(110): Xaa can be any naturally occurring amino acid
  misc_feature (124)..(124): Xaa can be any naturally occurring amino acid
  Coding DNA Sequence Number=SeqID_5517
LRXAMHIRXHLVYLTLRIVRPLTLIRHLRYMXXHHLHSHISTXRLSSSRLAFVSISDIHLSXXITHDSLIYYHAINRSYYSAANSLSYIDIYTTDLXIKYDDLSRIHTCXSSPNYHLALATGLXHIALIT

SEQ ID NO: 8345 - protein, 107 aa, Glycine max
  Coding DNA Sequence Number=SeqID_5519
  Pfam annotation: Domain name=zf-GRF; Domain location=19-65; Score =12.5; E_value=0.00095; Accession=PF06839.3; Description=GRF zinc finger
VHLMENANQGVDPHVLDIVNCPDCGRRVVTFVARRSQFAGKRFYKCRNHNLGRGGCDFYWWQQAYAEHLAGLGPVVPPLAQINQGENGIGGADQGGQMQPADLAGGQ

SEQ ID NO: 8346 - protein, 58 aa, Glycine max
  Coding DNA Sequence Number=SeqID_5521
EAPQSGSGIAQSLPNSGHIGNQHDQFGSGGIKFSTQSPQEDFGTQASHEVAVKYAERY

SEQ ID NO: 8347 - protein, 92 aa, Glycine max
  misc_feature (68)..(68): Xaa can be any naturally occurring amino acid
  Coding DNA Sequence Number=SeqID_5523
LGSLPREVFVWTSPRQTRGVGIHNNNPGEEKYIILVGEGQWRHPHNNMLVDTTEPSLLTTSILCLSSXRRIQKREEVSTQPPRLYRARRAVE

SEQ ID NO: 8348 - protein, 126 aa, Glycine max
  misc_feature (111)..(111): Xaa can be any naturally occurring amino acid
  Coding DNA Sequence Number=SeqID_5525
  Gene Ontology: Mol. function=carbonate dehydratase activity; Cellular component=chloroplast; Biological process=carbon utilization
  Homolog annotation: Hit_ID=Q9XQB0; Match level="QueryCoverage=98%, HitCoverage=37%, E-value=2e-38, Identity=70%"; Hit description =Carbonic anhydrase
  Subcellular localization annotation: CTP_CleavageSite=68; ConfidenceScore=5.64e-01
TSSINGWCLSSISPAKTYLKKATLGPSVFATENTPSTPSSYSSSSFPSLIQDRPVFAAPAPIITPTVREDMAKEYEQAIEELHKLLTDKSELTTTSADKVEHITATLRTSXSDGIPSSEASDRITD

SEQ ID NO: 8349 - protein, 118 aa, Glycine max; identical to SEQ ID NO: 8091
  misc_feature (6)..(10): Xaa can be any naturally occurring amino acid
  misc_feature (12)..(22): Xaa can be any naturally occurring amino acid
  misc_feature (26)..(26): Xaa can be any naturally occurring amino acid
  misc_feature (28)..(29): Xaa can be any naturally occurring amino acid
  misc_feature (31)..(31): Xaa can be any naturally occurring amino acid
  misc_feature (35)..(35): Xaa can be any naturally occurring amino acid
  misc_feature (44)..(46): Xaa can be any naturally occurring amino acid
  misc_feature (61)..(61): Xaa can be any naturally occurring amino acid
  misc_feature (63)..(68): Xaa can be any naturally occurring amino acid
  misc_feature (73)..(73): Xaa can be any naturally occurring amino acid
  misc_feature (82)..(82): Xaa can be any naturally occurring amino acid
  misc_feature (86)..(86): Xaa can be any naturally occurring amino acid
  misc_feature (88)..(89): Xaa can be any naturally occurring amino acid
  misc_feature (94)..(99): Xaa can be any naturally occurring amino acid
  misc_feature (101)..(101): Xaa can be any naturally occurring amino acid
  misc_feature (104)..(106): Xaa can be any naturally occurring amino acid
  misc_feature (111)..(112): Xaa can be any naturally occurring amino acid
  Coding DNA Sequence Number=SeqID_5526
  Subcellular localization annotation: CTP_CleavageSite=69; ConfidenceScore=5.30e-01

SEQ ID NO: 8350 - protein, 106 aa, Glycine max
  Coding DNA Sequence Number=SeqID_5528
SMIIERTTENGGDQDEREGGLWRVTCYLPLYIWCSRCASTHHTAPALSRPSPPARPARERGHPHRIQQFPQLTPTPSHRAPPDLQPPKYLYLRLCTYLNGTYKLTL

SEQ ID NO: 8351 - protein, 180 aa, Glycine max
  Coding DNA Sequence Number=SeqID_5530
  Gene Ontology: Mol. function=actin binding; Cellular component=actin cytoskeleton; Biological process=positive regulation of transcription factor import into nucleus
  Homolog annotation: Hit_ID=P13466; Match level="QueryCoverage=100%, HitCoverage=68%, E-value=3e-23, Identity=33%"; Hit description =Gelation factor
  Pfam annotation: Domain name=Filamin; Domain location=56-152; Score =108.6; E_value=1.9e-29; Accession=PF00630.9; Description =FilaminABP280 repeat
SYVGPPPVKPDIIDNGDGTYDVKYVAKGNGKHTILVNVRGKPIQNSPFTVEAVRLGVDVTKTEAYGPGLEGAVTKEPTHFTIATKNKNGDPIPTGGEKFDIKIAGPYNSDVRPELVDNKNGTYTVNYKPLDKGNHTITILHENQHVANSPYHIVVNANKDAADAGFSLAFGPGIEEIVSK

SEQ ID NO: 8352 - protein, 59 aa, Glycine max
  Coding DNA Sequence Number=SeqID_5531
  Gene Ontology: Mol. function=nucleotide binding; Cellular component =myosin complex; Biological process=protein amino acid phosphorylation
  Homolog annotation: Hit_ID=A7NXN1; Match level="QueryCoverage=94%, HitCoverage=3%, E-value=9e-25, Identity=94%"; Hit description =Chromosome chr5 scaffold_2, whole genome shotgun sequence
PTCSRFGKFVEIQFDQRGRISGAAIRTYLLERSRVCQLSDPERNYHCFYMLCGAPPETV

SEQ ID NO: 8353 - protein, 78 aa, Glycine max
  misc_feature (48)..(48): Xaa can be any naturally occurring amino acid
  misc_feature (51)..(51): Xaa can be any naturally occurring amino acid
  Coding DNA Sequence Number=SeqID_5532
LTCVREQIAQVWYVCMNTSKNIEVRSLMLCSVVITRVTVGCVRGGELXIHXHPLIYHSHKHTNHYRLTTPIPSSVYIV

SEQ ID NO: 8354 - protein, 117 aa, Glycine max
  misc_feature (1)..(3): Xaa can be any naturally occurring amino acid
  misc_feature (9)..(10): Xaa can be any naturally occurring amino acid
  misc_feature (66)..(66): Xaa can be any naturally occurring amino acid
  Coding DNA Sequence Number=SeqID_5533
XXXFFPSTXXRTVISYAKSDNNWKPQVPPRGAAPSFPLDHPPGVQRYCERSIIYTNNISQCAQQYXFLSNFFSTSCTNCFASIARAQASVRLYSSKHPQTHPFQTPVKFTSLNILSL

SEQ ID NO: 8355 - protein, 128 aa, Glycine max
  misc_feature (8)..(8): Xaa can be any naturally occurring amino acid
  misc_feature (12)..(12): Xaa can be any naturally occurring amino acid
  misc_feature (14)..(14): Xaa can be any naturally occurring amino acid
  misc_feature (16)..(16): Xaa can be any naturally occurring amino acid
  misc_feature (20)..(21): Xaa can be any naturally occurring amino acid
  misc_feature (26)..(26): Xaa can be any naturally occurring amino acid
  misc_feature (34)..(34): Xaa can be any naturally occurring amino acid
  misc_feature (39)..(39): Xaa can be any naturally occurring amino acid
  misc_feature (43)..(43): Xaa can be any naturally occurring amino acid
  misc_feature (46)..(47): Xaa can be any naturally occurring amino acid
  misc_feature (49)..(50): Xaa can be any naturally occurring amino acid
  misc_feature (55)..(56): Xaa can be any naturally occurring amino acid
  misc_feature (58)..(58): Xaa can be any naturally occurring amino acid
  misc_feature (62)..(62): Xaa can be any naturally occurring amino acid
  misc_feature (64)..(64): Xaa can be any naturally occurring amino acid
  misc_feature (67)..(67): Xaa can be any naturally occurring amino acid
  misc_feature (72)..(73): Xaa can be any naturally occurring amino acid
  misc_feature (76)..(76): Xaa can be any naturally occurring amino acid
  misc_feature (81)..(81): Xaa can be any naturally occurring amino acid
  misc_feature (90)..(91): Xaa can be any naturally occurring amino acid
  misc_feature (94)..(95): Xaa can be any naturally occurring amino acid
  misc_feature (100)..(101): Xaa can be any naturally occurring amino acid
  misc_feature (103)..(103): Xaa can be any naturally occurring amino acid
  misc_feature (105)..(106): Xaa can be any naturally occurring amino acid
  misc_feature (110)..(111): Xaa can be any naturally occurring amino acid
  misc_feature (114)..(114): Xaa can be any naturally occurring amino acid
  misc_feature (116)..(116): Xaa can be any naturally occurring amino acid
  misc_feature (121)..(121): Xaa can be any naturally occurring amino acid
  misc_feature (123)..(123): Xaa can be any naturally occurring amino acid
  Coding DNA Sequence Number=SeqID_5535
TADRCRQXRRSXTXDXPHYXXNERRXSITGQITXVDLTXDYNXESXXRXXGPQPXXGXCGSXCXLRXLAGDXXNCXILLSXAEAEAARQXXNGXXRCEMXXPXVXXRPRXXVSXVXMMLTXIXNTSIK

SEQ ID NO: 8356 - protein, 102 aa, Glycine max
  misc_feature (24)..(24): Xaa can be any naturally occurring amino acid
  misc_feature (30)..(30): Xaa can be any naturally occurring amino acid
  misc_feature (48)..(48): Xaa can be any naturally occurring amino acid
  misc_feature (59)..(59): Xaa can be any naturally occurring amino acid
  misc_feature (63)..(63): Xaa can be any naturally occurring amino acid
  misc_feature (77)..(77): Xaa can be any naturally occurring amino acid
  misc_feature (81)..(81): Xaa can be any naturally occurring amino acid
  misc_feature (88)..(88): Xaa can be any naturally occurring amino acid
  misc_feature (102)..(102): Xaa can be any naturally occurring amino acid
  Coding DNA Sequence Number=SeqID_5537
LRAESTTSVARIVVSTIVFSYSYXIVHPRXQRCIVYCSLYRRIIMHSXDAIVRHIYISXDTTXTTPSHPHDRHMHTXNIAXPSSAHIXLHIDSHDSTVQTTX

SEQ ID NO: 8357 - protein, 153 aa, Glycine max
  misc_feature (29)..(29): Xaa can be any naturally occurring amino acid
  misc_feature (51)..(51): Xaa can be any naturally occurring amino acid
  misc_feature (143)..(143): Xaa can be any naturally occurring amino acid
  Coding DNA Sequence Number=SeqID_5539
  Gene Ontology: Mol. function=methionine gamma-lyase activity; Cellular component=cytosol; Biological process=methionine catabolic process via 2-oxobutanoate
  Homolog annotation: Hit_ID=A7QJ62; Match level="QueryCoverage=75%, HitCoverage=26%, E-value=1e-19, Identity=47%"; Hit description =Chromosome chr2 scaffold_105, whole genome shotgun sequence
LATPKHNRSNDVDGGEAKKLLLQQGEADXAAALANARHKFWEHGGVNMSIXASATFTVIKPQTIQHMFSKELIPDRNFFIYNHHFNPTILILSHLITTLHNTKSSYYTTNTYPPCSHPAASLLSARTHNRSRTLYYKTHALLXHFLPARANIH

SEQ ID NO: 8358 - protein, 168 aa, Glycine max
  Coding DNA Sequence Number=SeqID_5540
  Gene Ontology: Mol. function=protein transporter activity; Cellular component=mitochondrial inner membrane; Biological process=protein transport
  Homolog annotation: Hit_ID=A7NY99; Match level="QueryCoverage=92%, HitCoverage=91%, E-value=2e-58, Identity=68%"; Hit description =Chromosome chr6 scaffold_3, whole genome shotgun sequence
  Pfam annotation: Domain name=Tim17; Domain location=35-167; Score =94.3; E_value=3.9e-25; Accession=PF02466.9; Description =Tim17Tim22Tim23 family
MADANAEPAAGSSSSNESVTQIEPIRMPTIEEMRAQEVWNNCAVKSVASGVMGGGLGLMMGLFLGALDNPITNDTMTGRQQFVFTAKQMGSRSWSSCKTFAVMGLVFSAAECIIEKARAKHDTTNTAFAGCVTGGSMSARGGPKAACIGCAGFATFSVLIEKFFDRHT

SEQ ID NO: 8359 - protein, 144 aa, Glycine max
  misc_feature (82)..(82): Xaa can be any naturally occurring amino acid
  misc_feature (111)..(111): Xaa can be any naturally occurring amino acid
  misc_feature (124)..(125): Xaa can be any naturally occurring amino acid
  misc_feature (129)..(129): Xaa can be any naturally occurring amino acid
  misc_feature (136)..(136): Xaa can be any naturally occurring amino acid
  Coding DNA Sequence Number=SeqID_5541
  Gene Ontology: Mol. function=transition metal ion binding; Cellular component=chloroplast; Biological process=cellular iron ion homeostasis
  Homolog annotation: Hit_ID=Q41709; Match level="QueryCoverage=85%, HitCoverage=51%, E-value=1e-38, Identity=62%"; Hit description =Ferritin-2, chloroplast precursor
  Subcellular localization annotation: CTP_CleavageSite=35; ConfidenceScore=5.68e-01
LLQTAASTASASSLSLFSPTSKPLRSVPTRGLVVHAAKGSTNHHTLTNVIFEPFEKVKKELDLIPTIPQASLAHQKYVDESXATGNEQINVKYNISYVYHTIFTYFNEDNXTLKSRTKCVKESXXEDRXHPYKLIXYHNKRSGR

SEQ ID NO: 8360 - protein, 121 aa, Glycine max
  Coding DNA Sequence Number=SeqID_5542
PKSLRLYLRAPDLYSCIHTTLCISSIVGSQHTLHSLSSYIYQHAVSDKRSFTENYLRHHRNSCLTYTHHIMPTPHTCANISHTLLNISSHINAIISLSVSRQSYLTLERFPPPSHIYDLIR

SEQ ID NO: 8361 - protein, 116 aa, Glycine max; identical to SEQ ID NO: 7743
  misc_feature (69)..(69): Xaa can be any naturally occurring amino acid
  misc_feature (93)..(93): Xaa can be any naturally occurring amino acid
  misc_feature (111)..(111): Xaa can be any naturally occurring amino acid
  Coding DNA Sequence Number=SeqID_5544

SEQ ID NO: 8362 - protein, 113 aa, Glycine max
  Coding DNA Sequence Number=SeqID_5545
  Homolog annotation: Hit_ID=A7QE22; Match level="QueryCoverage=43%, HitCoverage=12%, E-value=1e-14, Identity=75%"; Hit description =Chromosome chr4 scaffold_83, whole genome shotgun sequence
MLQRPRRRCEGTAMGAIVLDLRPGLGSRPFSLGMPTCRSFSQIEEPPTLLLAGPCPPPGVIYPPGFAGGLRPPFWVAFFPFSPPNGPAPGRTFTATSGWQPGTPAGAPPGGLD

SEQ ID NO: 8363 - protein, 148 aa, Glycine max
  misc_feature (28)..(28): Xaa can be any naturally occurring amino acid
  misc_feature (43)..(43): Xaa can be any naturally occurring amino acid
  misc_feature (56)..(56): Xaa can be any naturally occurring amino acid
  misc_feature (98)..(98): Xaa can be any naturally occurring amino acid
  misc_feature (102)..(102): Xaa can be any naturally occurring amino acid
  misc_feature (117)..(117): Xaa can be any naturally occurring amino acid
  misc_feature (142)..(142): Xaa can be any naturally occurring amino acid
  misc_feature (148)..(148): Xaa can be any naturally occurring amino acid
  Coding DNA Sequence Number=SeqID_5546
VRVADAGGLTSSLRSYGRSIIYFISKSXCSERDSSAQRARYRXEQNRRSGGACACXTSTVMRAIERGRMWRRAVVRRGAILYIISVSPRDARGVVSAXVSAXIIARYACVLRTYRRXRCYAGVASLRETLSRRSVARTRTEXDVYVMX

SEQ ID NO: 8364 - protein, 142 aa, Glycine max
  misc_feature (1)..(1): Xaa can be any naturally occurring amino acid
  misc_feature (16)..(16): Xaa can be any naturally occurring amino acid
  misc_feature (72)..(72): Xaa can be any naturally occurring amino acid
  misc_feature (100)..(100): Xaa can be any naturally occurring amino acid
  misc_feature (106)..(106): Xaa can be any naturally occurring amino acid
  misc_feature (125)..(126): Xaa can be any naturally occurring amino acid
  Coding DNA Sequence Number=SeqID_5548
XMLVVCYMNIGLGFRXLLCNRTGESAAVVGASLRQIYNTTCVITLYMMVRGVCLHLHCVLIMVCSRVLSHLXVLIGAPRLHHIIELWCVTSVVCMSRVEXVIRGAXVVCVRNADQEYITKMADSXXLESVISRFRYETPCDA

SEQ ID NO: 8365 - protein, 36 aa, Glycine max
  Coding DNA Sequence Number=SeqID_5550
KWSNVTTRLRYVVQGISSFASGMSYLSYPNFCSLLQ

SEQ ID NO: 8366 - protein, 78 aa, Glycine max
  Coding DNA Sequence Number=SeqID_5552
  Homolog annotation: Hit_ID=A0MDR4; Match level="QueryCoverage=100%, HitCoverage=98%, E-value=1e-23, Identity=66%"; Hit description =Putative uncharacterized protein
  Pfam annotation: Domain name=Yos1; Domain location=3-78; Score=121.7; E_value=2.2e-33; Accession=PF08571.1; Description=Yos1-like
MAFWTLIKGLLLFANAFAILNEDRFLAPRGWTLEKLHQTGRRNSPKGQIIGLIYACQYMRLPLLLINLVVIAMKIIAG

SEQ ID NO: 8367 - protein, 123 aa, Glycine max
  Coding DNA Sequence Number=SeqID_5553
LDKPDTRYVVCAEPFLRQPLRILLRAELVYDAEQGPQSRAAAITAYCVWRRRSDGRWSSFARPACVRSATRNVRAHAAPGSHPYRIFAYRYPRTVSPKRCAPRRHVHLFRALRFGWYVTSTMR

SEQ ID NO: 8368 - protein, 147 aa, Glycine max
  misc_feature (10)..(10): Xaa can be any naturally occurring amino acid
  misc_feature (14)..(14): Xaa can be any naturally occurring amino acid
  misc_feature (23)..(23): Xaa can be any naturally occurring amino acid
  misc_feature (43)..(43): Xaa can be any naturally occurring amino acid
  misc_feature (49)..(49): Xaa can be any naturally occurring amino acid
  misc_feature (83)..(85): Xaa can be any naturally occurring amino acid
  misc_feature (90)..(90): Xaa can be any naturally occurring amino acid
  misc_feature (104)..(104): Xaa can be any naturally occurring amino acid
  misc_feature (106)..(106): Xaa can be any naturally occurring amino acid
  misc_feature (115)..(115): Xaa can be any naturally occurring amino acid
  misc_feature (135)..(135): Xaa can be any naturally occurring amino acid
  misc_feature (143)..(143): Xaa can be any naturally occurring amino acid
  misc_feature (147)..(147): Xaa can be any naturally occurring amino acid
  Coding DNA Sequence Number=SeqID_5555
AAARTSELRXIASXYTDECSTRXSSTIETTRDHTVVSPHDALXCECFTXPRLRLRRVGVVGRAANCLSHTHMTQYILSRKQYXXXRQFYXPSTIYNERDALVFXSXVSCIYLSLXFYLNYLYPQFIHIMTKPLVXSHQTVEVXETAX

SEQ ID NO: 8369 - protein, 120 aa, Glycine max
  misc_feature (34)..(34): Xaa can be any naturally occurring amino acid
  misc_feature (41)..(41): Xaa can be any naturally occurring amino acid
  misc_feature (87)..(87): Xaa can be any naturally occurring amino acid
  misc_feature (95)..(95): Xaa can be any naturally occurring amino acid
  misc_feature (101)..(101): Xaa can be any naturally occurring amino acid
  Coding DNA Sequence Number=SeqID_5557
RQDQHHPTPHAARPTMCEKSLSRTPSAHSATEAXRDAREQXPAATECILTTRTSDAHTPPNSDMIVAPSHRAHTARLEYVHYTASPXSHVTQPIXLRPTLXRASTQQRLLHISPHTLPHP

SEQ ID NO: 8370 - protein, 91 aa, Glycine max
  Coding DNA Sequence Number=SeqID_5559
  Subcellular localization annotation: CTP_CleavageSite=55; ConfidenceScore=5.37e-01
TSTIKGMTFVTHSDPTPSSSSIQISILINHFTHKHQTLFNLRFPNPFVTNLTLLSTAHRVTDLADNVGILVIFLFTSKNDATPQIFFSPSR

SEQ ID NO: 8371 - protein, 95 aa, Glycine max; identical to SEQ ID NO: 7750
  Coding DNA Sequence Number=SeqID_5561

SEQ ID NO: 8372 - protein, 127 aa, Glycine max
  misc_feature (8)..(10): Xaa can be any naturally occurring amino acid
  misc_feature (12)..(13): Xaa can be any naturally occurring amino acid
  misc_feature (16)..(17): Xaa can be any naturally occurring amino acid
  misc_feature (19)..(19): Xaa can be any naturally occurring amino acid
  misc_feature (21)..(30): Xaa can be any naturally occurring amino acid
  misc_feature (51)..(51): Xaa can be any naturally occurring amino acid
  misc_feature (56)..(56): Xaa can be any naturally occurring amino acid
  misc_feature (63)..(67): Xaa can be any naturally occurring amino acid
  misc_feature (80)..(80): Xaa can be any naturally occurring amino acid
  misc_feature (85)..(85): Xaa can be any naturally occurring amino acid
  misc_feature (91)..(91): Xaa can be any naturally occurring amino acid
  misc_feature (106)..(106): Xaa can be any naturally occurring amino acid
  misc_feature (111)..(112): Xaa can be any naturally occurring amino acid
  misc_feature (116)..(116): Xaa can be any naturally occurring amino acid
  Coding DNA Sequence Number=SeqID_5563
WFFVVVLXXXFXXSLXXGXPXXXXXXXXXXNIIIHIFSLICVGPHPLQITXIKIRXSLYLTPXXXXXRRGFLVVVLFSLXPAALXPLPHAXAAAASPTPHPISNTXINYTXXRPRXRSSTHNIHNLL

SEQ ID NO: 8373 - protein, 82 aa, Glycine max
  Coding DNA Sequence Number=SeqID_5565
  Gene Ontology: Mol. function=protein binding; Cellular component =signalosome; Biological process=red or far red light signaling pathway
  Homolog annotation: Hit_ID=Q40112; Match level="QueryCoverage=100%, HitCoverage=32%, E-value=2e-24, Identity=68%"; Hit description =Putative uncharacterized protein LC15
QKRFQKALDLLHNVVTAPMSTINAIAVEAYKKHTLVSLIRHGQFSTSLPKDSSSFAQTNPKNLCQPYAQLGKNHGTGKIAKI

SEQ ID NO: 8374 - protein, 129 aa, Glycine max
  misc_feature (3)..(3): Xaa can be any naturally occurring amino acid
  misc_feature (15)..(15): Xaa can be any naturally occurring amino acid
  misc_feature (47)..(47): Xaa can be any naturally occurring amino acid
  misc_feature (70)..(70): Xaa can be any naturally occurring amino acid
  misc_feature (73)..(73): Xaa can be any naturally occurring amino acid
  misc_feature (79)..(79): Xaa can be any naturally occurring amino acid
  misc_feature (82)..(82): Xaa can be any naturally occurring amino acid
  misc_feature (88)..(90): Xaa can be any naturally occurring amino acid
  misc_feature (99)..(99): Xaa can be any naturally occurring amino acid
  misc_feature (102)..(102): Xaa can be any naturally occurring amino acid
  misc_feature (107)..(108): Xaa can be any naturally occurring amino acid
  misc_feature (129)..(129): Xaa can be any naturally occurring amino acid
  Coding DNA Sequence Number=SeqID_5566
SDXSAASLSTLASHXDTTTLHTAVERRRVMHTPVCDADRVLCCLCLXCLVRVVDDNLTKMRDVLTISVSXIYXNTVVLXPPXSTTPLXXXTFDVMCALXSIXGCSTXXTRARCGSAWHCSALTRVCAEX

SEQ ID NO: 8375 - protein, 126 aa, Glycine max
  misc_feature (47)..(47): Xaa can be any naturally occurring amino acid
  misc_feature (65)..(65): Xaa can be any naturally occurring amino acid
  misc_feature (77)..(77): Xaa can be any naturally occurring amino acid
  misc_feature (84)..(84): Xaa can be any naturally occurring amino acid
  misc_feature (110)..(110): Xaa can be any naturally occurring amino acid
  Coding DNA Sequence Number=SeqID_5568
PSRACGTLNLTRDRDRGAVREISATQRADAWLCVHYDVIYNTCVSYXVSFAHADSAEIRTLGSAXSRADIIAHGRCXRRATSVXDSRNMRRETLCIMLSSLHVDAVAETXSTSTLSHINIYVLAFY

SEQ ID NO: 8376 - protein, 35 aa, Glycine max
  Coding DNA Sequence Number=SeqID_5569
GLRLLTKSECSAWRFSWVVTRLFQSECCDGTIQPG

SEQ ID NO: 8377 - protein, 112 aa, Glycine max
  misc_feature (59)..(59): Xaa can be any naturally occurring amino acid
  Coding DNA Sequence Number=SeqID_5571
  Gene Ontology: Mol. function=hydrolase activity, hydrolyzing O -glycosyl compounds; Biological process=carbohydrate metabolic process
  Homolog annotation: Hit_ID=Q9M4A9; Match level="QueryCoverage=91%, HitCoverage=22%, E-value=4e-29, Identity=64%"; Hit description=Beta -1,3 glucanase precursor
MARTAMDRVKIYEEKPDILRAFAVIVISATVTGRSGDIAALSKIHSAKQWVATHMKRLXPETKVNYILVGCEVFHWGDTNMIRGLRRAMRTLDSALLAEGISDSKANHWLTL

SEQ ID NO: 8378 - protein, 86 aa, Glycine max; identical to SEQ ID NO: 7757
  misc_feature (1)..(1): Xaa can be any naturally occurring amino acid
  misc_feature (10)..(10): Xaa can be any naturally occurring amino acid
  misc_feature (60)..(60): Xaa can be any naturally occurring amino acid
  misc_feature (77)..(78): Xaa can be any naturally occurring amino acid
  Coding DNA Sequence Number=SeqID_5572

SEQ ID NO: 8379 - protein, 148 aa, Glycine max; identical to SEQ ID NO: 6009
  misc_feature (2)..(2): Xaa can be any naturally occurring amino acid
  misc_feature (8)..(9): Xaa can be any naturally occurring amino acid
  misc_feature (15)..(15): Xaa can be any naturally occurring amino acid
  misc_feature (17)..(17): Xaa can be any naturally occurring amino acid
  misc_feature (20)..(20): Xaa can be any naturally occurring amino acid
  misc_feature (24)..(24): Xaa can be any naturally occurring amino acid
  misc_feature (26)..(26): Xaa can be any naturally occurring amino acid
  misc_feature (42)..(42): Xaa can be any naturally occurring amino acid
  misc_feature (47)..(47): Xaa can be any naturally occurring amino acid
  misc_feature (50)..(50): Xaa can be any naturally occurring amino acid
  misc_feature (54)..(54): Xaa can be any naturally occurring amino acid
  misc_feature (56)..(57): Xaa can be any naturally occurring amino acid
  misc_feature (61)..(61): Xaa can be any naturally occurring amino acid
  misc_feature (73)..(73): Xaa can be any naturally occurring amino acid
  misc_feature (82)..(82): Xaa can be any naturally occurring amino acid
  misc_feature (92)..(92): Xaa can be any naturally occurring amino acid
  misc_feature (94)..(94): Xaa can be any naturally occurring amino acid
  misc_feature (102)..(102): Xaa can be any naturally occurring amino acid
  misc_feature (111)..(111): Xaa can be any naturally occurring amino acid
  misc_feature (125)..(125): Xaa can be any naturally occurring amino acid
  misc_feature (132)..(132): Xaa can be any naturally occurring amino acid
  misc_feature (134)..(135): Xaa can be any naturally occurring amino acid
  misc_feature (146)..(146): Xaa can be any naturally occurring amino acid
  Coding DNA Sequence Number=SeqID_5574

SEQ ID NO: 8380 - protein, 77 aa, Glycine max
  misc_feature (16)..(16): Xaa can be any naturally occurring amino acid
  misc_feature (50)..(50): Xaa can be any naturally occurring amino acid
  misc_feature (58)..(58): Xaa can be any naturally occurring amino acid
  misc_feature (71)..(71): Xaa can be any naturally occurring amino acid
  Coding DNA Sequence Number=SeqID_5576
IIKIIIVFKAIYLLQXQRMMHSVGYTRVRLLATLFIVYAPLSITLYSSHXRRAPLYDXTSHRFLPCAAELXCIIMND

SEQ ID NO: 8381 - protein, 91 aa, Glycine max
  Coding DNA Sequence Number=SeqID_5578
CVRTPPQLDLLASKNSQLNSELSELSESYGANNTQDTRMRGSNTNNRHTLDVGAAHYGAYLQHHNPPEKFRVIQTNSILIFLPSSPLPSIS

SEQ ID NO: 8382 - protein, 81 aa, Glycine max
  Coding DNA Sequence Number=SeqID_5580
ELVLMHDIVHPYYTGSCMANVCVSLDYKRIPPRTVGTRARTPAPSNYHASDPDPPPPSLFFLSPILSLFFLLISVYYVYLT

SEQ ID NO: 8383 - protein, 77 aa, Glycine max; identical to SEQ ID NO: 6014
  misc_feature (1)..(1): Xaa can be any naturally occurring amino acid
  misc_feature (6)..(8): Xaa can be any naturally occurring amino acid
  misc_feature (48)..(48): Xaa can be any naturally occurring amino acid
  misc_feature (50)..(51): Xaa can be any naturally occurring amino acid
  misc_feature (55)..(56): Xaa can be any naturally occurring amino acid
  Coding DNA Sequence Number=SeqID_5581
  Subcellular localization annotation: CTP_CleavageSite=20; ConfidenceScore=5.00e-01

SEQ ID NO: 8384 - protein, 135 aa, Glycine max
  Coding DNA Sequence Number=SeqID_5583
  Gene Ontology: Mol. function=protein binding; Cellular component =endosome; Biological process=protein transport
  Homolog annotation: Hit_ID=Q9S9T7; Match level="QueryCoverage=100%, HitCoverage=64%, E-value=2e-57, Identity=82%"; Hit description =Vacuolar protein sorting-associated protein 28 homolog 1
  Pfam annotation: Domain name=VPS28; Domain location=18-135; Score =144.4; E_value=3.1e-40; Accession=PF03997.3; Description=VPS28 protein
MEVKLWNDKREREMYENFAELYAIIKATEKLEKAYIRDLISPSEYETECQKLIVHFKTLSATLKDLVPNIERFAETYKMDCSAAVYRLVTSGVPATVEHRAAAMASTSSSASVVAECVQNFITSMDSLKLNMVAV

SEQ ID NO: 8385 - protein, 122 aa, Glycine max; identical to SEQ ID NO: 7784
  misc_feature (34)..(34): Xaa can be any naturally occurring amino acid
  misc_feature (49)..(49): Xaa can be any naturally occurring amino acid
  misc_feature (86)..(86): Xaa can be any naturally occurring amino acid
  misc_feature (89)..(89): Xaa can be any naturally occurring amino acid
  misc_feature (120)..(120): Xaa can be any naturally occurring amino acid
  Coding DNA Sequence Number=SeqID_5584

SEQ ID NO: 8386 - protein, 148 aa, Glycine max
  misc_feature (85)..(85): Xaa can be any naturally occurring amino acid
  misc_feature (139)..(139): Xaa can be any naturally occurring amino acid
  Coding DNA Sequence Number=SeqID_5586
  Gene Ontology: Mol. function=DNA binding; Cellular component =chromosome; Biological process=nucleosome assembly
  Homolog annotation: Hit_ID=Q9FJE8; Match level="QueryCoverage=100%, HitCoverage=100%, E-value=2e-55, Identity=78%"; Hit description =Probable histone H2A.7
  Pfam annotation: Domain name=CBFD_NFYB_HMF; Domain location=32-96; Score=14.7; E_value=0.0071; Accession=PF00808.13; Description =Histone-like transcription factor (CBFNF-Y) and archaeal histone
  Pfam annotation: Domain name=Histone; Domain location=26-99; Score =102.8; E_value=1.1e-27; Accession=PF00125.14; Description=Core histone H2AH2BH3H4
  Pfam module annotation: Pfam domain module=CBFD_NFYB_HMF::Histone; Domain location=32-96::26-99
  Subcellular localization annotation: CTP_CleavageSite=59; ConfidenceScore=5.15e-01
METTGKVKKAFGGRKAGGPKTKSVSKSIKAGLQFPVGRITRFLKKGRYAQRLGGGAPVYMAAVLEYLAAEVLELAGNAARDNKKXRIIPRHLLLAIRNDEELGKLLSGVTIAHGGVLPNINSVLLPKKSAKSSEDAAPXSPGKSPKKA

SEQ ID NO: 8387 - protein, 337 aa, Glycine max
  Coding DNA Sequence Number=SeqID_5587
  Gene Ontology: Mol. function=serine-type endopeptidase activity; Biological process=proteolysis
  Homolog annotation: Hit_ID=A0JTW5; Match level="QueryCoverage=60%, HitCoverage=60%, E-value=3e-36, Identity=44%"; Hit description =Putative uncharacterized protein precursor
MKTIIIFVLFFIALALADVSHFTSKKNARDEAAAAENYWTSENLLNAIPLDDQSVPFDEPQVIRPHEARNATEERVPQSSEGHDSLFFPSTPEEIESVSINSNKRIGQFAPVDSYTVYPWRTVGKIFFSKGGLNYVCSGSVIKRNVISTAGHCVYDGAAGGWVTNFIFVPGYHVSGGVAMRPYGTWYARQLRTTANWANTGLFCQDYGFAVIWDNSGAALGDVVGTLGWSINRDAPNTVWTSLGYPQASPYDGTQNFYSTSAYAGSAAPGCTPNTIGLYTSATPGSSGGPWVIDFGSNNYLNGLNSYKYDNYPDIMFGPYFDNNWLNALNEAEAISP

SEQ ID NO: 8388 - protein, 135 aa, Glycine max
  Coding DNA Sequence Number=SeqID_5588
  Gene Ontology: Mol. function=protein tyrosine phosphatase activity; Cellular component=cytoplasm; Biological process=protein amino acid dephosphorylation
  Homolog annotation: Hit_ID=Q84PD6; Match level="QueryCoverage=83%, HitCoverage=42%, E-value=3e-42, Identity=69%"; Hit description =Protein tyrosine phosphatase-like protein
  Pfam annotation: Domain name=LMWPc; Domain location=33-134; Score =93.6; E_value=6.4e-25; Accession=PF01451.11; Description=Low molecular weight phosphotyrosine protein phosphatase
  Subcellular localization annotation: CTP_CleavageSite=45; ConfidenceScore=5.49e-01
FFVSSFREKPRFGCFASSSPMATPTQSSETKPFSVLFVCLGNICRSPAAEGVFRDIVKKRGLDSKFIIDSAGTIDYHEGNMADPRMRSAAKRRGVEITSLSRPIKASDFREFDLILAMDEQNKEDILKAYNVWKA

SEQ ID NO: 8389 - protein, 241 aa, Glycine max; identical to SEQ ID NO: 7786
  misc_feature (2)..(2): Xaa can be any naturally occurring amino acid
  misc_feature (8)..(8): Xaa can be any naturally occurring amino acid
  misc_feature (29)..(29): Xaa can be any naturally occurring amino acid
  misc_feature (43)..(44): Xaa can be any naturally occurring amino acid
  misc_feature (64)..(64): Xaa can be any naturally occurring amino acid
  misc_feature (87)..(87): Xaa can be any naturally occurring amino acid
  misc_feature (136)..(136): Xaa can be any naturally occurring amino acid
  Coding DNA Sequence Number=SeqID_5589

SEQ ID NO: 8390 - protein, 133 aa, Glycine max
  misc_feature (7)..(7): Xaa can be any naturally occurring amino acid
  misc_feature (42)..(42): Xaa can be any naturally occurring amino acid
  misc_feature (58)..(58): Xaa can be any naturally occurring amino acid
  misc_feature (70)..(70): Xaa can be any naturally occurring amino acid
  misc_feature (99)..(99): Xaa can be any naturally occurring amino acid
  misc_feature (126)..(126): Xaa can be any naturally occurring amino acid
  misc_feature (131)..(131): Xaa can be any naturally occurring amino acid
  Coding DNA Sequence Number=SeqID_1583
MCIRTTXCISDPSQRPPSGQTTFVPYPSFLYHDFISRGSACXYTRHMCGAVRGTPSFXLCEWYALLIWQXRLYVCVACGRSYVGRSDWDDRIYCCTYSXELSAHAPSLVMVRLDTTRQTRVFISSXSVDYXGR

SEQ ID NO: 8391 - protein, 148 aa, Glycine max
  misc_feature (33)..(33): Xaa can be any naturally occurring amino acid
  misc_feature (139)..(139): Xaa can be any naturally occurring amino acid
  misc_feature (143)..(143): Xaa can be any naturally occurring amino acid
  misc_feature (146)..(147): Xaa can be any naturally occurring amino acid
  Coding DNA Sequence Number=SeqID_1585
  Gene Ontology: Mol. function=protein binding; Cellular component =protein complex; Biological process=chromosome segregation
  Homolog annotation: Hit_ID=P55034; Match level="QueryCoverage=79%, HitCoverage=30%, E-value=1e-36, Identity=70%"; Hit description=26S proteasome non-ATPase regulatory subunit 4
IKYEKKALEVVGKRLKKNSVSLDVVNFGDDDDXDKPLKLEALLSSVNNNDGSHIVHVPSGPNALSDVLLSTPVFTGDEGASGYVSAAAAAAAAGGDFDFGVDPNIDPELALALRVSMEEERARQEAAAKKAADEAGQKXQDGXSAXXS

SEQ ID NO: 8392 - protein, 119 aa, Glycine max
  misc_feature (40)..(41): Xaa can be any naturally occurring amino acid
  misc_feature (81)..(81): Xaa can be any naturally occurring amino acid
  misc_feature (96)..(96): Xaa can be any naturally occurring amino acid
  misc_feature (104)..(104): Xaa can be any naturally occurring amino acid
  misc_feature (116)..(116): Xaa can be any naturally occurring amino acid
  Coding DNA Sequence Number=SeqID_1586
LVIYIPSRLLFYLQVLVSVLFSTADHTVLVESGHIGLVAXXSSGFVPSPSFFFAEVESLLFGHSQISGSFFFSEGDLAVSXAEFSELTDIGGGADXSGDFFVDXDFGSDFLSDGFXGDD

SEQ ID NO: 8393 - protein, 161 aa, Glycine max
  misc_feature (37)..(37): Xaa can be any naturally occurring amino acid
  Coding DNA Sequence Number=SeqID_1588
  Homolog annotation: Hit_ID=Q3K7E5; Match level="QueryCoverage=98%, HitCoverage=83%, E-value=1e-69, Identity=83%"; Hit description =Transcriptional regulator, PadR family
  Pfam annotation: Domain name=PadR; Domain location=2-82; Score=72.4; E_value=1.5e-18; Accession=PF03551.5; Description=Transcriptional regulator PadR-like family
RVFAPGDLKLLLLALIAEQPCHGYDLIRQIEGMFDGXYSPSPGVIYPTLTFLEESEMILGDAAAGKKSYSVTDAGRQSLIEQAVALDGVRMRIDVSKRSLRGHERPLEIHEAVHNLRHALQLHNGRWSPEEILRVRDLLNNTAKAIVDGPASAPSCSEKPE

SEQ ID NO: 8394 - protein, 103 aa, Glycine max
  misc_feature (24)..(24): Xaa can be any naturally occurring amino acid
  misc_feature (91)..(91): Xaa can be any naturally occurring amino acid
  Coding DNA Sequence Number=SeqID_1589
  Gene Ontology: Mol. function=lyase activity; Cellular component =extracellular region
  Homolog annotation: Hit_ID=Q6U7H9; Match level="QueryCoverage=96%, HitCoverage=23%, E-value=1e-33, Identity=68%"; Hit description =Pectate lyase
LAGVCHPNWQQNRPRLTDCAIGHXKNAIGGRDSLIYVADHNRDDHAVNPNPGSLRHAEIQDEPLWIILDRYMAIQLKEELLMNSFKTIYGXRATVHVAAGPCI

SEQ ID NO: 8395 - protein, 182 aa, Glycine max
  misc_feature (11)..(11): Xaa can be any naturally occurring amino acid
  misc_feature (102)..(105): Xaa can be any naturally occurring amino acid
  misc_feature (107)..(107): Xaa can be any naturally occurring amino acid
  misc_feature (111)..(111): Xaa can be any naturally occurring amino acid
  misc_feature (113)..(113): Xaa can be any naturally occurring amino acid
  misc_feature (117)..(117): Xaa can be any naturally occurring amino acid
  misc_feature (120)..(121): Xaa can be any naturally occurring amino acid
  misc_feature (124)..(124): Xaa can be any naturally occurring amino acid
  misc_feature (128)..(129): Xaa can be any naturally occurring amino acid
  misc_feature (133)..(133): Xaa can be any naturally occurring amino acid
  misc_feature (135)..(135): Xaa can be any naturally occurring amino acid
  misc_feature (138)..(138): Xaa can be any naturally occurring amino acid
  misc_feature (143)..(143): Xaa can be any naturally occurring amino acid
  misc_feature (145)..(146): Xaa can be any naturally occurring amino acid
  misc_feature (148)..(149): Xaa can be any naturally occurring amino acid
  misc_feature (152)..(152): Xaa can be any naturally occurring amino acid
  misc_feature (154)..(154): Xaa can be any naturally occurring amino acid
  misc_feature (156)..(159): Xaa can be any naturally occurring amino acid
  Coding DNA Sequence Number=SeqID_1590
  Homolog annotation: Hit_ID=A7P6V1; Match level="QueryCoverage=90%, HitCoverage=24%, E-value=9e-29, Identity=48%"; Hit description =Chromosome chr9 scaffold_7, whole genome shotgun sequence
KVSVKLIMNEXNLTSEKRADSWVYNVFALYFIHTYIAIFYHALLHRNFSTLRQVLIQRLLLSEVLENLVENSLPYLKYIYKKYRVQHMMNEKGDAREKFQFXXXXEXEYLXPXYSAXSSXXELXDGLXXRFLXRXPCXVGMNXMXXGXXPPXFXFXXXXLVTAKRVSFPSRAAHQLCVMAYV

SEQ ID NO: 8396 - protein, 199 aa, Glycine max
  Coding DNA Sequence Number=SeqID_1591
APPPAAKILYEEDFSTKDKSFKDFYNRYLIPMREKIEEYAEKINNIVKEKELEFFNMNEITQRLITDFSKEKRELEATLRERNIAIANLRETIENLQNRSVHSGGNSGRVHSQDNIDLPRQVNANNLRVNTWTPDKLYSFRAKSSANKDSRLQTIQKLQSQKLRHKNSSEDSANKMNDFIQDSINISQINFETNPDDFS

SEQ ID NO: 8397 - protein, 111 aa, Glycine max
  misc_feature (69)..(69): Xaa can be any naturally occurring amino acid
  misc_feature (71)..(71): Xaa can be any naturally occurring amino acid
  Coding DNA Sequence Number=SeqID_1593
  Gene Ontology: Mol. function=small conjugating protein ligase activity; Cellular component=proteasome complex; Biological process =regulation of protein metabolic process
  Homolog annotation: Hit_ID=P35132; Match level="QueryCoverage=100%, HitCoverage=75%, E-value=1e-30, Identity=60%"; Hit description=SUMO -conjugating enzyme UBC9
  Pfam annotation: Domain name=UQ_con; Domain location=1-106; Score =41.0; E_value=4.4e-09; Accession=PF00179.16; Description=Ubiquitin -conjugating enzyme
IMGPVIEPYEEREFQVIIHFLRNNRLTPPKVAFRTKVFHPDINSNGNICLDIIKEQWNPALTIFKELLXFXSTQSDTNPYDQFDPEIAYMYKTDRAKYKANVLRWTQKNPM

SEQ ID NO: 8398 - protein, 114 aa, Glycine max; identical to SEQ ID NO: 6101
  misc_feature (6)..(6): Xaa can be any naturally occurring amino acid
  misc_feature (59)..(59): Xaa can be any naturally occurring amino acid
  Coding DNA Sequence Number=SeqID_5591

SEQ ID NO: 8399 - protein, 221 aa, Glycine max
  misc_feature (190)..(190): Xaa can be any naturally occurring amino acid
  misc_feature (196)..(196): Xaa can be any naturally occurring amino acid
  misc_feature (211)..(212): Xaa can be any naturally occurring amino acid
  misc_feature (221)..(221): Xaa can be any naturally occurring amino acid
  Coding DNA Sequence Number=SeqID_5593
QLRRPPPQIKHSIADYNSLNTIIWLNIFWFFLLTVNCFLAIFASNNALELPFYLVTFSFLVNSVYLFTGYCLLNSRVRYNIRTILRRLQNKSMSNESLNQTKTSVLMHNSKSYMSQTLSSPTTTKQLDLVDQAFPGSNLQTKFSNSQQQISGSRMLNKSAAYDFSTNFDSSTTTTTSHSNMSKHHHRRRXRKKSSXNDLNSTMDNYIDPYXXIDYDNDEQX

SEQ ID NO: 8400 - protein, 187 aa, Glycine max
  misc_feature (17)..(17): Xaa can be any naturally occurring amino acid
  misc_feature (41)..(41): Xaa can be any naturally occurring amino acid
  misc_feature (114)..(114): Xaa can be any naturally occurring amino acid
  misc_feature (120)..(120): Xaa can be any naturally occurring amino acid
  misc_feature (132)..(132): Xaa can be any naturally occurring amino acid
  misc_feature (165)..(165): Xaa can be any naturally occurring amino acid
  misc_feature (169)..(169): Xaa can be any naturally occurring amino acid
  misc_feature (176)..(176): Xaa can be any naturally occurring amino acid
  Coding DNA Sequence Number=SeqID_5595
LVIIYMSELPSGALSIXPHRMISQYDSVSAVYLRDVRVTTXLSINHSQMRARYRCVTASLKCHDYAHYTRAGRTLYHIYMLYYVCQHLVPARDMPAPRTTTHRTLYYICMLYRXRYILPXRVTRALVVRRAXLVSYITGAYSYLLNSISKYHLSSTYRCHADERXILCXMMEVITXHDEMTQCIHEH

SEQ ID NO: 8401 - protein, 159 aa, Glycine max
  misc_feature (39)..(40): Xaa can be any naturally occurring amino acid
  misc_feature (42)..(42): Xaa can be any naturally occurring amino acid
  misc_feature (66)..(66): Xaa can be any naturally occurring amino acid
  misc_feature (75)..(75): Xaa can be any naturally occurring amino acid
  misc_feature (117)..(117): Xaa can be any naturally occurring amino acid
  misc_feature (125)..(125): Xaa can be any naturally occurring amino acid
  misc_feature (131)..(131): Xaa can be any naturally occurring amino acid
  Coding DNA Sequence Number=SeqID_5597
NNTGDISIDDLHVLFYLSHSTIGYTNTNTDSSEGSVMWXXTXLRSGTVLLCAMSGGGEWHAVGNHXPHPHRSPRXTLADGANTLYRTPITHRGAATSHILRALSLVSTAHPPLSAAXCRYHLTIXRHLNIXLSRTCVSTPTALHRQRAGRRQMIRLHPQ

SEQ ID NO: 8402 - protein, 122 aa, Glycine max
  misc_feature (46)..(46): Xaa can be any naturally occurring amino acid
  misc_feature (114)..(114): Xaa can be any naturally occurring amino acid
  Coding DNA Sequence Number=SeqID_5599
  Gene Ontology: Mol. function=sucrose transmembrane transporter activity; Cellular component=integral to plasma membrane; Biological process=sucrose transport
  Homolog annotation: Hit_ID=Q7XA53; Match level="QueryCoverage=92%, HitCoverage=21%, E-value=9e-35, Identity=70%"; Hit description =Sucrose transporter
GGCVFLLSVCLAMTGCGTKRAQHSLQYIVFSNDHQESVPPPAAVKXGALALLSVIGISLAITCSGPPPPEKKLSSASGAGQGVSLGVLNLASVIPQMVVSVISGPWDALFGGGXFSAPLTVG

SEQ ID NO: 8403 - protein, 125 aa, Glycine max
  Coding DNA Sequence Number=SeqID_5600
  Gene Ontology: Mol. function=structural constituent of cuticle
  Homolog annotation: Hit_ID=Q7QIK6; Match level="QueryCoverage=58%, HitCoverage=22%, E-value=2e-21, Identity=65%"; Hit description =Cuticular protein 111, RR-3 family
  Pfam annotation: Domain name=Chitin_bind_4; Domain location=25-94; Score=45.2; E_value=2.4e-10; Accession=PF00379.13; Description =Insect cuticle protein
MFAKALVLAAAVCGALSFPLEYPGALYSQYHAQDELGQYTFGYSGPGATKHETKTADGVTRGSYSYVDANGQLQTRTYTADDVHGFRVAASDLPVGPSSASYPSYQSPQLPSAQLPSWQHAAPAR

SEQ ID NO: 8404 - protein, 136 aa, Glycine max
  misc_feature (58)..(58): Xaa can be any naturally occurring amino acid
  misc_feature (70)..(70): Xaa can be any naturally occurring amino acid
  Coding DNA Sequence Number=SeqID_5601
  Subcellular localization annotation: CTP_CleavageSite=31; ConfidenceScore=5.09e-01
FSRTHFFCSYEPFLTTLSISSYKYTPSFTPRLSAHHTPLFLFYSILLLSPLVIISSLXSTLLHTLQHATXPPYMILSYLSARAPFSYGFLSGTTPTLCAVLLLCSTPLPATSLAPQLRASLYTISHSTILPTALMT

SEQ ID NO: 8405 - protein, 135 aa, Glycine max; identical to SEQ ID NO: 7795
  misc_feature (3)..(3): Xaa can be any naturally occurring amino acid
  misc_feature (5)..(5): Xaa can be any naturally occurring amino acid
  misc_feature (22)..(22): Xaa can be any naturally occurring amino acid
  misc_feature (25)..(26): Xaa can be any naturally occurring amino acid
  misc_feature (38)..(38): Xaa can be any naturally occurring amino acid
  misc_feature (51)..(52): Xaa can be any naturally occurring amino acid
  misc_feature (60)..(60): Xaa can be any naturally occurring amino acid
  misc_feature (63)..(63): Xaa can be any naturally occurring amino acid
  misc_feature (66)..(66): Xaa can be any naturally occurring amino acid
  misc_feature (75)..(75): Xaa can be any naturally occurring amino acid
  misc_feature (96)..(97): Xaa can be any naturally occurring amino acid
  misc_feature (111)..(111): Xaa can be any naturally occurring amino acid
  misc_feature (120)..(120): Xaa can be any naturally occurring amino acid
  Coding DNA Sequence Number=SeqID_5603

SEQ ID NO: 8406 - protein, 166 aa, Glycine max
  misc_feature (44)..(45): Xaa can be any naturally occurring amino acid
  misc_feature (72)..(73): Xaa can be any naturally occurring amino acid
  misc_feature (87)..(87): Xaa can be any naturally occurring amino acid
  misc_feature (91)..(91): Xaa can be any naturally occurring amino acid
  misc_feature (124)..(124): Xaa can be any naturally occurring amino acid
  misc_feature (137)..(137): Xaa can be any naturally occurring amino acid
  misc_feature (140)..(140): Xaa can be any naturally occurring amino acid
  misc_feature (145)..(145): Xaa can be any naturally occurring amino acid
  Coding DNA Sequence Number=SeqID_529
TNRSFVTMYTYIIYNNLILTTSLRDTVSHLCYLRPRVPLLSRTXXLFSLLLLTYPHTAVSLSISVSTLLCYXXRYIDTTSTHDKRMXDVVXYALSVSVYDDERILSISYLFTYLNHCIILTLTXLCCVVAAPTPTIXLDXSAPVXYHTDTLCRLCARHTHTYLHSR

SEQ ID NO: 8407 - protein, 147 aa, Glycine max
  misc_feature (39)..(39): Xaa can be any naturally occurring amino acid
  misc_feature (42)..(43): Xaa can be any naturally occurring amino acid
  misc_feature (45)..(46): Xaa can be any naturally occurring amino acid
  misc_feature (49)..(49): Xaa can be any naturally occurring amino acid
  misc_feature (62)..(63): Xaa can be any naturally occurring amino acid
  misc_feature (66)..(66): Xaa can be any naturally occurring amino acid
  misc_feature (71)..(71): Xaa can be any naturally occurring amino acid
  misc_feature (73)..(73): Xaa can be any naturally occurring amino acid
  misc_feature (79)..(81): Xaa can be any naturally occurring amino acid
  misc_feature (83)..(84): Xaa can be any naturally occurring amino acid
  misc_feature (87)..(87): Xaa can be any naturally occurring amino acid
  misc_feature (98)..(98): Xaa can be any naturally occurring amino acid
  misc_feature (104)..(106): Xaa can be any naturally occurring amino acid
  misc_feature (112)..(113): Xaa can be any naturally occurring amino acid
  misc_feature (115)..(116): Xaa can be any naturally occurring amino acid
  misc_feature (123)..(123): Xaa can be any naturally occurring amino acid
  misc_feature (126)..(126): Xaa can be any naturally occurring amino acid
  misc_feature (129)..(129): Xaa can be any naturally occurring amino acid
  misc_feature (131)..(131): Xaa can be any naturally occurring amino acid
  misc_feature (134)..(134): Xaa can be any naturally occurring amino acid
  misc_feature (141)..(141): Xaa can be any naturally occurring amino acid
  Coding DNA Sequence Number=SeqID_531
  Subcellular localization annotation: CTP_CleavageSite=51; ConfidenceScore=5.14e-01
RSRDDASLGFFWFLLSPHQISPSHPNNKSPFAITPGHPXQKXXTXXITXPRRGRVGEMQKSXXITXGLAAXQXGSGVCXXXTXXSGXAEKGGGKQEVXPRRRSXXXFMKRLXXPXXAPTRRGXIYXGVXRXGRXPNADTTXRACVGL

SEQ ID NO: 8408 - protein, 77 aa, Glycine max
  misc_feature (16)..(16): Xaa can be any naturally occurring amino acid
  misc_feature (49)..(49): Xaa can be any naturally occurring amino acid
  Coding DNA Sequence Number=SeqID_533
  Gene Ontology: Mol. function=metal ion binding
  Homolog annotation: Hit_ID=Q75NI2; Match level="QueryCoverage=74%, HitCoverage=74%, E-value=3e-15, Identity=73%"; Hit description=Type 1 metallothionein
  Pfam annotation: Domain name=Metallothio_2; Domain location=1-76; Score=107.9; E_value=3.1e-29; Accession=PF01439.8; Description =Metallothionein
MSSCGCGSSCNCGQQXCGCNKYSFDLSYVEKTTTETLVLGVGPVKAQLXEGAEMGVASENGGCNCGSSCTCDPCNCK

SEQ ID NO: 8409 - protein, 79 aa, Glycine max
  misc_feature (67)..(67): Xaa can be any naturally occurring amino acid
  Coding DNA Sequence Number=SeqID_534
QIRVLQTRLQHASTQATRVCVSAWIMVRIAPYSHSFIGLLYDGKSCVRSLISAALEHDSQSRERESXRYSTTSVSCMCN

SEQ ID NO: 8410 - protein, 124 aa, Glycine max
  misc_feature (9)..(9): Xaa can be any naturally occurring amino acid
  misc_feature (11)..(11): Xaa can be any naturally occurring amino acid
  Coding DNA Sequence Number=SeqID_536
ASSGRRPLXFXLSLTLTDSPYSPQPAHATHGLAHTPLNRHRRRYICSLSFLCSHSSLLSKKAAHECCCTHSYSMHYSRRHSHSYLVSLRALIHPRATTNRRLSLLVRSCVLLSTASAICNKTSS

SEQ ID NO: 8411 - protein, 134 aa, Glycine max
  misc_feature (1)..(2): Xaa can be any naturally occurring amino acid
  misc_feature (7)..(7): Xaa can be any naturally occurring amino acid
  misc_feature (61)..(61): Xaa can be any naturally occurring amino acid
  Coding DNA Sequence Number=SeqID_538
XXNSCFXSLITRKSKKCSRARRITCACKPFYSSIILQSSEKDVFGSQGSSDNHKPQTNISXAIIPTGKKRRTSGGGGSGDNISGSTTINAVTATRIRIDTALKNRTMFFTTGWTPLHQIPANMKKSEDQIKKRE

SEQ ID NO: 8412 - protein, 289 aa, Glycine max
  misc_feature (185)..(185): Xaa can be any naturally occurring amino acid
  Coding DNA Sequence Number=SeqID_540
  Gene Ontology: Mol. function=ubiquitin-protein ligase activity; Cellular component=ubiquitin ligase complex; Biological process =protein ubiquitination
  Homolog annotation: Hit_ID=A7PD68; Match level="QueryCoverage=98%, HitCoverage=54%, E-value=1e-64, Identity=50%"; Hit description =Chromosome chr17 scaffold_12, whole genome shotgun sequence
  Pfam annotation: Domain name=U-box; Domain location=21-93; Score =23.3; E_value=1.6e-06; Accession=PF04564.6; Description=U-box domain
  Subcellular localization annotation: CTP_CleavageSite=38; ConfidenceScore=5.09e-01
MGGNGKHRWKFSFHRSSTHPPKEFTCPISGSLMSDPVVVASGQTFERLAVQLCKDLNFSPKLDDGTRPDFSTLIPNLAIKTTILHWCDNARTQHPRPPDYASLQRLVLEQKENDRVRVSEMELLNAVADLPPVIFSHAATELGPRVNHFNSGSSSEQESVIIPSSPGTPLPLTIRPTRFSSSSSXSCEIEIENPNTPASEEEEGLLKKLKSNEVFEQEEGVIALRKITRNKEDARVSLCTPRVLLALRGVIASRCGVVQANAVGVRGNRAIENQNQMMHLKSRIAALMA

SEQ ID NO: 8413 - protein, 141 aa, Glycine max
  misc_feature (15)..(15): Xaa can be any naturally occurring amino acid
  misc_feature (29)..(29): Xaa can be any naturally occurring amino acid
  misc_feature (45)..(45): Xaa can be any naturally occurring amino acid
  misc_feature (56)..(56): Xaa can be any naturally occurring amino acid
  misc_feature (68)..(68): Xaa can be any naturally occurring amino acid
  misc_feature (124)..(124): Xaa can be any naturally occurring amino acid
  Coding DNA Sequence Number=SeqID_5605
LIYRDLHKCLKRITXNRCPRALSQHLNYXSHSDQTLHYIMKIYTXGRWRATTGPHXAIKMRTHRLLMXQPLSHYQYKQVTNTYEPHTRHRHTTIHTTQTPRDRCTRQSISNGIVMMTNTMHTYXQQHTDIHNNNIMILEIN

SEQ ID NO: 8414 - protein, 82 aa, Glycine max; identical to SEQ ID NO: 7799
  Coding DNA Sequence Number=SeqID_5607

SEQ ID NO: 8415 - protein, 149 aa, Glycine max; identical to SEQ ID NO: 7803
  misc_feature (91)..(91): Xaa can be any naturally occurring amino acid
  misc_feature (132)..(132): Xaa can be any naturally occurring amino acid
  misc_feature (141)..(141): Xaa can be any naturally occurring amino acid
  Coding DNA Sequence Number=SeqID_5609

SEQ ID NO: 8416 - protein, 101 aa, Glycine max; identical to SEQ ID NO: 6449
  misc_feature (1)..(1): Xaa can be any naturally occurring amino acid
  misc_feature (10)..(10): Xaa can be any naturally occurring amino acid
  misc_feature (67)..(67): Xaa can be any naturally occurring amino acid
  misc_feature (93)..(93): Xaa can be any naturally occurring amino acid
  misc_feature (99)..(99): Xaa can be any naturally occurring amino acid
  misc_feature (101)..(101): Xaa can be any naturally occurring amino acid
  Coding DNA Sequence Number=SeqID_5611
  Subcellular localization annotation: CTP_CleavageSite=58; ConfidenceScore=5.44e-01

SEQ ID NO: 8417 - protein, 168 aa, Glycine max
  misc_feature (23)..(23): Xaa can be any naturally occurring amino acid
  misc_feature (39)..(39): Xaa can be any naturally occurring amino acid
  misc_feature (131)..(131): Xaa can be any naturally occurring amino acid
  Coding DNA Sequence Number=SeqID_5613
  Gene Ontology: Mol. function=hydrolase activity, acting on carbon -nitrogen (but not peptide) bonds, in linear amidines; Cellular component=chloroplast; Biological process=metabolic process
  Homolog annotation: Hit_ID=A9GYV1; Match level="QueryCoverage=100%, HitCoverage=34%, E-value=3e-59, Identity=72%"; Hit description =Allantoate amidohydrolase
GTVPMPMHQDPMAAAEKQIVNLXSLCKHPEEYLSYDENXSDSTFYSLSRSLGCTVGEISTWPRANNGIPGQVTYTGDIRAIDDLGREAAIYDISKQIYQIWEQRTVSCIIEHKHDASAVICDSDLSTQLTXATYTALKKMEGDSHERSAQHHRTEPGHEASAQKSHLT

SEQ ID NO: 8418 - protein, 128 aa, Glycine max
  misc_feature (7)..(7): Xaa can be any naturally occurring amino acid
  misc_feature (22)..(22): Xaa can be any naturally occurring amino acid
  misc_feature (26)..(26): Xaa can be any naturally occurring amino acid
  misc_feature (29)..(29): Xaa can be any naturally occurring amino acid
  misc_feature (35)..(35): Xaa can be any naturally occurring amino acid
  misc_feature (53)..(53): Xaa can be any naturally occurring amino acid
  misc_feature (83)..(83): Xaa can be any naturally occurring amino acid
  misc_feature (90)..(90): Xaa can be any naturally occurring amino acid
  misc_feature (101)..(101): Xaa can be any naturally occurring amino acid
  misc_feature (114)..(114): Xaa can be any naturally occurring amino acid
  Coding DNA Sequence Number=SeqID_5614
ISLIGSXQCGQHDQSTLCVYMXRYIXHYXTRPLIXAWQVCRRVLRVFSQISEXMKHDMQALHRAIRSCSDILQTGDVAIRYAXNYAYNIXDDNTMCAHRPXCSSYVVVEAVQTXEQHPHNKQLALSTT

SEQ ID NO: 8419 - protein, 178 aa, Glycine max
  misc_feature (149)..(178): Xaa can be any naturally occurring amino acid
  Coding DNA Sequence Number=SeqID_5616
GSQSKLTLTFALTDYNTLFTYTFHDCGTPLCTPSVLHYITCFKPFSNKIRLWQSKKFRVSLGLCQKRDFPVRGENPRRVLRGRPFKTKFFKKIPDLQKGAPTKAFPPRGFLPKGGPHPFKKKNKKGGGWFSPPPRRIIKKKKAFLFGCXXXXXXXXXXXXXXXXXXXXXXXXXXXXXX

SEQ ID NO: 8420 - protein, 197 aa, Glycine max
  misc_feature (43)..(43): Xaa can be any naturally occurring amino acid
  misc_feature (64)..(64): Xaa can be any naturally occurring amino acid
  misc_feature (76)..(76): Xaa can be any naturally occurring amino acid
  misc_feature (130)..(130): Xaa can be any naturally occurring amino acid
  Coding DNA Sequence Number=SeqID_5617
  Gene Ontology: Mol. function=serine-type endopeptidase activity; Cellular component=chloroplast; Biological process=proteolysis
  Homolog annotation: Hit_ID=A7Q159; Match level="QueryCoverage=100%, HitCoverage=64%, E-value=9e-69, Identity=69%"; Hit description =Chromosome chr10 scaffold_43, whole genome shotgun sequence
  Pfam annotation: Domain name=Trypsin; Domain location=2-183; Score= -26.4; E_value=0.0059; Accession=PF00089.16; Description=Trypsin
EEENAQGEGTASLFIRDKSGHIVTNYHADAKLATDTSGLQRCXLADAPWNSSVRGGKIIGVEPXDLLSRRGVMIQXSRCLGRSNDLRVGQRCFPMGNPYRCENTLSTRVVSGLGRQIPSPNGGAVRGAIXTDAAINAGNSGGPLIDLYGHVVGVNTATFPKKRTGVSSGVNFAIPIDTVVRTVPYLIVCGTPYSNRF

SEQ ID NO: 8421 - protein, 356 aa, Glycine max
  misc_feature (3)..(3): Xaa can be any naturally occurring amino acid
  misc_feature (6)..(6): Xaa can be any naturally occurring amino acid
  misc_feature (9)..(9): Xaa can be any naturally occurring amino acid
  misc_feature (11)..(12): Xaa can be any naturally occurring amino acid
  misc_feature (15)..(16): Xaa can be any naturally occurring amino acid
  misc_feature (18)..(18): Xaa can be any naturally occurring amino acid
  misc_feature (20)..(20): Xaa can be any naturally occurring amino acid
  misc_feature (22)..(24): Xaa can be any naturally occurring amino acid
  misc_feature (26)..(26): Xaa can be any naturally occurring amino acid
  misc_feature (31)..(33): Xaa can be any naturally occurring amino acid
  misc_feature (35)..(35): Xaa can be any naturally occurring amino acid
  misc_feature (43)..(43): Xaa can be any naturally occurring amino acid
  misc_feature (45)..(45): Xaa can be any naturally occurring amino acid
  misc_feature (50)..(51): Xaa can be any naturally occurring amino acid
  misc_feature (61)..(61): Xaa can be any naturally occurring amino acid
  misc_feature (64)..(64): Xaa can be any naturally occurring amino acid
  misc_feature (71)..(76): Xaa can be any naturally occurring amino acid
  misc_feature (80)..(80): Xaa can be any naturally occurring amino acid
  misc_feature (90)..(90): Xaa can be any naturally occurring amino acid
  misc_feature (94)..(95): Xaa can be any naturally occurring amino acid
  misc_feature (98)..(100): Xaa can be any naturally occurring amino acid
  misc_feature (104)..(104): Xaa can be any naturally occurring amino acid
  misc_feature (106)..(106): Xaa can be any naturally occurring amino acid
  misc_feature (114)..(114): Xaa can be any naturally occurring amino acid
  misc_feature (116)..(117): Xaa can be any naturally occurring amino acid
  misc_feature (124)..(124): Xaa can be any naturally occurring amino acid
  misc_feature (126)..(126): Xaa can be any naturally occurring amino acid
  misc_feature (129)..(129): Xaa can be any naturally occurring amino acid
  misc_feature (132)..(134): Xaa can be any naturally occurring amino acid
  misc_feature (136)..(138): Xaa can be any naturally occurring amino acid
  misc_feature (140)..(140): Xaa can be any naturally occurring amino acid
  misc_feature (142)..(154): Xaa can be any naturally occurring amino acid
  misc_feature (156)..(159): Xaa can be any naturally occurring amino acid
  misc_feature (168)..(169): Xaa can be any naturally occurring amino acid
  misc_feature (180)..(180): Xaa can be any naturally occurring amino acid
  misc_feature (182)..(184): Xaa can be any naturally occurring amino acid
  misc_feature (188)..(188): Xaa can be any naturally occurring amino acid
  misc_feature (190)..(193): Xaa can be any naturally occurring amino acid
  misc_feature (195)..(195): Xaa can be any naturally occurring amino acid
  misc_feature (197)..(201): Xaa can be any naturally occurring amino acid
  misc_feature (203)..(203): Xaa can be any naturally occurring amino acid
  misc_feature (206)..(206): Xaa can be any naturally occurring amino acid
  misc_feature (208)..(214): Xaa can be any naturally occurring amino acid
  misc_feature (216)..(219): Xaa can be any naturally occurring amino acid
  misc_feature (221)..(223): Xaa can be any naturally occurring amino acid
  misc_feature (225)..(247): Xaa can be any naturally occurring amino acid
  misc_feature (249)..(252): Xaa can be any naturally occurring amino acid
  misc_feature (254)..(266): Xaa can be any naturally occurring amino acid
  misc_feature (268)..(273): Xaa can be any naturally occurring amino acid
  misc_feature (275)..(275): Xaa can be any naturally occurring amino acid
  misc_feature (277)..(285): Xaa can be any naturally occurring amino acid
  misc_feature (287)..(298): Xaa can be any naturally occurring amino acid
  misc_feature (307)..(307): Xaa can be any naturally occurring amino acid
  misc_feature (310)..(312): Xaa can be any naturally occurring amino acid
  misc_feature (320)..(320): Xaa can be any naturally occurring amino acid
  misc_feature (338)..(338): Xaa can be any naturally occurring amino acid
  Coding DNA Sequence Number=SeqID_5618
  Subcellular localization annotation: CTP_CleavageSite=52; ConfidenceScore=5.03e-01
AWXRRXRTXSXXQVXXVXSXVXXXSXGPCSXXXLXCVVGLGLXAXAHVCXXRARTRSQPGXEAXRALSLPXXXXXXQTQXRPSCTPSARXPARXXARXXXVADXVXLSDIARAXEXXTVMAAPXRXLAXLVXXXRXXXRXPXXXXXXXXXXXXXGXXXXLTPHTPQRXXPHHHPPTPFPXPXXXPHPXTXXXXPXHXXXXXPXPPXPXXXXXXXPXXXXPXXXPXXXXXXXXXXXXXXXXXXXXXXXAXXXXPXXXXXXXXXXXXXPXXXXXXPXFXXXXXXXXXPXXXXXXXXXXXXPPSSAHRSXGPXXXPCHDTLTXPLPTHFTAARKSHRDYTXLPLVRRTLGNGVPLPCAR

SEQ ID NO: 8422 - protein, 66 aa, Glycine max
  Coding DNA Sequence Number=SeqID_5620
RQKGIIHIACIYSMYINWNSSTLAVVVASLYRPGKNMEYNVVARKKNWWNVIHMHVLWSGLLVLMS

SEQ ID NO: 8423 - protein, 91 aa, Glycine max
  misc_feature (2)..(2): Xaa can be any naturally occurring amino acid
  misc_feature (12)..(12): Xaa can be any naturally occurring amino acid
  misc_feature (17)..(19): Xaa can be any naturally occurring amino acid
  misc_feature (27)..(27): Xaa can be any naturally occurring amino acid
  misc_feature (39)..(39): Xaa can be any naturally occurring amino acid
  misc_feature (55)..(55): Xaa can be any naturally occurring amino acid
  misc_feature (63)..(63): Xaa can be any naturally occurring amino acid
  Coding DNA Sequence Number=SeqID_5622
HXSDAHDDAECXEMHHXXXSKHSARVXTHDHLRTIHPHXHPYFIICIAYLSLLQXSSHTPHQXAGSQLYSPHTQCIHHRHRHRNDIIYISR

SEQ ID NO: 8424 - protein, 125 aa, Glycine max; identical to SEQ ID NO: 6454
  misc_feature (8)..(8): Xaa can be any naturally occurring amino acid
  misc_feature (89)..(89): Xaa can be any naturally occurring amino acid
  Coding DNA Sequence Number=SeqID_5624

SEQ ID NO: 8425 - protein, 192 aa, Glycine max; identical to SEQ ID NO: 7809
  misc_feature (6)..(6): Xaa can be any naturally occurring amino acid
  misc_feature (10)..(10): Xaa can be any naturally occurring amino acid
  misc_feature (35)..(35): Xaa can be any naturally occurring amino acid
  misc_feature (65)..(65): Xaa can be any naturally occurring amino acid
  misc_feature (85)..(85): Xaa can be any naturally occurring amino acid
  misc_feature (120)..(120): Xaa can be any naturally occurring amino acid
  misc_feature (138)..(138): Xaa can be any naturally occurring amino acid
  misc_feature (192)..(192): Xaa can be any naturally occurring amino acid
  Coding DNA Sequence Number=SeqID_5626

SEQ ID NO: 8426 - protein, 200 aa, Glycine max
  misc_feature (33)..(33): Xaa can be any naturally occurring amino acid
  misc_feature (49)..(49): Xaa can be any naturally occurring amino acid
  misc_feature (64)..(64): Xaa can be any naturally occurring amino acid
  Coding DNA Sequence Number=SeqID_5628
  Gene Ontology: Mol. function=beta-1,4-mannosylglycoprotein 4-beta-N -acetylglucosaminyltransferase activity; Cellular component=membrane; Biological process=protein amino acid N-linked glycosylation
  Homolog annotation: Hit_ID=A7PM13; Match level="QueryCoverage=98%, HitCoverage=49%, E-value=2e-36, Identity=48%"; Hit description =Chromosome chr14 scaffold_21, whole genome shotgun sequence
  Pfam annotation: Domain name=Glyco_transf_17; Domain location=1-200; Score=-146.0; E_value=0.0002; Accession=PF04724.4; Description =Glycosyltransferase family 17
LKGELKGRDCTTYVSTGLIVPGGSYGLCLHGQXKICYLLLPLWESRSKXFREMPHYYHENCVLXSLCRLRGWRNLESTIRVLNTGLMSFDIYILTITQEDTMQHLPRTHNVLHVSISTFTGLGIPCAIGGPIGTALQALESRLTLAVSGGRFKRKENPWIDEADQRDALDHLLRIACINDDYLSIMPDDAETPSAHTILL

SEQ ID NO: 8427 - protein, 83 aa, Glycine max
  misc_feature (61)..(61): Xaa can be any naturally occurring amino acid
  misc_feature (68)..(68): Xaa can be any naturally occurring amino acid
  misc_feature (73)..(73): Xaa can be any naturally occurring amino acid
  Coding DNA Sequence Number=SeqID_5629
GRDEGRGLWSRRLLEESMITRSIIISVIVVFVYYSSYVTCALVVLVVRVLCAVSVLDRLCXTFLVRPXSDARXRHTPGQMGAH

SEQ ID NO: 8428 - protein, 143 aa, Glycine max
  misc_feature (37)..(37): Xaa can be any naturally occurring amino acid
  misc_feature (55)..(56): Xaa can be any naturally occurring amino acid
  misc_feature (79)..(79): Xaa can be any naturally occurring amino acid
  misc_feature (123)..(124): Xaa can be any naturally occurring amino acid
  misc_feature (129)..(129): Xaa can be any naturally occurring amino acid
  Coding DNA Sequence Number=SeqID_5631
VEYLLSYVPTMTTNTTGIRKRSCSVCQKIARDESRPXPDCSRIVYAQRVRPHVTXXPPRQTATILRLQYDYGASESIHXSARARDHVRDLRPRRHATSRCARDARPPSLLTEESMNATALPQXXRECTXRSHSRSARQQRRSV

SEQ ID NO: 8429 - protein, 120 aa, Glycine max
  Coding DNA Sequence Number=SeqID_5633
  Homolog annotation: Hit_ID=O64438; Match level="QueryCoverage=89%, HitCoverage=45%, E-value=2e-40, Identity=79%"; Hit description=ARG10
TNNKLDYSIVKNGRSFAVKDEIFCLLEGALNNLCILRQQYGLTKSGNEVVLVIEAYKALRDRAPYPDNHDECHLSESYAFIDPDKTTSTLFATSDQAGKVPLYRGITADGYIAFADDAYL

SEQ ID NO: 8430 - protein, 99 aa, Glycine max
  Coding DNA Sequence Number=SeqID_5634
  Gene Ontology: Mol. function=translation initiation factor activity
  Homolog annotation: Hit_ID=Q9LIN5; Match level="QueryCoverage=81%, HitCoverage=15%, E-value=1e-24, Identity=67%"; Hit description =Eukaryotic initiation factor 4B
TDAVVKSRPKVNPFGDAKPREAVLGERGMDWRKIDLELEHRSVDRPDTMEEKLLKQEIDNLKKQLEKESTIHSNKESVDEAGGDPTMSTCTITTTMKGN

SEQ ID NO: 8431 - protein, 471 aa, Glycine max
  Coding DNA Sequence Number=SeqID_5635
  Gene Ontology: Mol. function=transporter activity; Cellular component= integral to membrane; Biological process=transport
  Homolog annotation: Hit_ID=UPI00006D0081; Match level="QueryCoverage =88%, HitCoverage=86%, E-value=4e-42, Identity=25%"; Hit description =Major Facilitator Superfamily protein
  Pfam annotation: Domain name=MFS_1; Domain location=35-391; Score =66.2; E_value=1.1e-16; Accession=PF07690.6; Description=Major Facilitator Superfamily
  Pfam annotation: Domain name=Sugar_tr; Domain location=31-443; Score=- 143.9; E_value=0.0023; Accession=PF00083.14; Description=Sugar (and other) transporter
  Pfam module annotation: Pfam domain module=MFS_1::Sugar_tr; Domain location=35-391::31-443
MPTKSSTKESPQPEPIPEGNGYKLYKYRYVTGVIFALAAIQNILMWLIFSPIQLQLTHIYDLSLVVVNFATILISNVSYIPAYFVASYFIDTYGLRFGIITGGILTTIGLWIRCLCKEGFIYLFIGQCFAGIAQPFFYSVPQKISNVWFGAEERTMATSVIAISLTLGNALGAFLPQFFINLKESDTGILLDQIQNMMFWTAVIGSIFLAITILMFKAKPPTPPSKAAAAQKHNFRLSLKLLIKDKNTMLFLISSAAVAGSFITFPSVIQATADPYGINSDQIGNIMFAAILFGFLGAVIGGFYVNRTKKYKKSVLFCSTSSLALLVVVYFCATTENVFIFGAASCVFATFISPLLPLSMETLVEYSFPVAEATSGGFWFVFNQFLSTVESLGVDAIFSKEPTKSEGRIAFIIMIVYQAVAVLLMAFVKENLQRTKFEKEGLLVLDEILDPNKKNKEQSIHQHSVDRQYYP

SEQ ID NO: 8432 - protein, 213 aa, Glycine max; identical to SEQ ID NO: 7811
  misc_feature (51)..(51): Xaa can be any naturally occurring amino acid
  Coding DNA Sequence Number=SeqID_5636
  Subcellular localization annotation: CTP_CleavageSite=86; ConfidenceScore=5.33e-01

SEQ ID NO: 8433 - protein, 167 aa, Glycine max
  misc_feature (9)..(9): Xaa can be any naturally occurring amino acid
  misc_feature (11)..(11): Xaa can be any naturally occurring amino acid
  misc_feature (26)..(26): Xaa can be any naturally occurring amino acid
  misc_feature (60)..(60): Xaa can be any naturally occurring amino acid
  Coding DNA Sequence Number=SeqID_5638
ETCGCETIXNXERENGKSKRERHNTXNMECESTRQTYNMFGSAYITDIINRLSHTIHIFXLLLVYLSPFTSYALLFTIVKASFISLVQLFSSISSFISILTARHRLPTRTTHAPQHKETQRRHDSWHNQTFCNKTHTTHHYHMTTLTTPQTHTGVALRVLLSPVSCL

SEQ ID NO: 8434 - protein, 128 aa, Glycine max
  misc_feature (17)..(18): Xaa can be any naturally occurring amino acid
  misc_feature (31)..(31): Xaa can be any naturally occurring amino acid
  Coding DNA Sequence Number=SeqID_5640
  Subcellular localization annotation: CTP_CleavageSite=44; ConfidenceScore=5.62e-01
TVTATTAAQTRHETTPXXMAASAVFTLAAPXPRVTLMLSCLSSLASSRWKEMPANSTLVISRRILGGICAGAPSQRGRRVVWDEARWQSWARGLVQTEAAARRRGVAAARRIWGAAAMAVVVEVGEKS

SEQ ID NO: 8435 - protein, 45 aa, Glycine max
  Coding DNA Sequence Number=SeqID_5641
LCVMMSTTKNHIISTNRDHLFSTFSLNINHINLKSILIKINFIIL

SEQ ID NO: 8436 - protein, 167 aa, Glycine max
  misc_feature (20)..(20): Xaa can be any naturally occurring amino acid
  misc_feature (127)..(127): Xaa can be any naturally occurring amino acid
  misc_feature (161)..(161): Xaa can be any naturally occurring amino acid
  misc_feature (163)..(163): Xaa can be any naturally occurring amino acid
  Coding DNA Sequence Number=SeqID_5643
VEWRPNDAPLRSAPIAWGSXDERELENVVAYTAIRRYLRLSCAVCRDRVEQRSRSLRNTYIDTLIAYVVPTTAPTLSHFVSTRLYRTTTATDATRGMIEVTTSTPYAYAALDPRVTEHVRSTTAAHXIRTLVQRRATLTVHSVFILYHYAYASRREISILXSXDVIY

SEQ ID NO: 8437 - protein, 83 aa, Glycine max
  Coding DNA Sequence Number=SeqID_5645
  Subcellular localization annotation: CTP_CleavageSite=57; ConfidenceScore=5.45e-01
GQPTDLDQAKAKSTLDRSDDLSTPLLSRSLSLPCRNSLLFRPSHFFLWSRPSDSPSLASSQQQTPRFHTSYYPVTGKPEKVSL

SEQ ID NO: 8438 - protein, 45 aa, Glycine max
  Coding DNA Sequence Number=SeqID_5647
  Gene Ontology: Mol. function=structural constituent of ribosome; Cellular component=ribonucleoprotein complex; Biological process =translation
  Homolog annotation: Hit_ID=Q9M2F1; Match level="QueryCoverage=100%, HitCoverage=52%, E-value=7e-12, Identity=75%"; Hit description=40S ribosomal protein S27-2
MVLQNDIDLLNPPAELEKLKHKKKRLVQSPNSFFMDVKCQGCFNM

SEQ ID NO: 8439 - protein, 99 aa, Glycine max
  misc_feature (71)..(71): Xaa can be any naturally occurring amino acid
  misc_feature (98)..(98): Xaa can be any naturally occurring amino acid
  Coding DNA Sequence Number=SeqID_5648
VFISLTPRTITDIFKICTQRILISGNDARHRANDSDTLVTCCTPSTELILIAVLRDIRISGAHYPRTTHTXTISYKRWTLTLTHALSECHKRHTRGRXQ

SEQ ID NO: 8440 - protein, 419 aa, Glycine max
  misc_feature (402)..(402): Xaa can be any naturally occurring amino acid
  Coding DNA Sequence Number=SeqID_5650
  Gene Ontology: Mol. function=binding; Cellular component =intracellular; Biological process=protein folding
  Homolog annotation: Hit_ID=Q6IQ94; Match level="QueryCoverage=97%, HitCoverage=86%, E-value=3e-53, Identity=33%"; Hit description=FK506 binding protein 4
  Pfam annotation: Domain name=FKBP_C; Domain location=22-116; Score =175.1; E_value=1.8e-49; Accession=PF00254.18; Description=FKBP-type peptidyl-prolyl cis-trans i
  Pfam annotation: Domain name=TPR_1; Domain location=273-306; Score =9.7; E_value=0.36; Accession=PF00515.18; Description=Tetratricopeptid e repeat
  Pfam annotation: Domain name=TPR_1; Domain location=322-355; Score =14.0; E_value=0.11; Accession=PF00515.18; Description=Tetratricopepti de repeat
  Pfam annotation: Domain name=TPR_1; Domain location=356-389; Score =23.3; E_value=0.00092; Accession=PF00515.18; Description =Tetratricopeptide repeat
  Pfam annotation: Domain name=TPR_2; Domain location=273-306; Score =16.1; E_value=0.14; Accession=PF07719.7; Description=Tetratricopeptid e repeat
  Pfam annotation: Domain name=TPR_2; Domain location=322-355; Score =13.0; E_value=0.72; Accession=PF07719.7; Description=Tetratricopeptid e repeat
  Pfam annotation: Domain name=TPR_2; Domain location=356-389; Score =25.7; E_value=0.00017; Accession=PF07719.7; Description =Tetratricopeptide repeat
  Pfam module annotation: Pfam domain module=FKBP_C::TPR_1::TPR_1::TPR _1::TPR_2::TPR_2::TPR_2; Domain location=22-116::273-306::322 -355::356-389::273-306::322-355::356-389
MSNQIVDILGNGKVIKEILREGTGDEHPQSGLNVHVHYVGTLTNGKKFDSSRDRDEPFTFKLNAGQVIKGWDVGVSSMKRGELAKFTLQPDYAYGATGAGRDIPPNATLIFEVELLDWEDEEDISDARNESIKMKSLNRTGQSTVDVGDRVTVKIIARVLTVDDQNKPSVESEIETAELTFTIDDEEVLPAVEKSVKELGNGDKARFRIEAGDAALKVPKETTYLKHSETFLNAVKNLNNQRDRKLELEIEILNVEAYKGKSAESPKEKLEAAKSLKDEGNKLFQQGRYGIAKRKYKRATDLCDYLDSFEKDEIAASKDVQLPVYLNLAAVDLKEKDYKSAIDNSTKALAIDAKNVKGLYRRAQAHQGLGDLEQAKTDLAAALVAEPSNAAVQTLLNKIKQXIVNAKTKEKQLYGRMFK

SEQ ID NO: 8441 - protein, 163 aa, Glycine max
  misc_feature (10)..(10): Xaa can be any naturally occurring amino acid
  misc_feature (66)..(67): Xaa can be any naturally occurring amino acid
  misc_feature (94)..(94): Xaa can be any naturally occurring amino acid
  misc_feature (106)..(106): Xaa can be any naturally occurring amino acid
  misc_feature (108)..(108): Xaa can be any naturally occurring amino acid
  misc_feature (114)..(114): Xaa can be any naturally occurring amino acid
  misc_feature (121)..(121): Xaa can be any naturally occurring amino acid
  misc_feature (133)..(133): Xaa can be any naturally occurring amino acid
  misc_feature (153)..(153): Xaa can be any naturally occurring amino acid
  Coding DNA Sequence Number=SeqID_5651
  Subcellular localization annotation: CTP_CleavageSite=29; ConfidenceScore=5.03e-01
SQFSIELSSXVACCVDSRVCHLLLSVRSRSHARSNDIPPCARGALPSVVRDFVVLSPRVPIARTLXXSRLHPCILLDLLAAIHSHSGLRVIYDXTGADSHPYLFPXMXCLGACXSFIIFLXVLFSVSFVLILXIVRLAVRSSHLCSHTHLLFXTHHTPHQQHP

SEQ ID NO: 8442 - protein, 97 aa, Glycine max; identical to SEQ ID NO: 6627
  misc_feature (1)..(1): Xaa can be any naturally occurring amino acid
  misc_feature (5)..(5): Xaa can be any naturally occurring amino acid
  misc_feature (7)..(7): Xaa can be any naturally occurring amino acid
  misc_feature (12)..(12): Xaa can be any naturally occurring amino acid
  misc_feature (19)..(23): Xaa can be any naturally occurring amino acid
  misc_feature (61)..(61): Xaa can be any naturally occurring amino acid
  misc_feature (64)..(64): Xaa can be any naturally occurring amino acid
  misc_feature (84)..(89): Xaa can be any naturally occurring amino acid
  Coding DNA Sequence Number=SeqID_5653

SEQ ID NO: 8443 - protein, 155 aa, Glycine max
  misc_feature (1)..(1): Xaa can be any naturally occurring amino acid
  misc_feature (3)..(3): Xaa can be any naturally occurring amino acid
  misc_feature (18)..(18): Xaa can be any naturally occurring amino acid
  misc_feature (22)..(22): Xaa can be any naturally occurring amino acid
  misc_feature (29)..(29): Xaa can be any naturally occurring amino acid
  misc_feature (40)..(40): Xaa can be any naturally occurring amino acid
  misc_feature (42)..(42): Xaa can be any naturally occurring amino acid
  misc_feature (70)..(70): Xaa can be any naturally occurring amino acid
  misc_feature (74)..(75): Xaa can be any naturally occurring amino acid
  misc_feature (77)..(77): Xaa can be any naturally occurring amino acid
  misc_feature (89)..(89): Xaa can be any naturally occurring amino acid
  misc_feature (93)..(94): Xaa can be any naturally occurring amino acid
  misc_feature (102)..(102): Xaa can be any naturally occurring amino acid
  misc_feature (120)..(120): Xaa can be any naturally occurring amino acid
  misc_feature (147)..(147): Xaa can be any naturally occurring amino acid
  Coding DNA Sequence Number=SeqID_5655
XEXPHTASHTRHSRGGDXDETXSNRVKHXSHEIKDQTRRXSXHDAHDLYIMCPHPLASLLCTHHLALIHXTQFXXLXIDTDVQITIHTXQNIXXIDSTSTRXLHYHTRCIHVSNISMHSXTSHSTRIVCTSYHTITCHVCCGVHEPXHTHSQTTE

SEQ ID NO: 8444 - protein, 297 aa, Glycine max
  misc_feature (56)..(56): Xaa can be any naturally occurring amino acid
  Coding DNA Sequence Number=SeqID_5657
  Gene Ontology: Mol. function=binding
  Homolog annotation: Hit_ID=Q4E2J4; Match level="QueryCoverage=99%, HitCoverage=99%, E-value=2e-92, Identity=55%"; Hit description =Putative uncharacterized protein
MATYELKPVLAGTKKDPSKTQFVARKINDSPFGSFPESWTLPKREEAKAKATAARXSPPAAASAQQQTFVQFPKAHSGTGGATSSLNQGRRPDPPKAPVAGATGRRLIPPTEFRRFYDRGDLPIAVAHKSKMSIDWKVQLEQLDYHHYLPIFFDGLREKDEPYRFLALQGCYDLLAKGGAKILPTVPQLIIPLKTALNSRDPEIVCAVLKILQQLVAAGELIGEALVPYYRQLLPVLNLFKGKTKHMGDAIDYSQRTRMNMGDLIEETLQLLEVHGGPDAFINIKYMIPTYESCVLN

SEQ ID NO: 8445 - protein, 218 aa, Glycine max
  Coding DNA Sequence Number=SeqID_5658
  Gene Ontology: Mol. function=protein binding; Cellular component =nuclear speck; Biological process=mRNA processing
  Homolog annotation: Hit_ID=A0DKG3; Match level="QueryCoverage=75%, HitCoverage=72%, E-value=1e-38, Identity=50%"; Hit description =Chromosome undetermined scaffold_54, whole genome shotgun sequence
  Pfam annotation: Domain name=cwf21; Domain location=54-98; Score =27.7; E_value=4.4e-05; Accession=PF08312.2; Description=cwf21
MYNGIGLTTARGSGTSGYVQKNLSFVKPYAQQNPRDSFLKDLQALKDNVLAPPKKANKDILLHQQKRDIQLQLIKMREKLEAEGKSKEEINDRVKKAEEILNKKLESGELQLASARDYHKKALEKEKEYERVRRAFDMSEDYKPGSAFDFESQEKKRLEQMFEREKKKYEQKKEELKAQKKALKDGIVLEKEKPAEPAEKKTNEEARRERKEERAAAE

SEQ ID NO: 8446 - protein, 176 aa, Glycine max
  misc_feature (50)..(50): Xaa can be any naturally occurring amino acid
  misc_feature (73)..(73): Xaa can be any naturally occurring amino acid
  misc_feature (75)..(75): Xaa can be any naturally occurring amino acid
  misc_feature (85)..(85): Xaa can be any naturally occurring amino acid
  misc_feature (104)..(104): Xaa can be any naturally occurring amino acid
  misc_feature (109)..(109): Xaa can be any naturally occurring amino acid
  misc_feature (114)..(114): Xaa can be any naturally occurring amino acid
  misc_feature (122)..(122): Xaa can be any naturally occurring amino acid
  misc_feature (127)..(127): Xaa can be any naturally occurring amino acid
  misc_feature (133)..(135): Xaa can be any naturally occurring amino acid
  misc_feature (139)..(140): Xaa can be any naturally occurring amino acid
  misc_feature (143)..(144): Xaa can be any naturally occurring amino acid
  misc_feature (146)..(146): Xaa can be any naturally occurring amino acid
  misc_feature (151)..(151): Xaa can be any naturally occurring amino acid
  misc_feature (159)..(160): Xaa can be any naturally occurring amino acid
  Coding DNA Sequence Number=SeqID_5659
  Homolog annotation: Hit_ID=P03730; Match level="QueryCoverage=90%, HitCoverage=71%, E-value=4e-62, Identity=79%"; Hit description=Tail assembly protein I
  Pfam annotation: Domain name=Lambda_tail_I; Domain location=16-175; Score=134.6; E_value=2.7e-37; Accession=PF06805.2; Description =Bacteriophage lambda tail assembly prot
NWYRAPPSPGMVRICLYGDLQRFGRRIDLRVKTGAEAIRALATQLPAFRXKLSDGWFQVLIAGRDVSTNGLTXAXLHETLSDGAXIHIVPRVDGANSRGVFHIXLGAGXIAGSXFTGGATLXPWGAXIGAGGXXXILFXXGAXXAXGGVAXMLAPKARXXRIQTTDNACGSLLRPR

SEQ ID NO: 8447 - protein, 400 aa, Glycine max
  misc_feature (325)..(329): Xaa can be any naturally occurring amino acid
  Coding DNA Sequence Number=SeqID_5660
  Gene Ontology: Mol. function=nucleotide binding; Cellular component =chloroplast; Biological process=intracellular protein transport across a membrane
  Homolog annotation: Hit_ID=Q41062; Match level="QueryCoverage=100%, HitCoverage=38%, E-value=1e-166, Identity=76%"; Hit description =Protein translocase subunit secA, chloroplast precursor
  Pfam annotation: Domain name=DEAD; Domain location=146-302; Score= -29.6; E_value=0.0068; Accession=PF00270.19; Description=DEADDEAH box helicase
  Pfam annotation: Domain name=SecA_DEAD; Domain location=65-311; Score= 504.8; E_value=1.1e-148; Accession=PF07517.4; Description=SecA DEAD -like domain
  Pfam annotation: Domain name=SecA_PP_bind; Domain location=290-400; Score=86.5; E_value=8.6e-23; Accession=PF01043.10; Description=SecA preprotein cross-linking domain
  Pfam module annotation: Pfam domain module=DEAD::SecA_DEAD::SecA_PP _bind; Domain location=146-302::65-311::290-400
  Subcellular localization annotation: CTP_CleavageSite=55; ConfidenceScore=5.54e-01
MAASSLCSSFTSKTWNPHARYHHKTLAPPYSAFLRGDLQLHPPSVSGTRRRRRRRSGSVASLGGLLGGIFKGADTGEATKQQYAATVNIINGLEPEISALSDSELRDRTFALRERAQHGQSLDSLLPEAFAVVREASKRVLGLRPFDVQLIGGMVLHKGEIAEMRTGEGKTLVAVLPAYLNALSGKGVHVVTVNDYLARRDCEWVGQVPRFLGLKVGLIQQNMTSQQRKENYSCDITYVTNSELGFDYLRDNLATSVEDLVIRGFNYCIIDEVDSILIDEARTPLIISGPAEKPSDRYYKAAKIAEAFERDIHYTVDEKQKSVTXXXXXLSEQGYEDAENFKLFQSLYEPWQQWSLYIQNAIKPADLSLRDLNSTLIRGKEVLIVDEFTGRVMQGRRWSD

SEQ ID NO: 8448 - protein, 90 aa, Glycine max
  misc_feature (40)..(40): Xaa can be any naturally occurring amino acid
  misc_feature (42)..(42): Xaa can be any naturally occurring amino acid
  Coding DNA Sequence Number=SeqID_5661
KDSLHELLTEGIGRCALSNFYHGECIYIFGMSNMKHRESXHXVHTSTETIGHLIPMQMVRHSHHIHCVYMVARHNGTCVSIKRQYHMRII

SEQ ID NO: 8449 - protein, 124 aa, Glycine max; identical to SEQ ID NO: 7821
  misc_feature (9)..(9): Xaa can be any naturally occurring amino acid
  misc_feature (15)..(15): Xaa can be any naturally occurring amino acid
  misc_feature (46)..(47): Xaa can be any naturally occurring amino acid
  misc_feature (81)..(81): Xaa can be any naturally occurring amino acid
  misc_feature (123)..(123): Xaa can be any naturally occurring amino acid
  Coding DNA Sequence Number=SeqID_5663

SEQ ID NO: 8450 - protein, 121 aa, Glycine max
  misc_feature (24)..(24): Xaa can be any naturally occurring amino acid
  misc_feature (30)..(30): Xaa can be any naturally occurring amino acid
  misc_feature (44)..(44): Xaa can be any naturally occurring amino acid
  misc_feature (90)..(90): Xaa can be any naturally occurring amino acid
  misc_feature (92)..(92): Xaa can be any naturally occurring amino acid
  Coding DNA Sequence Number=SeqID_5665
  Subcellular localization annotation: CTP_CleavageSite=29; ConfidenceScore=5.24e-01
TSTQQQPPPFSHFSHKVVVRKSSXRFYVQXEAAASVLGVVLGIXLARLLSNEMEQVYPDTPLHHSRAACVVTSVCVYCSAPSPPSLADIXNXIYIHSISQIHTSHSTVDGRSWCHFFNMYI

SEQ ID NO: 8451 - protein, 90 aa, Glycine max
  Coding DNA Sequence Number=SeqID_5667
  Gene Ontology: Mol. function=protein serine/threonine kinase activity; Cellular component=chloroplast; Biological process=protein amino acid phosphorylation
  Homolog annotation: Hit_ID=A7QFQ4; Match level="QueryCoverage=83%, HitCoverage=14%, E-value=1e-27, Identity=80%"; Hit description =Chromosome chr8 scaffold_88, whole genome shotgun sequence
RDVKPANLVVTKRGQIKLIDFGAATDLRIGKNYVPNRTLLDPDYCPPELYVLPEETPSPPPEPIAAFLSPVLWQVLLLIFYLCTQNMVLL

SEQ ID NO: 8452 - protein, 112 aa, Glycine max
  misc_feature (85)..(86): Xaa can be any naturally occurring amino acid
  Coding DNA Sequence Number=SeqID_5668
  Gene Ontology: Mol. function=peptidase activity; Cellular component =membrane
  Homolog annotation: Hit_ID=Q9CAR7; Match level="QueryCoverage=100%, HitCoverage=38%, E-value=1e-54, Identity=94%"; Hit description =Putative uncharacterized protein T17F3.13
MGQVLGCVQVDQSTVAIKETFGKFDDVLEPGCHCLPWCLGSQVAGHLSLRVQQLDVRCETKTKDNVFVTVVASIQYRALAESAQXXAFYKLSNTRNQIQAYVFDVIRASVPK

SEQ ID NO: 8453 - protein, 41 aa, Glycine max; identical to SEQ ID NO: 6717
  Coding DNA Sequence Number=SeqID_5669

SEQ ID NO: 8454 - protein, 132 aa, Glycine max
  Coding DNA Sequence Number=SeqID_5671
  Gene Ontology: Mol. function=protein disulfide oxidoreductase activity; Cellular component=extracellular region; Biological process=cell redox homeostasis
  Homolog annotation: Hit_ID=Q8LFQ6; Match level="QueryCoverage=100%, HitCoverage=100%, E-value=3e-48, Identity=75%"; Hit description =Glutaredoxin-C4 precursor
  Pfam annotation: Domain name=Glutaredoxin; Domain location=41-103; Score=100.9; E_value=4e-27; Accession=PF00462.14; Description =Glutaredoxin
  Subcellular localization annotation: CTP_CleavageSite=54; ConfidenceScore=5.15e-01
MTMIRSISMLTLLVTLAASISMVSSASSADFVKKTISSHKIVIFSKSYCPYCRRAKSVFSELNQVPHVVELDEREDGGSIQSALGEIVGRRTVPQVFINGKHIGGSDDTVDAHESGELAKLLGVSESTRAEL

SEQ ID NO: 8455 - protein, 183 aa, Glycine max
  Coding DNA Sequence Number=SeqID_5672
  Gene Ontology: Mol. function=selenium binding; Biological process =cell redox homeostasis
  Homolog annotation: Hit_ID=Q9ZQ24; Match level="QueryCoverage=100%, HitCoverage=100%, E-value=5e-39, Identity=51%"; Hit description =Expressed protein
  Subcellular localization annotation: CTP_CleavageSite=25; ConfidenceScore=5.48e-01
MAPKKSDGEGKAKPTTVTTPVRQTRSMDRKTRSQTRHDSPGGGSSSSKLFTFESPEKKKRKPKAKDAGPATKKIKQEKEDDDDVAAAKEEGDDGAEHKRIVIEHCKQCKSFKERANELKDGLEIAVPGIIVTVNADKPRRGCFEIREEGGQTFVSLLDMKRPFKEMKDLDMEQVIADIVEKLK

SEQ ID NO: 8456 - protein, 208 aa, Glycine max
  misc_feature (14)..(14): Xaa can be any naturally occurring amino acid
  misc_feature (60)..(60): Xaa can be any naturally occurring amino acid
  misc_feature (69)..(69): Xaa can be any naturally occurring amino acid
  Coding DNA Sequence Number=SeqID_5673
LVLLLIMICVYIIXLRALLWECATGTIALRAPPRLNILCTCDLFTPTRSPARSARAAVAXTVVAIISHXQVAIAHDRHKCTRDAPQYYLYLTSDSTDARQVRDTVCGAGAVCDGATTRERVEAVLARYMLARLLSYLSRRTSTYIRHSITDVRYDETHSNTSTLVTPALRSTLRTCDSRRTLSRLRQRRTRSDIRLREISDVMTNVRV

SEQ ID NO: 8457 - protein, 94 aa, Glycine max
  misc_feature (65)..(65): Xaa can be any naturally occurring amino acid
  Coding DNA Sequence Number=SeqID_5675
LVVSYHLLRGRGGAFDYGGEVALLDSVACVHPRSTRWRWCCFTPRTVTVRYLQYIYTDSLFHKFXLSDAERVRNIVPRLLNGLFAEFIRRDITF

SEQ ID NO: 8458 - protein, 130 aa, Glycine max; identical to SEQ ID NO: 7474
  misc_feature (24)..(24): Xaa can be any naturally occurring amino acid
  Coding DNA Sequence Number=SeqID_5677

SEQ ID NO: 8459 - protein, 193 aa, Glycine max
  misc_feature (77)..(77): Xaa can be any naturally occurring amino acid
  misc_feature (112)..(112): Xaa can be any naturally occurring amino acid
  misc_feature (116)..(116): Xaa can be any naturally occurring amino acid
  misc_feature (121)..(121): Xaa can be any naturally occurring amino acid
  misc_feature (149)..(149): Xaa can be any naturally occurring amino acid
  misc_feature (173)..(173): Xaa can be any naturally occurring amino acid
  Coding DNA Sequence Number=SeqID_5679
  Gene Ontology: Mol. function=nucleotide binding; Cellular component =myosin complex; Biological process=signal transduction
  Homolog annotation: Hit_ID=Q39158; Match level="QueryCoverage=96%, HitCoverage=12%, E-value=1e-50, Identity=59%"; Hit description=Myosin
LDLIEKKPGGIIALLDEACMFPRSTHETFAQKLYQTFKNHKRFSKPKLARSDFTICHYAGDVTYQTGLVPDKNQDYXVVAEHQELPYAFQWPLWGWVCSPPSPEESSKNSKXSSIXGPRFXQPLGALLENFRAPWPHYILLWKPHNLLXPPIFVIKKVFHHLPSGGVLGAIRXTVAGIPLRRHFFEIFEPILD

SEQ ID NO: 8460 - protein, 65 aa, Glycine max
  Coding DNA Sequence Number=SeqID_5680
CDFMLILYFIMPVLSMAHNQYSAIQTLHCGLWRCRSEPSFINCLWQLAKDPPDHSPMAPPVNNNA

SEQ ID NO: 8461 - protein, 62 aa, Glycine max
  Coding DNA Sequence Number=SeqID_5682
GRGFPFFFEKKPRGSGIFYPGGFTSFGGFPKGPWLCANFVLFWERGPGIFPVVYHDGFTFEY

SEQ ID NO: 8462 - protein, 115 aa, Glycine max
  misc_feature (5)..(5): Xaa can be any naturally occurring amino acid
  misc_feature (7)..(11): Xaa can be any naturally occurring amino acid
  misc_feature (13)..(13): Xaa can be any naturally occurring amino acid
  misc_feature (18)..(20): Xaa can be any naturally occurring amino acid
  misc_feature (23)..(25): Xaa can be any naturally occurring amino acid
  misc_feature (27)..(27): Xaa can be any naturally occurring amino acid
  misc_feature (31)..(31): Xaa can be any naturally occurring amino acid
  misc_feature (35)..(35): Xaa can be any naturally occurring amino acid
  misc_feature (40)..(40): Xaa can be any naturally occurring amino acid
  misc_feature (50)..(50): Xaa can be any naturally occurring amino acid
  misc_feature (60)..(60): Xaa can be any naturally occurring amino acid
  misc_feature (62)..(62): Xaa can be any naturally occurring amino acid
  misc_feature (66)..(68): Xaa can be any naturally occurring amino acid
  misc_feature (76)..(76): Xaa can be any naturally occurring amino acid
  misc_feature (78)..(78): Xaa can be any naturally occurring amino acid
  Coding DNA Sequence Number=SeqID_5684
IYKYXEXXXXXSXYTVLXXXGGXXXHXPFPXAARXRCECXPPPPLPLVRXPPHRLIPDEXLXIYQXXXNTNVRRAXIXIDDVMRGRSSNGVYSYIHMRYVHTHVVTLMYMISWYV

SEQ ID NO: 8463 - protein, 77 aa, Glycine max; identical to SEQ ID NO: 6897
  Coding DNA Sequence Number=SeqID_5686

SEQ ID NO: 8464 - protein, 501 aa, Glycine max
  Coding DNA Sequence Number=SeqID_5688
  Gene Ontology: Mol. function=leucyl aminopeptidase activity; Cellular component=intracellular; Biological process=protein metabolic process
  Homolog annotation: Hit_ID=Q22U45; Match level="QueryCoverage=81%, HitCoverage=76%, E-value=1e-105, Identity=47%"; Hit description =Cytosol aminopeptidase family, catalytic domain containing protein
  Pfam annotation: Domain name=Peptidase_M17; Domain location=181-493; Score=405.4; E_value=8.4e-119; Accession=PF00883.11; Description =Cytosol aminopeptidase family, catalytic domain
MNLSKIASLTKIPRIISRPNLTEKAHTLVAILNENELTQPPSFLEAIRDNEPILEDLRKKKTVSLYGRTNEPFNYCHIAFEALRNTQRSLSVGATIARNLMRTKTTDASLYFSNSINPEQIAQFLNGLCLSNYKFERKALTKSEQENGKFRQIENINVFHDTFNPEDPAAKFIIESAKYSLFCREVLNTRANVADPESMLELCKELAAIDSNIKIEYIVGKELEEKGLNLIYGVGQGSCKASSLVCLKYEGNPQKPEDVLAFVGKGVTYDTGGLNLKPTGNIENMFYDKGGACTVLAAFKGAVEMKLPINLVCTVALVENSMSDKALHPKDILRSYKGLTVEIGNTDAEGRLILADAMTYTQRHYKPNTLLEFSTLTGAIKVALGNETAGIFSNDDNLVSELTEAGNESCESMWRLPITDEHREDMRSTIADLNNKGRSVSGGASKAAAFLENFVERGVKWAHIDIAGTSFREGEKFVYSSGATGHGVKLLLNYLKKKTQQ

SEQ ID NO: 8465 - protein, 198 aa, Glycine max
  misc_feature (187)..(187): Xaa can be any naturally occurring amino acid
  misc_feature (190)..(190): Xaa can be any naturally occurring amino acid
  misc_feature (198)..(198): Xaa can be any naturally occurring amino acid
  Coding DNA Sequence Number=SeqID_5689
  Subcellular localization annotation: CTP_CleavageSite=60; ConfidenceScore=5.65e-01
LKQMNKSSISNTLKIGDNTPSAYSASKNYSQTFSPNRNNMSSPQRGTTSMIHSELDRLRRANAELSQEFQKNGKDKTTLYEERISIIQAENRNLENLLNAYAKDRELLKQKDAKIADLENRLVLVATENERQASVIAKLEEENEELRARCSELGQVQFLLNESQSKINRLNSEVERLSAAADANSRXAQXWKHKHAEX

SEQ ID NO: 8466 - protein, 97 aa, Glycine max
  Coding DNA Sequence Number=SeqID_5691
  Gene Ontology: Cellular component=extracellular region
  Homolog annotation: Hit_ID=P46688; Match level="QueryCoverage=100%, HitCoverage=100%, E-value=2e-29, Identity=57%"; Hit description =Gibberellin-regulated protein 2 precursor
  Pfam annotation: Domain name=GASA; Domain location=3-97; Score=152.0; E_value=1.6e-42; Accession=PF02704.5; Description=Gibberellin regulated protein
MAITRSTVVLAILCFILIRAELGIYGEDLHMDAAKNIDCGGKCNYRCSKTSRHKMCIRACNSCCKTCSCVPPGTSGNRDMCPCYASLTTHGGKLKCP

SEQ ID NO: 8467 - protein, 240 aa, Glycine max
  misc_feature (46)..(46): Xaa can be any naturally occurring amino acid
  misc_feature (68)..(68): Xaa can be any naturally occurring amino acid
  Coding DNA Sequence Number=SeqID_5692
  Homolog annotation: Hit_ID=A7PMI5; Match level="QueryCoverage=97%, HitCoverage=63%, E-value=8e-82, Identity=64%"; Hit description =Chromosome chr14 scaffold_21, whole genome shotgun sequence
  Pfam annotation: Domain name=DUF1336; Domain location=1-226; Score =279.3; E_value=7.6e-81; Accession=PF07059.3; Description=Protein of unknown function (DUF1336)
LKANKKEFGQIHPDYSPCAVHGFLWLQKIEHDKTLCLNSCDEIFRXFPPVLVVNVHIPIVPVTLSQGXTNGEGVSFVLYFKLSDSYSKDLPLNFQENIRRLMDDEVEKVKSFRGDTIVPFRERLKILGRVVNPQDLHLSAAERKLMQTYNEKPLLSRPQHEFYSGENYYEIDLDMHRFSYISRKGFDMFLDRLKICILDVGLTIQGNKAEELPEQVLCCIRLNSIDYMNYQQLGITEEPL

SEQ ID NO: 8468 - protein, 206 aa, Glycine max
  Coding DNA Sequence Number=SeqID_1594
  Gene Ontology: Mol. function=molecular_function; Cellular component =integral to membrane; Biological process=retrograde vesicle-mediated transport, Golgi to ER
  Homolog annotation: Hit_ID=A9PBA9; Match level="QueryCoverage=81%, HitCoverage=86%, E-value=3e-58, Identity=63%"; Hit description =Putative uncharacterized protein
  Pfam annotation: Domain name=Rer1; Domain location=2-184; Score =423.7; E_value=2.6e-124; Accession=PF03248.4; Description=Rer1 family
MEASGGGGGGASPSAPVKQYLHDFSKLFQYYLDKSTPHSTYRWIGTFVIASIYVLRVVYVQGFYIVSYGLGIYLLNLLIGFLSPLVDPELDPSDSPLLPTKGSDEFKPFIRRLPEFKFWYSFTKALCIAFVMTFFSLFDVPVFWPILLCYWVVLFVLTMRRQVAHMMKYKYIPFNLGKQKYSARLCQNLPKAPSPETLSGMIFRVR

SEQ ID NO: 8469 - protein, 51 aa, Glycine max
  misc_feature (44)..(44): Xaa can be any naturally occurring amino acid
  misc_feature (46)..(46): Xaa can be any naturally occurring amino acid
  Coding DNA Sequence Number=SeqID_1595
KHYFLRVFLIIASQGSLSPFCISQSIKFIGTQHLLGQSGRQTEXYXHLHQI

SEQ ID NO: 8470 - protein, 119 aa, Glycine max
  misc_feature (53)..(53): Xaa can be any naturally occurring amino acid
  misc_feature (118)..(118): Xaa can be any naturally occurring amino acid
  Coding DNA Sequence Number=SeqID_1597
LNTMNEDCPARAHIARLFCVVPHHPLYCLHHCNDCRRFIRMTIACVYYVSSLXFFIFARPATLTLSSTLSAITLSLACYSQDCDGSYELYTTSATIVHTHSRLIFDTYLSALYSSLHXS

SEQ ID NO: 8471 - protein, 123 aa, Glycine max
  Coding DNA Sequence Number=SeqID_1599
  Subcellular localization annotation: CTP_CleavageSite=57; ConfidenceScore=5.33e-01
NTKKKKKKKKKKKKKKKKKKKKKKKKKKKKKFPAPRGIHNFKRGPPRGEPPVFVPLRGGKFQVGGNQGIFCSRGKIVIRSKFQKKNNPKEKRENPGGPKEGANSNKLGGAHGPFSSRKTCRAS

SEQ ID NO: 8472 - protein, 126 aa, Glycine max
  misc_feature (80)..(80): Xaa can be any naturally occurring amino acid
  Coding DNA Sequence Number=SeqID_1600
SVICVTNDGAWLVLRCEATITVERDATSLLFGLGHCGQIMFVRYANSTARGGYRYLLVRQGCESYCSDEICGGGIMTQHXSISSVGRQARLHLDAKLITCRHEYFWHMLGGVWGLDYRPHKVGGAT

SEQ ID NO: 8473 - protein, 268 aa, Glycine max
  misc_feature (223)..(223): Xaa can be any naturally occurring amino acid
  Coding DNA Sequence Number=SeqID_1602
KISDFLSTSYPLPSSIFSSYSLMNMDNPIQQTSEPTATNPPKNDDHIPVEAFEFRFPSRTEKRNIILKRVLIGFIAVFATVAFISAIISKNAYLNELEAKINDNLQTSNVKFLDNTQAPPVVFTAEAIEESLWKDSPYLTVLKNLAAQRYRYVILKETEEKGKGKIATGYYDTTNVTDFIGQFHEGQQRVGYITVGPEGYELIYLIIYNPENIKVQEILDNVXAPGDEKALAEFDIKNFKKIVVKKIDDIEKKIVIPEAPPVVTKESE

SEQ ID NO: 8474 - protein, 160 aa, Glycine max
  misc_feature (65)..(65): Xaa can be any naturally occurring amino acid
  Coding DNA Sequence Number=SeqID_1604
IVSRQLYFIIQRVNNIRRLYHLEGMRGYRVCKMLPLSDAVYVTCTCYTRAPAARVLLSPLARADXHAPPAVHSSLPPPHHAPSSLLTNKSHVHYTTSNSSISAPGIGRPALRLAACVPSASHDPRREADSPRCRTYTPLTTHANYKSVLIDFFIFLSSCY

SEQ ID NO: 8475 - protein, 470 aa, Glycine max
  Coding DNA Sequence Number=SeqID_1606
  Gene Ontology: Mol. function=transporter activity; Cellular component= cell outer membrane; Biological process=transport
  Homolog annotation: Hit_ID=A6LC58; Match level="QueryCoverage=99%, HitCoverage=44%, E-value=2e-94, Identity=39%"; Hit description =Putative outer membrane protein, probably involved in nutrient binding
  Pfam annotation: Domain name=TonB_dep_Rec; Domain location=107-377; Score=14.5; E_value=0.0047; Accession=PF00593.14; Description=TonB dependent receptor
WFNTLNYNKAFGDHLLNVLVGTEAVKTYAATTVASRSGFAFDDLDYRYLDAGSASGLSNSGAGATRSALFSQFGKVNYSYKNTYLADFTLRRDGSSRFSESNRYGIFPAFSLGVRLTEFPFMQKLRFVNDLKVRGGWGRTGNQLIPNVYNAYTLYASDPNNNAYDINGTGSSIVGGFSLVQFGNRNGKWETTTSTNVGFDASLLNNQMDVVFDWYTRTTSDMLAQIAMPRTMGTATIPYTNIGEMRNTGFDLGINYKNKIGNFRYQVGASISHYKNEVIKLNDDPNATLFGFSTRLPPISATKRGLPIAGFYGYIVDGVIKDDAEAATAPKFGTYTRAGTFKFRDVNGDGVITAADRTILGNPHPDFTYGLNLNVGYKNWDLTVFGQGSQGNKIFNYVRYWTDFNTFQGNRSKDILYNSWKKQGDIAKLPRLNSGDATSQQVSSYFIEDGSYMRIKNIQLTYTIPSSWLK

SEQ ID NO: 8476 - protein, 110 aa, Glycine max
  misc_feature (35)..(35): Xaa can be any naturally occurring amino acid
  misc_feature (45)..(47): Xaa can be any naturally occurring amino acid
  misc_feature (49)..(110): Xaa can be any naturally occurring amino acid
  Coding DNA Sequence Number=SeqID_5693
MRSTLLKANFWGGIRPLTLFFLRIPLRAFMIFTRXFLPLLMLQLXXXCXXXXXXXXXXXXXXXXXXXXXXXXXXXXXXXXXXXXXXXXXXXXXXXXXXXXXXXXXXXXXX

SEQ ID NO: 8477 - protein, 102 aa, Glycine max
  misc_feature (30)..(30): Xaa can be any naturally occurring amino acid
  misc_feature (68)..(68): Xaa can be any naturally occurring amino acid
  misc_feature (71)..(71): Xaa can be any naturally occurring amino acid
  Coding DNA Sequence Number=SeqID_5695
  Gene Ontology: Mol. function=ER retention sequence binding; Cellular component=endoplasmic reticulum membrane; Biological process=vesicle- mediated transport
  Homolog annotation: Hit_ID=A7Q746; Match level="QueryCoverage=100%, HitCoverage=47%, E-value=3e-15, Identity=45%"; Hit description=ER lumen protein retaining receptor
  Pfam annotation: Domain name=ER_lumen_recept; Domain location=2-92; Score=-149.1; E_value=0.1; Accession=PF00810.9; Description=ER lumen protein retaining receptor
KISFKGVLGPFPPVVESCAYFPSKSFFKEXKIFAIWRAQYVFLRGAPRGIYILNGIYRYLIDPLFAHXITXISAVVQTQLNAVFFYHYSQSGKTTKKLHWPA

SEQ ID NO: 8478 - protein, 179 aa, Glycine max
  misc_feature (22)..(22): Xaa can be any naturally occurring amino acid
  misc_feature (32)..(32): Xaa can be any naturally occurring amino acid
  Coding DNA Sequence Number=SeqID_5696
EEEKKPLKNDKSSPIWLPRHHXNQHNQSRESXNSDHNPSKPLSVDDEEADTDLETDRLLGQQRLDDHGFYDDKSTNWCDRPSRLIKSPSASLSSKTMQQQQHHAQTFSSASIRQGIGTSTASGVSAACANNSSNSSSSPPNQQQSSNQHLPKNPSASNQNENKDSLTSPTKSHLKKKKK

SEQ ID NO: 8479 - protein, 104 aa, Glycine max
  misc_feature (22)..(22): Xaa can be any naturally occurring amino acid
  misc_feature (52)..(52): Xaa can be any naturally occurring amino acid
  misc_feature (73)..(73): Xaa can be any naturally occurring amino acid
  misc_feature (76)..(76): Xaa can be any naturally occurring amino acid
  misc_feature (91)..(91): Xaa can be any naturally occurring amino acid
  misc_feature (96)..(96): Xaa can be any naturally occurring amino acid
  Coding DNA Sequence Number=SeqID_5698
IASWSKQKEKAADQSRKTSCQXTRSLVVDRVADGTIIDLSNAAVDRVVLAKXSVIAISVHGVRVGGSLRSSVXGAXGTVSRVAGVLLGSVXVGAVXLVVPVAGG

SEQ ID NO: 8480 - protein, 121 aa, Glycine max
  misc_feature (109)..(109): Xaa can be any naturally occurring amino acid
  misc_feature (111)..(111): Xaa can be any naturally occurring amino acid
  misc_feature (114)..(115): Xaa can be any naturally occurring amino acid
  misc_feature (117)..(117): Xaa can be any naturally occurring amino acid
  misc_feature (119)..(119): Xaa can be any naturally occurring amino acid
  Coding DNA Sequence Number=SeqID_5700
  Gene Ontology: Mol. function=cellulose synthase (UDP-forming) activity; Cellular component=membrane; Biological process=cellulose biosynthetic process
  Homolog annotation: Hit_ID=Q6J8X1; Match level="QueryCoverage=85%, HitCoverage=9%, E-value=3e-51, Identity=93%"; Hit description =Cellulose synthase
MQISNYASIVFMALFISIAATGILEMQWGGVSIDDWWRNEQFWVIGGVSSHLFALFQGLLKVLAGVNTNFTVTSKAADDGEFSELYIFKWTSLLIPPMTLLIMNIVGVXVXGVXXAXHXGF

SEQ ID NO: 8481 - protein, 109 aa, Glycine max
  Coding DNA Sequence Number=SeqID_5701
DTPSSLRLSTIYPHMLYEGTEYIPLYHARQRRTEEKTICDKHHPPVTLSCQQEMETHVAYSAVDTTIQTHHTYSLSTSPLRTYKGFGICHSLISLFQEEQEGKVTPHSK

SEQ ID NO: 8482 - protein, 116 aa, Glycine max
  misc_feature (44)..(44): Xaa can be any naturally occurring amino acid
  misc_feature (81)..(81): Xaa can be any naturally occurring amino acid
  misc_feature (96)..(96): Xaa can be any naturally occurring amino acid
  Coding DNA Sequence Number=SeqID_5703
  Subcellular localization annotation: CTP_CleavageSite=12; ConfidenceScore=5.01e-01
SKVYTITSTRVRSSARVVAALVISECLRLRVRSVDCCSKCQRPXSHVIGARRARLRYIRRAIVCSCRMIIISRASLDSVKXVGARRSGTHSDITLXHSVILLDTSKRKCIRRNRYT

SEQ ID NO: 8483 - protein, 143 aa, Glycine max; identical to SEQ ID NO: 7860
  misc_feature (28)..(28): Xaa can be any naturally occurring amino acid
  misc_feature (48)..(48): Xaa can be any naturally occurring amino acid
  misc_feature (63)..(63): Xaa can be any naturally occurring amino acid
  misc_feature (75)..(75): Xaa can be any naturally occurring amino acid
  misc_feature (78)..(78): Xaa can be any naturally occurring amino acid
  misc_feature (80)..(80): Xaa can be any naturally occurring amino acid
  misc_feature (84)..(84): Xaa can be any naturally occurring amino acid
  misc_feature (95)..(95): Xaa can be any naturally occurring amino acid
  misc_feature (105)..(105): Xaa can be any naturally occurring amino acid
  misc_feature (138)..(139): Xaa can be any naturally occurring amino acid
  Coding DNA Sequence Number=SeqID_5705

SEQ ID NO: 8484 - protein, 189 aa, Glycine max
  Coding DNA Sequence Number=SeqID_5707
  Gene Ontology: Mol. function=structural constituent of ribosome; Cellular component=ribonucleoprotein complex; Biological process =translation
  Homolog annotation: Hit_ID=P36210; Match level="QueryCoverage=88%, HitCoverage=89%, E-value=5e-53, Identity=72%"; Hit description=50S ribosomal protein L12-1, chloroplast precursor
  Pfam annotation: Domain name=Ribosomal_L12; Domain location=121-189; Score=126.7; E_value=6.6e-35; Accession=PF00542.9; Description =Ribosomal protein L7L12 C-terminal domain
  Subcellular localization annotation: CTP_CleavageSite=55; ConfidenceScore=5.77e-01
MAATSLSIATTFRSSSYLTHASPHGFFPSRPNTTFRICSPSSTPTHRATHLRPVSAVEAPEKIEKIGSEISSLTLEEARVLVDYLQDKFGVSPLSLAPAAAAVAAPGDGGGAAAAVEEQTEFDVVINEVPSSARIAVIKAVRALTSLALKEAKELIEGLPKKFKEGVTKDEAEEAKKQLEEAGAKVSIA

SEQ ID NO: 8485 - protein, 90 aa, Glycine max
  misc_feature (7)..(7): Xaa can be any naturally occurring amino acid
  misc_feature (32)..(32): Xaa can be any naturally occurring amino acid
  misc_feature (34)..(34): Xaa can be any naturally occurring amino acid
  Coding DNA Sequence Number=SeqID_5708
CTDVRRXCVCAAATAACVQGMLATDWISCTSXSXTTLYGDTILLCGMRRERGRLSVSTAHYAVNEHASSVSDAELSVATYARKRRVDRMR

SEQ ID NO: 8486 - protein, 88 aa, Glycine max
  Coding DNA Sequence Number=SeqID_5710
SSSHRRYCSHLFWRILSCMVLVYRPLQHRGTVGLEHSMFHVVLARLPVYKVVHVHPELGAPRMTLLARGRVPIHCEGQQSVYQRTGTN

SEQ ID NO: 8487 - protein, 81 aa, Glycine max
  misc_feature (32)..(32): Xaa can be any naturally occurring amino acid
  Coding DNA Sequence Number=SeqID_5712
TNLHPPHPHEGRDKDYKSTTSHAALVGYEWVXQGRRLCLLKAIICSPTEYTNTRCLTSSSPDRIQSSPLDTDANLVARRMF

SEQ ID NO: 8488 - protein, 110 aa, Glycine max
  misc_feature (7)..(7): Xaa can be any naturally occurring amino acid
  misc_feature (88)..(88): Xaa can be any naturally occurring amino acid
  misc_feature (101)..(101): Xaa can be any naturally occurring amino acid
  Coding DNA Sequence Number=SeqID_5713
YVSISSXDSPSKHIIDYKYILISHTYCVHAINRSHCLQNLLTDTCGRPPIPVAEYRVVGCGVRCWLNIECVSYGERAHDDGGVCGDRXPRMSWAYNHNHRXCAASESRGV

SEQ ID NO: 8489 - protein, 189 aa, Glycine max
  misc_feature (55)..(55): Xaa can be any naturally occurring amino acid
  misc_feature (125)..(125): Xaa can be any naturally occurring amino acid
  misc_feature (136)..(136): Xaa can be any naturally occurring amino acid
  Coding DNA Sequence Number=SeqID_5715
  Homolog annotation: Hit_ID=A7NTN3; Match level="QueryCoverage=95%, HitCoverage=69%, E-value=7e-68, Identity=77%"; Hit description =Chromosome chr18 scaffold_1, whole genome shotgun sequence
MITNGFILQEFLKALIGFIDVAGLYFALTQLTHRNISQNHKFQAVGLGWAFADSXLHRLAPLWVGARGLELLTWIIRTWDYILQGLEANANFVMSKCLEAMAHVVLSISLAAHETWILVLLQNKXPRTLIPYYIFXCKGIVATMPSITSYLRRGLGWHFPKVVGFELFTSLVMAFISWQLFAACQRPSV

SEQ ID NO: 8490 - protein, 118 aa, Glycine max; identical to SEQ ID NO: 7867
  misc_feature (6)..(7): Xaa can be any naturally occurring amino acid
  misc_feature (11)..(11): Xaa can be any naturally occurring amino acid
  misc_feature (21)..(21): Xaa can be any naturally occurring amino acid
  misc_feature (37)..(37): Xaa can be any naturally occurring amino acid
  misc_feature (43)..(43): Xaa can be any naturally occurring amino acid
  misc_feature (74)..(75): Xaa can be any naturally occurring amino acid
  misc_feature (79)..(79): Xaa can be any naturally occurring amino acid
  misc_feature (89)..(89): Xaa can be any naturally occurring amino acid
  misc_feature (94)..(94): Xaa can be any naturally occurring amino acid
  misc_feature (102)..(103): Xaa can be any naturally occurring amino acid
  misc_feature (105)..(105): Xaa can be any naturally occurring amino acid
  Coding DNA Sequence Number=SeqID_5716

SEQ ID NO: 8491 - protein, 117 aa, Glycine max
  misc_feature (22)..(22): Xaa can be any naturally occurring amino acid
  misc_feature (28)..(28): Xaa can be any naturally occurring amino acid
  misc_feature (48)..(48): Xaa can be any naturally occurring amino acid
  misc_feature (89)..(89): Xaa can be any naturally occurring amino acid
  misc_feature (93)..(93): Xaa can be any naturally occurring amino acid
  misc_feature (97)..(97): Xaa can be any naturally occurring amino acid
  misc_feature (110)..(110): Xaa can be any naturally occurring amino acid
  Coding DNA Sequence Number=SeqID_5718
  Subcellular localization annotation: CTP_CleavageSite=60; ConfidenceScore=5.71e-01
LSSMLRLLSILSRALNDVWSFXHTSSSXSSCVLYTSRSSLLCSSRSTXGSTTSRGDPLVVSSTVSVVLVSLSLNSHLYAPIYLSISSSXLQSXRTCXGVYTIARRAIAVXHARLSWS

SEQ ID NO: 8492 - protein, 74 aa, Glycine max
  misc_feature (7)..(7): Xaa can be any naturally occurring amino acid
  Coding DNA Sequence Number=SeqID_5720
  Subcellular localization annotation: CTP_CleavageSite=67; ConfidenceScore=5.69e-01
SPAKKGXGGGGGRGEGQRPSPPSSPKAKDPTKSSSPFSLLFPPSLLRPFSSGGLFPSPPLSLARPVICEALFRC

SEQ ID NO: 8493 - protein, 153 aa, Glycine max; identical to SEQ ID NO: 7870
  misc_feature (78)..(78): Xaa can be any naturally occurring amino acid
  Coding DNA Sequence Number=SeqID_5722

SEQ ID NO: 8494 - protein, 97 aa, Glycine max
  Coding DNA Sequence Number=SeqID_5724
SSSPPRCSPTPHESCEHQDHGQKQGPSDKLTVSPELQATNSHLYFNRGSLANQRLHTSCSYSPSHSRTAELTHTGVLVEQVEHTHVVQHLRLDGFEK

SEQ ID NO: 8495 - protein, 102 aa, Glycine max
  misc_feature (19)..(19): Xaa can be any naturally occurring amino acid
  misc_feature (26)..(26): Xaa can be any naturally occurring amino acid
  misc_feature (56)..(56): Xaa can be any naturally occurring amino acid
  Coding DNA Sequence Number=SeqID_541
DVLRGVTHAHSISLRTADXALMCAAXQTLQSDVLHSRAYRAHRARAQHYSVTSASXTYIYMISRIHALVLHHSDTSPYRHVPRYRMLSARRRCSTLARDMAN

SEQ ID NO: 8496 - protein, 156 aa, Glycine max; identical to SEQ ID NO: 7149
  misc_feature (7)..(7): Xaa can be any naturally occurring amino acid
  misc_feature (41)..(41): Xaa can be any naturally occurring amino acid
  misc_feature (45)..(45): Xaa can be any naturally occurring amino acid
  misc_feature (122)..(122): Xaa can be any naturally occurring amino acid
  Coding DNA Sequence Number=SeqID_543

SEQ ID NO: 8497 - protein, 521 aa, Glycine max
  misc_feature (1)..(1): Xaa can be any naturally occurring amino acid
  misc_feature (14)..(14): Xaa can be any naturally occurring amino acid
  misc_feature (37)..(37): Xaa can be any naturally occurring amino acid
  misc_feature (44)..(44): Xaa can be any naturally occurring amino acid
  misc_feature (79)..(79): Xaa can be any naturally occurring amino acid
  misc_feature (158)..(158): Xaa can be any naturally occurring amino acid
  misc_feature (329)..(329): Xaa can be any naturally occurring amino acid
  misc_feature (412)..(412): Xaa can be any naturally occurring amino acid
  misc_feature (457)..(457): Xaa can be any naturally occurring amino acid
  Coding DNA Sequence Number=SeqID_545
  Subcellular localization annotation: CTP_CleavageSite=48; ConfidenceScore=5.54e-01
XFPSITLLPCLHGXRPVLVFSTLCCLSSSPCFSFHCXSHRVCAXSSVCLASVVCARFLSVDFVSPARFLPLACASCCLXVLSHGSPSPRLPRIYLLTSIMCVNSTVLSLVLLCSPLCLSSSSLSSFLLLALFLCLFASSARSRAEFLSSLLISPPSIXSSLLSPRSSRPLSSFIYPLALSSATLFSLLCFLVVSSQLFCPARISLAIVSSSPPLSRPFSLFFLLPLFFSCLASLALLFLVSCLACSPSRVVPVFPRSPPRLVPLLVSLFSLRVSPFSLVPLAFLSPVPFLHSLRLLAFLFPGCSSLLSLFSLSRRRRGSFPPSPFFFCXPPPLLVRPAPRSSSFLSSSFLLPFILFSLFVSVWFRFLSHFSFSPLSVLPPPLLAPPLLSFLLLRSFFLLLFFAATPFSFLLXSVALLLSFFSSFSSRSSSCSPFLPASLVFLLLSPLAFLRFASAFXISPLLPLSCLCFAGGSTPRLLPLAPSFASLSIFCFRSPLLRAFFLLLVRIIFSRSPSLAPPSFL

SEQ ID NO: 8498 - protein, 109 aa, Glycine max
  Coding DNA Sequence Number=SeqID_547
HREGVHSSSSTVRSPTIFGGGGALYTRGFLANKMVASPQEEGGAHVTGISRAKRRGFSSIWGFDMKRSFYFFIYTRDFCHSHSPRGAQFVSRIFFCAGHTQGVKSSLGK

SEQ ID NO: 8499 - protein, 140 aa, Glycine max
  misc_feature (4)..(4): Xaa can be any naturally occurring amino acid
  misc_feature (74)..(74): Xaa can be any naturally occurring amino acid
  misc_feature (76)..(76): Xaa can be any naturally occurring amino acid
  misc_feature (96)..(96): Xaa can be any naturally occurring amino acid
  misc_feature (101)..(101): Xaa can be any naturally occurring amino acid
  Coding DNA Sequence Number=SeqID_549
  Subcellular localization annotation: CTP_CleavageSite=67; ConfidenceScore=5.11e-01
PGLXTRHPPPATCSMSPCANSVSAHATSLSLYYLITPTTLSLTQLYIAHRTISPIDTRNSKSPTDTSLSTYRHXTXEIVHLPLSLPRVHTQTQIPXCARPXIRRLHLIPLASPTRVYLSRTVITTSSHGSLTRYNLADTI

SEQ ID NO: 8500 - protein, 105 aa, Glycine max
  misc_feature (9)..(9): Xaa can be any naturally occurring amino acid
  misc_feature (56)..(56): Xaa can be any naturally occurring amino acid
  misc_feature (69)..(69): Xaa can be any naturally occurring amino acid
  misc_feature (88)..(88): Xaa can be any naturally occurring amino acid
  Coding DNA Sequence Number=SeqID_551
  Subcellular localization annotation: CTP_CleavageSite=68; ConfidenceScore=5.33e-01
YFPTFSVAXSSPTFPHFALSSFVYTSAYFYLTFKDTLSTKLSKQIIQYPQDLFRTXPHQLNTCMFTFRXSLAAPTYLICSSTPPTAQXQSLCRYVNIRVSVLAQF

SEQ ID NO: 8501 - protein, 56 aa, Glycine max
  Coding DNA Sequence Number=SeqID_5725
  Gene Ontology: Mol. function=structural constituent of ribosome; Cellular component=ribonucleoprotein complex; Biological process =translation
  Homolog annotation: Hit_ID=Q680P8; Match level="QueryCoverage=100%, HitCoverage=100%, E-value=3e-26, Identity=91%"; Hit description=40S ribosomal protein S29
  Pfam annotation: Domain name=Ribosomal_S14; Domain location=3-56; Score=83.3; E_value=7.6e-22; Accession=PF00253.11; Description =Ribosomal protein S14pS29e
MGFAAIWNSHPKKYGPGSRTCRVCGNSHGLIRKYGLNCCRQCFRSNAKEIGFIKYR

SEQ ID NO: 8502 - protein, 185 aa, Glycine max
  misc_feature (45)..(45): Xaa can be any naturally occurring amino acid
  misc_feature (48)..(48): Xaa can be any naturally occurring amino acid
  misc_feature (53)..(53): Xaa can be any naturally occurring amino acid
  misc_feature (70)..(70): Xaa can be any naturally occurring amino acid
  misc_feature (90)..(90): Xaa can be any naturally occurring amino acid
  misc_feature (95)..(95): Xaa can be any naturally occurring amino acid
  misc_feature (99)..(99): Xaa can be any naturally occurring amino acid
  misc_feature (108)..(108): Xaa can be any naturally occurring amino acid
  misc_feature (129)..(129): Xaa can be any naturally occurring amino acid
  misc_feature (137)..(137): Xaa can be any naturally occurring amino acid
  Coding DNA Sequence Number=SeqID_5726
  Gene Ontology: Mol. function=DNA binding; Cellular component =chromosome; Biological process=regulation of transcription, DNA -dependent
  Homolog annotation: Hit_ID=Q93YH8; Match level="QueryCoverage=69%, HitCoverage=30%, E-value=3e-42, Identity=69%"; Hit description=HMG I/Y like protein
  Pfam annotation: Domain name=Linker_histone; Domain location=33-97; Score=3.2; E_value=0.00049; Accession=PF00538.9; Description=linker histone H1 and H5 family
MDPTSIPPPPATTVPFTVEPSNHVTPADNTNTNHPPYDEMIYTAXRAXEEKDXSSKRAIRKYMEQVYKDXLPPTHSALLTSHPHRLESAXLLILXKKIXQLPGSDPLXPGLQAKKARGPPPKLKSQPNXSLKWPGIXLKKNPVLKSEKKEPGPPQKKLRPPKGGPGPQWRPGKKVLPPLWTGKII

SEQ ID NO: 8503 - protein, 104 aa, Glycine max
  misc_feature (33)..(33): Xaa can be any naturally occurring amino acid
  misc_feature (35)..(35): Xaa can be any naturally occurring amino acid
  misc_feature (41)..(43): Xaa can be any naturally occurring amino acid
  misc_feature (86)..(86): Xaa can be any naturally occurring amino acid
  Coding DNA Sequence Number=SeqID_5727
  Gene Ontology: Mol. function=metal ion binding; Cellular component =cytoplasm
  Homolog annotation: Hit_ID=Q8VZK0; Match level="QueryCoverage=100%, HitCoverage=38%, E-value=2e-32, Identity=58%"; Hit description =Putative uncharacterized protein At5g18650
  Pfam annotation: Domain name=zf-C3HC4; Domain location=57-98; Score =0.4; E_value=0.082; Accession=PF00097.15; Description=Zinc finger, C3HC4 type (RING finger)
YLEFSSRKKHFHCDDCRICRLGFRENYSHFSKXSXSYTNAXXXNHLCVENSMRHHSPICYEYLFDSLKNITVMKYGHTMHTQCYLXMLNRDKYFCPIFSKSLID

SEQ ID NO: 8504 - protein, 105 aa, Glycine max; identical to SEQ ID NO: 7254
  misc_feature (2)..(2): Xaa can be any naturally occurring amino acid
  misc_feature (19)..(19): Xaa can be any naturally occurring amino acid
  misc_feature (28)..(28): Xaa can be any naturally occurring amino acid
  misc_feature (40)..(40): Xaa can be any naturally occurring amino acid
  Coding DNA Sequence Number=SeqID_5728
  Subcellular localization annotation: CTP_CleavageSite=51; ConfidenceScore=5.74e-01

SEQ ID NO: 8505 - protein, 164 aa, Glycine max
  misc_feature (27)..(27): Xaa can be any naturally occurring amino acid
  misc_feature (35)..(35): Xaa can be any naturally occurring amino acid
  misc_feature (51)..(51): Xaa can be any naturally occurring amino acid
  misc_feature (63)..(63): Xaa can be any naturally occurring amino acid
  misc_feature (68)..(68): Xaa can be any naturally occurring amino acid
  misc_feature (77)..(77): Xaa can be any naturally occurring amino acid
  misc_feature (81)..(81): Xaa can be any naturally occurring amino acid
  misc_feature (98)..(98): Xaa can be any naturally occurring amino acid
  Coding DNA Sequence Number=SeqID_5730
  Gene Ontology: Mol. function=ATP binding; Cellular component =chloroplast; Biological process=protein folding
  Homolog annotation: Hit_ID=A7PDS7; Match level="QueryCoverage=89%, HitCoverage=57%, E-value=6e-38, Identity=52%"; Hit description =Chromosome chr11 scaffold_13, whole genome shotgun sequence
  Pfam annotation: Domain name=Cpn10; Domain location=61-152; Score =50.8; E_value=4.8e-12; Accession=PF00166.12; Description=Chaperonin 10 Kd subunit
  Subcellular localization annotation: CTP_CleavageSite=50; ConfidenceScore=5.47e-01
MASAQLTAIASSISTASFEGLQPSTVXFASTGRIXIGNLSQRSFQGLVVKXTTVVAPKYTAIXPLGDXVLIKIKEPXEKTXGGILLPSTTQTEPQRGXVVAIRKRKTVWKNNVEISMKTSTQIFYFEYSVAEIDFDSSKHLIVKNNDVVVLLRTYNIKNLKPFD

SEQ ID NO: 8506 - protein, 71 aa, Glycine max
  misc_feature (42)..(43): Xaa can be any naturally occurring amino acid
  Coding DNA Sequence Number=SeqID_5731
  Homolog annotation: Hit_ID=A7Q2V1; Match level="QueryCoverage=71%, HitCoverage=5%, E-value=1e-14, Identity=70%"; Hit description =Chromosome chr12 scaffold_47, whole genome shotgun sequence
NYQISCHSCNSQYAWQTLITYDACIRLCLQAWAKGCTEAPEXXKDECLALRSAFGWVPFCFTNTFLLASFI

SEQ ID NO: 8507 - protein, 104 aa, Glycine max
  Coding DNA Sequence Number=SeqID_5732
RLLDHISSQQCMAIYRRYLAGKLAKASCSSPRRIVWLNGEGIHLPKRVACLGLKLHPTCLGEFRVGNLCEDTILPFLLALFLNLTNNHQNLLCQNECECRRNSC

SEQ ID NO: 8508 - protein, 185 aa, Glycine max
  Coding DNA Sequence Number=SeqID_5734
  Subcellular localization annotation: CTP_CleavageSite=30; ConfidenceScore=5.06e-01
YTHCISLSPRIPAASLCVPRSCGPPHLLCKGFAPVGTRLLSSLSPDGEGAIATAGSGAMAMNADVRAASTAKREVDPRSEDWTRMAMRRHDPSRPPAAGVSRRREQQTIAIYTTSFSLQLLRRCRLHGWCRARDLSAAVVEALGGQGGGGKLWRGVRPHMNEEGLGERREDEASLLASSLDWRLI

SEQ ID NO: 8509 - protein, 86 aa, Glycine max; identical to SEQ ID NO: 7877
  misc_feature (8)..(8): Xaa can be any naturally occurring amino acid
  misc_feature (17)..(18): Xaa can be any naturally occurring amino acid
  misc_feature (37)..(37): Xaa can be any naturally occurring amino acid
  Coding DNA Sequence Number=SeqID_5735

SEQ ID NO: 8510 - protein, 145 aa, Glycine max
  misc_feature (7)..(7): Xaa can be any naturally occurring amino acid
  misc_feature (9)..(10): Xaa can be any naturally occurring amino acid
  misc_feature (12)..(12): Xaa can be any naturally occurring amino acid
  misc_feature (73)..(73): Xaa can be any naturally occurring amino acid
  misc_feature (87)..(87): Xaa can be any naturally occurring amino acid
  misc_feature (114)..(114): Xaa can be any naturally occurring amino acid
  misc_feature (116)..(117): Xaa can be any naturally occurring amino acid
  misc_feature (131)..(131): Xaa can be any naturally occurring amino acid
  Coding DNA Sequence Number=SeqID_5737
DYLSPIXPXXTXTNLSIVGVEELTFVDLVRYRYDEKHMRPLTLIQLLPNFAQRAWILYRNHLHTASAILSLDXHTNSHRHGPRPRIXDIQRIVHSFSSSITCQCEPHSCTELLXTXXTRSTNTLQYYGYSXRVIAARSPVDSWSS

SEQ ID NO: 8511 - protein, 112 aa, Glycine max; identical to SEQ ID NO: 7428
  misc_feature (11)..(11): Xaa can be any naturally occurring amino acid
  misc_feature (19)..(19): Xaa can be any naturally occurring amino acid
  misc_feature (28)..(28): Xaa can be any naturally occurring amino acid
  misc_feature (52)..(52): Xaa can be any naturally occurring amino acid
  misc_feature (55)..(55): Xaa can be any naturally occurring amino acid
  misc_feature (69)..(69): Xaa can be any naturally occurring amino acid
  misc_feature (85)..(85): Xaa can be any naturally occurring amino acid
  Coding DNA Sequence Number=SeqID_5739

SEQ ID NO: 8512 - protein, 60 aa, Glycine max
  Coding DNA Sequence Number=SeqID_5741
PTIHYDVSRLPPPRSQKLQLTDGTLHHEAPPRRKLNFSGTLFDHVGKKIKCQWMLENAIA

SEQ ID NO: 8513 - protein, 157 aa, Glycine max
  misc_feature (52)..(52): Xaa can be any naturally occurring amino acid
  misc_feature (60)..(60): Xaa can be any naturally occurring amino acid
  misc_feature (70)..(70): Xaa can be any naturally occurring amino acid
  misc_feature (106)..(106): Xaa can be any naturally occurring amino acid
  misc_feature (120)..(120): Xaa can be any naturally occurring amino acid
  misc_feature (131)..(131): Xaa can be any naturally occurring amino acid
  misc_feature (137)..(137): Xaa can be any naturally occurring amino acid
  Coding DNA Sequence Number=SeqID_5743
RSIIHRNKFIEERTRLLQKKDLKTKKTYKALKVRKARKAHKGWWHGSEGSGXTRMLVSVXKLKVEGSNLXSSMSKDCSNTPVNQMSRDEPDGSDSSDGPADRFQGXASGQINQMGQTPAXVRCELEELEEXEEEESXLELKMDGGSIRRSYILYNKI

SEQ ID NO: 8514 - protein, 121 aa, Glycine max; identical to SEQ ID NO: 7430
  misc_feature (1)..(1): Xaa can be any naturally occurring amino acid
  misc_feature (9)..(9): Xaa can be any naturally occurring amino acid
  misc_feature (27)..(27): Xaa can be any naturally occurring amino acid
  misc_feature (62)..(62): Xaa can be any naturally occurring amino acid
  misc_feature (84)..(84): Xaa can be any naturally occurring amino acid
  misc_feature (105)..(105): Xaa can be any naturally occurring amino acid
  misc_feature (107)..(107): Xaa can be any naturally occurring amino acid
  Coding DNA Sequence Number=SeqID_5745

SEQ ID NO: 8515 - protein, 134 aa, Glycine max
  misc_feature (14)..(14): Xaa can be any naturally occurring amino acid
  misc_feature (22)..(24): Xaa can be any naturally occurring amino acid
  misc_feature (41)..(41): Xaa can be any naturally occurring amino acid
  misc_feature (53)..(53): Xaa can be any naturally occurring amino acid
  misc_feature (68)..(68): Xaa can be any naturally occurring amino acid
  misc_feature (70)..(70): Xaa can be any naturally occurring amino acid
  misc_feature (86)..(86): Xaa can be any naturally occurring amino acid
  misc_feature (94)..(95): Xaa can be any naturally occurring amino acid
  misc_feature (99)..(99): Xaa can be any naturally occurring amino acid
  misc_feature (128)..(128): Xaa can be any naturally occurring amino acid
  Coding DNA Sequence Number=SeqID_5747
  Subcellular localization annotation: CTP_CleavageSite=54; ConfidenceScore=5.20e-01
PHIFLSYSISCVCXPPPPPPSXXXHTPPARHTAAVAAPASXTDTQCMLRHYPXSANHTPYYAPRLSCXRXPTPALLASYPTAFFSXAGITHAAXXSHHXLPTQHIHAIAHEINASACLYHTNDIYVGXTDYHIC

SEQ ID NO: 8516 - protein, 151 aa, Glycine max
  misc_feature (24)..(24): Xaa can be any naturally occurring amino acid
  misc_feature (145)..(145): Xaa can be any naturally occurring amino acid
  Coding DNA Sequence Number=SeqID_5749
  Gene Ontology: Mol. function=translation initiation factor activity; Cellular component=intracellular; Biological process=translational initiation
  Homolog annotation: Hit_ID=Q0U183; Match level="QueryCoverage=99%, HitCoverage=21%, E-value=2e-36, Identity=56%"; Hit description =Putative uncharacterized protein
PPRMAVEIDGWRDQPIAGDEVLQXAEDEQHASSVTELRSEKVDREQMARDMEAINEARRAEAERREAEEAAAKAIKNGEEAVVAEKKEAGPEVVSFIIKGDVSGSVEAVIDSVSALGNAEVSTRILRHGVGAPSEFDISHAADAXGHIINF

SEQ ID NO: 8517 - protein, 193 aa, Glycine max
  misc_feature (97)..(98): Xaa can be any naturally occurring amino acid
  Coding DNA Sequence Number=SeqID_5750
KRFGRCGNLSSIAPRRAREQTVLCSFGNIFTPSRGDAGVCWVSFSASTNKPFGGGGGVSPHVRGSWACGGYRGTPRPSQRLGCYCLFGGGGFLRKNXXIPPLLPSGGGGEKIFLLNVLSNKGTNVLKCFPFHNETMLVRGDSFLVLDLGLDVVDGVRAFHLKGDGLAGEGLDEDLHLEGRGREIHRENGIYWN

SEQ ID NO: 8518 - protein, 161 aa, Glycine max; identical to SEQ ID NO: 7513
  misc_feature (39)..(39): Xaa can be any naturally occurring amino acid
  misc_feature (154)..(154): Xaa can be any naturally occurring amino acid
  Coding DNA Sequence Number=SeqID_5751

SEQ ID NO: 8519 - protein, 139 aa, Glycine max
  misc_feature (128)..(128): Xaa can be any naturally occurring amino acid
  Coding DNA Sequence Number=SeqID_5753
  Subcellular localization annotation: CTP_CleavageSite=72; ConfidenceScore=5.59e-01
ISSILSSPLLSSPPPPPSHGPRRRPWPPPPSPDQTTGDPPCPRRSRSPSREPHHLRRSIPAESGGAQHPPVNASLRSVLLSDPGGLQQPPTNSPPRGVPRVSACVSPATLLGRDPPQPRRPRRICGAXARVTSSDLQRP

SEQ ID NO: 8520 - protein, 223 aa, Glycine max; identical to SEQ ID NO: 7889
  misc_feature (137)..(137): Xaa can be any naturally occurring amino acid
  misc_feature (142)..(143): Xaa can be any naturally occurring amino acid
  misc_feature (207)..(207): Xaa can be any naturally occurring amino acid
  misc_feature (219)..(220): Xaa can be any naturally occurring amino acid
  Coding DNA Sequence Number=SeqID_5755

SEQ ID NO: 8521 - protein, 100 aa, Glycine max
  misc_feature (1)..(1): Xaa can be any naturally occurring amino acid
  misc_feature (15)..(15): Xaa can be any naturally occurring amino acid
  misc_feature (24)..(24): Xaa can be any naturally occurring amino acid
  misc_feature (44)..(44): Xaa can be any naturally occurring amino acid
  misc_feature (56)..(56): Xaa can be any naturally occurring amino acid
  Coding DNA Sequence Number=SeqID_5757
XGGVYTFHPLHRHDXARVAAPPPXPHLTTDSHHILRLHHSCAVXLFIIILCYTTLXPNGARRRRRARDTQLAVISAPMISISTLPDHALTDSDSRTPYST

SEQ ID NO: 8522 - protein, 78 aa, Glycine max
  misc_feature (19)..(19): Xaa can be any naturally occurring amino acid
  Coding DNA Sequence Number=SeqID_5759
  Subcellular localization annotation: CTP_CleavageSite=60; ConfidenceScore=5.21e-01
MSDEPTLRSTTLYPRLNQXSSAPLSLLNKCRTPFTILLRGSLPPSSLCSIDDRRADRSVAQSNGVAREDRSLHRRRLH

SEQ ID NO: 8523 - protein, 115 aa, Glycine max; identical to SEQ ID NO: 7600
  misc_feature (40)..(40): Xaa can be any naturally occurring amino acid
  misc_feature (76)..(76): Xaa can be any naturally occurring amino acid
  Coding DNA Sequence Number=SeqID_5761

SEQ ID NO: 8524 - protein, 155 aa, Glycine max
  misc_feature (9)..(9): Xaa can be any naturally occurring amino acid
  misc_feature (19)..(19): Xaa can be any naturally occurring amino acid
  misc_feature (25)..(25): Xaa can be any naturally occurring amino acid
  misc_feature (44)..(44): Xaa can be any naturally occurring amino acid
  misc_feature (78)..(78): Xaa can be any naturally occurring amino acid
  misc_feature (81)..(81): Xaa can be any naturally occurring amino acid
  misc_feature (85)..(85): Xaa can be any naturally occurring amino acid
  misc_feature (144)..(144): Xaa can be any naturally occurring amino acid
  Coding DNA Sequence Number=SeqID_5763
QPSHLSRLXQRILIQCTDXYIHTYXLLEIYNNCTRYVRERICAXECTSHHSSAMRARPPLLLCSSRSLEHRRDRARVXLFXSTIXSSIDIYYLLYVTHFASRALLVARVMILVHECMMSVAATVLVSASRLSMHVSHISYSPPXSLYLDISIETC

SEQ ID NO: 8525 - protein, 166 aa, Glycine max; identical to SEQ ID NO: 7899
  misc_feature (9)..(10): Xaa can be any naturally occurring amino acid
  misc_feature (37)..(37): Xaa can be any naturally occurring amino acid
  misc_feature (57)..(57): Xaa can be any naturally occurring amino acid
  misc_feature (60)..(60): Xaa can be any naturally occurring amino acid
  misc_feature (70)..(70): Xaa can be any naturally occurring amino acid
  misc_feature (72)..(72): Xaa can be any naturally occurring amino acid
  misc_feature (74)..(74): Xaa can be any naturally occurring amino acid
  misc_feature (91)..(91): Xaa can be any naturally occurring amino acid
  misc_feature (110)..(110): Xaa can be any naturally occurring amino acid
  misc_feature (117)..(117): Xaa can be any naturally occurring amino acid
  misc_feature (166)..(166): Xaa can be any naturally occurring amino acid
  Coding DNA Sequence Number=SeqID_5765

SEQ ID NO: 8526 - protein, 106 aa, Glycine max
  misc_feature (61)..(61): Xaa can be any naturally occurring amino acid
  Coding DNA Sequence Number=SeqID_5767
  Gene Ontology: Mol. function=unfolded protein binding; Cellular component=mitochondrion; Biological process=cellular protein metabolic process
  Homolog annotation: Hit_ID=Q05045; Match level="QueryCoverage=80%, HitCoverage=14%, E-value=9e-27, Identity=75%"; Hit description =Chaperonin CPN60-1, mitochondrial precursor
YGCEKTTEGDDQQASIPANAPTAPIAYTAGASKETTDGVTPAKSIEFKDKFKNIRASLVKXVANATNDVAGDGTTCATILTKAILTEGCKSVADGMNAVVLIQGIN

SEQ ID NO: 8527 - protein, 66 aa, Glycine max
  Coding DNA Sequence Number=SeqID_5768
  Gene Ontology: Mol. function=structural constituent of ribosome; Cellular component=ribonucleoprotein complex; Biological process =translation
  Homolog annotation: Hit_ID=P42795; Match level="QueryCoverage=100%, HitCoverage=36%, E-value=8e-29, Identity=100%"; Hit description=60S ribosomal protein L11-1
  Pfam annotation: Domain name=Ribosomal_L5; Domain location=9-62; Score=98.8; E_value=1.7e-26; Accession=PF00281.9; Description =Ribosomal protein L5
MASEKKLSNPMRDIKVQKLVLNISVGESGDRLTRASKVLEQLSGQTPVFSKARYTVRSFGIRRNEK

SEQ ID NO: 8528 - protein, 135 aa, Glycine max
  Coding DNA Sequence Number=SeqID_5769
RSSSIHVSARVGTMSEKRNKAVTDIVQRGSDKSGRRNRCQRAYTRSTYYIISCGAVLDTYRHTTHTRAAWSDLVSACANYNNSKCKCCRKYSSDSQSIHITYRQLGTRVTRIAAQCIHPTATCISLTQAPLKSRD

SEQ ID NO: 8529 - protein, 95 aa, Glycine max
  misc_feature (5)..(5): Xaa can be any naturally occurring amino acid
  misc_feature (92)..(92): Xaa can be any naturally occurring amino acid
  Coding DNA Sequence Number=SeqID_5771
NQRLXSEPIYIYIYKTLIENTHTLYIIMGYTRSPPRHHLSQGHTERRKPHFSWGTKCSRARDSCYGEPPQTRERHALTRGPTREIRTGACGXTPF

SEQ ID NO: 8530 - protein, 185 aa, Glycine max
  misc_feature (27)..(27): Xaa can be any naturally occurring amino acid
  misc_feature (30)..(30): Xaa can be any naturally occurring amino acid
  Coding DNA Sequence Number=SeqID_5773
YLNEIKIKTDKMYEEFDTFKSIYNSQXLKXSEFMQTDTNRVNQITNSVNELKTLSKTLADLGSNELQKKFFTNQSRKYNVGELTKTHAPVSLVTQKNSVSVSSKSSTSDPPLNHLDIFSKIYPRITEQNFKTIMVNLANRVFPNDSMNLHSTINYANVQKIKVLVETHKSKEQPRRSLLLGINSF

SEQ ID NO: 8531 - protein, 125 aa, Glycine max
  misc_feature (42)..(43): Xaa can be any naturally occurring amino acid
  misc_feature (45)..(45): Xaa can be any naturally occurring amino acid
  misc_feature (50)..(51): Xaa can be any naturally occurring amino acid
  misc_feature (61)..(61): Xaa can be any naturally occurring amino acid
  misc_feature (79)..(79): Xaa can be any naturally occurring amino acid
  misc_feature (81)..(82): Xaa can be any naturally occurring amino acid
  misc_feature (84)..(84): Xaa can be any naturally occurring amino acid
  misc_feature (88)..(88): Xaa can be any naturally occurring amino acid
  misc_feature (94)..(94): Xaa can be any naturally occurring amino acid
  misc_feature (96)..(98): Xaa can be any naturally occurring amino acid
  misc_feature (100)..(100): Xaa can be any naturally occurring amino acid
  misc_feature (114)..(117): Xaa can be any naturally occurring amino acid
  misc_feature (119)..(121): Xaa can be any naturally occurring amino acid
  Coding DNA Sequence Number=SeqID_5775
  Subcellular localization annotation: CTP_CleavageSite=59; ConfidenceScore=5.08e-01
LAHQSRSHTHVTIARVQHRSKSYITYSTHNTASSSTIPLRWXXLXALGRXXGGGGCWVVCXPESKRSLSGLVAPPLSRXCXXRXSSLXLSLPSXPXXXLXLPPLSSLSSLSPSXXXXFXXXLFFF

SEQ ID NO: 8532 - protein, 119 aa, Glycine max
  misc_feature (9)..(9): Xaa can be any naturally occurring amino acid
  misc_feature (13)..(14): Xaa can be any naturally occurring amino acid
  misc_feature (38)..(38): Xaa can be any naturally occurring amino acid
  misc_feature (59)..(59): Xaa can be any naturally occurring amino acid
  Coding DNA Sequence Number=SeqID_5777
  Homolog annotation: Hit_ID=Q22W16; Match level="QueryCoverage=71%, HitCoverage=21%, E-value=3e-08, Identity=37%"; Hit description =Putative uncharacterized protein
KVHADQLSXQQRXXEIEDLVNQVQHEFQDNVQELAKIXKESSTQIIVDFEKAISSINNXNKILYKKFAVLEGSVGKNREDLGAMISDHEHSVSRKNEQLNRAVFDICRQLNINNPLLSY

SEQ ID NO: 8533 - protein, 252 aa, Glycine max
  misc_feature (1)..(158): Xaa can be any naturally occurring amino acid
  Coding DNA Sequence Number=SeqID_5778
XXXXXXXXXXXXXXXXXXXXXXXXXXXXXXXXXXXXXXXXXXXXXXXXXXXXXXXXXXXXXXXXXXXXXXXXXXXXXXXXXXXXXXXXXXXXXXXXXXXXXXXXXXXXXXXXXXXXXXXXXXXXXXXXXXXXXXXXXXXXXXXXXXXXXXXXXXXXXXKRDKGAEWRVGGGRGPTGAKGEKRGEEGEKGGEGGREKDEKGGDKWKAGEKERDGNTVYVHHLLDYMEVNGTFCSLGDKQEMLLRKYFSSPFSP

SEQ ID NO: 8534 - protein, 94 aa, Glycine max
  Coding DNA Sequence Number=SeqID_5779
CIFRIFPSLWCVLIDAERATDILHDECVNLSQCITGLMSAESTTHITIARRSRCLTIYIIGAEDEDGWTAGHLIITHVYDAHHISIIYIYNIII

SEQ ID NO: 8535 - protein, 132 aa, Glycine max
  misc_feature (19)..(21): Xaa can be any naturally occurring amino acid
  misc_feature (24)..(24): Xaa can be any naturally occurring amino acid
  misc_feature (34)..(35): Xaa can be any naturally occurring amino acid
  misc_feature (38)..(39): Xaa can be any naturally occurring amino acid
  misc_feature (70)..(70): Xaa can be any naturally occurring amino acid
  misc_feature (99)..(99): Xaa can be any naturally occurring amino acid
  misc_feature (106)..(106): Xaa can be any naturally occurring amino acid
  Coding DNA Sequence Number=SeqID_5781
YSYTIYVLIYFTSKSVKYXXXREXCYIFRYIINXXYNXXLVLFLLHSLFSFLTFLYLLLPFLSSLRSLLXVFVAKTLCISLSILHINSSIYHSGPPTLXLTTTATXANHVPARLSRHTHKSINTQQITKCIS

SEQ ID NO: 8536 - protein, 98 aa, Glycine max
  Coding DNA Sequence Number=SeqID_5783
  Gene Ontology: Cellular component=nucleus; Biological process=mRNA processing
  Homolog annotation: Hit_ID=A7QYP7; Match level="QueryCoverage=76%, HitCoverage=13%, E-value=1e-29, Identity=84%"; Hit description =Chromosome undetermined scaffold_252, whole genome shotgun sequence
EQRKEPEKPLYQVLEEKEEKIAPGTLLGTTHTYVVNTGTQDKSGAKRVDLLRGQKSDKVDVTLLARELDAMENVLPAKYEEAREEEKDARKGGQVQEE

SEQ ID NO: 8537 - protein, 78 aa, Glycine max; identical to SEQ ID NO: 7687
  misc_feature (21)..(22): Xaa can be any naturally occurring amino acid
  misc_feature (25)..(25): Xaa can be any naturally occurring amino acid
  misc_feature (33)..(33): Xaa can be any naturally occurring amino acid
  misc_feature (52)..(52): Xaa can be any naturally occurring amino acid
  misc_feature (62)..(62): Xaa can be any naturally occurring amino acid
  Coding DNA Sequence Number=SeqID_5784
  Subcellular localization annotation: CTP_CleavageSite=42; ConfidenceScore=5.25e-01

SEQ ID NO: 8538 - protein, 66 aa, Glycine max
  Coding DNA Sequence Number=SeqID_5785
  Gene Ontology: Mol. function=hydrolase activity, hydrolyzing O -glycosyl compounds; Cellular component=cellular_component; Biological process=carbohydrate metabolic process
  Homolog annotation: Hit_ID=P83344; Match level="QueryCoverage=84%, HitCoverage=12%, E-value=2e-13, Identity=63%"; Hit description =Putative beta-D-xylosidase
AGVACGYTTPLQGIARYVKTAHQVGCRGVACRGNELFNAAETISMQADSNEWGLDQDHTINSYTKQ

SEQ ID NO: 8539 - protein, 138 aa, Glycine max
  Coding DNA Sequence Number=SeqID_5786
  Homolog annotation: Hit_ID=O64482; Match level="QueryCoverage=52%, HitCoverage=40%, E-value=2e-17, Identity=52%"; Hit description =Expressed protein
  Subcellular localization annotation: CTP_CleavageSite=50; ConfidenceScore=5.54e-01
MARSSSPSLSLSRCRFAAVSLLPSSRSIFFRSQSSNRRSNLGELIEIDVAASQSQSQSDPLSQKLEDAVHRIMVRRAAPDWLPFLPGASYWVPPRRSQSHGIAKLVEKLANPVGDEESVSVASGRGWPCSDYFIKGVE

SEQ ID NO: 8540 - protein, 177 aa, Glycine max
  misc_feature (77)..(77): Xaa can be any naturally occurring amino acid
  misc_feature (120)..(120): Xaa can be any naturally occurring amino acid
  misc_feature (126)..(126): Xaa can be any naturally occurring amino acid
  misc_feature (133)..(133): Xaa can be any naturally occurring amino acid
  Coding DNA Sequence Number=SeqID_5787
  Gene Ontology: Mol. function=triacylglycerol lipase activity; Biological process=lipid metabolic process
  Homolog annotation: Hit_ID=A7NW75; Match level="QueryCoverage=96%, HitCoverage=39%, E-value=2e-38, Identity=47%"; Hit description =Chromosome chr5 scaffold_2, whole genome shotgun sequence
MISFSDGWLIILVTCLHLLAFSDGRELKVRHKKPHYQYNHTLATILVEYASAVYLSDLTELFTWTCFKCNDWFKAFXGWPRFVMIELVVDVEHCLQAFIVVADDPIAIIIIFSGTNGHSXQNWIEXYIVYPNXTILPTILDSNDRPVDFFGDIEIIATGHSMGGAMASFCGLVLTVN

SEQ ID NO: 8541 - protein, 60 aa, Glycine max
  misc_feature (3)..(3): Xaa can be any naturally occurring amino acid
  Coding DNA Sequence Number=SeqID_5788
  Homolog annotation: Hit_ID=Q9AV95; Match level="QueryCoverage=81%, HitCoverage=7%, E-value=9e-14, Identity=79%"; Hit description =Putative uncharacterized protein
MAXESASRLTSMADSYIGSLISLTSKSEIKYKGILYHINTEESNIGLKNSILLLPTSFFL

SEQ ID NO: 8542 - protein, 142 aa, Glycine max; identical to SEQ ID NO: 7766
  Coding DNA Sequence Number=SeqID_5789

SEQ ID NO: 8543 - protein, 61 aa, Glycine max
  misc_feature (45)..(46): Xaa can be any naturally occurring amino acid
  Coding DNA Sequence Number=SeqID_5791
  Homolog annotation: Hit_ID=Q2HHA7; Match level="QueryCoverage=98%, HitCoverage=9%, E-value=4e-07, Identity=50%"; Hit description =Putative uncharacterized protein
MLIRAQVLADSFQDRFKPLTVEKPRVSPRPDGVRAMCSLGIQCLXXLANTPLIEYTLEFLA

SEQ ID NO: 8544 - protein, 156 aa, Glycine max
  misc_feature (64)..(64): Xaa can be any naturally occurring amino acid
  Coding DNA Sequence Number=SeqID_5792
RVSLLLLLNQGRGGSRMVATRVEEYNHTSCTCAPDWSAGAWLREPWRIWTCLTWWVGRSSGWRXGDGEGEVAGSCAWKGTAHPDGKGLRITGRGELSLTRVSRRVVLLRRGCICSSLSVSSFRPLSFVRTSFTRGCKRHPRSFFHAVRASPTGALN

SEQ ID NO: 8545 - protein, 128 aa, Glycine max; identical to SEQ ID NO: 7583
  misc_feature (3)..(3): Xaa can be any naturally occurring amino acid
  misc_feature (100)..(100): Xaa can be any naturally occurring amino acid
  misc_feature (116)..(116): Xaa can be any naturally occurring amino acid
  Coding DNA Sequence Number=SeqID_5794

SEQ ID NO: 8546 - protein, 135 aa, Glycine max; identical to SEQ ID NO: 6506
  misc_feature (7)..(7): Xaa can be any naturally occurring amino acid
  misc_feature (112)..(112): Xaa can be any naturally occurring amino acid
  misc_feature (123)..(123): Xaa can be any naturally occurring amino acid
  Coding DNA Sequence Number=SeqID_1202

SEQ ID NO: 8547 - protein, 185 aa, Glycine max; identical to SEQ ID NO: 6507
  misc_feature (21)..(21): Xaa can be any naturally occurring amino acid
  misc_feature (82)..(83): Xaa can be any naturally occurring amino acid
  misc_feature (87)..(87): Xaa can be any naturally occurring amino acid
  misc_feature (102)..(103): Xaa can be any naturally occurring amino acid
  misc_feature (113)..(113): Xaa can be any naturally occurring amino acid
  misc_feature (127)..(128): Xaa can be any naturally occurring amino acid
  misc_feature (138)..(138): Xaa can be any naturally occurring amino acid
  misc_feature (157)..(157): Xaa can be any naturally occurring amino acid
  misc_feature (159)..(159): Xaa can be any naturally occurring amino acid
  misc_feature (167)..(167): Xaa can be any naturally occurring amino acid
  misc_feature (170)..(170): Xaa can be any naturally occurring amino acid
  misc_feature (176)..(178): Xaa can be any naturally occurring amino acid
  misc_feature (182)..(182): Xaa can be any naturally occurring amino acid
  Coding DNA Sequence Number=SeqID_1204

SEQ ID NO: 8548 - protein, 139 aa, Glycine max
  misc_feature (56)..(56): Xaa can be any naturally occurring amino acid
  Coding DNA Sequence Number=SeqID_1206
YVSHILSHSTPLVSSRTRAWMYVQVVSTAEVRMCGRCKYRGEEGGGAGIYVSVCEXQCPIEALHERRGALRRCASASRVDGWRMSRDVERRRARGDVVSLHAPMCVSPHVWLVRDASMLRERRARSSRVLRVSAGACRP

SEQ ID NO: 8549 - protein, 126 aa, Glycine max
  misc_feature (49)..(49): Xaa can be any naturally occurring amino acid
  misc_feature (102)..(102): Xaa can be any naturally occurring amino acid
  misc_feature (107)..(107): Xaa can be any naturally occurring amino acid
  misc_feature (109)..(110): Xaa can be any naturally occurring amino acid
  misc_feature (116)..(116): Xaa can be any naturally occurring amino acid
  misc_feature (119)..(126): Xaa can be any naturally occurring amino acid
  Coding DNA Sequence Number=SeqID_1208
  Gene Ontology: Cellular component=extracellular region; Biological process=cellulose and pectin-containing cell wall organization and biogenesis
  Homolog annotation: Hit_ID=Q38864; Match level="QueryCoverage=93%, HitCoverage=46%, E-value=2e-47, Identity=76%"; Hit description =Expansin-A5 precursor
  Pfam annotation: Domain name=DPBB_1; Domain location=73-121; Score =0.6; E_value=0.0051; Accession=PF03330.8; Description=Rare lipoprotein A (RlpA)-like double-psi be
MGVLVISALLLHVLSFSVCVQGFYRRGGHHPGGHMGPWINAHATFYGGXDASGTMGGACGYGNLYGQGYGTETAALSTALFDNGLSCGACFELKCVNDPQWXIQGRXIXXTATNFXPPXXXXXXXX

SEQ ID NO: 8550 - protein, 136 aa, Glycine max
  Coding DNA Sequence Number=SeqID_1209
  Gene Ontology: Mol. function=nucleotidyltransferase activity; Biological process=DNA modification
  Homolog annotation: Hit_ID=A5ESW3; Match level="QueryCoverage=92%, HitCoverage=39%, E-value=2e-55, Identity=82%"; Hit description =Putative ardC antirestriction protein
PIGYRAPPRETGEEAAAIPFLKRFTVFNAAQCENLPAEVAAVAPPPPPGLIEPRVEALIRATGVDFRIGGNRAFYAPGPDFVMVPPPQAYFEPINWHRTALHELGHASGHPSRLGRDLGGVFGSKKYAFEELVALS

SEQ ID NO: 8551 - protein, 158 aa, Glycine max; identical to SEQ ID NO: 6512
  misc_feature (16)..(16): Xaa can be any naturally occurring amino acid
  misc_feature (63)..(63): Xaa can be any naturally occurring amino acid
  misc_feature (76)..(76): Xaa can be any naturally occurring amino acid
  misc_feature (98)..(98): Xaa can be any naturally occurring amino acid
  Coding DNA Sequence Number=SeqID_1210

SEQ ID NO: 8552 - protein, 144 aa, Glycine max
  Coding DNA Sequence Number=SeqID_1212
  Gene Ontology: Mol. function=protein binding
  Homolog annotation: Hit_ID=Q9LXC2; Match level="QueryCoverage=100%, HitCoverage=100%, E-value=5e-33, Identity=51%"; Hit description =Putative uncharacterized protein F17I14_240
  Pfam annotation: Domain name=CHCH; Domain location=96-137; Score =44.4; E_value=3.9e-10; Accession=PF06747.3; Description=CHCH domain
  Subcellular localization annotation: CTP_CleavageSite=54; ConfidenceScore=5.31e-01
MPRRSSGGGYRARPAPARPAPARARSPPPPQTVKHAPPPATAQPQRSAIGSTIADGMTWGAGNAIGHRVVDAIMGPRTIKHETVVSEAAPASPVANSMASASCDTQSKAFQECVNNYGSDISKCQFYMDMLTECKKNSGSMMAA

SEQ ID NO: 8553 - protein, 131 aa, Glycine max; identical to SEQ ID NO: 8342
  misc_feature (21)..(21): Xaa can be any naturally occurring amino acid
  misc_feature (35)..(35): Xaa can be any naturally occurring amino acid
  Coding DNA Sequence Number=SeqID_1213

SEQ ID NO: 8554 - protein, 89 aa, Glycine max
  Coding DNA Sequence Number=SeqID_1607
  Subcellular localization annotation: CTP_CleavageSite=50; ConfidenceScore=5.62e-01
FLPSSLPETPFSLPKPFLLLLLFYHSTPSPPRSLPQTLTPMLSTRSWKSRSERGREPWRWLQARGRGWQRRAPHSDLPRRFNVTMIGDF

SEQ ID NO: 8555 - protein, 220 aa, Glycine max
  misc_feature (35)..(35): Xaa can be any naturally occurring amino acid
  misc_feature (40)..(40): Xaa can be any naturally occurring amino acid
  misc_feature (70)..(70): Xaa can be any naturally occurring amino acid
  misc_feature (72)..(72): Xaa can be any naturally occurring amino acid
  Coding DNA Sequence Number=SeqID_1609
  Subcellular localization annotation: CTP_CleavageSite=49; ConfidenceScore=5.21e-01
IHKQKHKRCGALTRWLGLNLSPYSISPSCVVFLCXSAPFXVWRPCPLLCSSPIVCLFVLGYTQNKHRCVXFXFFSSHLTLTFNSSLLFCLLRYSFVFDPFPHDAGWASGPHTCATHYTLGWGGWSSLCCCAPRFVRPVRSTSPSLPSCYSARTTICALHLLTLFLADFSAWPINEGGRPHHLASRHSSLTCLVLSLLYLSLPSSPPPLLVRLSSSPSPHH

SEQ ID NO: 8556 - protein, 77 aa, Glycine max
  misc_feature (3)..(6): Xaa can be any naturally occurring amino acid
  misc_feature (21)..(21): Xaa can be any naturally occurring amino acid
  misc_feature (31)..(31): Xaa can be any naturally occurring amino acid
  misc_feature (36)..(36): Xaa can be any naturally occurring amino acid
  misc_feature (48)..(48): Xaa can be any naturally occurring amino acid
  misc_feature (54)..(54): Xaa can be any naturally occurring amino acid
  misc_feature (56)..(56): Xaa can be any naturally occurring amino acid
  Coding DNA Sequence Number=SeqID_1611
  Subcellular localization annotation: CTP_CleavageSite=28; ConfidenceScore=5.14e-01
HSXXXXSSLPNKQDPENNVRXRFFRFVCSFXRFELXCRLLFSCSIYIXPLGSRXFXDRMSLFMRYDVFFFMLQTILI

SEQ ID NO: 8557 - protein, 161 aa, Glycine max
  misc_feature (5)..(5): Xaa can be any naturally occurring amino acid
  misc_feature (11)..(11): Xaa can be any naturally occurring amino acid
  misc_feature (77)..(77): Xaa can be any naturally occurring amino acid
  Coding DNA Sequence Number=SeqID_1613
  Gene Ontology: Mol. function=nutrient reservoir activity; Cellular component=cellulose and pectin-containing cell wall; Biological process=translation
  Homolog annotation: Hit_ID=P10743; Match level="QueryCoverage=99%, HitCoverage=62%, E-value=1e-59, Identity=74%"; Hit description=Stem 31 kDa glycoprotein precursor
  Pfam annotation: Domain name=Acid_phosphat_B; Domain location=1-161; Score=86.6; E_value=7.7e-23; Accession=PF03767.5; Description=HAD superfamily, subfamily IIIB (Acid
REREXQHNDIXRGGRENTALAKIPHDEKHGEGVEESNETLYDEGANKGDAPAVPETLKKYNKLLSLGIKIEGASGRXRDKRAGTEANLKKAGFHTGEQLSLKDPQRSTPNALTDKSAKRENLLRQGYRIVGITGDQWSELRGDHRGESRTFKAPKPMYNSE

SEQ ID NO: 8558 - protein, 140 aa, Glycine max
  misc_feature (9)..(9): Xaa can be any naturally occurring amino acid
  misc_feature (21)..(21): Xaa can be any naturally occurring amino acid
  misc_feature (112)..(113): Xaa can be any naturally occurring amino acid
  misc_feature (118)..(118): Xaa can be any naturally occurring amino acid
  Coding DNA Sequence Number=SeqID_1614
PHIICILYXSIHVYTCINYTXMCNIVYRIYRMQSHIAHVVHIYASYHTDATSHERLRGIRYRSRWICVDGCRSQGGLTKRAYKRTRYKPHARQPVRPRDVRTECHNECCSLXXPRARXGERDVNISTYSSVYLYCSMRLE

SEQ ID NO: 8559 - protein, 161 aa, Glycine max; identical to SEQ ID NO: 6794
  misc_feature (1)..(1): Xaa can be any naturally occurring amino acid
  misc_feature (6)..(8): Xaa can be any naturally occurring amino acid
  misc_feature (19)..(19): Xaa can be any naturally occurring amino acid
  misc_feature (69)..(69): Xaa can be any naturally occurring amino acid
  misc_feature (75)..(76): Xaa can be any naturally occurring amino acid
  misc_feature (78)..(78): Xaa can be any naturally occurring amino acid
  misc_feature (83)..(83): Xaa can be any naturally occurring amino acid
  misc_feature (89)..(89): Xaa can be any naturally occurring amino acid
  misc_feature (108)..(108): Xaa can be any naturally occurring amino acid
  misc_feature (120)..(120): Xaa can be any naturally occurring amino acid
  misc_feature (133)..(133): Xaa can be any naturally occurring amino acid
  misc_feature (148)..(149): Xaa can be any naturally occurring amino acid
  misc_feature (158)..(159): Xaa can be any naturally occurring amino acid
  Coding DNA Sequence Number=SeqID_1616

SEQ ID NO: 8560 - protein, 139 aa, Glycine max
  Coding DNA Sequence Number=SeqID_1618
  Gene Ontology: Mol. function=catalytic activity; Cellular component =mitochondrion; Biological process=metabolic process
  Homolog annotation: Hit_ID=Q9LEV3; Match level="QueryCoverage=100%, HitCoverage=67%, E-value=2e-66, Identity=90%"; Hit description =Uncharacterized protein At5g10860, mitochondrial precursor
  Subcellular localization annotation: CTP_CleavageSite=38; ConfidenceScore=5.35e-01
MQAVIRSFVSGGNVVRSSLLQHLRVVNPAIQPSVLSTRSESTQPARMEEHGFESTTISDVMNAKGKSADGSWLWCTTDDSVYDAVKSMTQHNVGALVVVKPGEQQSLAGIITERDYLRKIIVQGRSSKSTKVGDIMTEE

SEQ ID NO: 8561 - protein, 119 aa, Glycine max
  misc_feature (8)..(8): Xaa can be any naturally occurring amino acid
  misc_feature (11)..(11): Xaa can be any naturally occurring amino acid
  misc_feature (21)..(21): Xaa can be any naturally occurring amino acid
  misc_feature (51)..(51): Xaa can be any naturally occurring amino acid
  misc_feature (72)..(72): Xaa can be any naturally occurring amino acid
  misc_feature (76)..(77): Xaa can be any naturally occurring amino acid
  misc_feature (107)..(107): Xaa can be any naturally occurring amino acid
  Coding DNA Sequence Number=SeqID_1619
EHDAVSAXYDXARPRTSHQSXKRQTSVDRHTPIRARFYRSHVPDSHPTVSXAHASTRREHYVATQSCGAEGXALHXXSPRSVSAQHNTRLRDQHMRELSRDNSRLLXWRGSVVPCAECV

SEQ ID NO: 8562 - protein, 139 aa, Glycine max
  Coding DNA Sequence Number=SeqID_5796
  Gene Ontology: Mol. function=hydrolase activity, hydrolyzing O -glycosyl compounds; Cellular component=cellulose and pectin -containing cell wall; Biological process=carbohydrate metabolic process
  Homolog annotation: Hit_ID=A8TVQ9; Match level="QueryCoverage=99%, HitCoverage=27%, E-value=7e-49, Identity=65%"; Hit description=Beta -glucosidase G3
  Pfam annotation: Domain name=Glyco_hydro_1; Domain location=2-140; Score=-300.4; E_value=0.0013; Accession=PF00232.9; Description =Glycosyl hydrolase family 1
MTDQRDGRVLCPYAASNWLCVYPRGLRQLLLYIKKQYNSPVIYITESGYDELNDPTLSLEESMIDTYRVDYFYRYLYYLQMAIRDGVNVKGYFVWSLLDNMEWSAGYTVRFGLVFVDYKDGLKRYLKLSAQWFKNFLNK

SEQ ID NO: 8563 - protein, 112 aa, Glycine max; identical to SEQ ID NO: 7585
  misc_feature (29)..(29): Xaa can be any naturally occurring amino acid
  misc_feature (31)..(32): Xaa can be any naturally occurring amino acid
  misc_feature (39)..(39): Xaa can be any naturally occurring amino acid
  misc_feature (59)..(60): Xaa can be any naturally occurring amino acid
  misc_feature (64)..(64): Xaa can be any naturally occurring amino acid
  misc_feature (76)..(76): Xaa can be any naturally occurring amino acid
  misc_feature (95)..(95): Xaa can be any naturally occurring amino acid
  misc_feature (97)..(97): Xaa can be any naturally occurring amino acid
  misc_feature (102)..(102): Xaa can be any naturally occurring amino acid
  misc_feature (105)..(105): Xaa can be any naturally occurring amino acid
  Coding DNA Sequence Number=SeqID_5797

SEQ ID NO: 8564 - protein, 154 aa, Glycine max
  misc_feature (39)..(40): Xaa can be any naturally occurring amino acid
  misc_feature (42)..(42): Xaa can be any naturally occurring amino acid
  misc_feature (63)..(63): Xaa can be any naturally occurring amino acid
  misc_feature (83)..(83): Xaa can be any naturally occurring amino acid
  misc_feature (91)..(91): Xaa can be any naturally occurring amino acid
  misc_feature (99)..(99): Xaa can be any naturally occurring amino acid
  misc_feature (110)..(110): Xaa can be any naturally occurring amino acid
  misc_feature (128)..(128): Xaa can be any naturally occurring amino acid
  Coding DNA Sequence Number=SeqID_5799
  Gene Ontology: Mol. function=structural constituent of ribosome; Cellular component=ribonucleoprotein complex; Biological process =translation
  Homolog annotation: Hit_ID=P31674; Match level="QueryCoverage=87%, HitCoverage=88%, E-value=5e-15, Identity=41%"; Hit description=40S ribosomal protein S15
  Pfam annotation: Domain name=Ribosomal_S19; Domain location=55-133; Score=7.2; E_value=6.6e-05; Accession=PF00203.11; Description =Ribosomal protein S19
MADVDVDPEVAAAGPKKRTFRKFSYRGVDLDALLDMSSXXTXVGLFPARARRRSRGSEEEAMXLVRSCAGRKRAPAGEKLSSXDPPRNMIXMPEMIGAXLGIYQGRAFTXEIKPKMLGTNWEKFPLSXNPGKNGGPGYRAPPPSGVFPPQGENG

SEQ ID NO: 8565 - protein, 197 aa, Glycine max
  misc_feature (103)..(103): Xaa can be any naturally occurring amino acid
  misc_feature (188)..(188): Xaa can be any naturally occurring amino acid
  Coding DNA Sequence Number=SeqID_5800
  Gene Ontology: Mol. function=acetate-CoA ligase activity; Cellular component=mitochondrion; Biological process=metabolic process
  Homolog annotation: Hit_ID=A0R3A6; Match level="QueryCoverage=91%, HitCoverage=29%, E-value=7e-56, Identity=58%"; Hit description =Propionate--CoA ligase
QLRRPPPPIIYMPMIPEVIFSMQATARVGAIHSVVFGGFGAPELAGRIQDLKPKVVLLASCGIEPNKVVDYKKILDEALKLAAIPNIKKILVQREMYKVPMIXGEDFDYYEELAQAKPMDPVPVDGSDYLYILYTSGTTGQPKGIVRENGGNAVALCYTMKYLFGITENDVFFCAADVGWVTGHSYIXYAPLLIGAT

SEQ ID NO: 8566 - protein, 139 aa, Glycine max; identical to SEQ ID NO: 7847
  misc_feature (2)..(2): Xaa can be any naturally occurring amino acid
  misc_feature (12)..(12): Xaa can be any naturally occurring amino acid
  misc_feature (27)..(27): Xaa can be any naturally occurring amino acid
  misc_feature (38)..(38): Xaa can be any naturally occurring amino acid
  misc_feature (63)..(63): Xaa can be any naturally occurring amino acid
  misc_feature (85)..(85): Xaa can be any naturally occurring amino acid
  misc_feature (90)..(90): Xaa can be any naturally occurring amino acid
  misc_feature (111)..(111): Xaa can be any naturally occurring amino acid
  misc_feature (126)..(126): Xaa can be any naturally occurring amino acid
  misc_feature (133)..(133): Xaa can be any naturally occurring amino acid
  misc_feature (135)..(135): Xaa can be any naturally occurring amino acid
  Coding DNA Sequence Number=SeqID_5801

SEQ ID NO: 8567 - protein, 93 aa, Glycine max; identical to SEQ ID NO: 7588
  Coding DNA Sequence Number=SeqID_5803

SEQ ID NO: 8568 - protein, 198 aa, Glycine max
  misc_feature (187)..(187): Xaa can be any naturally occurring amino acid
  misc_feature (198)..(198): Xaa can be any naturally occurring amino acid
  Coding DNA Sequence Number=SeqID_5805
  Homolog annotation: Hit_ID=Q6Z441; Match level="QueryCoverage=97%, HitCoverage=28%, E-value=2e-64, Identity=64%"; Hit description =Putative pathogenesis related homeodomain protein PRHA
APPPAHLGTSLTVMCPSKDIFKEATKQMDSEDGLGEDWLSEYSGDEDYDPEENDFTSSSLDSGEESISDQSNCSGSPLYSPNDDIPGFISADFTDAEGFYHTNSNLGIDSDDDDVAEMLTYQRPKREEMFGKLTENEKQSEDEDWGTNNRRKKRRVDSAGVGVKSAEGSLDVKSNEKAQPQRRKLFXIPPEAVQVLRX

SEQ ID NO: 8569 - protein, 204 aa, Glycine max
  misc_feature (16)..(16): Xaa can be any naturally occurring amino acid
  misc_feature (74)..(74): Xaa can be any naturally occurring amino acid
  misc_feature (171)..(171): Xaa can be any naturally occurring amino acid
  misc_feature (180)..(180): Xaa can be any naturally occurring amino acid
  Coding DNA Sequence Number=SeqID_5806
  Gene Ontology: Mol. function=sugar:hydrogen symporter activity; Cellular component=membrane; Biological process=carbohydrate transport
  Homolog annotation: Hit_ID=A9PBN5; Match level="QueryCoverage=98%, HitCoverage=58%, E-value=6e-66, Identity=63%"; Hit description =Putative uncharacterized protein
MEESFVFQWSVIRSLXLSILQWWAFNVTVIIVNKWIFQKLDFKFPLSGSCVHFICSSIGAYVVFKLLKLKPLIXVTPEDRWRRILPMAFGFSITIVLGNVSLRYFPVYLLCFYTSFPPEPQVCFAWLVGKKYFDWGFWAPLIPIGGGFLLHLEKSFNFKRLGFRGALFGVXANSKKTIFXKSLLVGKNFERINPGFLMWPFFEP

SEQ ID NO: 8570 - protein, 135 aa, Glycine max
  misc_feature (10)..(10): Xaa can be any naturally occurring amino acid
  misc_feature (12)..(13): Xaa can be any naturally occurring amino acid
  misc_feature (21)..(21): Xaa can be any naturally occurring amino acid
  misc_feature (28)..(28): Xaa can be any naturally occurring amino acid
  misc_feature (33)..(33): Xaa can be any naturally occurring amino acid
  misc_feature (35)..(36): Xaa can be any naturally occurring amino acid
  misc_feature (52)..(52): Xaa can be any naturally occurring amino acid
  misc_feature (54)..(54): Xaa can be any naturally occurring amino acid
  misc_feature (69)..(69): Xaa can be any naturally occurring amino acid
  misc_feature (99)..(99): Xaa can be any naturally occurring amino acid
  misc_feature (105)..(105): Xaa can be any naturally occurring amino acid
  misc_feature (120)..(120): Xaa can be any naturally occurring amino acid
  Coding DNA Sequence Number=SeqID_5807
TRMHSRNVSXAXXQIVYGVYXQCGEQRXVCLLXNXXTITSLSSEREVWTGLXSXRIRQISTRRCHHRYXPDRSTASQYLSSLAVVVRAHRTSATSAGVXRSHITXDCSEVSDVIGVMKGXGASHYPTSHAAQIHR

SEQ ID NO: 8571 - protein, 258 aa, Glycine max
  Coding DNA Sequence Number=SeqID_5809
  Gene Ontology: Mol. function=sequence-specific DNA binding; Cellular component=nucleus; Biological process=regulation of transcription, DNA-dependent
  Homolog annotation: Hit_ID=Q9LZV6; Match level="QueryCoverage=100%, HitCoverage=99%, E-value=7e-93, Identity=69%"; Hit description =Probable WRKY transcription factor 62
  Pfam annotation: Domain name=WRKY; Domain location=113-175; Score =91.3; E_value=3.1e-24; Accession=PF03106.6; Description=WRKY DNA -binding domain
MESCQQKVMEKLLHGHGCANQLKLIMDHHAESDSSVEREDLAKSVLHCFSDALSILIDTNDHNKDDDKSNNSSPQDSSHVLESSRKPFHKRGRKTSMAESSDYRRHESPNPIYHDGFLWRKYGQKQIKESDHQRSYYKCAYTNDQKCEAKKQVQMIQNNPPLYSTTYFGRHTCQLHQAFETFPIDTSDPQDSRMIRFDNPDSSTHQHQNQIIHLKAEQMMPSEKAEEWSSPSEYMSSEVAYAVEAFGFNPARTSSDLS

SEQ ID NO: 8572 - protein, 128 aa, Glycine max; identical to SEQ ID NO: 7593
  misc_feature (1)..(1): Xaa can be any naturally occurring amino acid
  misc_feature (21)..(21): Xaa can be any naturally occurring amino acid
  misc_feature (24)..(24): Xaa can be any naturally occurring amino acid
  misc_feature (46)..(47): Xaa can be any naturally occurring amino acid
  misc_feature (52)..(52): Xaa can be any naturally occurring amino acid
  misc_feature (57)..(57): Xaa can be any naturally occurring amino acid
  misc_feature (66)..(66): Xaa can be any naturally occurring amino acid
  misc_feature (69)..(69): Xaa can be any naturally occurring amino acid
  misc_feature (88)..(88): Xaa can be any naturally occurring amino acid
  misc_feature (98)..(98): Xaa can be any naturally occurring amino acid
  Coding DNA Sequence Number=SeqID_5810

SEQ ID NO: 8573 - protein, 82 aa, Glycine max
  Coding DNA Sequence Number=SeqID_5812
RREYKEREEGNFELIIKRGEDIEGGEVVWRGRLRSTSNFHYQNLRGGMRKREKYEGVNIAAKRGENNHIFIRERWFIARVYK

SEQ ID NO: 8574 - protein, 144 aa, Glycine max
  Coding DNA Sequence Number=SeqID_5814
  Gene Ontology: Mol. function=oxidoreductase activity; Cellular component=nucleus; Biological process=regulation of transcription, DNA-dependent
  Homolog annotation: Hit_ID=O60341; Match level="QueryCoverage=94%, HitCoverage=15%, E-value=1e-20, Identity=45%"; Hit description =Lysine-specific histone demethylase 1
  Subcellular localization annotation: CTP_CleavageSite=64; ConfidenceScore=5.83e-01
MLTTKKSESTGGGDNGSDPQPPASSSSSSSSSSSSSSSSGIMASPDTGAGLERTPRKKERASPGAEHGSSSAPGIMAGGEGRQPETPEGRRTSRRKRAKVEYREMDESLANLSKDEYYSEEERNAKAEREKKVPPASSQAPPEE

SEQ ID NO: 8575 - protein, 108 aa, Glycine max; identical to SEQ ID NO: 7599
  misc_feature (71)..(72): Xaa can be any naturally occurring amino acid
  misc_feature (87)..(87): Xaa can be any naturally occurring amino acid
  misc_feature (95)..(95): Xaa can be any naturally occurring amino acid
  misc_feature (105)..(108): Xaa can be any naturally occurring amino acid
  Coding DNA Sequence Number=SeqID_5815

SEQ ID NO: 8576 - protein, 155 aa, Glycine max
  Coding DNA Sequence Number=SeqID_5817
  Gene Ontology: Cellular component=cytoplasmic vesicle; Biological process=response to biotic stimulus
  Homolog annotation: Hit_ID=Q9SXL8; Match level="QueryCoverage=92%, HitCoverage=95%, E-value=5e-34, Identity=48%"; Hit description=Csf-2 protein
  Pfam annotation: Domain name=Bet_v_I; Domain location=4-153; Score =185.9; E_value=1e-52; Accession=PF00407.9; Description=Pathogenesis -related protein Bet v I family
MAYSQLQKLEANVSIKASAEQFYDVLCHKTHQIPKIFPEKALSVEILKGAWGTEGSIISWNYLYEGKVCVAKEVIEGIDKKNKKMSFKVIEGDVLGHYKSFKFIMQVTPKEKGSVVQCVVEYEKQKDHIPDPHTLLQSTVELCKKINAYLTQDNN

SEQ ID NO: 8577 - protein, 131 aa, Glycine max; identical to SEQ ID NO: 7925
  misc_feature (22)..(22): Xaa can be any naturally occurring amino acid
  misc_feature (41)..(41): Xaa can be any naturally occurring amino acid
  misc_feature (45)..(46): Xaa can be any naturally occurring amino acid
  misc_feature (53)..(53): Xaa can be any naturally occurring amino acid
  misc_feature (67)..(67): Xaa can be any naturally occurring amino acid
  misc_feature (73)..(73): Xaa can be any naturally occurring amino acid
  misc_feature (91)..(92): Xaa can be any naturally occurring amino acid
  misc_feature (95)..(96): Xaa can be any naturally occurring amino acid
  misc_feature (103)..(103): Xaa can be any naturally occurring amino acid
  misc_feature (109)..(109): Xaa can be any naturally occurring amino acid
  misc_feature (130)..(130): Xaa can be any naturally occurring amino acid
  Coding DNA Sequence Number=SeqID_5818

SEQ ID NO: 8578 - protein, 155 aa, Glycine max
  Coding DNA Sequence Number=SeqID_5820
  Gene Ontology: Mol. function=structural constituent of cuticle; Cellular component=lipid particle
  Homolog annotation: Hit_ID=Q16PW8; Match level="QueryCoverage=41%, HitCoverage=46%, E-value=2e-17, Identity=67%"; Hit description=Pupal cuticle protein, putative
  Pfam annotation: Domain name=Chitin_bind_4; Domain location=49-115; Score=75.1; E_value=2.3e-19; Accession=PF00379.13; Description =Insect cuticle protein
MAFKVIVALSVLAVAAALPQYHSGYAPAPKYAPAPAPAYKSYAPKYEEPAPAHPKYEFEYSVNDPHTYDIKSQKESRDGDYVKGVYELVEPDGSKRIVEYSDDGYGFQAVVHKEAGKGYAAPAYSAPAPAYAAPAYSAPSYSAPKYSPAPSYSKY

SEQ ID NO: 8579 - protein, 205 aa, Glycine max
  misc_feature (20)..(20): Xaa can be any naturally occurring amino acid
  misc_feature (86)..(86): Xaa can be any naturally occurring amino acid
  misc_feature (96)..(96): Xaa can be any naturally occurring amino acid
  misc_feature (107)..(107): Xaa can be any naturally occurring amino acid
  misc_feature (118)..(120): Xaa can be any naturally occurring amino acid
  misc_feature (123)..(123): Xaa can be any naturally occurring amino acid
  misc_feature (143)..(143): Xaa can be any naturally occurring amino acid
  misc_feature (159)..(159): Xaa can be any naturally occurring amino acid
  misc_feature (164)..(164): Xaa can be any naturally occurring amino acid
  misc_feature (170)..(170): Xaa can be any naturally occurring amino acid
  misc_feature (172)..(172): Xaa can be any naturally occurring amino acid
  Coding DNA Sequence Number=SeqID_5821
AIYSTTLIRTNMVICCDGTXRFEGGLVICFDLCCYCSYDICIIGIDENVRLSVPRDHIYMFYRVMLYVICSRLSCEIYYEMGYSVXTTPRSMSACXCLPRPSRARVXMCCSEMLTGKXXXIFXPRLLPLYDVIELDQSISYSXLTPLPIIILRDSIRYXSLSPXSMRCGXAXVMYYLCMWWCVMCPLDRVSCRALVITYSDRTHE

SEQ ID NO: 8580 - protein, 202 aa, Glycine max; identical to SEQ ID NO: 7613
  misc_feature (51)..(51): Xaa can be any naturally occurring amino acid
  misc_feature (90)..(90): Xaa can be any naturally occurring amino acid
  misc_feature (159)..(159): Xaa can be any naturally occurring amino acid
  misc_feature (197)..(197): Xaa can be any naturally occurring amino acid
  Coding DNA Sequence Number=SeqID_5823

SEQ ID NO: 8581 - protein, 116 aa, Glycine max; identical to SEQ ID NO: 7615
  misc_feature (62)..(63): Xaa can be any naturally occurring amino acid
  misc_feature (91)..(91): Xaa can be any naturally occurring amino acid
  misc_feature (105)..(105): Xaa can be any naturally occurring amino acid
  misc_feature (109)..(109): Xaa can be any naturally occurring amino acid
  Coding DNA Sequence Number=SeqID_5825

SEQ ID NO: 8582 - protein, 140 aa, Glycine max; identical to SEQ ID NO: 7617
  misc_feature (15)..(15): Xaa can be any naturally occurring amino acid
  misc_feature (38)..(38): Xaa can be any naturally occurring amino acid
  misc_feature (70)..(70): Xaa can be any naturally occurring amino acid
  misc_feature (87)..(87): Xaa can be any naturally occurring amino acid
  misc_feature (103)..(103): Xaa can be any naturally occurring amino acid
  misc_feature (120)..(120): Xaa can be any naturally occurring amino acid
  misc_feature (130)..(130): Xaa can be any naturally occurring amino acid
  misc_feature (136)..(136): Xaa can be any naturally occurring amino acid
  misc_feature (140)..(140): Xaa can be any naturally occurring amino acid
  Coding DNA Sequence Number=SeqID_5827

SEQ ID NO: 8583 - protein, 67 aa, Glycine max
  misc_feature (13)..(13): Xaa can be any naturally occurring amino acid
  misc_feature (16)..(16): Xaa can be any naturally occurring amino acid
  misc_feature (18)..(18): Xaa can be any naturally occurring amino acid
  misc_feature (24)..(24): Xaa can be any naturally occurring amino acid
  misc_feature (29)..(29): Xaa can be any naturally occurring amino acid
  misc_feature (36)..(36): Xaa can be any naturally occurring amino acid
  misc_feature (39)..(40): Xaa can be any naturally occurring amino acid
  Coding DNA Sequence Number=SeqID_5829
  Homolog annotation: Hit_ID=A2Y2N4; Match level="QueryCoverage=100%, HitCoverage=19%, E-value=7e-12, Identity=61%"; Hit description =Putative uncharacterized protein
VNEEIEQNIQMTXEIXSXIVQHSXETEKXYLNKESXLTXXVSVTELELNGLIQVANSMGIANMLKMM

SEQ ID NO: 8584 - protein, 139 aa, Glycine max
  misc_feature (3)..(3): Xaa can be any naturally occurring amino acid
  misc_feature (51)..(51): Xaa can be any naturally occurring amino acid
  misc_feature (58)..(58): Xaa can be any naturally occurring amino acid
  misc_feature (96)..(96): Xaa can be any naturally occurring amino acid
  misc_feature (132)..(132): Xaa can be any naturally occurring amino acid
  Coding DNA Sequence Number=SeqID_5830
CRXHTSYTNLIISASFIDLRWHHVAVILAICCSSDCGSIFLSLSSGVVLCXFTYMLSXSRASTFLLSSSVRPAGLHLLISNEYVFSLHDRTARLYXPRTRPGLGVSASYHSFSSRLPHTARERAGPTLHMSXRHLSSIA

SEQ ID NO: 8585 - protein, 75 aa, Glycine max
  Coding DNA Sequence Number=SeqID_5832
  Subcellular localization annotation: CTP_CleavageSite=56; ConfidenceScore=5.22e-01
SPSLCIIVPSVSEDAPSSYTPYTNKTHDQKLKLQFLTSQSHNSHTSLSLSSLSLCVSFTPFDSQPITVSTNPLTP

SEQ ID NO: 8586 - protein, 123 aa, Glycine max
  misc_feature (3)..(3): Xaa can be any naturally occurring amino acid
  misc_feature (14)..(14): Xaa can be any naturally occurring amino acid
  misc_feature (20)..(20): Xaa can be any naturally occurring amino acid
  misc_feature (23)..(23): Xaa can be any naturally occurring amino acid
  misc_feature (28)..(28): Xaa can be any naturally occurring amino acid
  misc_feature (41)..(41): Xaa can be any naturally occurring amino acid
  misc_feature (51)..(51): Xaa can be any naturally occurring amino acid
  misc_feature (54)..(54): Xaa can be any naturally occurring amino acid
  misc_feature (72)..(72): Xaa can be any naturally occurring amino acid
  misc_feature (84)..(84): Xaa can be any naturally occurring amino acid
  misc_feature (87)..(87): Xaa can be any naturally occurring amino acid
  misc_feature (109)..(110): Xaa can be any naturally occurring amino acid
  misc_feature (119)..(119): Xaa can be any naturally occurring amino acid
  Coding DNA Sequence Number=SeqID_5833
CRXVVTLLLYDHTXERHSYXHTXSVCDXMYTISSRQKQNHXMLSHEKSTSXRHXRIYKYDYMDVLTTNQLRXARSERYCLVLYXHVXICDVCTNVCETRESALYTVSPXXMSTYIDARXSYAW

SEQ ID NO: 8587 - protein, 197 aa, Glycine max
  Coding DNA Sequence Number=SeqID_5835
DRDTSRHTRTHRAGDRRIVMASSAVSHSHGGQHQQHLPAAAGSMMARVDRLDLVVGYLEEMRHHSGGSGRSSTTATSTLSSSSPTTPRSSRPHGCRPAEELLREAKAKGSLVERIAFLEDRVLRMEEERMDLSSSMDTAEQTTPTSSGRRTMRMMMSGSGGAGDEHGSGGSGKKGKKGLKSLVKSCVRAGAKLKTKE

SEQ ID NO: 8588 - protein, 307 aa, Glycine max; identical to SEQ ID NO: 8006
  misc_feature (13)..(13): Xaa can be any naturally occurring amino acid
  misc_feature (16)..(17): Xaa can be any naturally occurring amino acid
  misc_feature (32)..(33): Xaa can be any naturally occurring amino acid
  misc_feature (52)..(52): Xaa can be any naturally occurring amino acid
  misc_feature (61)..(62): Xaa can be any naturally occurring amino acid
  misc_feature (65)..(65): Xaa can be any naturally occurring amino acid
  misc_feature (69)..(69): Xaa can be any naturally occurring amino acid
  misc_feature (86)..(86): Xaa can be any naturally occurring amino acid
  misc_feature (101)..(101): Xaa can be any naturally occurring amino acid
  misc_feature (115)..(115): Xaa can be any naturally occurring amino acid
  misc_feature (120)..(120): Xaa can be any naturally occurring amino acid
  misc_feature (128)..(129): Xaa can be any naturally occurring amino acid
  misc_feature (142)..(142): Xaa can be any naturally occurring amino acid
  misc_feature (160)..(160): Xaa can be any naturally occurring amino acid
  misc_feature (163)..(163): Xaa can be any naturally occurring amino acid
  misc_feature (176)..(176): Xaa can be any naturally occurring amino acid
  misc_feature (180)..(180): Xaa can be any naturally occurring amino acid
  misc_feature (182)..(182): Xaa can be any naturally occurring amino acid
  misc_feature (214)..(214): Xaa can be any naturally occurring amino acid
  misc_feature (231)..(231): Xaa can be any naturally occurring amino acid
  misc_feature (233)..(233): Xaa can be any naturally occurring amino acid
  misc_feature (268)..(268): Xaa can be any naturally occurring amino acid
  misc_feature (272)..(272): Xaa can be any naturally occurring amino acid
  misc_feature (274)..(275): Xaa can be any naturally occurring amino acid
  misc_feature (289)..(289): Xaa can be any naturally occurring amino acid
  misc_feature (295)..(295): Xaa can be any naturally occurring amino acid
  misc_feature (297)..(297): Xaa can be any naturally occurring amino acid
  Coding DNA Sequence Number=SeqID_5836

SEQ ID NO: 8589 - protein, 107 aa, Glycine max
  Coding DNA Sequence Number=SeqID_5838
HILGLLPFLFLHSFSDPWIHPNLLLDPAKGGGRGEKGDLRRSAVAAGSRRRQVLQLDHTFLLLAAAVHWMAMELGPFELERWLSSRESTGGGRSWASYLLLWQLPPM

SEQ ID NO: 8590 - protein, 107 aa, Glycine max; identical to SEQ ID NO: 8078
  misc_feature (58)..(58): Xaa can be any naturally occurring amino acid
  Coding DNA Sequence Number=SeqID_5840
  Subcellular localization annotation: CTP_CleavageSite=19; ConfidenceScore=5.18e-01

SEQ ID NO: 8591 - protein, 127 aa, Glycine max; identical to SEQ ID NO: 8159
  misc_feature (2)..(2): Xaa can be any naturally occurring amino acid
  misc_feature (45)..(45): Xaa can be any naturally occurring amino acid
  misc_feature (59)..(59): Xaa can be any naturally occurring amino acid
  misc_feature (63)..(63): Xaa can be any naturally occurring amino acid
  Coding DNA Sequence Number=SeqID_5842

SEQ ID NO: 8592 - protein, 169 aa, Glycine max
  misc_feature (83)..(83): Xaa can be any naturally occurring amino acid
  misc_feature (111)..(111): Xaa can be any naturally occurring amino acid
  misc_feature (119)..(119): Xaa can be any naturally occurring amino acid
  misc_feature (137)..(137): Xaa can be any naturally occurring amino acid
  Coding DNA Sequence Number=SeqID_5844
  Gene Ontology: Mol. function=nucleotide binding; Cellular component =cytoplasm; Biological process=response to stress
  Homolog annotation: Hit_ID=Q43532; Match level="QueryCoverage=99%, HitCoverage=25%, E-value=1e-49, Identity=61%"; Hit description=HSP70
YHFVHECMRNHKKDISGHPKALMRLRTACERANRTLLSTAQTTIEIDSLYDGADFYTTITPATFDELIIDLFYTHMQPVTKCXTDAKMDKSTAHDDVLASGSTRMPKVQLXIPDSFTAXDLCLIITPDEAGAYRAAXQAAIETLDRNKNEHDLMVVDVTPLSLGSETAG

SEQ ID NO: 8593 - protein, 112 aa, Glycine max
  misc_feature (7)..(7): Xaa can be any naturally occurring amino acid
  misc_feature (9)..(9): Xaa can be any naturally occurring amino acid
  misc_feature (11)..(11): Xaa can be any naturally occurring amino acid
  Coding DNA Sequence Number=SeqID_553
TIIIFLXCXTXLLLPTIDARERPHAPPRGEARLSHYTEEEITHPATRGRRENSIILVLFLVRAVSVLSVVYLFSCSLSIATPHRSNLGRVITRVWRTAAAAPINHTSPPRVE

SEQ ID NO: 8594 - protein, 113 aa, Glycine max
  misc_feature (29)..(29): Xaa can be any naturally occurring amino acid
  misc_feature (33)..(33): Xaa can be any naturally occurring amino acid
  misc_feature (35)..(35): Xaa can be any naturally occurring amino acid
  misc_feature (39)..(40): Xaa can be any naturally occurring amino acid
  misc_feature (42)..(44): Xaa can be any naturally occurring amino acid
  misc_feature (50)..(51): Xaa can be any naturally occurring amino acid
  misc_feature (64)..(64): Xaa can be any naturally occurring amino acid
  misc_feature (66)..(66): Xaa can be any naturally occurring amino acid
  misc_feature (82)..(82): Xaa can be any naturally occurring amino acid
  misc_feature (86)..(86): Xaa can be any naturally occurring amino acid
  misc_feature (93)..(93): Xaa can be any naturally occurring amino acid
  Coding DNA Sequence Number=SeqID_555
ASIYDSAIASSAVDERVACLSTSILRSSXHTVXSXYDTXXTXXXDSTSPXXKLDQTDIHHVKLXSXAYEVYCGLSHVAYYYXTISXCLALKIXTTMHLVYSSYIREHLRHVTV

SEQ ID NO: 8595 - protein, 171 aa, Glycine max
  misc_feature (134)..(134): Xaa can be any naturally occurring amino acid
  misc_feature (141)..(141): Xaa can be any naturally occurring amino acid
  misc_feature (147)..(147): Xaa can be any naturally occurring amino acid
  Coding DNA Sequence Number=SeqID_557
IRNTLARRSRSPPHLRYNIHFLSFSLLVLMDLGILSHSYLHSLYSLFSTRYYLFSPRTPPSSPHLSPLPPPPPAPLYTFIPSPLALTPHTIYTTQPSPHPTHKHTISPTSIPLIYITPHTLQQYITNRLLTRSXISFRPRXSHASLXYHSFSSLFSDPPTPLVIYYVLYTD

SEQ ID NO: 8596 - protein, 104 aa, Glycine max
  misc_feature (81)..(81): Xaa can be any naturally occurring amino acid
  Coding DNA Sequence Number=SeqID_559
  Subcellular localization annotation: CTP_CleavageSite=69; ConfidenceScore=5.19e-01
KAYMGGRDPPRPPRVYLGPPQPPTKGSTFLFPQPNPFQDLVARKMFLPIPGELSTEGGLTCNSVAAESRAFRRSSLYTYIXSAFPFVGQRCFCHSITSPISSKM

SEQ ID NO: 8597 - protein, 112 aa, Glycine max
  misc_feature (96)..(96): Xaa can be any naturally occurring amino acid
  Coding DNA Sequence Number=SeqID_561
  Gene Ontology: Mol. function=DNA photolyase activity; Biological process=DNA repair
  Homolog annotation: Hit_ID=Q6EAM9; Match level="QueryCoverage=99%, HitCoverage=17%, E-value=2e-36, Identity=69%"; Hit description =Cryptochrome 2A apoprotein
  Pfam annotation: Domain name=DNA_photolyase; Domain location=4-109; Score=8.5; E_value=1.4e-06; Accession=PF00875.8; Description=DNA photolyase
MGSNRTIVWFRRDLRIEDNPALTAAAKEGSVLPEYVWCPKEEGQFYPVRVSRWWLKLSLAHLDQSLISVGPGLVLSKTLSTAIAAVVVRKALKAGXIGRIHRYDPVTLVLDP

SEQ ID NO: 8598 - protein, 172 aa, Glycine max
  misc_feature (2)..(4): Xaa can be any naturally occurring amino acid
  misc_feature (6)..(6): Xaa can be any naturally occurring amino acid
  misc_feature (8)..(9): Xaa can be any naturally occurring amino acid
  misc_feature (11)..(13): Xaa can be any naturally occurring amino acid
  misc_feature (26)..(26): Xaa can be any naturally occurring amino acid
  misc_feature (33)..(33): Xaa can be any naturally occurring amino acid
  misc_feature (37)..(37): Xaa can be any naturally occurring amino acid
  misc_feature (42)..(42): Xaa can be any naturally occurring amino acid
  misc_feature (50)..(50): Xaa can be any naturally occurring amino acid
  misc_feature (52)..(55): Xaa can be any naturally occurring amino acid
  misc_feature (57)..(57): Xaa can be any naturally occurring amino acid
  misc_feature (67)..(68): Xaa can be any naturally occurring amino acid
  misc_feature (77)..(78): Xaa can be any naturally occurring amino acid
  misc_feature (81)..(81): Xaa can be any naturally occurring amino acid
  misc_feature (84)..(86): Xaa can be any naturally occurring amino acid
  misc_feature (90)..(90): Xaa can be any naturally occurring amino acid
  misc_feature (92)..(92): Xaa can be any naturally occurring amino acid
  misc_feature (97)..(97): Xaa can be any naturally occurring amino acid
  misc_feature (102)..(102): Xaa can be any naturally occurring amino acid
  misc_feature (106)..(107): Xaa can be any naturally occurring amino acid
  misc_feature (110)..(110): Xaa can be any naturally occurring amino acid
  misc_feature (112)..(112): Xaa can be any naturally occurring amino acid
  misc_feature (117)..(117): Xaa can be any naturally occurring amino acid
  misc_feature (123)..(123): Xaa can be any naturally occurring amino acid
  misc_feature (133)..(133): Xaa can be any naturally occurring amino acid
  misc_feature (141)..(141): Xaa can be any naturally occurring amino acid
  misc_feature (143)..(144): Xaa can be any naturally occurring amino acid
  misc_feature (149)..(149): Xaa can be any naturally occurring amino acid
  Coding DNA Sequence Number=SeqID_562
  Subcellular localization annotation: CTP_CleavageSite=32; ConfidenceScore=5.04e-01
CXXXHXAXXYXXXLRMSIPISKRRRXRHTRTRXRYAXADVPXAPLALVRXAXXXXSXPCLFCLVLGXXSSFSLSVSXXLAXSMXXXAALXCXLLSPXYSCVXSDAXXRHXLXLCCSXHNDRPXHGLKALVPSXRDTASHSXPXXYHTSXSFIIQYPHHLYTTSSTTSRLLSI

SEQ ID NO: 8599 - protein, 148 aa, Glycine max
  misc_feature (16)..(16): Xaa can be any naturally occurring amino acid
  misc_feature (18)..(18): Xaa can be any naturally occurring amino acid
  misc_feature (46)..(46): Xaa can be any naturally occurring amino acid
  misc_feature (48)..(49): Xaa can be any naturally occurring amino acid
  misc_feature (109)..(109): Xaa can be any naturally occurring amino acid
  Coding DNA Sequence Number=SeqID_564
  Gene Ontology: Mol. function=oxidoreductase activity; Cellular component=cytosol; Biological process=auxin mediated signaling pathway
  Homolog annotation: Hit_ID=A7Q9M0; Match level="QueryCoverage=99%, HitCoverage=43%, E-value=1e-51, Identity=68%"; Hit description =Chromosome chr5 scaffold_67, whole genome shotgun sequence
CRELGIGIVAYSPLGXGXLAAGPKLAENLEDDDYRKGLPRFQEENXNXXKILYEKVQAMATKKGCTPAQLALAWVHHQGDDVCPIPGTSKIENLNQNIGALSVKLTPEXMAELEAIARPDFVKGERYDSNMATYKDSETPLLSSWKAA

SEQ ID NO: 8600 - protein, 97 aa, Glycine max
  misc_feature (3)..(3): Xaa can be any naturally occurring amino acid
  misc_feature (54)..(54): Xaa can be any naturally occurring amino acid
  Coding DNA Sequence Number=SeqID_5845
RSXRSLPAYVILLLYAISAISDRIIAYETRQYYLLHILHLHFTFDAILRTHNQXITERSLVLTVVPSLMVVIHPYHLSNISDMARLYPCLRNRDALP

SEQ ID NO: 8601 - protein, 79 aa, Glycine max; identical to SEQ ID NO: 7626
  misc_feature (7)..(7): Xaa can be any naturally occurring amino acid
  misc_feature (10)..(10): Xaa can be any naturally occurring amino acid
  misc_feature (12)..(13): Xaa can be any naturally occurring amino acid
  misc_feature (15)..(17): Xaa can be any naturally occurring amino acid
  misc_feature (29)..(29): Xaa can be any naturally occurring amino acid
  misc_feature (48)..(48): Xaa can be any naturally occurring amino acid
  Coding DNA Sequence Number=SeqID_5847

SEQ ID NO: 8602 - protein, 98 aa, Glycine max
  Coding DNA Sequence Number=SeqID_5849
  Gene Ontology: Mol. function=phosphatidate cytidylyltransferase activity; Cellular component=integral to membrane; Biological process=phospholipid biosynthetic process
  Homolog annotation: Hit_ID=A2WV89; Match level="QueryCoverage=63%, HitCoverage=12%, E-value=3e-16, Identity=66%"; Hit description =Phosphatidate cytidylyltransferase
  Subcellular localization annotation: CTP_CleavageSite=32; ConfidenceScore=5.37e-01
MPPFYIHCRRSSVAPPPPSSGGARLQFYSRLRIQAVATDGNTASGQVLLVSDRNKNKSMLICTYSTLWMIGGFVFIVYMGHLYIWAVVAVLVYHSSTG

SEQ ID NO: 8603 - protein, 74 aa, Glycine max; identical to SEQ ID NO: 8235
  Coding DNA Sequence Number=SeqID_5850

SEQ ID NO: 8604 - protein, 208 aa, Glycine max
  misc_feature (128)..(128): Xaa can be any naturally occurring amino acid
  Coding DNA Sequence Number=SeqID_5852
  Gene Ontology: Mol. function=protein transporter activity; Cellular component=mitochondrial inner membrane; Biological process=protein transport
  Homolog annotation: Hit_ID=A2Q4T7; Match level="QueryCoverage=60%, HitCoverage=79%, E-value=5e-28, Identity=51%"; Hit description =Mitochondrial import inner membrane translocase, subunit Tim17/22
  Pfam annotation: Domain name=Tim17; Domain location=36-159; Score= -15.4; E_value=0.0058; Accession=PF02466.9; Description =Tim17Tim22Tim23 family
NSSSRPPEKAQPFLRIRLGTRPPAHAAQGVRKAAMEDDSPATKTETADVTALDAGTLCGTIVPTCYDMPRVERHDSLASLLRTLKMCGSYGVTFAAVLGLYIGLERIVQIQRKKSDFDNGAIGGFVSXASDYGYRGQSITSALIGVSRLRFTCATLYVDEYTTRERDVKRHMHTPGNKGRACSLTMPATRTQTWRPAREFLSSLRLPR

SEQ ID NO: 8605 - protein, 360 aa, Glycine max
  Coding DNA Sequence Number=SeqID_5853
  Gene Ontology: Mol. function=transferase activity, transferring phosphorus-containing groups; Cellular component=cellular_component; Biological process=phosphorylation
  Homolog annotation: Hit_ID=P91798; Match level="QueryCoverage=98%, HitCoverage=100%, E-value=1e-167, Identity=80%"; Hit description =Arginine kinase
  Pfam annotation: Domain name=ATP-gua_Ptrans; Domain location=110-360; Score=583.5; E_value=2.1e-172; Accession=PF00217.9; Description =ATP:guanido phosphotransferase, C-terminal catalytic domain
  Pfam annotation: Domain name=ATP-gua_PtransN; Domain location=24-100; Score=124.2; E_value=3.9e-34; Accession=PF02807.5; Description =ATP:guanido phosphotransferase, N-terminal domain
  Pfam module annotation: Pfam domain module=ATP-gua_Ptrans::ATP-gua _PtransN; Domain location=110-360::24-100
SNKSEAMVDAAVLEKLEAGFTKLANSDSKSLLKKHLSREVFDKLKNKKTSFGSTLLDCIQSGIENLDSGFGIYAPDAEAYTVFADIFDPMIEEYHGFAKDAKHPPRDFGDVSSFPNVDPTGEYVVSTRVRCGRSMDGYSFNPCLTEAQYKEMEEKVSSTLSGLEGNLKGKYYPLTGMTKEVQQQLIDDHFLFKEGDRFLQAANACRFWPTGRGIYHNDEKTFLVWCNEEDHLRIISMQKGGDLGEVYRRLVSAVNDIEKRIPFSHHERLGFLTFCPTNLGTTIRASVHIKVPKLAKDYAKLEEVAGKYNLQVRGTSGEHSESIGGIYDISNKRRLGLTEYQAVKEMSDGILELIKIEASL

SEQ ID NO: 8606 - protein, 116 aa, Glycine max; identical to SEQ ID NO: 8238
  misc_feature (16)..(16): Xaa can be any naturally occurring amino acid
  misc_feature (23)..(23): Xaa can be any naturally occurring amino acid
  misc_feature (73)..(73): Xaa can be any naturally occurring amino acid
  misc_feature (76)..(76): Xaa can be any naturally occurring amino acid
  misc_feature (93)..(93): Xaa can be any naturally occurring amino acid
  Coding DNA Sequence Number=SeqID_5854

SEQ ID NO: 8607 - protein, 157 aa, Glycine max
  misc_feature (56)..(56): Xaa can be any naturally occurring amino acid
  Coding DNA Sequence Number=SeqID_5856
  Homolog annotation: Hit_ID=A7QF25; Match level="QueryCoverage=66%, HitCoverage=13%, E-value=1e-07, Identity=34%"; Hit description =Chromosome chr16 scaffold_86, whole genome shotgun sequence
TLRLKDEKLEAFRWQLLRTELEMKQMRAHVEGQVKDVTQLKLDQMRLETLLLEREXQLTSLKEQFGLKLKALKNYLNLPSQSLELPQYAGWSKIKGCPRKQGEKKLIKMETFGLKKNWKSAARGLPPWPSLDRGYLNTRPPTKSNFTKKTRFSPAVN

SEQ ID NO: 8608 - protein, 91 aa, Glycine max
  misc_feature (62)..(62): Xaa can be any naturally occurring amino acid
  misc_feature (79)..(79): Xaa can be any naturally occurring amino acid
  Coding DNA Sequence Number=SeqID_5857
  Gene Ontology: Mol. function=transferase activity, transferring glycosyl groups; Cellular component=integral to membrane; Biological process=protein amino acid glycosylation
  Homolog annotation: Hit_ID=A7Q2N1; Match level="QueryCoverage=100%, HitCoverage=13%, E-value=9e-33, Identity=72%"; Hit description =Chromosome chr1 scaffold_46, whole genome shotgun sequence
LRYGKWVVTYVEWSEEDYLFYANGCGYILSLDIVRYIVSEFDMRKLRLFKMEDVSMGMWVEXFNSLKLVYYLYSFKFCXFGCIEDYYIVYY

SEQ ID NO: 8609 - protein, 156 aa, Glycine max
  Coding DNA Sequence Number=SeqID_5858
  Homolog annotation: Hit_ID=A3AXL1; Match level="QueryCoverage=82%, HitCoverage=21%, E-value=2e-16, Identity=43%"; Hit description =Putative uncharacterized protein
ISAGRRHLWGYGSYEDEIEGFSDEEPPRGMTPSVGSCRTSSNSKFSLLNRSVLMSQSTSKAKTTKSTPMSNSVASKPLEESRTKKLLPKITISPLRKIYFVDSDTDSDDNRKQSKPKKPMSPIKKRESMHKYMQKKPILQQNSKSEGSTVVQKSED

SEQ ID NO: 8610 - protein, 60 aa, Glycine max
  misc_feature (39)..(39): Xaa can be any naturally occurring amino acid
  Coding DNA Sequence Number=SeqID_5859
NSIYLLKFNYNIYIFNNKYLQATKPFIFLPIFVCVKSLXANLVSITSQYFLVNSVSLISK

SEQ ID NO: 8611 - protein, 139 aa, Glycine max
  misc_feature (16)..(16): Xaa can be any naturally occurring amino acid
  Coding DNA Sequence Number=SeqID_5861
  Gene Ontology: Mol. function=cysteine-type endopeptidase activity; Cellular component=plasma membrane; Biological process=proteolysis
  Homolog annotation: Hit_ID=Q9STL4; Match level="QueryCoverage=100%, HitCoverage=38%, E-value=8e-15, Identity=39%"; Hit description =Cysteine endopeptidase-like protein
  Pfam annotation: Domain name=Peptidase_C1; Domain location=1-134; Score=-132.6; E_value=0.038; Accession=PF00112.13; Description =Papain family cysteine protease
AVTPVKNQGATCNSCXAFTAVGAVESLVKIKTGDLIFLSEQEGGGLDYIPLEGGAGGEIFHMAISYFQKNGSISKRNTLTPGDQGKLDFIKKNVFVPIVGPGEVPNHFWETFKKGISNNPLAVPFPPKTIKFPIYLPGV

SEQ ID NO: 8612 - protein, 139 aa, Glycine max
  misc_feature (1)..(1): Xaa can be any naturally occurring amino acid
  misc_feature (6)..(6): Xaa can be any naturally occurring amino acid
  misc_feature (53)..(53): Xaa can be any naturally occurring amino acid
  misc_feature (68)..(68): Xaa can be any naturally occurring amino acid
  misc_feature (76)..(76): Xaa can be any naturally occurring amino acid
  misc_feature (106)..(106): Xaa can be any naturally occurring amino acid
  misc_feature (115)..(115): Xaa can be any naturally occurring amino acid
  misc_feature (138)..(138): Xaa can be any naturally occurring amino acid
  Coding DNA Sequence Number=SeqID_5862
XYHSHXQYSIHANSRSHSIHYILTTALLRPPYLTPLQNSSLPPHIVQSTHSTXLHCTLDHRAHPPHLXPLSYQLYXTPLRLTLIPYQRRRPDLQTHYLVNVRVTIXTPTYTTYSXIYHHTHSHHHRHTLQPTSHRSIXQ

SEQ ID NO: 8613 - protein, 107 aa, Glycine max
  misc_feature (9)..(9): Xaa can be any naturally occurring amino acid
  misc_feature (38)..(38): Xaa can be any naturally occurring amino acid
  misc_feature (41)..(41): Xaa can be any naturally occurring amino acid
  misc_feature (50)..(51): Xaa can be any naturally occurring amino acid
  misc_feature (69)..(69): Xaa can be any naturally occurring amino acid
  misc_feature (73)..(74): Xaa can be any naturally occurring amino acid
  misc_feature (81)..(81): Xaa can be any naturally occurring amino acid
  misc_feature (88)..(88): Xaa can be any naturally occurring amino acid
  misc_feature (99)..(99): Xaa can be any naturally occurring amino acid
  misc_feature (101)..(101): Xaa can be any naturally occurring amino acid
  Coding DNA Sequence Number=SeqID_5864
  Subcellular localization annotation: CTP_CleavageSite=13; ConfidenceScore=5.01e-01
RHTSQHKNXSTSRCARLRQNDLLQCLFISYTRARHANXNVXSPAPPMQAXXSRPPITETYSAGTSQRSXVYYXXLRIVIYXLLNVHMXCIEVNTTGFKXTXYKIIYV

SEQ ID NO: 8614 - protein, 226 aa, Glycine max
  misc_feature (167)..(167): Xaa can be any naturally occurring amino acid
  misc_feature (201)..(201): Xaa can be any naturally occurring amino acid
  misc_feature (205)..(205): Xaa can be any naturally occurring amino acid
  Coding DNA Sequence Number=SeqID_5866
  Gene Ontology: Mol. function=oxidoreductase activity; Cellular component=extracellular region; Biological process=electron transport
  Homolog annotation: Hit_ID=O24093; Match level="QueryCoverage=99%, HitCoverage=39%, E-value=5e-94, Identity=75%"; Hit description=L -ascorbate oxidase precursor
  Pfam annotation: Domain name=Cu-oxidase_2; Domain location=38-147; Score=-17.8; E_value=0.054; Accession=PF07731.4; Description =Multicopper oxidase
  Pfam annotation: Domain name=Cu-oxidase_3; Domain location=31-148; Score=193.2; E_value=6.4e-55; Accession=PF07732.5; Description =Multicopper oxidase
  Pfam module annotation: Pfam domain module=Cu-oxidase_2::Cu-oxidase _3; Domain location=38-147::31-148
MSLKALFVGCIIWLGLVELSIGGIVRHYKFDVEYMIRKPDCLEHVLMGINGQFPGPTIRAEVGDILDIALTNKLFTEGTGFHWHGIRQVGTPWADGTAAISQCAINPGEAFHYRFTVDRPGTYFYHGHHGMQRSAGLYGSLIVDLPKGQNEPFHYDGEFNLLLSDVXHTMSHEQGGGLSVRPFIWIGEPDTLLMQCRRRLXCSLXSEVMSTPLPQCQLREGEECAP

SEQ ID NO: 8615 - protein, 107 aa, Glycine max; identical to SEQ ID NO: 8317
  misc_feature (2)..(2): Xaa can be any naturally occurring amino acid
  misc_feature (27)..(27): Xaa can be any naturally occurring amino acid
  misc_feature (29)..(29): Xaa can be any naturally occurring amino acid
  misc_feature (53)..(54): Xaa can be any naturally occurring amino acid
  misc_feature (61)..(61): Xaa can be any naturally occurring amino acid
  misc_feature (72)..(73): Xaa can be any naturally occurring amino acid
  misc_feature (90)..(90): Xaa can be any naturally occurring amino acid
  misc_feature (97)..(97): Xaa can be any naturally occurring amino acid
  misc_feature (104)..(104): Xaa can be any naturally occurring amino acid
  misc_feature (106)..(106): Xaa can be any naturally occurring amino acid
  Coding DNA Sequence Number=SeqID_5867

SEQ ID NO: 8616 - protein, 216 aa, Glycine max
  Coding DNA Sequence Number=SeqID_5869
  Pfam annotation: Domain name=ubiquitin; Domain location=7-76; Score =23.2; E_value=0.00099; Accession=PF00240.13; Description=Ubiquitin family
APPPLSLVPQNIFTSITVPYNIDDVAELKAVIEEVHGLSPDEYRLVASGRVLEDQMALKNLNLYKNCVVYVIPRPGPFQSLFSHPISQFGYAVRNESVKQIAEEGVDNHAFTSVMKTLSKTASRLKLESDVPLEPFDGTFATNGIQISADQVKKLRSSKEQQVKLVSAYKLHEIIEKIKSKQNSEEIIEILKSDLSLAESLLIGTHDQDAFTFVRN

SEQ ID NO: 8617 - protein, 110 aa, Glycine max
  Coding DNA Sequence Number=SeqID_5871
IDYFISCFIRQPTLLHLSSPLIFDIYHPSDIWSFYYIKRVPHIYTSQLYMHYIHLFNISVFNDTRGHIGERLVYTHTTFSTDVYTHLSCLAHVYYRYIPSITSFTPSMSL

SEQ ID NO: 8618 - protein, 119 aa, Glycine max
  misc_feature (88)..(88): Xaa can be any naturally occurring amino acid
  misc_feature (90)..(90): Xaa can be any naturally occurring amino acid
  Coding DNA Sequence Number=SeqID_5873
  Gene Ontology: Mol. function=oxidoreductase activity; Cellular component=extracellular region; Biological process=hydrogen peroxide catabolic process
  Homolog annotation: Hit_ID=P22196; Match level="QueryCoverage=89%, HitCoverage=32%, E-value=6e-26, Identity=55%"; Hit description =Cationic peroxidase 2 precursor
VFLVLDLAIANKVHGQGTRVWFYSTTCPPAEYIVKYTDTTHVNSDSTLAAGLLRMHFHDCYVQCRDTSVLIVSYGTDRTSLTTLALRXMXVTDDATNRLLARCHAVLACADMIRLTVCD

SEQ ID NO: 8619 - protein, 86 aa, Glycine max
  misc_feature (6)..(6): Xaa can be any naturally occurring amino acid
  misc_feature (16)..(16): Xaa can be any naturally occurring amino acid
  misc_feature (26)..(26): Xaa can be any naturally occurring amino acid
  misc_feature (34)..(34): Xaa can be any naturally occurring amino acid
  misc_feature (49)..(49): Xaa can be any naturally occurring amino acid
  misc_feature (66)..(66): Xaa can be any naturally occurring amino acid
  Coding DNA Sequence Number=SeqID_5874
AVALGXAQKDTFLEVXSDYLRTSMQXNTDSSIVXNHHLEHYAKCHVASXFSGLLCLSTPFIYLIKXAWIYVGLNRLFNLLRERLFF

SEQ ID NO: 8620 - protein, 152 aa, Glycine max
  misc_feature (112)..(112): Xaa can be any naturally occurring amino acid
  Coding DNA Sequence Number=SeqID_5876
  Gene Ontology: Mol. function=peptidase activity
  Homolog annotation: Hit_ID=A7QEE4; Match level="QueryCoverage=100%, HitCoverage=42%, E-value=1e-19, Identity=46%"; Hit description =Chromosome chr1 scaffold_84, whole genome shotgun sequence
  Subcellular localization annotation: CTP_CleavageSite=37; ConfidenceScore=5.71e-01
MVSQMISCLSKSSSLFCISGSRSLIPPKTYNRGGLCRFSPGFASRRLSTVYRRKWRSACISNSGKETEGEGKLQGGGSEWRILERWEVPWEWQTVSLTSLACGLRQFCFDRXLTEMVALPYLGIDVQKLSLDDKAEILFLDQGLTTLAVLAV

SEQ ID NO: 8621 - protein, 99 aa, Glycine max
  misc_feature (17)..(18): Xaa can be any naturally occurring amino acid
  misc_feature (68)..(68): Xaa can be any naturally occurring amino acid
  Coding DNA Sequence Number=SeqID_5877
  Gene Ontology: Biological process=primary shoot apical meristem specification
  Homolog annotation: Hit_ID=Q2HW32; Match level="QueryCoverage=92%, HitCoverage=7%, E-value=6e-29, Identity=67%"; Hit description =Lissencephaly type-1-like homology motif; CTLH, C-terminal to LisH motif; Nitrous oxide ...
  Homolog annotation: Hit description=reductase, N-terminal; WD40-like; Quinonprotein alcohol dehydrogenase-like
MCFPNQCSLNWQHQLCXXPRPNPDIKTLFTDHTCTPPNGPLAPTPVNLPVAAVAKPAAYTSIGSHGVXYLAPFPPAAATANTNALAGWMANASASSSVQ

SEQ ID NO: 8622 - protein, 63 aa, Glycine max
  misc_feature (17)..(17): Xaa can be any naturally occurring amino acid
  misc_feature (23)..(23): Xaa can be any naturally occurring amino acid
  Coding DNA Sequence Number=SeqID_5878
KVQPGSDITKCNDPPRXYDINTXICDNFNFYKMNSFKFSYENRSNFVTTYIHPTTHHYLSEYA

SEQ ID NO: 8623 - protein, 210 aa, Glycine max
  misc_feature (109)..(109): Xaa can be any naturally occurring amino acid
  misc_feature (158)..(158): Xaa can be any naturally occurring amino acid
  Coding DNA Sequence Number=SeqID_5880
  Gene Ontology: Mol. function=3-hydroxyacyl-CoA dehydrogenase activity; Cellular component=glyoxysome; Biological process=fatty acid metabolic process
  Homolog annotation: Hit_ID=A7Q8E4; Match level="QueryCoverage=88%, HitCoverage=25%, E-value=8e-76, Identity=74%"; Hit description =Chromosome chr5 scaffold_64, whole genome shotgun sequence
HGAFRLVDLVGLGVAIATGMQFIQNFPERTYKSMLIPLLQEDKRAGETTRKGFYLYDDKRKASPDPELKNYIQKARSFTGFSVDPKLVKLQEKDIIEMIFFPVVNEACXVLDEGIAVKASDLDISAVLGMGFPPSREGFLFWAAFLGSRSIIFKFEEXWSELYGEFFKPCAYLAARAAKGIPLVSSLRSFISMSFMQTICHVIHTYSWIV

SEQ ID NO: 8624 - protein, 118 aa, Glycine max
  Coding DNA Sequence Number=SeqID_5881
LTARTSDPREDMFPQTLILSSTHNPFHGDLVLSTTAPDDIHDVLLDGSQRVFFHNAAPTPFPRRWLLPSTRCPLYVHWTTNYLLPQPIVALSPTSARTCRDSARTLLAPVRIKSQIRL

SEQ ID NO: 8625 - protein, 170 aa, Glycine max
  misc_feature (10)..(10): Xaa can be any naturally occurring amino acid
  Coding DNA Sequence Number=SeqID_5883
  Gene Ontology: Mol. function=transporter activity; Cellular component= membrane; Biological process=transport
  Homolog annotation: Hit_ID=Q89RT7; Match level="QueryCoverage=87%, HitCoverage=45%, E-value=2e-47, Identity=67%"; Hit description=Sugar ABC transporter permease protein
MTDIDKEALXQTRWFLSQYTIQLFYRLVAVLLICAVLAVLNDSFLSLGNILNVMRQANLTLFIKTGLTLVVLTAGLDLSVGANVALSACVAGTVIHTTGSATLGILTGLACGGIVGLLNGIMVTALRIPSFITTYGMLWVLNGLPYWYMGEMQPGGSLLLGRPPPRGVPL

SEQ ID NO: 8626 - protein, 133 aa, Glycine max
  Coding DNA Sequence Number=SeqID_5884
  Homolog annotation: Hit_ID=O04191; Match level="QueryCoverage=87%, HitCoverage=40%, E-value=3e-39, Identity=65%"; Hit description =Expressed protein
MSRLPPPPLLSVNLPLIEKTTDSELTPTRLSFPNEFPYEFDSPAFSPGFTSPGNSTETEDESSDDEEDFLAGLTRRLAPSTHRLPPPSFKSEEKRQVAATSPLLPPSHAHTTSFRRDNAWEVISAAAGEVARL

SEQ ID NO: 8627 - protein, 89 aa, Glycine max
  Coding DNA Sequence Number=SeqID_5885
GSYSFLLGRLLLRISRKTLNLQGEKKRDLCIWITSHQARSPRSRHVSRLSLSLTLYMIKLWNHSLAWRARNQMVLRCKTVIKMTSLGLN

SEQ ID NO: 8628 - protein, 114 aa, Glycine max
  misc_feature (72)..(72): Xaa can be any naturally occurring amino acid
  Coding DNA Sequence Number=SeqID_5887
  Gene Ontology: Mol. function=structural constituent of ribosome; Cellular component=intracellular; Biological process=translation
  Homolog annotation: Hit_ID=A7Q436; Match level="QueryCoverage=89%, HitCoverage=79%, E-value=3e-14, Identity=47%"; Hit description =Chromosome chr13 scaffold_48, whole genome shotgun sequence
PAASTRIKEHELRGEDEEDGQAELTDLKPEGALLPPPRLTGRRRHQQSEIKEVGASLARVVAVISQTQKAAXREEDNNKHLPPHVRPPKKDALRRRLTKHQPSLLTEREEEEEK

SEQ ID NO: 8629 - protein, 120 aa, Glycine max
  misc_feature (19)..(19): Xaa can be any naturally occurring amino acid
  misc_feature (25)..(25): Xaa can be any naturally occurring amino acid
  misc_feature (43)..(43): Xaa can be any naturally occurring amino acid
  misc_feature (72)..(72): Xaa can be any naturally occurring amino acid
  misc_feature (77)..(77): Xaa can be any naturally occurring amino acid
  Coding DNA Sequence Number=SeqID_5888
AHHIRRRPRIQLQYGSCMXRTRECXRTGELLIAVRQDYNVYSXLSQGAIHPSKHVSPLRCIRVSTVADTCMXYCARXPRQYIISQKRVGYECSMSAMCRLPHGHTLTHARSQYITAHRET

SEQ ID NO: 8630 - protein, 178 aa, Glycine max
  Coding DNA Sequence Number=SeqID_5890
  Homolog annotation: Hit_ID=O49479; Match level="QueryCoverage=48%, HitCoverage=76%, E-value=1e-07, Identity=37%"; Hit description =Putative uncharacterized protein F24J7.170
  Subcellular localization annotation: CTP_CleavageSite=9; ConfidenceScore=5.29e-01
SMSQSSSLKSDAASAFTILPEFAAAKAATMELNQSFKTKLVSFRSFIRKTTTSKDEVRASIRCIVRCIDNMEISLNDYEVIVEDKVDRPEVSSSEDLSHDQLRSNATLLLKYFRNRTLEYFFAAFFPPDITHVDDAMAQFGLIRSHLENCESLIYKVMMEAYDCIASSEDEDSGYIFF

SEQ ID NO: 8631 - protein, 120 aa, Glycine max
  misc_feature (11)..(11): Xaa can be any naturally occurring amino acid
  misc_feature (64)..(64): Xaa can be any naturally occurring amino acid
  Coding DNA Sequence Number=SeqID_5891
YTIIRTYLYTXSRPSSIYYLTVLVILFTTITHIPLIVRLSLFSVYMWCFVLVVSSRDYNTLNTXHITHRIDSPVLSIASCWGCERGGGLRCNQPVRGGCGCVSDAAVRRSSPPTHITLSH

SEQ ID NO: 8632 - protein, 142 aa, Glycine max
  misc_feature (138)..(138): Xaa can be any naturally occurring amino acid
  Coding DNA Sequence Number=SeqID_1621
  Homolog annotation: Hit_ID=A2YG90; Match level="QueryCoverage=61%, HitCoverage=28%, E-value=2e-42, Identity=88%"; Hit description =Putative uncharacterized protein
SHLGGLRPARGREAAAVVSISGSLVAGARGEGSCGGVVAREVWWWCRRRRRRMSESEQRPVPRRESPWGLPEGDKRQPKAHRCNDRVEDVVQAAFEGNPFKTVPGPFKVFWQCMRSKPGEEPTVPFTYLQLDPPKRVXAKLE

SEQ ID NO: 8633 - protein, 259 aa, Glycine max
  misc_feature (69)..(69): Xaa can be any naturally occurring amino acid
  misc_feature (157)..(259): Xaa can be any naturally occurring amino acid
  Coding DNA Sequence Number=SeqID_1622
PKQEWPYCFLQVNDFVCLSHIAYVSEQRLLMEKKILRSLNITLHVPHPHGSTCLFFFPPLPPGGGEELXPLSFLSFVRAFPSSTTPYPDLFFLGPPLHPSLSGVISGVPPAPSQSTTFSSPVTLSPPLTVRPPPSAPPLPLSRAITPPHSPMCRLPXXXXXXXXXXXXXXXXXXXXXXXXXXXXXXXXXXXXXXXXXXXXXXXXXXXXXXXXXXXXXXXXXXXXXXXXXXXXXXXXXXXXXXXXXXXXXXXXXXXXXXX

SEQ ID NO: 8634 - protein, 213 aa, Glycine max
  Coding DNA Sequence Number=SeqID_1624
  Gene Ontology: Cellular component=monolayer-surrounded lipid storage body
  Homolog annotation: Hit_ID=P29530; Match level="QueryCoverage=98%, HitCoverage=93%, E-value=3e-40, Identity=46%"; Hit description=P24 oleosin isoform A
  Pfam annotation: Domain name=Oleosin; Domain location=56-173; Score =89.8; E_value=8.8e-24; Accession=PF01277.8; Description=Oleosin
MKMMTTQVPPHSVQVHTTTHRYEAGVVPPGARFEPPRHEAGVKAPSSIYHSERGPTTSHVLAALAGLPDGGILLLLSGLTLAGTLTGLVVATPIFIIFSPVLIPDTVSIGLNVAGVMKTAQYAMTALLSSTLIVLYIKKTQTETEKMAADGNYHLDEVIHHLVIKTKKVGGSTHEGAQDIHNSVEHTRQLIATTSIHSMGAPCTNARDAKPEA

SEQ ID NO: 8635 - protein, 112 aa, Glycine max
  Coding DNA Sequence Number=SeqID_1625
  Homolog annotation: Hit_ID=Q9AV44; Match level="QueryCoverage=99%, HitCoverage=94%, E-value=3e-19, Identity=52%"; Hit description =Putative uncharacterized protein OSJNBa0001O14.22
MQRCFPSRSTRRQAPHHGGGVTVVSCGEGEGGVKIVVSRDELERIAAGVSRRQCRHRHVVVPSAPGPPVEEEQSAREGGRDRLLRRWPESEGGAAVRRGDWRPELGGIPEEG

SEQ ID NO: 8636 - protein, 101 aa, Glycine max
  misc_feature (53)..(54): Xaa can be any naturally occurring amino acid
  misc_feature (65)..(65): Xaa can be any naturally occurring amino acid
  Coding DNA Sequence Number=SeqID_1626
  Gene Ontology: Mol. function=structural constituent of ribosome; Cellular component=ribonucleoprotein complex; Biological process =translation
  Homolog annotation: Hit_ID=P43209; Match level="QueryCoverage=86%, HitCoverage=88%, E-value=9e-30, Identity=77%"; Hit description=60S ribosomal protein L37a
  Pfam annotation: Domain name=Ribosomal_L37ae; Domain location=2-87; Score=128.9; E_value=1.5e-35; Accession=PF01780.9; Description =Ribosomal L37ae protein family
MAKRTKKVGIVGKYGTRYGASIRKQIKKMEVSQHSKYFCEFCGKYGVKRNAVXXIWGCKDCGKVXGPLTPMGGGPRSTAVAITAFAHPGLNPRSPLSLPRM

SEQ ID NO: 8637 - protein, 150 aa, Glycine max
  misc_feature (31)..(31): Xaa can be any naturally occurring amino acid
  misc_feature (42)..(42): Xaa can be any naturally occurring amino acid
  misc_feature (68)..(68): Xaa can be any naturally occurring amino acid
  misc_feature (90)..(90): Xaa can be any naturally occurring amino acid
  misc_feature (93)..(94): Xaa can be any naturally occurring amino acid
  misc_feature (97)..(97): Xaa can be any naturally occurring amino acid
  misc_feature (108)..(108): Xaa can be any naturally occurring amino acid
  misc_feature (117)..(117): Xaa can be any naturally occurring amino acid
  misc_feature (121)..(121): Xaa can be any naturally occurring amino acid
  misc_feature (131)..(131): Xaa can be any naturally occurring amino acid
  misc_feature (135)..(135): Xaa can be any naturally occurring amino acid
  misc_feature (138)..(138): Xaa can be any naturally occurring amino acid
  misc_feature (146)..(146): Xaa can be any naturally occurring amino acid
  Coding DNA Sequence Number=SeqID_1627
RACSRGLFLFSLTTYALDSMVCHIDIRHVSXTARGRLFAYEXLLASLRAYPFSLSQLSILGSSKYDYXSSTRPPSGPRDARVFAELPRRXAHXXEPXSSRRVLVCVCXLASCSREAXVPYXLLPIVSRAAXILAXRVXCSIAARGXRAIM

SEQ ID NO: 8638 - protein, 318 aa, Glycine max
  Coding DNA Sequence Number=SeqID_1629
MSVEELSPCKSSSTSLSIGFLPEISLFSGKRLPSEFEIPSPEVSTPLLPHQRKKQPKSGLIIRRSHLLCSESGQDIDEPNSLCIPRDLDTESQGLSVPSEPQSPLSPDFRVGRCPNGENDGFMEKVKEVTEEEEQSPKCFGEEFYKRIEDFLDLESLHICQPEPPRRNLLNTLRVNTVRMLSTGVSENASGTGTVHSELNSPSLISPSIHTSKLFQRRSSSKDFSVESAPSGQKLALSKSPFYSMNKRVLDSEKKESSGQEENEDPMTISRRSSPRKFFGLAALNTKLKEFAQVSSQNHSEASSATSILMLDCSPIKI

SEQ ID NO: 8639 - protein, 94 aa, Glycine max
  misc_feature (19)..(19): Xaa can be any naturally occurring amino acid
  misc_feature (47)..(47): Xaa can be any naturally occurring amino acid
  Coding DNA Sequence Number=SeqID_1631
  Homolog annotation: Hit_ID=O49403; Match level="QueryCoverage=62%, HitCoverage=14%, E-value=3e-08, Identity=47%"; Hit description=Heat stress transcription factor A-4a
MMMDVFRSLSCYQEICRLXEDCHFSSIPRYPLFVRDVYDMVDDPSTXSVVSWSDSGKSFIIWKESEFLGDVFPRCFSCDYDMTSLTAWFAMGYS

SEQ ID NO: 8640 - protein, 266 aa, Glycine max
  misc_feature (213)..(213): Xaa can be any naturally occurring amino acid
  misc_feature (217)..(217): Xaa can be any naturally occurring amino acid
  Coding DNA Sequence Number=SeqID_5893
ISAAPTNTLRRVSGGVIHIPGGVRDHITLVASWSFNKLRVKTHSPWGQKRCGAVSLTLPPGVCQILQSAWRHKLCAVRWAVNHLLLSLCCAPVSTTTYTQSLPAPLHHNTKQARACAPSAPPRCLHQLPRLVYSLWWGVGGNYHLLSVVRLGRHYTSSLAPSPNTPMLLYIPPAAAAIVMNVFAHCLCYHVVSASVWSDQYYTLCTFSHTHPXPHTXLPIYSTCPLPFWLYELSPPLTHLAVPNTNRGVVCASAPPPPHLCCLLPS

SEQ ID NO: 8641 - protein, 122 aa, Glycine max; identical to SEQ ID NO: 7656
  misc_feature (11)..(11): Xaa can be any naturally occurring amino acid
  misc_feature (51)..(51): Xaa can be any naturally occurring amino acid
  misc_feature (71)..(71): Xaa can be any naturally occurring amino acid
  misc_feature (109)..(109): Xaa can be any naturally occurring amino acid
  Coding DNA Sequence Number=SeqID_5895
  Subcellular localization annotation: CTP_CleavageSite=70; ConfidenceScore=5.18e-01

SEQ ID NO: 8642 - protein, 121 aa, Glycine max
  misc_feature (11)..(11): Xaa can be any naturally occurring amino acid
  misc_feature (17)..(17): Xaa can be any naturally occurring amino acid
  misc_feature (21)..(21): Xaa can be any naturally occurring amino acid
  misc_feature (32)..(32): Xaa can be any naturally occurring amino acid
  misc_feature (40)..(40): Xaa can be any naturally occurring amino acid
  misc_feature (43)..(43): Xaa can be any naturally occurring amino acid
  misc_feature (50)..(50): Xaa can be any naturally occurring amino acid
  misc_feature (65)..(65): Xaa can be any naturally occurring amino acid
  misc_feature (83)..(83): Xaa can be any naturally occurring amino acid
  misc_feature (91)..(91): Xaa can be any naturally occurring amino acid
  misc_feature (98)..(98): Xaa can be any naturally occurring amino acid
  misc_feature (116)..(116): Xaa can be any naturally occurring amino acid
  misc_feature (120)..(120): Xaa can be any naturally occurring amino acid
  Coding DNA Sequence Number=SeqID_5897
VRRRVRDSCAXVRRRRXVGRXYTLSFDSATYXAYVRDNRXIYXCSRLRWXVSCDANYGRYARQSXYTVWRRRDSVRVHARPDXRYDESRVXVHPRAAXLHASIYIAQYVPPSHVIXSCSXM

SEQ ID NO: 8643 - protein, 186 aa, Glycine max
  Coding DNA Sequence Number=SeqID_5899
HLSVSLGVRYPALYKFCCRSHAPLLYTAASAGALRATAWLRTVLSTIVVCQPYRHVRGCTDAESVTPVLARSLRVTGRPAARALRTALCKCSRVSIAVIFASAFWLRRVHYRPAPPRALPLFGVLHARGGVGFTVRRPPFALCIWADPRGRGRVDYPCRGANPRRPRPRALVYWAGGSPRPCVLRF

SEQ ID NO: 8644 - protein, 157 aa, Glycine max
  misc_feature (8)..(8): Xaa can be any naturally occurring amino acid
  misc_feature (77)..(77): Xaa can be any naturally occurring amino acid
  misc_feature (138)..(138): Xaa can be any naturally occurring amino acid
  misc_feature (141)..(142): Xaa can be any naturally occurring amino acid
  Coding DNA Sequence Number=SeqID_5901
  Gene Ontology: Mol. function=fructose-bisphosphate aldolase activity; Cellular component=mitochondrial envelope; Biological process =metabolic process
  Homolog annotation: Hit_ID=A5B118; Match level="QueryCoverage=100%, HitCoverage=43%, E-value=3e-51, Identity=63%"; Hit description =Fructose-bisphosphate aldolase
  Pfam annotation: Domain name=Glycolytic; Domain location=1-157; Score= -57.3; E_value=3.2e-10; Accession=PF00274.9; Description=Fructose -bisphosphate aldolase class-I
IGPNEPSXLSIHENAYGLAKYTVIYQENGLVPIVNPKILINRPHNIHKYTTVTNHILTACYKALNDHHVLLEGTLLXPNIVTPGSQSTKVSPQVVAEHTIKTLQRTIPTAGATIVVLSGDQSKEEACSDLNTIKPIEXKEXXALSVCFRKTLQQSTL

SEQ ID NO: 8645 - protein, 178 aa, Glycine max; identical to SEQ ID NO: 7663
  misc_feature (14)..(14): Xaa can be any naturally occurring amino acid
  misc_feature (153)..(153): Xaa can be any naturally occurring amino acid
  Coding DNA Sequence Number=SeqID_5902
  Subcellular localization annotation: CTP_CleavageSite=20; ConfidenceScore=5.40e-01

SEQ ID NO: 8646 - protein, 119 aa, Glycine max; identical to SEQ ID NO: 8561
  misc_feature (8)..(8): Xaa can be any naturally occurring amino acid
  misc_feature (11)..(11): Xaa can be any naturally occurring amino acid
  misc_feature (21)..(21): Xaa can be any naturally occurring amino acid
  misc_feature (51)..(51): Xaa can be any naturally occurring amino acid
  misc_feature (72)..(72): Xaa can be any naturally occurring amino acid
  misc_feature (76)..(77): Xaa can be any naturally occurring amino acid
  misc_feature (107)..(107): Xaa can be any naturally occurring amino acid
  Coding DNA Sequence Number=SeqID_5904

SEQ ID NO: 8647 - protein, 124 aa, Glycine max
  misc_feature (33)..(33): Xaa can be any naturally occurring amino acid
  Coding DNA Sequence Number=SeqID_5905
  Subcellular localization annotation: CTP_CleavageSite=42; ConfidenceScore=5.55e-01
IHSSPSLAYPFAPTKMHLHPSLLFSRSISHLLXSLCGRSKVRAKPAEPTPLLFPFLAAVRDLPLLAPSLFLIPCFHRYAQPTGFSAMRQLLGEVRSHVAGVFNRVTACRAGCEASKIVGAPRST

SEQ ID NO: 8648 - protein, 210 aa, Glycine max
  misc_feature (210)..(210): Xaa can be any naturally occurring amino acid
  Coding DNA Sequence Number=SeqID_5907
  Gene Ontology: Mol. function=nucleotidyltransferase activity; Cellular component=cytosol; Biological process=metabolic process
  Homolog annotation: Hit_ID=Q0UEG9; Match level="QueryCoverage=95%, HitCoverage=35%, E-value=1e-108, Identity=96%"; Hit description =Putative uncharacterized protein
  Pfam annotation: Domain name=UDPGP; Domain location=1-210; Score =139.8; E_value=7.4e-39; Accession=PF01704.8; Description=UTP- -glucose-1-phosphate uridylyltransferase
ESATGPPPYDDLANTEAVEYLNKLAVVKLNGGLGTSMGCVGPKSVIEVRDGMSFLDLSVRQIEYLNRTYDVNVPFVLMNSFNTDTDTASIIKKYEGHNIDILTFNQSRYPRILKDSLLPAPKENKSDIANWYPPGHGDVFESLYNTGMIDKLMDRGIEYIFLSNADNLGAVVDLRILQHMVDSQAEYIMELTDKTKADVKGGTIIDYEGX

SEQ ID NO: 8649 - protein, 152 aa, Glycine max
  Coding DNA Sequence Number=SeqID_5908
LQHVFYNVLSIGYTFSCALLSMQHRLISPLAQHIQLFQHAHHGLRLTIATSGHMHLLGMRDHVTSPAPKKILNLLCYTHAFDPSNQLTYPDQSPRANEPMLHHRSNDGGSDYGFGKQRTDWQRVRLEVVVKSVYGTPSRPLRSSGIEGVVVS

SEQ ID NO: 8650 - protein, 78 aa, Glycine max
  Coding DNA Sequence Number=SeqID_5909
RTEVYCRSRIHMNFSSPEDAKNNKFGAPQQVSIQLESLPEILHCDSQLQTQQQCTSFYSWKAEMASLLLFRNPSMKEW

SEQ ID NO: 8651 - protein, 43 aa, Glycine max
  Coding DNA Sequence Number=SeqID_5911
  Homolog annotation: Hit_ID=A7PCZ3; Match level="QueryCoverage=79%, HitCoverage=17%, E-value=1e-07, Identity=85%"; Hit description =Chromosome chr17 scaffold_12, whole genome shotgun sequence
MYVFFQVVLIANSLPALNDVTAMELPDIVAEAAKVCVFLYYEL

SEQ ID NO: 8652 - protein, 131 aa, Glycine max; identical to SEQ ID NO: 7669
  misc_feature (4)..(4): Xaa can be any naturally occurring amino acid
  misc_feature (26)..(26): Xaa can be any naturally occurring amino acid
  misc_feature (35)..(35): Xaa can be any naturally occurring amino acid
  misc_feature (44)..(44): Xaa can be any naturally occurring amino acid
  misc_feature (64)..(64): Xaa can be any naturally occurring amino acid
  misc_feature (78)..(78): Xaa can be any naturally occurring amino acid
  misc_feature (96)..(96): Xaa can be any naturally occurring amino acid
  misc_feature (120)..(120): Xaa can be any naturally occurring amino acid
  Coding DNA Sequence Number=SeqID_5912
  Subcellular localization annotation: CTP_CleavageSite=57; ConfidenceScore=5.22e-01

SEQ ID NO: 8653 - protein, 151 aa, Glycine max
  misc_feature (16)..(16): Xaa can be any naturally occurring amino acid
  misc_feature (30)..(30): Xaa can be any naturally occurring amino acid
  misc_feature (54)..(56): Xaa can be any naturally occurring amino acid
  misc_feature (114)..(114): Xaa can be any naturally occurring amino acid
  misc_feature (138)..(138): Xaa can be any naturally occurring amino acid
  Coding DNA Sequence Number=SeqID_5914
LNIDAQLLLRDNSCSXPCYSTCLLSLNNYXHIYETLSLHSTYLLHSNITIARHXXXLLSIVTHHRHSMTHARVIYSTIHTRPTIHVYSISSTRCASLRDRSTSTPRRTSLLYVXVIHVHIVSHLIHLIRLTRTILQSXCALVTPCLHHRYI

SEQ ID NO: 8654 - protein, 185 aa, Glycine max
  Coding DNA Sequence Number=SeqID_5916
  Subcellular localization annotation: CTP_CleavageSite=42; ConfidenceScore=5.43e-01
SSYFSFFSPPPHLPTGHYYSLLPPSVTKISLSLSHTHTQSTQAMANKNFLCIIEEMDRLWFHQAILFSEPTASVISLPSPPDEKKPVPTSESVSCSSSILSSPPPPDEETSTDESPSSEQQLSSESMSVPLQDGSINNEEERKDGLTRMNLLDNRTRSHSSSPSTQNRHRKLRKPATTCARKLQK

SEQ ID NO: 8655 - protein, 32 aa, Glycine max
  Coding DNA Sequence Number=SeqID_5917
THTLDRCQNLRLQFRQCLLSSFNRQSNENPSL

SEQ ID NO: 8656 - protein, 123 aa, Glycine max
  misc_feature (45)..(45): Xaa can be any naturally occurring amino acid
  misc_feature (69)..(69): Xaa can be any naturally occurring amino acid
  misc_feature (81)..(81): Xaa can be any naturally occurring amino acid
  Coding DNA Sequence Number=SeqID_5919
  Gene Ontology: Mol. function=electron carrier activity; Cellular component=anchored to membrane; Biological process=electron transport
  Homolog annotation: Hit_ID=Q9ZRV5; Match level="QueryCoverage=96%, HitCoverage=98%, E-value=1e-37, Identity=63%"; Hit description=Basic blue copper protein
  Pfam annotation: Domain name=Cu_bind_like; Domain location=36-114; Score=71.9; E_value=2.1e-18; Accession=PF02298.8; Description =Plastocyanin-like domain
MALGRGSAVVLLLCFLLLHSHMARAATYTVGDSGGWTFNTVAWPXGKLFRTGDTLAFNYSPVTHNVATXNKAGYDSCKTPXGARVYKPGTDPTRLARGENYSLLHYVGPWQAGMKIAINGGRA

SEQ ID NO: 8657 - protein, 187 aa, Glycine max
  misc_feature (14)..(15): Xaa can be any naturally occurring amino acid
  misc_feature (22)..(23): Xaa can be any naturally occurring amino acid
  misc_feature (26)..(26): Xaa can be any naturally occurring amino acid
  Coding DNA Sequence Number=SeqID_5920
  Gene Ontology: Mol. function=hydrolase activity; Biological process =metabolic process
  Homolog annotation: Hit_ID=A7NZB4; Match level="QueryCoverage=78%, HitCoverage=41%, E-value=5e-41, Identity=59%"; Hit description =Chromosome chr6 scaffold_3, whole genome shotgun sequence
IFANDDLEYQTKFXXERLGMGXXRMXLESIFNRIHPQSLEYTSFGKPHPSVFKNAEILLEKLVASLYDDFYDINHDNTSYFKTLYMIGDNPAVDIKGGRPTGAPRIPLHTRTGELRGRDKRGHFTADPVVDTVEAAEDYKTTQEWGSSGRRRQRCAAEGATLEGKGPQKRGFAGEGRSWRTLSRCGG

SEQ ID NO: 8658 - protein, 73 aa, Glycine max
  Coding DNA Sequence Number=SeqID_5921
LKFFVQEAALKIINSHSKEDALKIFLAVIEMFFFSFLRFRNNCSLLFSRFIRTFFVVGYTRDPDAVAFKSFFF

SEQ ID NO: 8659 - protein, 108 aa, Glycine max
  misc_feature (62)..(62): Xaa can be any naturally occurring amino acid
  misc_feature (64)..(64): Xaa can be any naturally occurring amino acid
  Coding DNA Sequence Number=SeqID_5923
  Gene Ontology: Mol. function=transferase activity, transferring glycosyl groups; Cellular component=endoplasmic reticulum
  Homolog annotation: Hit_ID=A7Q7G9; Match level="QueryCoverage=98%, HitCoverage=10%, E-value=4e-36, Identity=68%"; Hit description =Chromosome chr18 scaffold_59, whole genome shotgun sequence
  Pfam annotation: Domain name=C2; Domain location=1-71; Score=34.4; E _value=4.1e-07; Accession=PF00168.20; Description=C2 domain
ARNLLPMKAREGRTTDAYCVAKYGNKWVRTRTLLDTLSPRWNEQYTWEVHDPCTVITVGVFXYXHINGNRAARYQIFVKVTNTRAILETDREYQQFYRVRILHPSALR

SEQ ID NO: 8660 - protein, 131 aa, Glycine max
  Coding DNA Sequence Number=SeqID_5924
LLILRSLGRSRTAVNDNDHRARITPVPPSSDPISPERDGWTRRSRRSRGPGRRPGGRGNAAGQGGPVAAPVIYWFCEHCGDLRHDNQARHLVNHIYMEHQETQQRLRQLQAREAYQRAHGGSKKRGNRRRH

SEQ ID NO: 8661 - protein, 108 aa, Glycine max
  misc_feature (15)..(15): Xaa can be any naturally occurring amino acid
  misc_feature (37)..(37): Xaa can be any naturally occurring amino acid
  misc_feature (46)..(46): Xaa can be any naturally occurring amino acid
  misc_feature (53)..(53): Xaa can be any naturally occurring amino acid
  misc_feature (56)..(56): Xaa can be any naturally occurring amino acid
  misc_feature (90)..(90): Xaa can be any naturally occurring amino acid
  misc_feature (102)..(102): Xaa can be any naturally occurring amino acid
  Coding DNA Sequence Number=SeqID_5926
VLYLWRSGASRGSHXAGERALSVRETGDKCMYIFRDXVQRRVYEIXYLRYYCXLPXKHDDTRRATRSCISPITPTLIDLVRGESRASLSXTLAPVPPTFVVXTPLSVT

SEQ ID NO: 8662 - protein, 203 aa, Glycine max
  misc_feature (19)..(19): Xaa can be any naturally occurring amino acid
  misc_feature (62)..(62): Xaa can be any naturally occurring amino acid
  misc_feature (65)..(65): Xaa can be any naturally occurring amino acid
  misc_feature (84)..(84): Xaa can be any naturally occurring amino acid
  misc_feature (119)..(119): Xaa can be any naturally occurring amino acid
  misc_feature (156)..(156): Xaa can be any naturally occurring amino acid
  misc_feature (179)..(179): Xaa can be any naturally occurring amino acid
  misc_feature (190)..(190): Xaa can be any naturally occurring amino acid
  Coding DNA Sequence Number=SeqID_5928
  Gene Ontology: Mol. function=cytochrome-c oxidase activity; Cellular component=mitochondrial respiratory chain; Biological process =aerobic respiration
  Homolog annotation: Hit_ID=A7UG06; Match level="QueryCoverage=97%, HitCoverage=24%, E-value=1e-101, Identity=93%"; Hit description =Cytochrome oxidase subunits 1 and 2 polyprotein
  Pfam annotation: Domain name=COX1; Domain location=1-130; Score= -205.9; E_value=0.00011; Accession=PF00115.10; Description=Cytochrome C and Quinol oxidase polypeptide I
PPPHTSLLFALGFVFMFTXGGLSGVVLANASLDIAFHDTYYVVAHFHYVLSMGAVFALFSGXYFXIPKILGLDYNLLYSKAHFXVLFTGVNLTFFPQHFLGLQGMPRRISDYPDAFTGXNFISSIGSLISVAATVLFLHIVYLQLVKGKAIFGYPXAVPQLFSDYLRILKDKCAPGLEXALSNPPKPHAXTSLPLQSSTILSS

SEQ ID NO: 8663 - protein, 148 aa, Glycine max; identical to SEQ ID NO: 7677
  misc_feature (63)..(63): Xaa can be any naturally occurring amino acid
  misc_feature (109)..(109): Xaa can be any naturally occurring amino acid
  misc_feature (118)..(118): Xaa can be any naturally occurring amino acid
  misc_feature (120)..(128): Xaa can be any naturally occurring amino acid
  misc_feature (131)..(132): Xaa can be any naturally occurring amino acid
  misc_feature (135)..(136): Xaa can be any naturally occurring amino acid
  misc_feature (140)..(142): Xaa can be any naturally occurring amino acid
  Coding DNA Sequence Number=SeqID_5929

SEQ ID NO: 8664 - protein, 102 aa, Glycine max
  misc_feature (67)..(67): Xaa can be any naturally occurring amino acid
  Coding DNA Sequence Number=SeqID_5931
CVVVRVFSFHLSSYFFSYLLTTAARRIKQLPTPETAQIDDTSLHRDNLAVPPAFPSGVSIFIERHCXSKRCDDAMDKHTPASGQDRHPLLLAHCCMYYFCVW

SEQ ID NO: 8665 - protein, 83 aa, Glycine max
  misc_feature (49)..(49): Xaa can be any naturally occurring amino acid
  Coding DNA Sequence Number=SeqID_5933
CIDYWIYVFDGNRTEVTVLITNRHTYNCRAREKHGLHHIISVTRYTIRXRAGWWWDNNTPIYICDVSSRRAHYILYRFNVLST

SEQ ID NO: 8666 - protein, 183 aa, Glycine max
  misc_feature (137)..(137): Xaa can be any naturally occurring amino acid
  misc_feature (143)..(143): Xaa can be any naturally occurring amino acid
  misc_feature (146)..(146): Xaa can be any naturally occurring amino acid
  Coding DNA Sequence Number=SeqID_5935
GGFFKKTGGGGPLGKKIPPPFWGGPPTFAPKLGWGGPPGGLNLWGETWGPPLFGGQITRGGAPRFPFGSRDKKSFPGPLLAFPRVSGWIWDPPVPKGGGWPFPCTAGPVGPLNITRLVADGVVRAVMWNRSDQRNAXRAAEKXAEXSCRNRTLGRHAPGAPESLKALFSFPSLILENHFEKRG

SEQ ID NO: 8667 - protein, 89 aa, Glycine max
  Coding DNA Sequence Number=SeqID_5937
PRCVIPYFCYLLRSDEEPPWRWAGAEGGGGVEAEVGEGARGEEHLRFVFLRLRRRRPAELPRGGHGERGRGGEPKRRRERRRFPPSESD

SEQ ID NO: 8668 - protein, 133 aa, Glycine max
  misc_feature (30)..(30): Xaa can be any naturally occurring amino acid
  misc_feature (46)..(46): Xaa can be any naturally occurring amino acid
  misc_feature (61)..(61): Xaa can be any naturally occurring amino acid
  misc_feature (77)..(77): Xaa can be any naturally occurring amino acid
  misc_feature (112)..(112): Xaa can be any naturally occurring amino acid
  misc_feature (119)..(119): Xaa can be any naturally occurring amino acid
  Coding DNA Sequence Number=SeqID_5939
  Gene Ontology: Mol. function=transporter activity; Cellular component= integral to membrane; Biological process=auxin mediated signaling pathway
  Homolog annotation: Hit_ID=Q8GV74; Match level="QueryCoverage=93%, HitCoverage=20%, E-value=1e-41, Identity=68%"; Hit description=Auxin efflux carrier protein
SSEFGSSLHMFVWSSSASPVSDVFGAHEYXSHDQKKIKLDGISGKXENHKDTSEDYLKKEXSTFGNKEMDGGMNQLXSEKVGDGKPKTMPPASVMTRLILIMVWRKLIRNPXTYSSLIXLTWSLFIQGMGDPA

SEQ ID NO: 8669 - protein, 152 aa, Glycine max; identical to SEQ ID NO: 7691
  Coding DNA Sequence Number=SeqID_5940

SEQ ID NO: 8670 - protein, 85 aa, Glycine max
  Coding DNA Sequence Number=SeqID_5941
  Pfam annotation: Domain name=Ribosomal_L41; Domain location=29-53; Score=23.1; E_value=0.001; Accession=PF05162.4; Description =Ribosomal protein L41
  Subcellular localization annotation: CTP_CleavageSite=30; ConfidenceScore=5.22e-01
SSFSFSVVVSQPPRLGLGNEEGFCFLFAMRAKRKKKRMTRLKRKLRKMIQTSKFCVKLTLSPPLLQLLMLANTTPFLSLALVPPF

SEQ ID NO: 8671 - protein, 62 aa, Glycine max
  Coding DNA Sequence Number=SeqID_5943
  Homolog annotation: Hit_ID=A5BRJ0; Match level="QueryCoverage=80%, HitCoverage=9%, E-value=4e-21, Identity=86%"; Hit description =Putative uncharacterized protein
EKNWVWWKRDGCLPYEKQRIEKKAVPDGPKKRRPRWRLGNKELSQLWKWADQNPVCHSLQKL

SEQ ID NO: 8672 - protein, 201 aa, Glycine max
  misc_feature (1)..(30): Xaa can be any naturally occurring amino acid
  misc_feature (33)..(36): Xaa can be any naturally occurring amino acid
  misc_feature (38)..(38): Xaa can be any naturally occurring amino acid
  misc_feature (40)..(41): Xaa can be any naturally occurring amino acid
  misc_feature (43)..(50): Xaa can be any naturally occurring amino acid
  misc_feature (52)..(58): Xaa can be any naturally occurring amino acid
  misc_feature (60)..(67): Xaa can be any naturally occurring amino acid
  misc_feature (70)..(70): Xaa can be any naturally occurring amino acid
  misc_feature (72)..(74): Xaa can be any naturally occurring amino acid
  misc_feature (76)..(78): Xaa can be any naturally occurring amino acid
  misc_feature (80)..(85): Xaa can be any naturally occurring amino acid
  misc_feature (87)..(88): Xaa can be any naturally occurring amino acid
  misc_feature (91)..(92): Xaa can be any naturally occurring amino acid
  misc_feature (97)..(98): Xaa can be any naturally occurring amino acid
  misc_feature (101)..(102): Xaa can be any naturally occurring amino acid
  misc_feature (104)..(104): Xaa can be any naturally occurring amino acid
  misc_feature (106)..(108): Xaa can be any naturally occurring amino acid
  misc_feature (110)..(110): Xaa can be any naturally occurring amino acid
  misc_feature (114)..(115): Xaa can be any naturally occurring amino acid
  misc_feature (117)..(117): Xaa can be any naturally occurring amino acid
  misc_feature (121)..(121): Xaa can be any naturally occurring amino acid
  misc_feature (123)..(125): Xaa can be any naturally occurring amino acid
  misc_feature (147)..(148): Xaa can be any naturally occurring amino acid
  misc_feature (154)..(155): Xaa can be any naturally occurring amino acid
  misc_feature (166)..(166): Xaa can be any naturally occurring amino acid
  misc_feature (171)..(171): Xaa can be any naturally occurring amino acid
  misc_feature (175)..(175): Xaa can be any naturally occurring amino acid
  misc_feature (183)..(184): Xaa can be any naturally occurring amino acid
  misc_feature (189)..(189): Xaa can be any naturally occurring amino acid
  misc_feature (191)..(193): Xaa can be any naturally occurring amino acid
  misc_feature (199)..(199): Xaa can be any naturally occurring amino acid
  Coding DNA Sequence Number=SeqID_5944
XXXXXXXXXXXXXXXXXXXXXXXXXXXXXXPPXXXXGXGXXGXXXXXXXXGXXXXXXXDXXXXXXXXRRXRXXXTXXXEXXXXXXTXXGTXXKQQPXXHNXXRXNXXXHXREPXXTXTNEXRXXXRQGRTDGPREAERESGGLHSNXXPSDEIXXLRYNIQISTYXCPYKXLNIXTHLRDAAXXTDRRXTXXXNPETIXLV

SEQ ID NO: 8673 - protein, 115 aa, Glycine max
  Coding DNA Sequence Number=SeqID_5946
  Subcellular localization annotation: CTP_CleavageSite=58; ConfidenceScore=5.24e-01
PCQPFSLAIGAGMSGRSLPALQGWGAAFEHFPRNARRDCTGNSKFHWARSRFLALAPRTRQISGPCRPGFQGVQSGGLPSHFCQIFLGEHFVQFLTTARFGGNYLSLAIRAFGVG

SEQ ID NO: 8674 - protein, 106 aa, Glycine max
  Coding DNA Sequence Number=SeqID_5948
TNSTNKKHKLEKNWYILNKFQSNKTPDVPPNYLNGIFTTTPEHHPMDKGEGSRRQESHKRTAQTKRWERILKNKVPTANRKRLKNKEEVTTTKHGGKGRGNRTDGT

SEQ ID NO: 8675 - protein, 182 aa, Glycine max
  misc_feature (37)..(38): Xaa can be any naturally occurring amino acid
  misc_feature (42)..(42): Xaa can be any naturally occurring amino acid
  misc_feature (73)..(73): Xaa can be any naturally occurring amino acid
  misc_feature (154)..(154): Xaa can be any naturally occurring amino acid
  misc_feature (175)..(175): Xaa can be any naturally occurring amino acid
  Coding DNA Sequence Number=SeqID_5950
AINRFIEKDKEMCLKAKSATLLDLNEIVRNHYELLYXXDYGXQYQTQELEKKIAKCEKKLSKARKFKWTAEIXKCRNKIADINQKLESIRTEKATIFENICNMDSVIERLILNALSNAQRKLDTSDSDLNGRQIENLEVILEGISIKHPKGELXRKFLKEQLEDLEDEELERNSXLEKKKKK

SEQ ID NO: 8676 - protein, 172 aa, Glycine max
  misc_feature (39)..(39): Xaa can be any naturally occurring amino acid
  misc_feature (42)..(42): Xaa can be any naturally occurring amino acid
  misc_feature (74)..(74): Xaa can be any naturally occurring amino acid
  misc_feature (88)..(88): Xaa can be any naturally occurring amino acid
  misc_feature (136)..(136): Xaa can be any naturally occurring amino acid
  Coding DNA Sequence Number=SeqID_5952
  Gene Ontology: Mol. function=oxidoreductase activity; Cellular component=extracellular region; Biological process=response to oxidative stress
  Homolog annotation: Hit_ID=A7Q6C3; Match level="QueryCoverage=83%, HitCoverage=43%, E-value=6e-42, Identity=61%"; Hit description =Chromosome chr11 scaffold_56, whole genome shotgun sequence
  Pfam annotation: Domain name=peroxidase; Domain location=43-170; Score=-35.9; E_value=9.3e-05; Accession=PF00141.13; Description =Peroxidase
MGDPCFFEDLSSLLLLIDSTQTSSGHLTRGFYLYTCPNXNSXARSAVEQKYQHTFVTAPATLRLYFHDRFVRGXDASILLASTNNMAXEKDHPDDISLAEYGFDTLARAKASVDSDPQCINKGACADILALATRDXINLADQPFYEFELNIRDSIISTNCRAARQIPHADII

SEQ ID NO: 8677 - protein, 251 aa, Glycine max
  misc_feature (42)..(42): Xaa can be any naturally occurring amino acid
  misc_feature (69)..(69): Xaa can be any naturally occurring amino acid
  misc_feature (98)..(98): Xaa can be any naturally occurring amino acid
  misc_feature (116)..(116): Xaa can be any naturally occurring amino acid
  misc_feature (144)..(144): Xaa can be any naturally occurring amino acid
  misc_feature (159)..(159): Xaa can be any naturally occurring amino acid
  misc_feature (190)..(190): Xaa can be any naturally occurring amino acid
  misc_feature (193)..(193): Xaa can be any naturally occurring amino acid
  Coding DNA Sequence Number=SeqID_5953
  Gene Ontology: Mol. function=protein-tyrosine kinase activity; Cellular component=cellulose and pectin-containing cell wall; Biological process=protein amino acid phosphorylation
  Homolog annotation: Hit_ID=A7NTC2; Match level="QueryCoverage=93%, HitCoverage=32%, E-value=4e-52, Identity=50%"; Hit description =Chromosome chr18 scaffold_1, whole genome shotgun sequence
TPFTPPVPILLCLNNNYLLHRDLSTCLHRDTGIDGKLQFLHXMPTEKIGIGAAEGIADLHECSPPLAHXDIHTSQLYYSIDQFESRLVSLSDGTAQRXSSTMRHLKGLHQATIFQXTYSGRSSTTCAYDIYCFGKTLLDLITGXLKALSVHDGSTNERXQQTLPYITMYYDERVTKIIDPSLIADDDLLXRYXAMATVGHACLNPKPSKRTPIRDVLKALDNPLKIVIEQHTNSARLRSNSSKKYCSTAFF

SEQ ID NO: 8678 - protein, 141 aa, Glycine max
  Coding DNA Sequence Number=SeqID_5954
QKRCLWTHNNDFMPKDLIVTTVTKFLCPKSSSPHLLQRFDNLNKREAGNGQWRTIEEAQDVELSNDQVVAKRNVLAFWEAKGNGFAKSNWLMHEFRLVSKSLPSMVSSVAVYRIFEKKEGRKGKKAKGSEGETSSHTAVRK

SEQ ID NO: 8679 - protein, 132 aa, Glycine max; identical to SEQ ID NO: 7699
  misc_feature (10)..(10): Xaa can be any naturally occurring amino acid
  misc_feature (16)..(16): Xaa can be any naturally occurring amino acid
  misc_feature (69)..(69): Xaa can be any naturally occurring amino acid
  misc_feature (88)..(88): Xaa can be any naturally occurring amino acid
  misc_feature (95)..(95): Xaa can be any naturally occurring amino acid
  misc_feature (120)..(120): Xaa can be any naturally occurring amino acid
  misc_feature (129)..(129): Xaa can be any naturally occurring amino acid
  Coding DNA Sequence Number=SeqID_5956

SEQ ID NO: 8680 - protein, 443 aa, Glycine max
  misc_feature (247)..(247): Xaa can be any naturally occurring amino acid
  misc_feature (387)..(387): Xaa can be any naturally occurring amino acid
  Coding DNA Sequence Number=SeqID_5958
  Gene Ontology: Mol. function=pectate lyase activity; Cellular component=extracellular region; Biological process=pathogenesis
  Homolog annotation: Hit_ID=Q40319; Match level="QueryCoverage=99%, HitCoverage=100%, E-value=0.0, Identity=69%"; Hit description =Pectate lyase homolog
  Pfam annotation: Domain name=Pec_lyase_C; Domain location=175-360; Score=312.2; E_value=9.7e-91; Accession=PF00544.9; Description =Pectate lyase
  Pfam annotation: Domain name=Pec_lyase_N; Domain location=30-80; Score=75.5; E_value=1.7e-19; Accession=PF04431.4; Description =Pectate lyase, N terminus
  Pfam module annotation: Pfam domain module=Pec_lyase_C::Pec_lyase_N; Domain location=175-360::30-80
MERIMVGSATKVAFNLLVTFAIVIPCLEAGIAEFDDFLKAQADEAQKIALEAYVPVPEDVTDELNFHVHLSLENSTRRELRQRKGRSGKKCVASNPIDTCWRCNKNWANDRYRLAKCGKGFGRRATGGLGGPIYVVTDNSDDDMVNPKPGTIRHAVTQRGPLWIIFQRSMMIKLNQELMISSDKTIDGRGANVVFRDGAGLTIQFVNNVIIHGVRIKNIVPKEGGMIRDSYNHVGLRTKSDGDAISXFGASNVWIDHVSLSNCADGLIDVIQGSTAITISNCHMTKHNDVMLFGASDSYSGDKIMQITVAFNHFGQGLVQRMPRCRWGFVHVLNNDYTHWMMYAIGGSSGPTILSQGNRFIAPNNNAAKLITHRDYAEFQVWKNWQXQSEMDLFINGAQFIPSGSPIKTTYKKGLLMKPRDGTHASRLTRNSGALNCIVGRPC

SEQ ID NO: 8681 - protein, 117 aa, Glycine max
  Coding DNA Sequence Number=SeqID_5959
GDRGAGDEVLGVEALLGDRQPLDLGPSPWDAAPEPLLLRNHALAVGRGHRGAAADDHDVLTNHGRFGCLLPGGGFAGDPMPRCCCSWVGRRASGWSEVEFLLFLVVGGGERGKGFWN

SEQ ID NO: 8682 - protein, 165 aa, Glycine max
  misc_feature (117)..(117): Xaa can be any naturally occurring amino acid
  Coding DNA Sequence Number=SeqID_5961
  Gene Ontology: Mol. function=catalytic activity; Cellular component =cytosol; Biological process=pyridoxine biosynthetic process
  Homolog annotation: Hit_ID=Q8L940; Match level="QueryCoverage=95%, HitCoverage=50%, E-value=8e-52, Identity=72%"; Hit description =Pyridoxal biosynthesis protein PDX1.3
  Pfam annotation: Domain name=SOR_SNZ; Domain location=22-165; Score =101.7; E_value=2.3e-27; Accession=PF01680.7; Description=SORSNZ family
MGSGSGVVTAYGNGAITETKKSPFSVKVGLAQMLRGGVIMDVGNAEQARIAEEAGACAGMALERVPADIRAEGGEARMSDPQLIKDIKRAGTIPVMDKARSGHFREDQNREGTGIGXGDEREVVTLADEGGHIKKHQLAEYPLAGGRRNLRKDPRRNWEGDDKNR

SEQ ID NO: 8683 - protein, 411 aa, Glycine max
  misc_feature (144)..(147): Xaa can be any naturally occurring amino acid
  misc_feature (239)..(239): Xaa can be any naturally occurring amino acid
  misc_feature (248)..(248): Xaa can be any naturally occurring amino acid
  misc_feature (388)..(389): Xaa can be any naturally occurring amino acid
  Coding DNA Sequence Number=SeqID_5962
  Gene Ontology: Mol. function=protein binding
  Homolog annotation: Hit_ID=A7QUZ0; Match level="QueryCoverage=99%, HitCoverage=82%, E-value=7e-92, Identity=48%"; Hit description =Chromosome chr16 scaffold_182, whole genome shotgun sequence
  Subcellular localization annotation: CTP_CleavageSite=37; ConfidenceScore=5.27e-01
MSFRSENVNPNPSPTPPLKKRWSDIWTKSKPLNQMVMAMKLHSLSSSPRISTTDKTNPILSPFPITDRTLLLSDALLLKIIALVSDSSTQRNSNSLVCKRWLNLQGRLVRSLRISDWNFLLSGRLMHRFPNLNHVDLLSDALIXXXXSGILLSNRVISMHLDSNSSPNWCFFEDNMLPVEVIDNGLTSLASGCPNLRRLHVIGTTEIGLLTLAEECSTLQETRNCSGCSDQCFCAGIAXCGILQILEXLLGPGDGVLRFRCGLIMGWTILLKGCRRLVKLELVGCEGSFDGVKAIGQCCVMLEELVIVDHRMDDGWLAGVSFCENLKTLRVQSCKVIDGSPGLEEHLGCCEALERVHLQKFQMRDRNGVGALFSVCRNAREIVLQDCXXLDDGTLSLAVVCRHPEHLKLDN

SEQ ID NO: 8684 - protein, 190 aa, Glycine max
  Coding DNA Sequence Number=SeqID_5963
  Gene Ontology: Cellular component=integral to membrane
  Homolog annotation: Hit_ID=Q8GWI3; Match level="QueryCoverage=100%, HitCoverage=100%, E-value=5e-73, Identity=73%"; Hit description =Putative uncharacterized protein At4g22830/T12H17_220
  Subcellular localization annotation: CTP_CleavageSite=72; ConfidenceScore=5.78e-01
MAIASTSTLIFSCAKPDLRPFPSHFRSSSPSPSPLVSQLRIPSLTHDPISLSGLIGTGLVAATFMAAGPGSTAMAAVDSLQLSEPANALSLPTWAVHVSSVVEWITAMVLVWKYGEREGYESWKGLSWGMVPLLGGALCACTWHFFYNAESLEVLVALQGALTVIGNITLCIAAFRINKSASKMETSEEP

SEQ ID NO: 8685 - protein, 131 aa, Glycine max
  misc_feature (4)..(4): Xaa can be any naturally occurring amino acid
  misc_feature (12)..(12): Xaa can be any naturally occurring amino acid
  misc_feature (21)..(21): Xaa can be any naturally occurring amino acid
  misc_feature (23)..(23): Xaa can be any naturally occurring amino acid
  misc_feature (26)..(27): Xaa can be any naturally occurring amino acid
  misc_feature (29)..(30): Xaa can be any naturally occurring amino acid
  misc_feature (35)..(36): Xaa can be any naturally occurring amino acid
  misc_feature (112)..(112): Xaa can be any naturally occurring amino acid
  Coding DNA Sequence Number=SeqID_5964
CAVXTRVLTVDXHQTYSNRLXRXRGXXKXXKGWGXXNMIYDRAVMYHLCVSIASILHRAHVLSLSRLAYTTVYIESGTVNSRPYDMWLLVNMTRLTYVDYILSPRPHSTAHXCAYLRCLGVSTITPAHILY

SEQ ID NO: 8686 - protein, 125 aa, Glycine max
  misc_feature (1)..(1): Xaa can be any naturally occurring amino acid
  misc_feature (9)..(9): Xaa can be any naturally occurring amino acid
  misc_feature (58)..(58): Xaa can be any naturally occurring amino acid
  misc_feature (67)..(67): Xaa can be any naturally occurring amino acid
  misc_feature (71)..(71): Xaa can be any naturally occurring amino acid
  misc_feature (101)..(101): Xaa can be any naturally occurring amino acid
  misc_feature (122)..(122): Xaa can be any naturally occurring amino acid
  Coding DNA Sequence Number=SeqID_565
XVHSYSILXTRYTCATISILDSCHPSLLPVTSCYTLCERTALAPVSVLQYIHSIERYXSYLLLRCKXRRSXRVSALSFLLIECATGHDIVSIWRREHICMXSVCVSVCVYSHRVLQTSSSLXTAI

SEQ ID NO: 8687 - protein, 244 aa, Glycine max
  misc_feature (16)..(16): Xaa can be any naturally occurring amino acid
  misc_feature (22)..(22): Xaa can be any naturally occurring amino acid
  misc_feature (129)..(129): Xaa can be any naturally occurring amino acid
  misc_feature (154)..(154): Xaa can be any naturally occurring amino acid
  Coding DNA Sequence Number=SeqID_567
LLYELRLSRAPFVCYXLLVCRXCARSRPLLSSFAHRTFFYTTNYLFREDCLTSTLILYMYSTGALRVVYRPQYIDVFRDSLPSITFILRTRVCDICVAVSARGNINSARVVGTAPRPRATNAANPEYYXSPRVVNIYYHVVNSRAPRAEIYCIXNCAVESEAELRGEDGVLCRVFLRAGRLFLAAGYSRITGARAGWIRTLSLARRFIIKYGRVYSPMKNVGGTRRTGGPAHIIKCGSGWVSVS

SEQ ID NO: 8688 - protein, 172 aa, Glycine max
  misc_feature (2)..(3): Xaa can be any naturally occurring amino acid
  misc_feature (5)..(5): Xaa can be any naturally occurring amino acid
  misc_feature (7)..(7): Xaa can be any naturally occurring amino acid
  misc_feature (9)..(9): Xaa can be any naturally occurring amino acid
  misc_feature (71)..(71): Xaa can be any naturally occurring amino acid
  misc_feature (75)..(76): Xaa can be any naturally occurring amino acid
  Coding DNA Sequence Number=SeqID_569
  Gene Ontology: Mol. function=transferase activity, transferring glycosyl groups; Cellular component=integral to membrane; Biological process=metabolic process
  Homolog annotation: Hit_ID=A6XNC7; Match level="QueryCoverage=94%, HitCoverage=32%, E-value=2e-38, Identity=54%"; Hit description =(Iso)flavonoid glycosyltransferase
QXXEXAXAXEDSGHDFIWPARKNDGGEGDNSPEEPEKRMKESNKGYLIWGRAPQLPIPENPAIGGAVTHCXRNTXXESENAGSPTATWPQIAEHPLNEKPAVDVSKIGAPAGAKERRNWNEPGSEAAKREEIGNAIASPRSEEQQDGGTRKKAQEPSGAGKQRHKGWGTLPQ

SEQ ID NO: 8689 - protein, 141 aa, Glycine max
  misc_feature (6)..(6): Xaa can be any naturally occurring amino acid
  misc_feature (8)..(8): Xaa can be any naturally occurring amino acid
  misc_feature (15)..(15): Xaa can be any naturally occurring amino acid
  misc_feature (33)..(33): Xaa can be any naturally occurring amino acid
  misc_feature (37)..(38): Xaa can be any naturally occurring amino acid
  misc_feature (45)..(45): Xaa can be any naturally occurring amino acid
  misc_feature (92)..(92): Xaa can be any naturally occurring amino acid
  Coding DNA Sequence Number=SeqID_570
YRHTVXLXVHDECVXDVYIACQHRCTRISLLLXHNYXXVRTMRRXVHIESSSIRAARDTLSTQRQVSVSAVCMLLSRHVLQIDQSAITLREXNRYRREYGVLARHQPDGRTSQQQVTSYIRCRCCDDATLASTCAYAVLVV

SEQ ID NO: 8690 - protein, 121 aa, Glycine max; identical to SEQ ID NO: 6020
  misc_feature (11)..(11): Xaa can be any naturally occurring amino acid
  misc_feature (14)..(14): Xaa can be any naturally occurring amino acid
  misc_feature (99)..(99): Xaa can be any naturally occurring amino acid
  misc_feature (119)..(119): Xaa can be any naturally occurring amino acid
  misc_feature (121)..(121): Xaa can be any naturally occurring amino acid
  Coding DNA Sequence Number=SeqID_572

SEQ ID NO: 8691 - protein, 128 aa, Glycine max
  Coding DNA Sequence Number=SeqID_574
GRAVNQRRACRRSGGDASMNRSRHHRASRNGGDAATCCSSMPSIITTKLDVDEAALPAASYLHGHGSSKRGRKARMKSSRLPVEKHCSGKEEGRLATLGEGGGGGAARRCVAVVGRRRCTRDWGGEGG

SEQ ID NO: 8692 - protein, 176 aa, Glycine max; identical to SEQ ID NO: 7175
  misc_feature (10)..(10): Xaa can be any naturally occurring amino acid
  misc_feature (19)..(19): Xaa can be any naturally occurring amino acid
  misc_feature (25)..(25): Xaa can be any naturally occurring amino acid
  misc_feature (45)..(45): Xaa can be any naturally occurring amino acid
  misc_feature (50)..(50): Xaa can be any naturally occurring amino acid
  misc_feature (53)..(53): Xaa can be any naturally occurring amino acid
  misc_feature (56)..(57): Xaa can be any naturally occurring amino acid
  misc_feature (61)..(61): Xaa can be any naturally occurring amino acid
  misc_feature (65)..(65): Xaa can be any naturally occurring amino acid
  misc_feature (72)..(72): Xaa can be any naturally occurring amino acid
  misc_feature (81)..(81): Xaa can be any naturally occurring amino acid
  misc_feature (84)..(84): Xaa can be any naturally occurring amino acid
  misc_feature (90)..(90): Xaa can be any naturally occurring amino acid
  misc_feature (95)..(95): Xaa can be any naturally occurring amino acid
  misc_feature (110)..(110): Xaa can be any naturally occurring amino acid
  misc_feature (118)..(118): Xaa can be any naturally occurring amino acid
  misc_feature (126)..(126): Xaa can be any naturally occurring amino acid
  misc_feature (140)..(140): Xaa can be any naturally occurring amino acid
  misc_feature (176)..(176): Xaa can be any naturally occurring amino acid
  Coding DNA Sequence Number=SeqID_576

SEQ ID NO: 8693 - protein, 147 aa, Glycine max
  misc_feature (147)..(147): Xaa can be any naturally occurring amino acid
  Coding DNA Sequence Number=SeqID_5965
  Gene Ontology: Mol. function=hydrolase activity, acting on acid halide bonds, in C-halide compounds; Biological process=metabolic process
  Homolog annotation: Hit_ID=Q89D82; Match level="QueryCoverage=98%, HitCoverage=59%, E-value=4e-68, Identity=88%"; Hit description=2 -haloalkanoic acid dehalogenase
  Pfam annotation: Domain name=Hydrolase; Domain location=3-146; Score =9.7; E_value=0.0084; Accession=PF00702.16; Description=haloacid dehalogenase-like hydrolase
MNLKAVVFDAYGTLYDIQSVAEITEDAFPGYGEIITQVWRIKQLEYTWLRSLMRRYQDFAAVTRDSLGYTLRVLGLDYEKDAFERVIEKYLHLDLYPDATAALSALKPRKLAILSNGSPDMLNALVRNSGLDRLLDATISVDARKTX

SEQ ID NO: 8694 - protein, 130 aa, Glycine max
  misc_feature (127)..(127): Xaa can be any naturally occurring amino acid
  Coding DNA Sequence Number=SeqID_5966
  Subcellular localization annotation: CTP_CleavageSite=16; ConfidenceScore=5.01e-01
SFFGGCGKTPTSPFFFFSKKGENFFFWGLFPHKQKEGLPRGKGATKKGAPGPNFWNFSPIYTFPGGKSPGAPYSCFCPNHGKSPNFGNHEREIGFSQSPVIFGQFLFQPFFTFFLMLGPLPSISVPXKII

SEQ ID NO: 8695 - protein, 106 aa, Glycine max
  misc_feature (18)..(18): Xaa can be any naturally occurring amino acid
  misc_feature (30)..(31): Xaa can be any naturally occurring amino acid
  misc_feature (60)..(62): Xaa can be any naturally occurring amino acid
  Coding DNA Sequence Number=SeqID_5967
  Gene Ontology: Mol. function=amino acid binding; Biological process =metabolic process
  Homolog annotation: Hit_ID=A7P2B7; Match level="QueryCoverage=74%, HitCoverage=18%, E-value=6e-27, Identity=77%"; Hit description =Chromosome chr1 scaffold_5, whole genome shotgun sequence
YLVVTIQCKDRPKLLDLXIVCTLTDMKYVXXHANIDAEGPEAYQEYYIKHIDGSPVKSDXXXQRVIQCLAATIKRRVSELSDLLTLSGFAILLIYLHIQMMPSCLC

SEQ ID NO: 8696 - protein, 129 aa, Glycine max
  misc_feature (23)..(23): Xaa can be any naturally occurring amino acid
  misc_feature (26)..(26): Xaa can be any naturally occurring amino acid
  Coding DNA Sequence Number=SeqID_5968
TDNHECSASCAARVYNKTDGAGXEYXILVGRGAGEYIYLLDLMRSGVAVVKRIGHVILIILITYGNAGRPRADNTPHYHSAVRADHRYLILYVAVLVHGSGGSHTSVGRVVSRVACDIMAPIINWKGRK

SEQ ID NO: 8697 - protein, 96 aa, Glycine max
  Coding DNA Sequence Number=SeqID_5970
RSIFFFVFFFILFIRTCTFPSKEIVMNTTPRAARRLNGKDTVLLNLNPNHTGTKEISFAHHVWSACKSKVNASFSYYSILRFCHRHRSLPQSSQEL

SEQ ID NO: 8698 - protein, 137 aa, Glycine max
  misc_feature (68)..(68): Xaa can be any naturally occurring amino acid
  misc_feature (77)..(77): Xaa can be any naturally occurring amino acid
  misc_feature (79)..(79): Xaa can be any naturally occurring amino acid
  misc_feature (137)..(137): Xaa can be any naturally occurring amino acid
  Coding DNA Sequence Number=SeqID_5972
MWPHISTGVLRVCCQFLCRCNVVRSHTAARRLIGWYEYHERVQSPVLDVGARGEICSLAQADHYRIPXIWARGHLRXIXAPLSYYCITDDVASMYMLHCTTYLHPARPRWTGGEGRLPSPMFPTYRFYRICTIDHCX

SEQ ID NO: 8699 - protein, 85 aa, Glycine max
  Coding DNA Sequence Number=SeqID_5974
  Subcellular localization annotation: CTP_CleavageSite=46; ConfidenceScore=5.50e-01
TIVILRCAVLPPPILSSVLCSFGGLGSSTARLALTLVCSSSGYQFRCVAESAPSAVFLDNARLSISTVLHRSLIVAVILTLPPHT

SEQ ID NO: 8700 - protein, 369 aa, Glycine max
  misc_feature (130)..(130): Xaa can be any naturally occurring amino acid
  misc_feature (182)..(182): Xaa can be any naturally occurring amino acid
  misc_feature (280)..(280): Xaa can be any naturally occurring amino acid
  misc_feature (320)..(320): Xaa can be any naturally occurring amino acid
  misc_feature (338)..(338): Xaa can be any naturally occurring amino acid
  Coding DNA Sequence Number=SeqID_5976
  Gene Ontology: Mol. function=NADH dehydrogenase (ubiquinone) activity; Cellular component=integral to membrane; Biological process=electron transport
  Homolog annotation: Hit_ID=A5J070; Match level="QueryCoverage=100%, HitCoverage=100%, E-value=1e-143, Identity=71%"; Hit description =NADH-ubiquinone oxidoreductase chain 1
  Pfam annotation: Domain name=NADHdh; Domain location=8-357; Score =416.7; E_value=3.3e-122; Accession=PF00146.11; Description=NADH dehydrogenase
MRFNITLISILENVILILPALLGVAFVTVAERKTMASMQRRLGPNAVGYYGLLQAFADALKLILKEYVAPTQANLILFFLGPIITLMFALLGFAVIPYGPGLSISDMELGIFFMLAVSSLATYGILLAGXSANSKYAFLGSLRSTAQLISYELVLSSVLLIVIMITNSLNLNINVQFQKITXLALPLLCILIIFFIGSVAETNRAPFDLAEAESELVSGFMTEHAAVIFVFFFLAEYSSIVIMCIFTSILFFGGYLVDFDLILLFDKINYIYAYIFDIDXITSLDYFNIRNILINPSIDGLFSGISLGIKSGIMVFVFIXVRASFPRIRFDQLMSFCXTVLLPILFGFIFLVPCILYAFGVFFINISLF

SEQ ID NO: 8701 - protein, 146 aa, Glycine max; identical to SEQ ID NO: 7710
  misc_feature (46)..(46): Xaa can be any naturally occurring amino acid
  misc_feature (65)..(65): Xaa can be any naturally occurring amino acid
  misc_feature (139)..(139): Xaa can be any naturally occurring amino acid
  Coding DNA Sequence Number=SeqID_5977

SEQ ID NO: 8702 - protein, 203 aa, Glycine max
  misc_feature (185)..(185): Xaa can be any naturally occurring amino acid
  Coding DNA Sequence Number=SeqID_5979
  Subcellular localization annotation: CTP_CleavageSite=18; ConfidenceScore=5.04e-01
LFLKNNNNHHLSLLQPISSNMKFITFLFALLLLSFVFSQQTDTQTDDLTVRTADDNDLSDTEPTRVKGFLPDLTDQSDDNTNDQDDSDTEQTGTRRALADLTDQSDDNTETNTETNTNGNTSDQDDSDTEQTGTGRALADLTDQSDDNTETNTNDNTNDQDDSDTEQTGTLRALADLTDQSDDNXETNTNDNTNDQDQSDSDN

SEQ ID NO: 8703 - protein, 162 aa, Glycine max
  misc_feature (158)..(158): Xaa can be any naturally occurring amino acid
  Coding DNA Sequence Number=SeqID_5981
  Gene Ontology: Biological process=response to salt stress
NLNNENKHMAGKLMTLQVSHLLCISLVIFFVFSVNVVSEEDYQRVVPPEDKTTTVWFSTIKQSGNDYWAKLKESLGRGHARFFPPNIDFRGKDDASMGAGGKMKEAVTRSFEHSKDTVEEAARSAAEVACDATEAVKEKVKRSFSGSETTQQQSDELXIRRL

SEQ ID NO: 8704 - protein, 200 aa, Glycine max
  misc_feature (1)..(72): Xaa can be any naturally occurring amino acid
  Coding DNA Sequence Number=SeqID_5982
XXXXXXXXXXXXXXXXXXXXXXXXXXXXXXXXXXXXXXXXXXXXXXXXXXXXXXXXXXXXXXXXXXXXXXXXGKARAKPPQRRPLRLQSKQANSTPRDLSLPAPPSDAVTLGSSTRSGSSANDSIPARQAVPQAGRGRSFTQVRQAQRPPRQALPQAFLQGVHQKLIFIPYQHHHQSAPRVDRLTLQASGHRSDRRLRLG

SEQ ID NO: 8705 - protein, 94 aa, Glycine max
  misc_feature (38)..(38): Xaa can be any naturally occurring amino acid
  misc_feature (53)..(54): Xaa can be any naturally occurring amino acid
  misc_feature (59)..(59): Xaa can be any naturally occurring amino acid
  Coding DNA Sequence Number=SeqID_5984
AYTQHKHPRLFSSFDLVGLLSFFFGCLLLGCPSFECNXECCYGCVISLWTTLXXCYNLXEEERQEEEEPREHGKGGAGKERRVSRVKETQHKRG

SEQ ID NO: 8706 - protein, 150 aa, Glycine max
  Coding DNA Sequence Number=SeqID_5986
  Pfam annotation: Domain name=zf-GRF; Domain location=36-78; Score =2.5; E_value=0.016; Accession=PF06839.3; Description=GRF zinc finger
LRCVAPCSCSRAVASSSSTMSASSSSVGQDEILPLVPCIECSGRVYSWIARHGVNAGRRFYKCVNKERCGFMRSSEEYRAQLIGSQLLADRLVVPAHSQPAAYLHRRVIPGEQVEQWRRGGEVAADARVEQQPWKGKALASQPRQVHFRK

SEQ ID NO: 8707 - protein, 100 aa, Glycine max
  Coding DNA Sequence Number=SeqID_5988
LRVQRTTDHGLSATDHTNRSPPTRARADKMVVYPSQILRDLLPLRNFLTTRSHAVVPRSASSLSLLLYSDLSITSVYKNASSNNVLDTQHHTPPSLCAAL

SEQ ID NO: 8708 - protein, 62 aa, Glycine max
  Coding DNA Sequence Number=SeqID_5990
  Subcellular localization annotation: CTP_CleavageSite=24; ConfidenceScore=5.27e-01
TKPNSSNPTKPASPSLRGDRRYPNGATAKETHRSLRQTGGVRLASQICFSFGREGEISHEMA

SEQ ID NO: 8709 - protein, 132 aa, Glycine max
  misc_feature (50)..(50): Xaa can be any naturally occurring amino acid
  misc_feature (54)..(54): Xaa can be any naturally occurring amino acid
  misc_feature (58)..(59): Xaa can be any naturally occurring amino acid
  misc_feature (62)..(62): Xaa can be any naturally occurring amino acid
  misc_feature (66)..(66): Xaa can be any naturally occurring amino acid
  misc_feature (75)..(76): Xaa can be any naturally occurring amino acid
  misc_feature (81)..(81): Xaa can be any naturally occurring amino acid
  misc_feature (90)..(90): Xaa can be any naturally occurring amino acid
  misc_feature (100)..(100): Xaa can be any naturally occurring amino acid
  misc_feature (102)..(102): Xaa can be any naturally occurring amino acid
  Coding DNA Sequence Number=SeqID_5992
  Gene Ontology: Mol. function=identical protein binding; Cellular component=extracellular region; Biological process=negative regulation of catalytic activity
  Homolog annotation: Hit_ID=O49607; Match level="QueryCoverage=70%, HitCoverage=12%, E-value=4e-30, Identity=67%"; Hit description =Subtilisin proteinase-like
ARAGGGLAVFEDRRRQLHTTRSPQFLGLRNQRGLWAESDYGSDVIIGVFXTGVXARRXXFSXLNLXPIPGRGEGXXGGGVXFSPKNCNHXLIGARFFSKXHXASAGGGGSQSNQPHHEITIPYQRPWGPGPC

SEQ ID NO: 8710 - protein, 128 aa, Glycine max
  misc_feature (42)..(43): Xaa can be any naturally occurring amino acid
  misc_feature (48)..(48): Xaa can be any naturally occurring amino acid
  misc_feature (51)..(53): Xaa can be any naturally occurring amino acid
  misc_feature (99)..(99): Xaa can be any naturally occurring amino acid
  misc_feature (108)..(108): Xaa can be any naturally occurring amino acid
  misc_feature (114)..(114): Xaa can be any naturally occurring amino acid
  Coding DNA Sequence Number=SeqID_1632
  Homolog annotation: Hit_ID=A8W460; Match level="QueryCoverage=66%, HitCoverage=28%, E-value=1e-11, Identity=43%"; Hit description=SINA1
EKRGNAQIINSVKFRIFVSGCFSFRVFTFSGGRKGVWFGELXXLMSVXCVXXXDGVGEDEIHANHHHSGVFSTQPRDGGTWNINGVGPHGIASATQRHXSAGLYVCDXSNERSXHQCHSGHTTWSTCK

SEQ ID NO: 8711 - protein, 151 aa, Glycine max; identical to SEQ ID NO: 8653
  misc_feature (16)..(16): Xaa can be any naturally occurring amino acid
  misc_feature (30)..(30): Xaa can be any naturally occurring amino acid
  misc_feature (54)..(56): Xaa can be any naturally occurring amino acid
  misc_feature (114)..(114): Xaa can be any naturally occurring amino acid
  misc_feature (138)..(138): Xaa can be any naturally occurring amino acid
  Coding DNA Sequence Number=SeqID_1633

SEQ ID NO: 8712 - protein, 83 aa, Glycine max
  misc_feature (1)..(1): Xaa can be any naturally occurring amino acid
  misc_feature (9)..(9): Xaa can be any naturally occurring amino acid
  misc_feature (33)..(33): Xaa can be any naturally occurring amino acid
  misc_feature (38)..(38): Xaa can be any naturally occurring amino acid
  misc_feature (54)..(54): Xaa can be any naturally occurring amino acid
  misc_feature (56)..(56): Xaa can be any naturally occurring amino acid
  misc_feature (70)..(73): Xaa can be any naturally occurring amino acid
  misc_feature (82)..(82): Xaa can be any naturally occurring amino acid
  Coding DNA Sequence Number=SeqID_1635
  Subcellular localization annotation: CTP_CleavageSite=47; ConfidenceScore=5.30e-01
XVQETTGAXAPRLLSSATLSYLLTLFPRIYTSXISHQXPAPRPRKERASSSSSXYXKNMVSFSPVRTLGXXXXPSIPSPFCXP

SEQ ID NO: 8713 - protein, 223 aa, Glycine max
  misc_feature (115)..(116): Xaa can be any naturally occurring amino acid
  misc_feature (129)..(129): Xaa can be any naturally occurring amino acid
  misc_feature (162)..(162): Xaa can be any naturally occurring amino acid
  misc_feature (193)..(193): Xaa can be any naturally occurring amino acid
  misc_feature (195)..(195): Xaa can be any naturally occurring amino acid
  misc_feature (210)..(210): Xaa can be any naturally occurring amino acid
  Coding DNA Sequence Number=SeqID_1637
SQSPSLHLTHPPIYIILAQHPHTHIIKKTNINTSATQLPLTQSSPIPISPTIHHPHQFNILFVVLFIVFLSSPVSLFSPFFVCFSPRALLSEPSHTQRTHHINTPPLSTPAQPQXXTTPPLTNTKKKQXYIHTISFIFYICISKRTLPFIFSFFLFSLSRFXTCVVLGWLYFPHHPHTTPYCNPFKRFFCSGXGXGVWGLLMVLPTALPXGHTTQPTHHTQTK

SEQ ID NO: 8714 - protein, 118 aa, Glycine max
  misc_feature (20)..(20): Xaa can be any naturally occurring amino acid
  misc_feature (91)..(118): Xaa can be any naturally occurring amino acid
  Coding DNA Sequence Number=SeqID_1639
  Subcellular localization annotation: CTP_CleavageSite=55; ConfidenceScore=5.45e-01
RGAPPISQSTSPLGPRPRRXRRPLAQPGIRQRQISSSPMHQDYPARMRSMLLRPRAADQACGLRATPWASTPMSGPSCPKRHLNALFLGLXXXXXXXXXXXXXXXXXXXXXXXXXXXX

SEQ ID NO: 8715 - protein, 112 aa, Glycine max; identical to SEQ ID NO: 6819
  misc_feature (46)..(46): Xaa can be any naturally occurring amino acid
  Coding DNA Sequence Number=SeqID_1641

SEQ ID NO: 8716 - protein, 108 aa, Glycine max; identical to SEQ ID NO: 8661
  misc_feature (15)..(15): Xaa can be any naturally occurring amino acid
  misc_feature (37)..(37): Xaa can be any naturally occurring amino acid
  misc_feature (46)..(46): Xaa can be any naturally occurring amino acid
  misc_feature (53)..(53): Xaa can be any naturally occurring amino acid
  misc_feature (56)..(56): Xaa can be any naturally occurring amino acid
  misc_feature (90)..(90): Xaa can be any naturally occurring amino acid
  misc_feature (102)..(102): Xaa can be any naturally occurring amino acid
  Coding DNA Sequence Number=SeqID_1643

SEQ ID NO: 8717 - protein, 93 aa, Glycine max
  misc_feature (3)..(3): Xaa can be any naturally occurring amino acid
  misc_feature (8)..(8): Xaa can be any naturally occurring amino acid
  misc_feature (29)..(29): Xaa can be any naturally occurring amino acid
  misc_feature (44)..(44): Xaa can be any naturally occurring amino acid
  misc_feature (46)..(46): Xaa can be any naturally occurring amino acid
  misc_feature (56)..(59): Xaa can be any naturally occurring amino acid
  Coding DNA Sequence Number=SeqID_1645
LFXLFIQXTLFIKTHKTAHTHNPNTTTHXIYIDRKRNQTHYQKXEXGEARAVMGEXXXXRRNRGEFDVYPILSALSPPTLVVSASTQQERLYI

SEQ ID NO: 8718 - protein, 98 aa, Glycine max
  misc_feature (28)..(28): Xaa can be any naturally occurring amino acid
  misc_feature (46)..(46): Xaa can be any naturally occurring amino acid
  misc_feature (67)..(67): Xaa can be any naturally occurring amino acid
  Coding DNA Sequence Number=SeqID_5993
  Gene Ontology: Mol. function=transporter activity; Cellular component= integral to membrane; Biological process=transport
  Homolog annotation: Hit_ID=A5LGM4; Match level="QueryCoverage=100%, HitCoverage=34%, E-value=5e-17, Identity=47%"; Hit description =Plasma membrane intrinsic protein
PERESKKIHMFRLLGPPPIEMDVLMVNXPPIPDIGSGIHPVEILGXGVINTPNKPWDDHGIFWVGPXIGAAIAAFYPQLILKAGAAKALGSFRSTPHN

SEQ ID NO: 8719 - protein, 286 aa, Glycine max; identical to SEQ ID NO: 7721
  misc_feature (1)..(1): Xaa can be any naturally occurring amino acid
  misc_feature (60)..(60): Xaa can be any naturally occurring amino acid
  Coding DNA Sequence Number=SeqID_5994

SEQ ID NO: 8720 - protein, 103 aa, Glycine max
  Coding DNA Sequence Number=SeqID_5996
KDEAEFSLFTISTYTKPLYYCYSVFTTLIMMGSWLLRSIIYPSSADTLQTRTYLLLLLPCLRVVMGLHVFVWCDFCRCSPLIFLITYCPLLICFVSFSLTSAC

SEQ ID NO: 8721 - protein, 142 aa, Glycine max
  misc_feature (68)..(68): Xaa can be any naturally occurring amino acid
  misc_feature (76)..(76): Xaa can be any naturally occurring amino acid
  misc_feature (86)..(86): Xaa can be any naturally occurring amino acid
  misc_feature (95)..(95): Xaa can be any naturally occurring amino acid
  misc_feature (102)..(102): Xaa can be any naturally occurring amino acid
  misc_feature (110)..(110): Xaa can be any naturally occurring amino acid
  misc_feature (127)..(127): Xaa can be any naturally occurring amino acid
  Coding DNA Sequence Number=SeqID_5998
  Gene Ontology: Mol. function=DNA binding; Cellular component=nucleus; Biological process=regulation of transcription
  Homolog annotation: Hit_ID=A7NVF8; Match level="QueryCoverage=97%, HitCoverage=59%, E-value=2e-44, Identity=64%"; Hit description =Chromosome chr18 scaffold_1, whole genome shotgun sequence
  Pfam annotation: Domain name=NAM; Domain location=3-127; Score=127.5; E_value=4e-35; Accession=PF02365.6; Description=No apical meristem (NAM) protein
LQLPPDFRFHPTDDELVNHYLCRKCDAQTIAVPIIKEIDLNKFDPWKLPQMALYGEKECYFFSPRDRXYPIRSRPXQAAGMSTARXTGRDYPMGXNDMPCIXNCLVIYAXNPNGVETNGIMHDYRLXDVDRSCLKNSTTTTS

SEQ ID NO: 8722 - protein, 244 aa, Glycine max; identical to SEQ ID NO: 7724
  misc_feature (13)..(13): Xaa can be any naturally occurring amino acid
  misc_feature (23)..(23): Xaa can be any naturally occurring amino acid
  misc_feature (97)..(97): Xaa can be any naturally occurring amino acid
  misc_feature (103)..(103): Xaa can be any naturally occurring amino acid
  misc_feature (134)..(134): Xaa can be any naturally occurring amino acid
  misc_feature (169)..(169): Xaa can be any naturally occurring amino acid
  misc_feature (193)..(194): Xaa can be any naturally occurring amino acid
  misc_feature (210)..(210): Xaa can be any naturally occurring amino acid
  misc_feature (212)..(212): Xaa can be any naturally occurring amino acid
  misc_feature (219)..(219): Xaa can be any naturally occurring amino acid
  misc_feature (230)..(230): Xaa can be any naturally occurring amino acid
  misc_feature (234)..(234): Xaa can be any naturally occurring amino acid
  misc_feature (239)..(240): Xaa can be any naturally occurring amino acid
  Coding DNA Sequence Number=SeqID_5999

SEQ ID NO: 8723 - protein, 124 aa, Glycine max
  misc_feature (8)..(8): Xaa can be any naturally occurring amino acid
  misc_feature (24)..(24): Xaa can be any naturally occurring amino acid
  misc_feature (27)..(30): Xaa can be any naturally occurring amino acid
  misc_feature (32)..(32): Xaa can be any naturally occurring amino acid
  misc_feature (36)..(36): Xaa can be any naturally occurring amino acid
  misc_feature (38)..(38): Xaa can be any naturally occurring amino acid
  misc_feature (54)..(54): Xaa can be any naturally occurring amino acid
  misc_feature (58)..(58): Xaa can be any naturally occurring amino acid
  misc_feature (89)..(89): Xaa can be any naturally occurring amino acid
  misc_feature (100)..(100): Xaa can be any naturally occurring amino acid
  misc_feature (113)..(113): Xaa can be any naturally occurring amino acid
  Coding DNA Sequence Number=SeqID_5209
SKDSAHIXTVRSTALRCVYSVIIXSLXXXXSXYRCXQXPMLQRASERETSLRYXGEDXHYSLVKSAACAERYSTYSRKEYTHESSRQRXVVLMRMRSHNXNSRRPSPPVITPXAQITRRQMPSA

SEQ ID NO: 8724 - protein, 189 aa, Glycine max; identical to SEQ ID NO: 8150
  misc_feature (14)..(14): Xaa can be any naturally occurring amino acid
  Coding DNA Sequence Number=SeqID_5211
  Subcellular localization annotation: CTP_CleavageSite=78; ConfidenceScore=5.16e-01

SEQ ID NO: 8725 - protein, 89 aa, Glycine max
  Coding DNA Sequence Number=SeqID_5213
  Homolog annotation: Hit_ID=A8FC26; Match level="QueryCoverage=76%, HitCoverage=60%, E-value=9e-22, Identity=72%"; Hit description =Hypothetical membrane protein
  Pfam annotation: Domain name=DUF1360; Domain location=13-89; Score =76.7; E_value=7.8e-20; Accession=PF07098.2; Description=Protein of unknown function (DUF1360)
GDGKEERRRWRLLSGALSFVVFALASFRLTRLIVFDTITAPFRRLFHEEQEEVNEQGEVETYIIIKGGGLRSWVGELLSCYWCTSAATT

SEQ ID NO: 8726 - protein, 138 aa, Glycine max
  misc_feature (1)..(2): Xaa can be any naturally occurring amino acid
  misc_feature (18)..(18): Xaa can be any naturally occurring amino acid
  misc_feature (23)..(23): Xaa can be any naturally occurring amino acid
  misc_feature (40)..(40): Xaa can be any naturally occurring amino acid
  misc_feature (54)..(54): Xaa can be any naturally occurring amino acid
  misc_feature (67)..(67): Xaa can be any naturally occurring amino acid
  misc_feature (71)..(72): Xaa can be any naturally occurring amino acid
  misc_feature (83)..(83): Xaa can be any naturally occurring amino acid
  misc_feature (88)..(88): Xaa can be any naturally occurring amino acid
  misc_feature (95)..(95): Xaa can be any naturally occurring amino acid
  misc_feature (105)..(105): Xaa can be any naturally occurring amino acid
  misc_feature (118)..(118): Xaa can be any naturally occurring amino acid
  misc_feature (127)..(127): Xaa can be any naturally occurring amino acid
  Coding DNA Sequence Number=SeqID_5214
  Subcellular localization annotation: CTP_CleavageSite=55; ConfidenceScore=5.10e-01
XXSLLLYSARLARRAALXSLIPXRGTMYAHPSHVSSLSPXLSTLPCTSLDLTLXLCAVVVACTTNEXRRAXXRLFILSYADSXTLCLXTNTTRTXLLVTRLSGDXSGRGPHSRVDALXLHICTLLYXHHLLYDIEPST

SEQ ID NO: 8727 - protein, 65 aa, Glycine max
  Coding DNA Sequence Number=SeqID_5216
  Pfam annotation: Domain name=F-box; Domain location=1-48; Score=34.3; E_value=4.3e-07; Accession=PF00646.23; Description=F-box domain
KRKVTLPFDLIVEILLRLSVRSLLRFKCVSKSWCALISDPEFAKSHIDITKSKAPYRENLTFGDG

SEQ ID NO: 8728 - protein, 66 aa, Glycine max
  Coding DNA Sequence Number=SeqID_5218
PSFFNKKKSIKIELNWEYRHPVLQDHIILSHMYSLIYISNNHDQLEKHINANQNCLGFPLFCRSNP

SEQ ID NO: 8729 - protein, 129 aa, Glycine max
  misc_feature (2)..(2): Xaa can be any naturally occurring amino acid
  misc_feature (15)..(15): Xaa can be any naturally occurring amino acid
  misc_feature (19)..(19): Xaa can be any naturally occurring amino acid
  misc_feature (23)..(23): Xaa can be any naturally occurring amino acid
  misc_feature (51)..(51): Xaa can be any naturally occurring amino acid
  misc_feature (63)..(63): Xaa can be any naturally occurring amino acid
  Coding DNA Sequence Number=SeqID_5219
  Subcellular localization annotation: CTP_CleavageSite=46; ConfidenceScore=5.42e-01
IXHASRAHRSAHMPXQALXWQNXGRAAVGRHRRPLTPCSKMSTSVSLSSAXDHVSSNVVCLHXLHTHYMDALCGCGMTDLIVVARRACRPRARAATVAASRLVLQRALIKGCNRPWSATPHTSTRPSVN

SEQ ID NO: 8730 - protein, 98 aa, Glycine max
  Coding DNA Sequence Number=SeqID_5221
  Gene Ontology: Mol. function=protein binding; Cellular component =integral to membrane; Biological process=protein amino acid phosphorylation
  Homolog annotation: Hit_ID=A7Q7I4; Match level="QueryCoverage=98%, HitCoverage=46%, E-value=2e-18, Identity=42%"; Hit description =Chromosome undetermined scaffold_60, whole genome shotgun sequence
  Pfam annotation: Domain name=LRR_1; Domain location=27-49; Score =17.1; E_value=0.068; Accession=PF00560.23; Description=Leucine Rich Repeat
  Pfam annotation: Domain name=LRR_1; Domain location=3-25; Score=18.5; E_value=0.026; Accession=PF00560.23; Description=Leucine Rich Repeat
  Pfam annotation: Domain name=LRR_1; Domain location=51-73; Score =12.6; E_value=1.4; Accession=PF00560.23; Description=Leucine Rich Repeat
  Pfam module annotation: Pfam domain module=LRR_1::LRR_1::LRR_1; Domain location=27-49::3-25::51-73
SLSLQRLDLSRNRFEGNIPSQIGNLSELRHLYLSWNTLEGNIPSQIGNLSKLQHLYLRYNHLDRSITSQLGNLSNLQKLYLGGRVPSRLGKLSQLLLI

SEQ ID NO: 8731 - protein, 222 aa, Glycine max
  Coding DNA Sequence Number=SeqID_5222
  Homolog annotation: Hit_ID=A5ASB9; Match level="QueryCoverage=82%, HitCoverage=66%, E-value=5e-32, Identity=40%"; Hit description =Putative uncharacterized protein
KDMVSETESPPLIGPRISFSDGGDFICTELEKEIVKGSVKVSDFEFLSENASPERMHTADELFSEGKLLPLWQEKHSEKLKNVNLKTNEEEESRKVEAAMTSDDSSKNRVCWFIDEDPSPRPPKCTVLWKELLRLKKQRSSSSVKSSLSPSSSTSSSSSLEDKREGKRGKKGLERTRSSTSVRIRPMIHVPVCTPPSKSSVSLPPLFPSLRLKKNRAEKSKL

SEQ ID NO: 8732 - protein, 134 aa, Glycine max
  misc_feature (15)..(16): Xaa can be any naturally occurring amino acid
  misc_feature (21)..(21): Xaa can be any naturally occurring amino acid
  misc_feature (26)..(26): Xaa can be any naturally occurring amino acid
  misc_feature (28)..(28): Xaa can be any naturally occurring amino acid
  misc_feature (33)..(33): Xaa can be any naturally occurring amino acid
  misc_feature (42)..(42): Xaa can be any naturally occurring amino acid
  misc_feature (61)..(61): Xaa can be any naturally occurring amino acid
  misc_feature (64)..(64): Xaa can be any naturally occurring amino acid
  misc_feature (68)..(70): Xaa can be any naturally occurring amino acid
  misc_feature (75)..(76): Xaa can be any naturally occurring amino acid
  misc_feature (80)..(80): Xaa can be any naturally occurring amino acid
  misc_feature (84)..(84): Xaa can be any naturally occurring amino acid
  misc_feature (93)..(93): Xaa can be any naturally occurring amino acid
  misc_feature (95)..(95): Xaa can be any naturally occurring amino acid
  misc_feature (98)..(99): Xaa can be any naturally occurring amino acid
  misc_feature (105)..(105): Xaa can be any naturally occurring amino acid
  misc_feature (113)..(113): Xaa can be any naturally occurring amino acid
  misc_feature (115)..(115): Xaa can be any naturally occurring amino acid
  misc_feature (127)..(128): Xaa can be any naturally occurring amino acid
  misc_feature (132)..(132): Xaa can be any naturally occurring amino acid
  misc_feature (134)..(134): Xaa can be any naturally occurring amino acid
  Coding DNA Sequence Number=SeqID_5223
HFDVQTALTCLRRLXXASRSXIESSXLXILTHXSSRPTEIQXAISLRRSSATCSRAWQLRXRAXRNAXXXRERFXXVRRXRVCXLCSLVAIHXTXHTXXYTHPQXSLITPDSXAXSRLALSLLPLRXXENVXIX

SEQ ID NO: 8733 - protein, 76 aa, Glycine max
  misc_feature (41)..(41): Xaa can be any naturally occurring amino acid
  Coding DNA Sequence Number=SeqID_5225
  Gene Ontology: Mol. function=cysteine-type endopeptidase activity; Cellular component=endoplasmic reticulum lumen; Biological process =proteolysis
  Homolog annotation: Hit_ID=P25803; Match level="QueryCoverage=93%, HitCoverage=19%, E-value=1e-19, Identity=67%"; Hit description =Vignain precursor
MAMKKFLWVVLSLSLVLGVANSFDFHDKDLESEETLWDLYXRWRSHHTVSRSLGDKHKRFKRFQKEKWMHVIHHKG

SEQ ID NO: 8734 - protein, 91 aa, Glycine max
  misc_feature (50)..(50): Xaa can be any naturally occurring amino acid
  Coding DNA Sequence Number=SeqID_5226
  Gene Ontology: Mol. function=serine carboxypeptidase activity; Cellular component=peroxisome; Biological process=proteolysis
  Homolog annotation: Hit_ID=P37890; Match level="QueryCoverage=97%, HitCoverage=17%, E-value=1e-26, Identity=67%"; Hit description =Serine carboxypeptidase 1 precursor (EC 3.4.16.5) (Serine carboxypeptidase I) ...
  Homolog annotation: Hit description=(Carboxypeptidase C) [Contains: Serine carboxypeptidase 1 chain A (Serine carboxypeptidase I chain A); Serine carboxypeptidase 1 chain B (Serine carboxypeptidase I chain B)]
SKNTSKYATGDLETASDTHLFLLKWFQQFPEFQANPFYIAGESYAGVYVXPTLAFEVAKGIWSGTKPVINFKGYLGGKMLSRTKYLDGNCS

SEQ ID NO: 8735 - protein, 108 aa, Glycine max
  misc_feature (24)..(24): Xaa can be any naturally occurring amino acid
  misc_feature (53)..(53): Xaa can be any naturally occurring amino acid
  misc_feature (75)..(77): Xaa can be any naturally occurring amino acid
  misc_feature (83)..(83): Xaa can be any naturally occurring amino acid
  misc_feature (85)..(85): Xaa can be any naturally occurring amino acid
  Coding DNA Sequence Number=SeqID_5227
YDDVCVHIFRYTRHDDYYLLVVVXHQLPTRLPAHHHTSLKCRYSVSNYRSYMXLTYSRSHHHLVYDIYDERKRSXXXTQYAHXTXPTPLHLICALVTTASVRSCGDTI

SEQ ID NO: 8736 - protein, 127 aa, Glycine max
  misc_feature (82)..(82): Xaa can be any naturally occurring amino acid
  misc_feature (123)..(124): Xaa can be any naturally occurring amino acid
  Coding DNA Sequence Number=SeqID_5229
SPSFSTSHYLRVGPVWFRGHGDRYTIHLNICIILLSCRRRRREPRSIATPRCEKSVDERVRNIRNVNIPYKIIIMRGKRDGXAGVLLDVGWGSTVVIECVVTHNSPSGLLPLRVVVMCGCCAXXVKA

SEQ ID NO: 8737 - protein, 71 aa, Glycine max
  Coding DNA Sequence Number=SeqID_5231
  Subcellular localization annotation: CTP_CleavageSite=56; ConfidenceScore=5.12e-01
ALSLHLSTKPLFVMWPALAMALHRAVSPHKVSYVLATVFPMVIQFVLLHAWCSAVCSSSIKSPPTQRVSPI

SEQ ID NO: 8738 - protein, 108 aa, Glycine max
  Coding DNA Sequence Number=SeqID_5233
WDPKRVPFETKYNWVLGRRAPRGGARGPYKRSLVPFPIGGNFLQVRPPLPGRGSGGPQFRQCQCQRSSFALKVTDNWNIHAYRKSTCAMDASPLISGHIFDVGRARAV

SEQ ID NO: 8739 - protein, 102 aa, Glycine max
  misc_feature (10)..(10): Xaa can be any naturally occurring amino acid
  misc_feature (12)..(12): Xaa can be any naturally occurring amino acid
  misc_feature (46)..(46): Xaa can be any naturally occurring amino acid
  misc_feature (96)..(97): Xaa can be any naturally occurring amino acid
  Coding DNA Sequence Number=SeqID_5235
IYSSGYEVTXCXKYAHTSAHPIFLYCVLSHGLRLLRTSGATPPARXREWTAPQYDTHCTGRVRTTLSDILVVYYDPPYSITFVRNLFAFAIAALNXXCARLL

SEQ ID NO: 8740 - protein, 56 aa, Glycine max
  Coding DNA Sequence Number=SeqID_5237
  Homolog annotation: Hit_ID=A7PAN3; Match level="QueryCoverage=94%, HitCoverage=13%, E-value=9e-12, Identity=62%"; Hit description =Chromosome chr14 scaffold_9, whole genome shotgun sequence
GRKVPPGPPTEVPIALPPPQDPSGPATEGHWIAKLVACGGRHPLPIVEWKSNESSN

SEQ ID NO: 8741 - protein, 122 aa, Glycine max
  misc_feature (22)..(22): Xaa can be any naturally occurring amino acid
  misc_feature (35)..(37): Xaa can be any naturally occurring amino acid
  misc_feature (54)..(54): Xaa can be any naturally occurring amino acid
  misc_feature (58)..(58): Xaa can be any naturally occurring amino acid
  misc_feature (78)..(79): Xaa can be any naturally occurring amino acid
  misc_feature (84)..(84): Xaa can be any naturally occurring amino acid
  misc_feature (88)..(88): Xaa can be any naturally occurring amino acid
  misc_feature (112)..(112): Xaa can be any naturally occurring amino acid
  Coding DNA Sequence Number=SeqID_5238
FIHTLYLHLPWRRYQLPHVQAXAVPTTWTTVAPRXXXEHNIPLLPHSGTSLDGXLSQXSLLSTHISTLTRRHVVYNSXXHTHKXEIWXLYPARLRRGCITLCRSKSLCVRLXLFCLLSMYAD

SEQ ID NO: 8742 - protein, 89 aa, Glycine max
  misc_feature (18)..(19): Xaa can be any naturally occurring amino acid
  misc_feature (23)..(24): Xaa can be any naturally occurring amino acid
  misc_feature (28)..(29): Xaa can be any naturally occurring amino acid
  misc_feature (65)..(66): Xaa can be any naturally occurring amino acid
  Coding DNA Sequence Number=SeqID_5240
  Homolog annotation: Hit_ID=A7P297; Match level="QueryCoverage=75%, HitCoverage=18%, E-value=6e-07, Identity=46%"; Hit description =Chromosome chr19 scaffold_4, whole genome shotgun sequence
MLREMELGVKQVLVKLGXXGSAXXVEGXXPIQQPAILAKTVVDTTGAGDTFTAAFAVALVEGKSXXECLRFAGVYGGMQLLSRIFSLCS

SEQ ID NO: 8743 - protein, 148 aa, Glycine max
  misc_feature (72)..(73): Xaa can be any naturally occurring amino acid
  misc_feature (75)..(75): Xaa can be any naturally occurring amino acid
  misc_feature (77)..(77): Xaa can be any naturally occurring amino acid
  misc_feature (96)..(96): Xaa can be any naturally occurring amino acid
  Coding DNA Sequence Number=SeqID_5241
  Homolog annotation: Hit_ID=A0DZZ8; Match level="QueryCoverage=100%, HitCoverage=31%, E-value=1e-09, Identity=26%"; Hit description =Chromosome undetermined scaffold_70, whole genome shotgun sequence
MMYPKKTPKQAKADQEAKKLISQQQREQLKEMVAGKFQAKYPNKDPQALQEKVDNFFENNGHQTLTSEALRXXDXNXAYSEKDKRSAIGQDRDDIXVKSGVSKMSGATDFAPLDKTERSGSKKGTTVDLNMRTRKEPSEKAYRNDEEE

SEQ ID NO: 8744 - protein, 233 aa, Glycine max
  misc_feature (53)..(53): Xaa can be any naturally occurring amino acid
  misc_feature (80)..(80): Xaa can be any naturally occurring amino acid
  misc_feature (84)..(84): Xaa can be any naturally occurring amino acid
  misc_feature (90)..(90): Xaa can be any naturally occurring amino acid
  misc_feature (122)..(122): Xaa can be any naturally occurring amino acid
  misc_feature (127)..(128): Xaa can be any naturally occurring amino acid
  misc_feature (137)..(137): Xaa can be any naturally occurring amino acid
  misc_feature (141)..(141): Xaa can be any naturally occurring amino acid
  misc_feature (182)..(182): Xaa can be any naturally occurring amino acid
  misc_feature (203)..(203): Xaa can be any naturally occurring amino acid
  Coding DNA Sequence Number=SeqID_5242
HYDRARQARAVVEHIYAQRGGELRRKRRSSIRLEWTRCVRNQDEGREEETSWXERKGNVDDEYAQHADRSVKAGFIYRHXGQEXGSRTPXIYTINHNTYNKQHLCIYTGRRCGGVVRQREFXAMFIXXSITHKTVIXSSVXRNTQLCDIPNEEDTEQKPECSIRCQKRLSYEPLSPQICAPXTNEMTTLRQCAPSPCCVAPPXVLRALRCRPPMCITIHLLLVPASFCHTMYV

SEQ ID NO: 8745 - protein, 135 aa, Glycine max
  Coding DNA Sequence Number=SeqID_5244
  Homolog annotation: Hit_ID=A9PAG3; Match level="QueryCoverage=57%, HitCoverage=38%, E-value=1e-35, Identity=83%"; Hit description =Putative uncharacterized protein
MSSFNGSSNIDNLLLQTLLGRLQIRPPNSPPLLSQSLEDLLFKPDDSDGDDRSSLDGEEARLEKELISVIVSGRIDPLKPNSGQAVTVNEHHICVGFHEDEESDYRVWEWHGHIMLFDEENGYTPEYIYGNYFER

SEQ ID NO: 8746 - protein, 112 aa, Glycine max
  misc_feature (31)..(31): Xaa can be any naturally occurring amino acid
  misc_feature (83)..(83): Xaa can be any naturally occurring amino acid
  misc_feature (89)..(89): Xaa can be any naturally occurring amino acid
  misc_feature (112)..(112): Xaa can be any naturally occurring amino acid
  Coding DNA Sequence Number=SeqID_5245
  Gene Ontology: Mol. function=RNA binding; Biological process=RNA processing
  Homolog annotation: Hit_ID=A7P0Y6; Match level="QueryCoverage=82%, HitCoverage=22%, E-value=1e-35, Identity=82%"; Hit description =Chromosome chr19 scaffold_4, whole genome shotgun sequence
  Subcellular localization annotation: CTP_CleavageSite=39; ConfidenceScore=5.10e-01
LRGGAITILSSFGTSLSGPEYDPSFKSFKGXFGPLPSDVAMELSNVLNNLNGTKESIKGAKLWFMQRSPFAPALAEALRDRVXFALDEXERQLPIIYLGHDIIFDRLNRRTX

SEQ ID NO: 8747 - protein, 204 aa, Glycine max
  misc_feature (129)..(129): Xaa can be any naturally occurring amino acid
  misc_feature (181)..(181): Xaa can be any naturally occurring amino acid
  Coding DNA Sequence Number=SeqID_5246
  Gene Ontology: Mol. function=catalytic activity; Biological process =metabolic process
  Homolog annotation: Hit_ID=A7Q9R2; Match level="QueryCoverage=98%, HitCoverage=47%, E-value=9e-67, Identity=55%"; Hit description =Chromosome chr5 scaffold_67, whole genome shotgun sequence
MEKVKVLRRLLETPGVHQGPACFDALGAKLIESAGFPYCITSGFSIAASRLALPDTGFISYGEMLEQGQLITQAVSIPVIGDADNGYGNAMNLKRTVKGFIAAGFAGIILEDQIAPKACGHTRGRKSVXRCKAYGDAGADVLFIDALASVQRMKALCGLFPIFRNFAICLKGGGKRLYFSXSELREVGYKLLMIPFPWMGGCLR

SEQ ID NO: 8748 - protein, 159 aa, Glycine max
  misc_feature (2)..(2): Xaa can be any naturally occurring amino acid
  misc_feature (22)..(22): Xaa can be any naturally occurring amino acid
  misc_feature (35)..(35): Xaa can be any naturally occurring amino acid
  misc_feature (57)..(57): Xaa can be any naturally occurring amino acid
  misc_feature (66)..(66): Xaa can be any naturally occurring amino acid
  misc_feature (100)..(100): Xaa can be any naturally occurring amino acid
  misc_feature (126)..(126): Xaa can be any naturally occurring amino acid
  misc_feature (130)..(130): Xaa can be any naturally occurring amino acid
  Coding DNA Sequence Number=SeqID_5247
DXICLLHQRITQTSSIRCAAPXARGAAPARERYVXYTCCRALEVYVSMYIYSPDMRXCTDSYRRHXYILIIAIQYQLLLLYILQHSIRFRYILFVEDTTXRIALSHRLMYDTLPRIIYIIYLSTVXIICXAPPLSSTPLCHYDDKYSPPCDPHTIRCHI

SEQ ID NO: 8749 - protein, 84 aa, Glycine max
  misc_feature (46)..(46): Xaa can be any naturally occurring amino acid
  Coding DNA Sequence Number=SeqID_5249
GCSLTYAIIARSRSVGVDGTEYLTSSAVANLADGASHGEHGRQERXAHVLTYRRRPVHHRRREGGAKRAASIARAEAEARLCVE

SEQ ID NO: 8750 - protein, 151 aa, Glycine max
  misc_feature (6)..(11): Xaa can be any naturally occurring amino acid
  misc_feature (41)..(42): Xaa can be any naturally occurring amino acid
  misc_feature (114)..(114): Xaa can be any naturally occurring amino acid
  Coding DNA Sequence Number=SeqID_5251
CGLGVXXXXXXLFCMDYCKYANTKAGEHEVRKRSRENNHRXXKPLPPFPQTARHAAPSYHEIYINIPRTPLLECEILYYYSDKRPSLLWVAHECVSRCQYSHIYLARIVARSPXVSTTRAVYYCLCLCVLLYIVFGALLDLFVFVGSLLSI

SEQ ID NO: 8751 - protein, 84 aa, Glycine max
  Coding DNA Sequence Number=SeqID_5253
  Gene Ontology: Mol. function=methyltransferase activity; Cellular component=Golgi apparatus
  Homolog annotation: Hit_ID=A7QS69; Match level="QueryCoverage=88%, HitCoverage=12%, E-value=3e-31, Identity=83%"; Hit description =Chromosome chr5 scaffold_156, whole genome shotgun sequence
  Pfam annotation: Domain name=DUF248; Domain location=1-84; Score= -393.6; E_value=0.05; Accession=PF03141.7; Description=Putative methyltransferase
MPSCRIRTRVMNVVPFDAKSNNLGIIYERGLIGTYMDWCEPFSTYPRTYDLIHASGVFSMYMDKCDITDILLEMHRILRPKGAV

SEQ ID NO: 8752 - protein, 165 aa, Glycine max; identical to SEQ ID NO: 8191
  misc_feature (20)..(20): Xaa can be any naturally occurring amino acid
  misc_feature (41)..(41): Xaa can be any naturally occurring amino acid
  misc_feature (67)..(67): Xaa can be any naturally occurring amino acid
  misc_feature (69)..(71): Xaa can be any naturally occurring amino acid
  misc_feature (133)..(133): Xaa can be any naturally occurring amino acid
  misc_feature (138)..(138): Xaa can be any naturally occurring amino acid
  misc_feature (141)..(141): Xaa can be any naturally occurring amino acid
  Coding DNA Sequence Number=SeqID_5254

SEQ ID NO: 8753 - protein, 138 aa, Glycine max
  misc_feature (26)..(26): Xaa can be any naturally occurring amino acid
  misc_feature (128)..(128): Xaa can be any naturally occurring amino acid
  misc_feature (130)..(131): Xaa can be any naturally occurring amino acid
  Coding DNA Sequence Number=SeqID_5256
ETSTSSRIVTIYSCSGVWSSLSCRCXCDVIYQHVYLPYYTNSKNVRCSIVIYILYISMSSIYSPPTHYSRYTPPLQRMSRRRPTDHMHKRYSTRVRQRRIADSVLSANLVVMHHLIETTYIATTPHTXIXXHRGSAQL

SEQ ID NO: 8754 - protein, 568 aa, Glycine max
  Coding DNA Sequence Number=SeqID_5257
  Gene Ontology: Mol. function=protein serine/threonine kinase activity; Cellular component=cytoplasm; Biological process=protein amino acid phosphorylation
  Homolog annotation: Hit_ID=Q24G69; Match level="QueryCoverage=55%, HitCoverage=64%, E-value=1e-84, Identity=50%"; Hit description =Protein kinase domain containing protein
  Pfam annotation: Domain name=Pkinase; Domain location=19-284; Score =84.0; E_value=5e-22; Accession=PF00069.15; Description=Protein kinase domain
  Pfam annotation: Domain name=Pkinase_Tyr; Domain location=19-266; Score=-151.4; E_value=0.0038; Accession=PF07714.7; Description =Protein tyrosine kinase
  Pfam module annotation: Pfam domain module=Pkinase::Pkinase_Tyr; Domain location=19-284::19-266
MDIKHLNPKTQKIVVGSKYILKERLGGGSFGQIYSATNNSENTASFAVKLEKRLPNNYTTLTKEAKVIIDLKDSIGFPTLYDIGREEDYNYMAINLLGFNLEKLFKLCRFRFSLKTVLMLANQMLSRIEVMHGKNYIHRDIKPENFCMGIGHFRKTLYIIDFGLARSYKDANGKHIPIRENKGLVGTARYASINAHIGTELSRRDDLEGIGYTLIYLLKGSLPWQNLKGQTKSEKYQLIKEKKLCTSVETLCKGLPSEFATYMNYVKSLEFTDVPNYSYLKKLFKNLLVQSGFELDYQYDWLCKLNTTTLKKEGNFAPEPRINLKDLSAPEDSKNNSPLINEQRGKTTLNVGFQELAETNLKLKSAGASFSHLDDDDASPKTRKVSNVVRIVGQKFIDHIKQKNAKPRSKSHKGQSKYDCTTSYHSSKALNFTLANADFDVPAEVTANNAPGDKIEHTASLVAKRKDFSQGAISNVFNSGDSIEFQESGLNFIQNKKPSIPSLEPVSGPLRESNGYKKSNFHRGRTQVNDYEENLSESSICEWKDGKNISQMLNQQHFSVMRKQDLGT

SEQ ID NO: 8755 - protein, 90 aa, Glycine max
  misc_feature (8)..(9): Xaa can be any naturally occurring amino acid
  misc_feature (17)..(17): Xaa can be any naturally occurring amino acid
  misc_feature (53)..(53): Xaa can be any naturally occurring amino acid
  Coding DNA Sequence Number=SeqID_5258
HSLGAPYXXATHEPVTXTVYLHTAKCMTRHTVTLRPLHCTWYGHCHSIVCQIXTTPYQHTRHTLKKYICTQYVVAHHCVHRRQHRSPMIY

SEQ ID NO: 8756 - protein, 123 aa, Glycine max
  misc_feature (1)..(1): Xaa can be any naturally occurring amino acid
  Coding DNA Sequence Number=SeqID_5260
  Gene Ontology: Cellular component=membrane
  Homolog annotation: Hit_ID=Q0U6C7; Match level="QueryCoverage=99%, HitCoverage=35%, E-value=2e-55, Identity=81%"; Hit description =Putative uncharacterized protein
XLESVGFNVGIAYFMICMGILCLVYLVCSMRTNLVFFLIFFTLVPAFGLLAGTFIHTAQGNAGIASKCQEAAGAFTFVTCILGWYIFFAIMLASVDFPFSLPIVDLSGMIKGASEKQKVDHVE

SEQ ID NO: 8757 - protein, 306 aa, Glycine max
  Coding DNA Sequence Number=SeqID_5261
  Gene Ontology: Mol. function=translation initiation factor activity; Cellular component=transcription factor complex; Biological process =regulation of transcription, DNA-dependent
  Homolog annotation: Hit_ID=Q54FD6; Match level="QueryCoverage=93%, HitCoverage=88%, E-value=6e-33, Identity=29%"; Hit description =Transcription initiation factor IIB
  Pfam annotation: Domain name=TFIIB; Domain location=112-183; Score =36.2; E_value=1.2e-07; Accession=PF00382.10; Description =Transcription factor TFIIB repeat
  Pfam annotation: Domain name=TFIIB; Domain location=206-277; Score =59.5; E_value=1.2e-14; Accession=PF00382.10; Description =Transcription factor TFIIB repeat
  Pfam annotation: Domain name=TFIIB_Zn_Ribbon; Domain location=6-49; Score=58.8; E_value=1.8e-14; Accession=PF08271.2; Description=TFIIB zinc-binding
  Pfam module annotation: Pfam domain module=TFIIB::TFIIB::TFIIB_Zn _Ribbon; Domain location=112-183::206-277::6-49
MDQSDDYCPRCKKSTTLVTDSSQGTVVCQQCGVVIEDRMIDQTKEYREFAEGNSSGADRRRIGGIRSNYLEDGGLALSISGSTSGDSKIMTMSTRLGSNSEDRSLFKGHTLINKWGNLLNLQKSILSKAEEQFSKIENSKKTLKGRSIESIAAAVLYIASRMCSVPLRPHDIENTTGVPIKDIKGAYKGVKNHVNYIPPLDPPRYCSNFCAKLGLPNEVSNAAYKIAEAIKQKRLLDGRNPRTIASAAIYIAIQLSPDCKCSLKDISQHSKIAENTIKNSYKDLYAHRADIVPEWKGRLALDTLHS

SEQ ID NO: 8758 - protein, 105 aa, Glycine max
  Coding DNA Sequence Number=SeqID_5262
  Gene Ontology: Mol. function=dolichyl-diphosphooligosaccharide -protein glycotransferase activity; Cellular component=oligosaccharyl transferase complex; Biological process=protein amino acid N-linked glycosylation via asparagine
  Homolog annotation: Hit_ID=A3EXZ0; Match level="QueryCoverage=98%, HitCoverage=27%, E-value=5e-13, Identity=40%"; Hit description =Putative ribophorin II
MTATYKSKPIINHIFRQQDKRPPTVVSDAFALIVLVPVLILFVLWIKLRVNLSGFSFSLSGLIFHLGLGSIFALFTYFWLELDMFSTIKYLLGLGLVTFLSGHVS

SEQ ID NO: 8759 - protein, 75 aa, Glycine max
  misc_feature (15)..(15): Xaa can be any naturally occurring amino acid
  Coding DNA Sequence Number=SeqID_5263
  Gene Ontology: Mol. function=protein serine/threonine kinase activity; Cellular component=beta-catenin destruction complex; Biological process=protein amino acid phosphorylation
  Homolog annotation: Hit_ID=A7PM77; Match level="QueryCoverage=100%, HitCoverage=18%, E-value=1e-23, Identity=72%"; Hit description =Chromosome chr14 scaffold_21, whole genome shotgun sequence
FTCSRYYGAPKLILXATEYTVTIDMRYVGCVLDELLLGQPLFTGESGVDQLNEIIKVLGTLTKQELRCMRSNYNE

SEQ ID NO: 8760 - protein, 117 aa, Glycine max
  misc_feature (9)..(9): Xaa can be any naturally occurring amino acid
  misc_feature (14)..(14): Xaa can be any naturally occurring amino acid
  misc_feature (44)..(44): Xaa can be any naturally occurring amino acid
  misc_feature (75)..(75): Xaa can be any naturally occurring amino acid
  misc_feature (95)..(95): Xaa can be any naturally occurring amino acid
  Coding DNA Sequence Number=SeqID_5264
LAMAGGVFXLTSTXALRLLMMIHGSLPHYPLSYTARLVALDIDXLDKYETSFSKEGERADHRDMNYIHTRCALLXLRRYVPHLPYYSVLSIYRGXSLFIAWIVMSISDSSMIYEKTR

SEQ ID NO: 8761 - protein, 107 aa, Glycine max
  misc_feature (31)..(31): Xaa can be any naturally occurring amino acid
  misc_feature (66)..(66): Xaa can be any naturally occurring amino acid
  Coding DNA Sequence Number=SeqID_5266
CFGLCLVVLVVVSTRCRVVLLQTLARCVRSXHRRTRRAVFIHRYEMSMMILCSVFIFIRLVLLGEXTVVLCGAAGVSLPLCPLAADVVKLILNGRSQLSMYSNTLTP

SEQ ID NO: 8762 - protein, 175 aa, Glycine max
  misc_feature (24)..(24): Xaa can be any naturally occurring amino acid
  misc_feature (26)..(26): Xaa can be any naturally occurring amino acid
  misc_feature (138)..(138): Xaa can be any naturally occurring amino acid
  misc_feature (159)..(159): Xaa can be any naturally occurring amino acid
  Coding DNA Sequence Number=SeqID_5268
LRRSAQNVTDDTHTVSDINTYLRXSXRVSGREFVEEGGCRGRIMLDKYTVSERHQIRVVTRRPSCVEERYAPLDCCARTYCSISPNVRILRCTIHRSSTPSHGYFSTSVYYAQYLCDCTTLLSPPRPAHPPSPPSSPXDAAPPSLTLRRAGLLRAEHGXRESVMHRERTYIIYVN

SEQ ID NO: 8763 - protein, 144 aa, Glycine max; identical to SEQ ID NO: 8198
  Coding DNA Sequence Number=SeqID_5269

SEQ ID NO: 8764 - protein, 135 aa, Glycine max
  Coding DNA Sequence Number=SeqID_5271
PLAEHTSYAHTMTTHPALHTPSYPNTHHSTQIDVRTRVAAAIITSLLRLCAECCRLEIGLRDFSHLNTCSHTRAPARIQISSIHRYKQHHLSWHHHTPRLSEEHTHSYSCEFCYLLMPSVYNYLLYSPLSTHVGG

SEQ ID NO: 8765 - protein, 112 aa, Glycine max
  misc_feature (2)..(2): Xaa can be any naturally occurring amino acid
  misc_feature (11)..(11): Xaa can be any naturally occurring amino acid
  misc_feature (28)..(28): Xaa can be any naturally occurring amino acid
  misc_feature (56)..(57): Xaa can be any naturally occurring amino acid
  misc_feature (62)..(62): Xaa can be any naturally occurring amino acid
  misc_feature (73)..(73): Xaa can be any naturally occurring amino acid
  misc_feature (76)..(76): Xaa can be any naturally occurring amino acid
  misc_feature (80)..(84): Xaa can be any naturally occurring amino acid
  misc_feature (87)..(88): Xaa can be any naturally occurring amino acid
  Coding DNA Sequence Number=SeqID_5273
RXISNELTCPXPQHSSPPPSLIGVGCIXLACDANYDVSCYRRWLCAAVRSICLSHXXCIHTXHDHNLYHRPLXHTXHGAXXXXXLHXXEVRGACLGHEPAIHVVISSALFRV

SEQ ID NO: 8766 - protein, 122 aa, Glycine max
  Coding DNA Sequence Number=SeqID_5275
SIQCFYTCILKLLSGTSCCFLSSILLHHTYKFYALEVLKGHRRRLADILISGTEEFKDKGAQHANESRRQAGESAMETSGKTSIGDEDYWCNENLAQDNGPACFLASNTAASLSFTEQTCSK

SEQ ID NO: 8767 - protein, 83 aa, Glycine max
  misc_feature (2)..(2): Xaa can be any naturally occurring amino acid
  misc_feature (66)..(66): Xaa can be any naturally occurring amino acid
  Coding DNA Sequence Number=SeqID_5277
DXKGEDELVQNDQKESVPLSKNHCQVIKRRNIFPFLLMFSLIFLESLVRTYDFTDFRLREAQMHFXCDGTIYIVTMVGALFLF

SEQ ID NO: 8768 - protein, 124 aa, Glycine max
  Coding DNA Sequence Number=SeqID_5279
  Gene Ontology: Mol. function=structural constituent of ribosome; Cellular component=ribonucleoprotein complex; Biological process =translation
  Homolog annotation: Hit_ID=Q6RJY1; Match level="QueryCoverage=98%, HitCoverage=73%, E-value=7e-46, Identity=77%"; Hit description=60S ribosomal protein L12
  Pfam annotation: Domain name=Ribosomal_L11; Domain location=34-102; Score=49.2; E_value=1.5e-11; Accession=PF00298.9; Description =Ribosomal protein L11, RNA binding domain
GDDIDQETDQDWKGLRDTVKLTGHNCQAKDTVVPFARALVIKGLKEPDRDLKKTIIILRTGHISLDDVIEIARVMRPRSMAKDLSGSIKEILGTCVSVGCTVDGKDPKDLQQEITDGDVEVPLD

SEQ ID NO: 8769 - protein, 50 aa, Glycine max
  Coding DNA Sequence Number=SeqID_5280
  Homolog annotation: Hit_ID=A7QFJ2; Match level="QueryCoverage=100%, HitCoverage=23%, E-value=7e-15, Identity=78%"; Hit description =Chromosome chr8 scaffold_88, whole genome shotgun sequence
SNNIVAQMLKKHPVQSILIGKDPFMVTVYPNIDYAFIVALIVILDEINPD

SEQ ID NO: 8770 - protein, 205 aa, Glycine max; identical to SEQ ID NO: 8205
  Coding DNA Sequence Number=SeqID_5281
  Subcellular localization annotation: CTP_CleavageSite=29; ConfidenceScore=5.12e-01

SEQ ID NO: 8771 - protein, 166 aa, Glycine max
  misc_feature (76)..(166): Xaa can be any naturally occurring amino acid
  Coding DNA Sequence Number=SeqID_5283
PDPRTRKKPLAPITKPNPTTKANLKFLPPQPLPIFIWKLHPPGEHFCPRNTYSANPLLSQTLGYTKIPPRRTRTRXXXXXXXXXXXXXXXXXXXXXXXXXXXXXXXXXXXXXXXXXXXXXXXXXXXXXXXXXXXXXXXXXXXXXXXXXXXXXXXXXXXXXXXXXXX

SEQ ID NO: 8772 - protein, 186 aa, Glycine max; identical to SEQ ID NO: 8206
  misc_feature (9)..(9): Xaa can be any naturally occurring amino acid
  misc_feature (67)..(67): Xaa can be any naturally occurring amino acid
  misc_feature (89)..(89): Xaa can be any naturally occurring amino acid
  misc_feature (134)..(134): Xaa can be any naturally occurring amino acid
  misc_feature (137)..(137): Xaa can be any naturally occurring amino acid
  misc_feature (167)..(167): Xaa can be any naturally occurring amino acid
  misc_feature (181)..(182): Xaa can be any naturally occurring amino acid
  Coding DNA Sequence Number=SeqID_5285
  Subcellular localization annotation: CTP_CleavageSite=55; ConfidenceScore=5.37e-01

SEQ ID NO: 8773 - protein, 166 aa, Glycine max
  misc_feature (21)..(21): Xaa can be any naturally occurring amino acid
  misc_feature (29)..(29): Xaa can be any naturally occurring amino acid
  Coding DNA Sequence Number=SeqID_5287
  Gene Ontology: Mol. function=calcium-dependent phospholipid binding; Cellular component=cytoplasm; Biological process=blood coagulation
  Homolog annotation: Hit_ID=Q9SYT0; Match level="QueryCoverage=100%, HitCoverage=53%, E-value=1e-56, Identity=71%"; Hit description =Annexin D1
  Pfam annotation: Domain name=Annexin; Domain location=15-80; Score =90.9; E_value=4e-24; Accession=PF00191.10; Description=Annexin
MATLKVSSHVPSPSEDAEQLXSAFDGWGXEEDLIISILAHRSAEQRKLIRQAYHEACGEDLLKTLDKELTSDFERAILLWTLEPGERDALLANEATKRWTSSNQVLMEVACTRTSTQLFPLGKLHARYKRPMERRAPHPTGTSKVWASLLPQRFKGNGELDLASQK

SEQ ID NO: 8774 - protein, 158 aa, Glycine max; identical to SEQ ID NO: 8210
  misc_feature (3)..(4): Xaa can be any naturally occurring amino acid
  misc_feature (10)..(11): Xaa can be any naturally occurring amino acid
  misc_feature (18)..(18): Xaa can be any naturally occurring amino acid
  misc_feature (22)..(22): Xaa can be any naturally occurring amino acid
  misc_feature (26)..(26): Xaa can be any naturally occurring amino acid
  misc_feature (34)..(34): Xaa can be any naturally occurring amino acid
  misc_feature (60)..(60): Xaa can be any naturally occurring amino acid
  misc_feature (66)..(66): Xaa can be any naturally occurring amino acid
  misc_feature (70)..(70): Xaa can be any naturally occurring amino acid
  Coding DNA Sequence Number=SeqID_5288

SEQ ID NO: 8775 - protein, 123 aa, Glycine max
  Coding DNA Sequence Number=SeqID_5290
TAGTMKPAMMPAELWSDAPPLPTSAVGVDLDPTPEDVGVCPAGAPEDGDVVGAEAQLLSGGVLTPHWSGRPRARVLLTAPSPSAAGSVESNLVFRFTQRQQQHLRLGCMHGCMSAHQLVKSPF

SEQ ID NO: 8776 - protein, 138 aa, Glycine max
  misc_feature (23)..(23): Xaa can be any naturally occurring amino acid
  misc_feature (51)..(51): Xaa can be any naturally occurring amino acid
  misc_feature (77)..(77): Xaa can be any naturally occurring amino acid
  Coding DNA Sequence Number=SeqID_5291
DLEVGSLAVFVKIEYCYHVLLVXVDRYMDKIIRKVALISSLWKVRAMCRWXAKKYSQRLEGWESEQRGRETSVLPLXGTIYLYNRCRLRTRNNVHNTVVFVSPVLLFFSLLGGRMFGVYGVAQCLPKRVFPSVLRYLC

SEQ ID NO: 8777 - protein, 153 aa, Glycine max
  misc_feature (143)..(144): Xaa can be any naturally occurring amino acid
  Coding DNA Sequence Number=SeqID_577
  Gene Ontology: Mol. function=peptidase activity; Cellular component =membrane
  Homolog annotation: Hit_ID=A7QGS5; Match level="QueryCoverage=100%, HitCoverage=52%, E-value=2e-64, Identity=78%"; Hit description =Chromosome chr16 scaffold_94, whole genome shotgun sequence
  Pfam annotation: Domain name=Band_7; Domain location=10-153; Score =93.6; E_value=6.3e-25; Accession=PF01145.15; Description=SPFH domain Band 7 family
MGNTNCIVGGCIDQASVGVVERWGRFEHIAEPGCHFFNPLAGQWLAGVLSTRINSLEVKIETKTKDNVFVQLICSIQYRVVKTNADDAFYELQNPREQIQAYVFDVVRALVPMMTLDALFEQKGEVAKSVLEELEKVMGAYGXXIEHILMVDI

SEQ ID NO: 8778 - protein, 93 aa, Glycine max
  misc_feature (7)..(7): Xaa can be any naturally occurring amino acid
  misc_feature (60)..(60): Xaa can be any naturally occurring amino acid
  misc_feature (67)..(67): Xaa can be any naturally occurring amino acid
  misc_feature (74)..(74): Xaa can be any naturally occurring amino acid
  misc_feature (79)..(79): Xaa can be any naturally occurring amino acid
  misc_feature (86)..(86): Xaa can be any naturally occurring amino acid
  misc_feature (89)..(90): Xaa can be any naturally occurring amino acid
  Coding DNA Sequence Number=SeqID_578
ITLPVIXNINVNSEACSVPNSISSLSIPSTSKGGRYPIRPIMSRITIPLAVLLHVRDWEXLRYPLIXCTLPPFXSLGYXKKAPPIXLPXXCPP

SEQ ID NO: 8779 - protein, 195 aa, Glycine max
  Coding DNA Sequence Number=SeqID_580
  Homolog annotation: Hit_ID=Q9M089; Match level="QueryCoverage=100%, HitCoverage=100%, E-value=3e-89, Identity=84%"; Hit description =Putative uncharacterized protein AT4g31130
  Pfam annotation: Domain name=DUF1218; Domain location=45-161; Score =164.5; E_value=2.9e-46; Accession=PF06749.3; Description=Protein of unknown function (DUF1218)
MAVTMKHMSLIVSLFGVLSFLLGVIAENKKPASGTPINGKGVVICKYPSDPTVALGYLSAAFLLASTIAGYKSLFMSYKGRSVPNSVLFKSTTFSVFFNIALITSGLALSLLLWPTITEQLHLTRNVHRNLETSCPTAKTGLLGGGAFVSLDSCLFWLVALMLADNAREDHFDETENRNVNGNSSSRDVNLKIDA

SEQ ID NO: 8780 - protein, 153 aa, Glycine max
  misc_feature (7)..(7): Xaa can be any naturally occurring amino acid
  misc_feature (10)..(10): Xaa can be any naturally occurring amino acid
  misc_feature (12)..(12): Xaa can be any naturally occurring amino acid
  misc_feature (16)..(16): Xaa can be any naturally occurring amino acid
  misc_feature (23)..(25): Xaa can be any naturally occurring amino acid
  misc_feature (37)..(37): Xaa can be any naturally occurring amino acid
  misc_feature (44)..(44): Xaa can be any naturally occurring amino acid
  misc_feature (58)..(58): Xaa can be any naturally occurring amino acid
  misc_feature (63)..(63): Xaa can be any naturally occurring amino acid
  misc_feature (81)..(81): Xaa can be any naturally occurring amino acid
  misc_feature (128)..(128): Xaa can be any naturally occurring amino acid
  misc_feature (135)..(135): Xaa can be any naturally occurring amino acid
  misc_feature (137)..(137): Xaa can be any naturally occurring amino acid
  misc_feature (141)..(142): Xaa can be any naturally occurring amino acid
  misc_feature (144)..(144): Xaa can be any naturally occurring amino acid
  misc_feature (146)..(146): Xaa can be any naturally occurring amino acid
  Coding DNA Sequence Number=SeqID_581
SLAFLRXCDXLXYHPXTAVSSIXXXRYVEKITRRCRXYDKVARXHIVVIHITTALSPXHHARXYGAQLNCDCLSLLSSRVXSMTSYQRCTASSHTHTDLFSVCRAFIDIYRCDMKPDSHSYTNYADSXYDDVLYXCXRLIXXTXTXTTSLLLV

SEQ ID NO: 8781 - protein, 117 aa, Glycine max
  misc_feature (4)..(4): Xaa can be any naturally occurring amino acid
  misc_feature (12)..(12): Xaa can be any naturally occurring amino acid
  misc_feature (33)..(33): Xaa can be any naturally occurring amino acid
  misc_feature (44)..(44): Xaa can be any naturally occurring amino acid
  misc_feature (63)..(63): Xaa can be any naturally occurring amino acid
  misc_feature (66)..(66): Xaa can be any naturally occurring amino acid
  misc_feature (90)..(90): Xaa can be any naturally occurring amino acid
  misc_feature (106)..(107): Xaa can be any naturally occurring amino acid
  Coding DNA Sequence Number=SeqID_583
AFAXHMTLRMKXRDREMMTRLVTCSPHSPSQYXLTPVVYALHMXIATEEAQYAVRGAHAAKAXTGXRASYYTPLHICPHIISCDPIRGVXDSSPHSRDALSVHTAXXRAGTSRIVTC

SEQ ID NO: 8782 - protein, 117 aa, Glycine max
  misc_feature (89)..(89): Xaa can be any naturally occurring amino acid
  Coding DNA Sequence Number=SeqID_585
TRVGEKAVLAPCNSASIIAGYDYRVNCSPILGAATYLAASQREVSRGSRPKLNTKVLYLSYIGLAYAPLYKKPERAREQPSAVLVAVSXSSYLHHHTDITAPPLLVPSSSQSLHQLG

SEQ ID NO: 8783 - protein, 129 aa, Glycine max; identical to SEQ ID NO: 6033
  misc_feature (17)..(17): Xaa can be any naturally occurring amino acid
  misc_feature (67)..(67): Xaa can be any naturally occurring amino acid
  misc_feature (86)..(86): Xaa can be any naturally occurring amino acid
  Coding DNA Sequence Number=SeqID_587

SEQ ID NO: 8784 - protein, 192 aa, Glycine max
  misc_feature (14)..(14): Xaa can be any naturally occurring amino acid
  misc_feature (18)..(18): Xaa can be any naturally occurring amino acid
  misc_feature (38)..(38): Xaa can be any naturally occurring amino acid
  misc_feature (71)..(72): Xaa can be any naturally occurring amino acid
  misc_feature (74)..(74): Xaa can be any naturally occurring amino acid
  misc_feature (89)..(89): Xaa can be any naturally occurring amino acid
  misc_feature (118)..(118): Xaa can be any naturally occurring amino acid
  misc_feature (127)..(127): Xaa can be any naturally occurring amino acid
  misc_feature (149)..(149): Xaa can be any naturally occurring amino acid
  misc_feature (155)..(155): Xaa can be any naturally occurring amino acid
  misc_feature (160)..(160): Xaa can be any naturally occurring amino acid
  misc_feature (175)..(175): Xaa can be any naturally occurring amino acid
  Coding DNA Sequence Number=SeqID_5293
RRVLSPCTSVRSSXRQRXYIIYHPSCLSSHDLLYVRAXRRGARSTRAARWRDVIRSIIRIESRVPERLSDXXWXAVAERIVVISAAAPXLRVRSSPHLSISLRATILFLLVSACVYHXLPAVASRHXPQRGARSLLSSRRQRAVSSISXVLRVRXLYAVXAIVLCLFAHSQRAHXPHRHSLTLTCQPDQYDW

SEQ ID NO: 8785 - protein, 138 aa, Glycine max
  misc_feature (11)..(11): Xaa can be any naturally occurring amino acid
  misc_feature (40)..(40): Xaa can be any naturally occurring amino acid
  misc_feature (45)..(45): Xaa can be any naturally occurring amino acid
  misc_feature (68)..(68): Xaa can be any naturally occurring amino acid
  misc_feature (83)..(83): Xaa can be any naturally occurring amino acid
  misc_feature (115)..(115): Xaa can be any naturally occurring amino acid
  misc_feature (117)..(117): Xaa can be any naturally occurring amino acid
  misc_feature (127)..(127): Xaa can be any naturally occurring amino acid
  misc_feature (137)..(137): Xaa can be any naturally occurring amino acid
  Coding DNA Sequence Number=SeqID_5295
RRAYHSSSSCXYVCGSSDRSTHTLSAIHMIERSLEIRRVXPARLXLIIHYVIILTTTGREDRKTATIXTNSKQPYTSSHTTPXRAPSHLVAPPERLSLPFSPNGGRSAARHVGGXRXPWGGGVYNQXLQVQETLPSXM

SEQ ID NO: 8786 - protein, 120 aa, Glycine max
  Coding DNA Sequence Number=SeqID_5297
RTKEEPRCRRRCGGYSDTEALRSHPASSYDRKKTRVTSHRRSQTRGARARYFNLIYRASCAVASVILFMYKASSILIILMTWYCTSAARPIVRSHSIYCPAPCSMCSCDNKYARRFYEGA

SEQ ID NO: 8787 - protein, 96 aa, Glycine max; identical to SEQ ID NO: 8225
  Coding DNA Sequence Number=SeqID_5299

SEQ ID NO: 8788 - protein, 145 aa, Glycine max
  Coding DNA Sequence Number=SeqID_1647
NTHLCPLYTYVVHFIRSIAALDIHLAILPHTLLYRTLCSFTYNHLIHPFSYLSPPPHSYIGNRGGGYIFDLRIYYICAHISDQLHAARTILYPAPYHNPTLTLFIIITPPAATFLAYVRQRQTHLDNYITLRSKNALLRTRDAHT

SEQ ID NO: 8789 - protein, 112 aa, Glycine max
  misc_feature (4)..(8): Xaa can be any naturally occurring amino acid
  misc_feature (12)..(12): Xaa can be any naturally occurring amino acid
  misc_feature (18)..(18): Xaa can be any naturally occurring amino acid
  misc_feature (27)..(27): Xaa can be any naturally occurring amino acid
  misc_feature (42)..(42): Xaa can be any naturally occurring amino acid
  misc_feature (57)..(57): Xaa can be any naturally occurring amino acid
  misc_feature (73)..(73): Xaa can be any naturally occurring amino acid
  Coding DNA Sequence Number=SeqID_1649
  Subcellular localization annotation: CTP_CleavageSite=55; ConfidenceScore=5.58e-01
PFFXXXXXFISXFYLNLXPTPPRPRAXRPVARLPRVRPSAAXLLSPRHPLHCTTRCXLDRGTVFLCGILRSCXLDGLAAPSLAQLLYEDSSLLYSTTDDDAIWIARQTDAHT

SEQ ID NO: 8790 - protein, 174 aa, Glycine max
  misc_feature (107)..(107): Xaa can be any naturally occurring amino acid
  misc_feature (126)..(126): Xaa can be any naturally occurring amino acid
  misc_feature (128)..(128): Xaa can be any naturally occurring amino acid
  misc_feature (132)..(132): Xaa can be any naturally occurring amino acid
  misc_feature (139)..(139): Xaa can be any naturally occurring amino acid
  misc_feature (157)..(157): Xaa can be any naturally occurring amino acid
  misc_feature (161)..(161): Xaa can be any naturally occurring amino acid
  misc_feature (170)..(170): Xaa can be any naturally occurring amino acid
  Coding DNA Sequence Number=SeqID_1651
  Homolog annotation: Hit_ID=A0E9Z6; Match level="QueryCoverage=91%, HitCoverage=83%, E-value=6e-13, Identity=24%"; Hit description =Chromosome undetermined scaffold_85, whole genome shotgun sequence
SYVGPPPPPIFDNVKTCIATDQVIITDIITGVEDIQTKVASKVQEGIALIGKAVEIIPTAVQQCKVAEADIKTLIKMVNSFKNPASFLYYVGKSILINRVDVFKEVXSAVKAYQTGDFTNFGYWIXRXMDTXFIGQKAXQVQDTQTDVLNFARGFLXGIAXESIFDDIKXCITD

SEQ ID NO: 8791 - protein, 160 aa, Glycine max
  misc_feature (93)..(93): Xaa can be any naturally occurring amino acid
  Coding DNA Sequence Number=SeqID_1652
  Gene Ontology: Mol. function=alpha,alpha-trehalose-phosphate synthase (UDP-forming) activity; Cellular component=alpha,alpha-trehalose -phosphate synthase complex (UDP-forming); Biological process =trehalose biosynthetic process
  Homolog annotation: Hit_ID=A9ZSX8; Match level="QueryCoverage=99%, HitCoverage=18%, E-value=2e-44, Identity=55%"; Hit description =Trehalose-6-phosphate synthase
GSPSLSGAIRVNPWNIDEVAEAMNSAVTMSEAEKHLRHEKHYKYISSHDVAYWARSFDQDLDRACREHYSKRYWGVGLGLGFTIVALNPTFKXLSINHITSTYTYTHNQLILLNYYNTIIPRTTINTPNKECITILNYLYSNPSNMRCIMNKQDKNYLSK

SEQ ID NO: 8792 - protein, 140 aa, Glycine max
  Coding DNA Sequence Number=SeqID_1653
YAAHTRSNISSDTREFVSRSIQQIRINMASVCMELSCPHFLSSDIELSLSCRILLAVDRSRMAYRGWIGECVWDAGELLCARLTCGLRIGGCGRWVKIITTGRQVENGYRACCRAFDRVIQKRRGQARISRVIASSHAPQ

SEQ ID NO: 8793 - protein, 51 aa, Glycine max
  Coding DNA Sequence Number=SeqID_1655
  Gene Ontology: Mol. function=structural constituent of ribosome; Cellular component=ribonucleoprotein complex; Biological process =translation
  Homolog annotation: Hit_ID=P51424; Match level="QueryCoverage=100%, HitCoverage=100%, E-value=3e-14, Identity=72%"; Hit description=60S ribosomal protein L39-1
  Pfam annotation: Domain name=Ribosomal_L39; Domain location=9-51; Score=98.4; E_value=2.2e-26; Accession=PF00832.10; Description =Ribosomal L39 protein
MPSHKTFIIKKKLGKKMRQNRPIPGWIRLRTDNKIRYNAKRRHWRRTKLGF

SEQ ID NO: 8794 - protein, 136 aa, Glycine max
  misc_feature (30)..(30): Xaa can be any naturally occurring amino acid
  misc_feature (59)..(59): Xaa can be any naturally occurring amino acid
  misc_feature (112)..(112): Xaa can be any naturally occurring amino acid
  Coding DNA Sequence Number=SeqID_1656
  Gene Ontology: Mol. function=transition metal ion binding; Cellular component=chloroplast; Biological process=cellular iron ion homeostasis
  Homolog annotation: Hit_ID=Q41709; Match level="QueryCoverage=94%, HitCoverage=52%, E-value=1e-33, Identity=62%"; Hit description =Ferritin-2, chloroplast precursor
  Subcellular localization annotation: CTP_CleavageSite=33; ConfidenceScore=5.35e-01
MLLQTGVACGSSLSLFSPNAEPPRRVPLVXGVRAAKGSTNHRALTGVIFEPFEEANKEXLDLGRTAPQASLARQKYVDESEAAVNEQITEEYNVSYGYHAPPAHFNRNNAPXQPLPSFFKEIPEQKRKHVGTPPRV

SEQ ID NO: 8795 - protein, 111 aa, Glycine max
  misc_feature (23)..(23): Xaa can be any naturally occurring amino acid
  misc_feature (67)..(67): Xaa can be any naturally occurring amino acid
  misc_feature (105)..(105): Xaa can be any naturally occurring amino acid
  misc_feature (109)..(109): Xaa can be any naturally occurring amino acid
  Coding DNA Sequence Number=SeqID_1657
VRFCLLSAGWRLYNILSLNTTIXHYRHKHTLYISTVLLLSPTYTHYLPRSHPSPCLSYFISLVASLXHSSHNYRVYVCWSATHPLRTLSVVCVCVTRAYVLITHXTRCXSY

SEQ ID NO: 8796 - protein, 104 aa, Glycine max
  misc_feature (26)..(26): Xaa can be any naturally occurring amino acid
  Coding DNA Sequence Number=SeqID_5301
  Subcellular localization annotation: CTP_CleavageSite=12; ConfidenceScore=5.15e-01
PTPQSRSTVNRLCSSKTPLTPRSHRXTTLQHSHPQSHLSCLLLDENTTNDANLYILSLRRFSLCHSLVDSELNVRYRILYSLILCQIVIEILTAKLIRSAGRSS

SEQ ID NO: 8797 - protein, 242 aa, Glycine max
  misc_feature (10)..(12): Xaa can be any naturally occurring amino acid
  misc_feature (15)..(15): Xaa can be any naturally occurring amino acid
  misc_feature (37)..(37): Xaa can be any naturally occurring amino acid
  misc_feature (40)..(40): Xaa can be any naturally occurring amino acid
  misc_feature (56)..(56): Xaa can be any naturally occurring amino acid
  misc_feature (79)..(79): Xaa can be any naturally occurring amino acid
  misc_feature (89)..(89): Xaa can be any naturally occurring amino acid
  misc_feature (99)..(99): Xaa can be any naturally occurring amino acid
  misc_feature (101)..(101): Xaa can be any naturally occurring amino acid
  misc_feature (111)..(111): Xaa can be any naturally occurring amino acid
  misc_feature (116)..(118): Xaa can be any naturally occurring amino acid
  misc_feature (121)..(122): Xaa can be any naturally occurring amino acid
  misc_feature (128)..(128): Xaa can be any naturally occurring amino acid
  misc_feature (130)..(131): Xaa can be any naturally occurring amino acid
  misc_feature (133)..(133): Xaa can be any naturally occurring amino acid
  misc_feature (141)..(142): Xaa can be any naturally occurring amino acid
  misc_feature (145)..(146): Xaa can be any naturally occurring amino acid
  misc_feature (150)..(150): Xaa can be any naturally occurring amino acid
  misc_feature (152)..(152): Xaa can be any naturally occurring amino acid
  misc_feature (156)..(156): Xaa can be any naturally occurring amino acid
  misc_feature (158)..(158): Xaa can be any naturally occurring amino acid
  misc_feature (165)..(165): Xaa can be any naturally occurring amino acid
  misc_feature (192)..(192): Xaa can be any naturally occurring amino acid
  misc_feature (210)..(210): Xaa can be any naturally occurring amino acid
  misc_feature (213)..(214): Xaa can be any naturally occurring amino acid
  misc_feature (217)..(218): Xaa can be any naturally occurring amino acid
  misc_feature (220)..(220): Xaa can be any naturally occurring amino acid
  misc_feature (225)..(226): Xaa can be any naturally occurring amino acid
  misc_feature (228)..(228): Xaa can be any naturally occurring amino acid
  misc_feature (238)..(238): Xaa can be any naturally occurring amino acid
  Coding DNA Sequence Number=SeqID_5303
YACRGVYVQXXXSLXTQRAIATAHRTRSRRISTASAXHSXPISARERIVIRSETYXHTQVIYRYRHLFPVFVFRSLLAXFPDVLRLLSXAAPTSPRTHXQXATADRSATHXNEKPXXXHIXXLSILSXLXXEXLCGITLLXXIEXXELCXPXLLVXRXTSRIDRXQLLARASCSPFFSATRNLSSARAAPLXAAVAGSAARRWFIRSAAXRGXXGGXXGXGGGAXXKXARRTPGRRSXRTPP

SEQ ID NO: 8798 - protein, 267 aa, Glycine max
  misc_feature (12)..(12): Xaa can be any naturally occurring amino acid
  misc_feature (14)..(14): Xaa can be any naturally occurring amino acid
  misc_feature (28)..(29): Xaa can be any naturally occurring amino acid
  misc_feature (40)..(40): Xaa can be any naturally occurring amino acid
  misc_feature (48)..(48): Xaa can be any naturally occurring amino acid
  misc_feature (51)..(51): Xaa can be any naturally occurring amino acid
  misc_feature (65)..(65): Xaa can be any naturally occurring amino acid
  misc_feature (67)..(67): Xaa can be any naturally occurring amino acid
  Coding DNA Sequence Number=SeqID_5305
  Gene Ontology: Mol. function=DNA-directed RNA polymerase activity; Cellular component=intracellular; Biological process=transcription
  Homolog annotation: Hit_ID=A6EFJ6; Match level="QueryCoverage=100%, HitCoverage=20%, E-value=2e-85, Identity=59%"; Hit description=DNA -directed RNA polymerase subunit beta
  Pfam annotation: Domain name=RNA_pol_Rpb2_6; Domain location=66-267; Score=12.4; E_value=1.9e-14; Accession=PF00562.18; Description=RNA polymerase Rpb2, domain 6
GDAKDVSLKAPXGXEGVVIDKKLFQRAXXDKNGKIREKAXLEKVEKVXQQXEESIKELLLDKLQXLXKDKASTGVSNNFGEMLIGKGAKFNQKNLAAIDYQNVNPLGWTGDAKTDDQINTLLHNYSIRFNEELGRYKREKFNISIGDELPAGVLKLAKVYLAVKRKLKVGDKMAGRHGNKGIVAKIVRAEDMPFMEDGTPVDIVLNPLGVPSRMNLGQIYETILGWTGKRLGVKFATPIFDGASTDEIEEYCKQASIPRNGHTYLYD

SEQ ID NO: 8799 - protein, 98 aa, Glycine max
  Coding DNA Sequence Number=SeqID_5306
  Subcellular localization annotation: CTP_CleavageSite=58; ConfidenceScore=5.41e-01
LSLIICLFQQSTQLHQTNDVTQHPCSSWPAPLVPRQSSQQVAGSLRRLHRTRPCQPPPALQKAAPNGCCCHKRLPSSRPWHRVIVTWGFLLRRPGSWQ

SEQ ID NO: 8800 - protein, 69 aa, Glycine max
  Coding DNA Sequence Number=SeqID_5308
  Subcellular localization annotation: CTP_CleavageSite=42; ConfidenceScore=5.58e-01
GTRALGVPFSLGLFPLGNFSPFSFKVPGVFKKRYIFFGLQRRRNAKFSPQEVYTTWSRGVGRGIFFGAY

SEQ ID NO: 8801 - protein, 74 aa, Glycine max
  Coding DNA Sequence Number=SeqID_5310
TPFPPPVPTSLCLNIDKRFPIEGALSDATNTDRQNLSHNLLRLLKANLGYFRNSLTYDATKLRIISQFVRTRLN

SEQ ID NO: 8802 - protein, 67 aa, Glycine max
  Coding DNA Sequence Number=SeqID_5312
  Homolog annotation: Hit_ID=A7NZQ4; Match level="QueryCoverage=86%, HitCoverage=49%, E-value=2e-13, Identity=65%"; Hit description =Chromosome chr6 scaffold_3, whole genome shotgun sequence
  Subcellular localization annotation: CTP_CleavageSite=38; ConfidenceScore=5.37e-01
AARIVDCNGVCSTPKGKRFRIPEVLTCPPAPKKRRVTSCSSSKNKRSPIAFFASPDIELFFFSAIKS

SEQ ID NO: 8803 - protein, 90 aa, Glycine max
  misc_feature (53)..(53): Xaa can be any naturally occurring amino acid
  Coding DNA Sequence Number=SeqID_5313
  Gene Ontology: Mol. function=protein serine/threonine kinase activity; Cellular component=basolateral plasma membrane; Biological process=protein amino acid phosphorylation
  Homolog annotation: Hit_ID=A3A3S1; Match level="QueryCoverage=87%, HitCoverage=16%, E-value=7e-30, Identity=79%"; Hit description =Putative uncharacterized protein
MAPKVMEQKDYDFKADIWLFGITALELAIGHAPFSIQPPAKVFLMTLQHAPPXLHNTKEKKFSDSFKSLIATCKKKKKSWVGIVEKNKKN

SEQ ID NO: 8804 - protein, 141 aa, Glycine max
  misc_feature (43)..(43): Xaa can be any naturally occurring amino acid
  misc_feature (132)..(132): Xaa can be any naturally occurring amino acid
  Coding DNA Sequence Number=SeqID_5314
  Homolog annotation: Hit_ID=Q2A991; Match level="QueryCoverage=100%, HitCoverage=83%, E-value=4e-64, Identity=82%"; Hit description =Putative uncharacterized protein
  Pfam annotation: Domain name=DUF581; Domain location=67-128; Score =104.5; E_value=3.3e-28; Accession=PF04570.5; Description=Protein of unknown function (DUF581)
MEVSTRKPYFIEEEDDGLVSLAEMEAGVSSPSSCYTNMNQYHXRSYYNNYHQYSVSSPRSVVVSEKFHDFRFDNSCFGQQSVPHFLDSCFLCKKRLGHNKDIFMYRGDTPFCSEECREEQIKRDESKEKKKXLSSSVKAMR

SEQ ID NO: 8805 - protein, 125 aa, Glycine max
  misc_feature (3)..(3): Xaa can be any naturally occurring amino acid
  misc_feature (6)..(6): Xaa can be any naturally occurring amino acid
  misc_feature (20)..(20): Xaa can be any naturally occurring amino acid
  Coding DNA Sequence Number=SeqID_5315
TPXQHXSPIRMRAYRVLWCXLIAELGVARSPSLEGSFGYAHPRSSLFLPSVRPAHSELSPSPRYASTLHRILFVSPADLCTLVRQASNLLFFYITFSLYGSFHSLACRLCAFALRPLLYYVGLYR

SEQ ID NO: 8806 - protein, 167 aa, Glycine max
  misc_feature (40)..(40): Xaa can be any naturally occurring amino acid
  misc_feature (62)..(62): Xaa can be any naturally occurring amino acid
  Coding DNA Sequence Number=SeqID_5317
ATVPAKLASYSVRWPWRAAAAAAWRVPGRGCSPPLLWPAXCESTAARNCAVGVLKKPPAPKXRLCSGEGREKGGPFVQNFGGGPPGVHFAFNFLRMGFFGGGVNFLRGVPGRQNPRGKGPPGRGGREPKKTEAGGVFSGGGEPPPGGPFERKNSRPPEGYSVQQTWG

SEQ ID NO: 8807 - protein, 154 aa, Glycine max
  misc_feature (46)..(46): Xaa can be any naturally occurring amino acid
  misc_feature (74)..(74): Xaa can be any naturally occurring amino acid
  misc_feature (124)..(124): Xaa can be any naturally occurring amino acid
  misc_feature (144)..(144): Xaa can be any naturally occurring amino acid
  Coding DNA Sequence Number=SeqID_5319
IGTTITCSQQPQQQHSRCSLPVPALRVCSHYPLLRRLDLLILARCXYASLDVEKLDTRISHYIVTYATRQCPLXYTSSGTPLHQFSICISSPRAPTHLHSQMLRRTPHLLVDHTTHLYSLTSQXAHIQDYDYVVATNTVIYSHXAHELNYTMVR

SEQ ID NO: 8808 - protein, 211 aa, Glycine max
  misc_feature (167)..(167): Xaa can be any naturally occurring amino acid
  misc_feature (181)..(181): Xaa can be any naturally occurring amino acid
  Coding DNA Sequence Number=SeqID_5321
GLRVPSVIYIRGAPGGKPEHGSRGGVSITKIHSVYFILYTRGVISGAVSPFISLCGPYAVTGSRWLWPAGDKHGMWDTRGGICEDGVGYEGVRRAAPRTPRRLNGCRSDTAESARASSACANRRKLGTKAHVVIHSHVVYNAHKHGKDNQVKSVRTSQYYSVQYGEXVVGSGADKDDRLYXYQLLTHVCGRDAWMQVAGLVIYTCNNTLLP

SEQ ID NO: 8809 - protein, 234 aa, Glycine max
  misc_feature (60)..(60): Xaa can be any naturally occurring amino acid
  misc_feature (172)..(172): Xaa can be any naturally occurring amino acid
  Coding DNA Sequence Number=SeqID_5323
GRKKKGCYSPPRFWGKFLRRGTTLFWGGGGFPPPSPGGERRRVFFIPLPGGVSKILLGAXGGGEGGGAPSGKPRVAPPPGLFHGENRGVLGVSGAGAPGGGNGAPGGAFCPWGGGGGGFLAFPPGGTGGVNSSPRAGGGQPGREGKPLEALGGPLPVFRGTRARGGSARRSXLPPSPGCNRAAAAAAGTVTRTSKTKAVLHSDAAIATKYGCLLLSGKLECQEAQEQMLTGTIE

SEQ ID NO: 8810 - protein, 114 aa, Glycine max; identical to SEQ ID NO: 8250
  Coding DNA Sequence Number=SeqID_5325
  Subcellular localization annotation: CTP_CleavageSite=21; ConfidenceScore=5.04e-01

SEQ ID NO: 8811 - protein, 146 aa, Glycine max
  misc_feature (31)..(31): Xaa can be any naturally occurring amino acid
  Coding DNA Sequence Number=SeqID_5327
  Gene Ontology: Mol. function=ligase activity, forming aminoacyl-tRNA and related compounds; Cellular component=cytoplasm; Biological process=alanyl-tRNA aminoacylation
  Homolog annotation: Hit_ID=A2ZNN8; Match level="QueryCoverage=87%, HitCoverage=10%, E-value=2e-41, Identity=67%"; Hit description =Putative uncharacterized protein
RSVSQYHARRRRRPISPRAGMAAAAGPTRLXYFDDMWALRAPATVLSIHHQEEGGRRAVVLDATVFHPQGGGQPADTGAIVSASGAGARFLVKDGVVFHYGRFEDAAGEEELSQGQSVSLEVDAERRKLNSRLHSARHLLDSCMTN

SEQ ID NO: 8812 - protein, 99 aa, Glycine max
  misc_feature (12)..(12): Xaa can be any naturally occurring amino acid
  misc_feature (22)..(22): Xaa can be any naturally occurring amino acid
  Coding DNA Sequence Number=SeqID_5328
  Homolog annotation: Hit_ID=A7NTF2; Match level="QueryCoverage=98%, HitCoverage=15%, E-value=1e-37, Identity=76%"; Hit description =Chromosome chr18 scaffold_1, whole genome shotgun sequence
VASAEIKFRHGXPPGDGVLYYXGEVFSTSHQPVASLRLERILNGLQDIEYLRLYASRYGRDESIALLERMGVYSGPERYTFEHMPIDAMRGPIFNARRS

SEQ ID NO: 8813 - protein, 172 aa, Glycine max; identical to SEQ ID NO: 8253
  misc_feature (1)..(1): Xaa can be any naturally occurring amino acid
  misc_feature (4)..(6): Xaa can be any naturally occurring amino acid
  misc_feature (26)..(26): Xaa can be any naturally occurring amino acid
  misc_feature (34)..(35): Xaa can be any naturally occurring amino acid
  misc_feature (37)..(47): Xaa can be any naturally occurring amino acid
  misc_feature (49)..(59): Xaa can be any naturally occurring amino acid
  misc_feature (61)..(71): Xaa can be any naturally occurring amino acid
  misc_feature (73)..(73): Xaa can be any naturally occurring amino acid
  misc_feature (76)..(76): Xaa can be any naturally occurring amino acid
  misc_feature (79)..(80): Xaa can be any naturally occurring amino acid
  misc_feature (82)..(86): Xaa can be any naturally occurring amino acid
  misc_feature (90)..(92): Xaa can be any naturally occurring amino acid
  misc_feature (96)..(96): Xaa can be any naturally occurring amino acid
  misc_feature (98)..(98): Xaa can be any naturally occurring amino acid
  misc_feature (106)..(106): Xaa can be any naturally occurring amino acid
  misc_feature (108)..(109): Xaa can be any naturally occurring amino acid
  misc_feature (111)..(111): Xaa can be any naturally occurring amino acid
  misc_feature (113)..(113): Xaa can be any naturally occurring amino acid
  misc_feature (115)..(116): Xaa can be any naturally occurring amino acid
  misc_feature (118)..(121): Xaa can be any naturally occurring amino acid
  misc_feature (123)..(124): Xaa can be any naturally occurring amino acid
  misc_feature (127)..(127): Xaa can be any naturally occurring amino acid
  misc_feature (130)..(130): Xaa can be any naturally occurring amino acid
  misc_feature (132)..(133): Xaa can be any naturally occurring amino acid
  misc_feature (136)..(138): Xaa can be any naturally occurring amino acid
  misc_feature (141)..(142): Xaa can be any naturally occurring amino acid
  misc_feature (147)..(147): Xaa can be any naturally occurring amino acid
  misc_feature (150)..(150): Xaa can be any naturally occurring amino acid
  misc_feature (156)..(157): Xaa can be any naturally occurring amino acid
  misc_feature (159)..(159): Xaa can be any naturally occurring amino acid
  misc_feature (163)..(163): Xaa can be any naturally occurring amino acid
  Coding DNA Sequence Number=SeqID_5329
  Subcellular localization annotation: CTP_CleavageSite=11; ConfidenceScore=5.06e-01

SEQ ID NO: 8814 - protein, 68 aa, Glycine max
  Coding DNA Sequence Number=SeqID_5331
HELIGASNTMVWIQFEYYVVVLPENHAGIEHYSTCPCWRRAQVPLHDRVNRQVAIYMLRSAHLTPSLN

SEQ ID NO: 8815 - protein, 68 aa, Glycine max
  Coding DNA Sequence Number=SeqID_5333
  Gene Ontology: Mol. function=nucleic acid binding; Cellular component= ribonucleoprotein complex; Biological process=mRNA metabolic process
  Homolog annotation: Hit_ID=O22247; Match level="QueryCoverage=98%, HitCoverage=62%, E-value=3e-23, Identity=79%"; Hit description=Small nuclear ribonucleoprotein-like protein
  Pfam annotation: Domain name=LSM; Domain location=20-68; Score=21.6; E_value=0.00074; Accession=PF01423.12; Description=LSM domain
EDPAGKNQQEKFITGPLSVLMMSVANNTQVLIHCRYNTKLLGRVRAFDRHCNMVLENVREMWSEGTKD

SEQ ID NO: 8816 - protein, 81 aa, Glycine max
  misc_feature (70)..(70): Xaa can be any naturally occurring amino acid
  Coding DNA Sequence Number=SeqID_5334
  Subcellular localization annotation: CTP_CleavageSite=57; ConfidenceScore=5.21e-01
LRRPPPVPLVQSFIDGEGRSSFTRQGSMVYTKRPSRKSRLKRRFDTRKGQKDESVILKEQVEELQMKILXKDELIESSENT

SEQ ID NO: 8817 - protein, 310 aa, Glycine max
  Coding DNA Sequence Number=SeqID_5336
ANVINHLSDKMFKWFKQPDIPSSSPDMLTFPFEYNIFGFTMDNYVKSYTRNRVTKENLKEIIEEVNSALKSDSDSFKAWDFFAIFIILALNGGIIACIATIEMKAFVVFAIKLGYICIALIMNFVIYGCCLDSTVNRLRDKIQSILDQKDEYFDSKGMKWTVCNGADFPYWVELHIQSQFEMKLEREIEKATGQKKNKKTDRDNENKGILDSTGNIKYQKKGGLFGNKKKNEQHLIGFEVDEEAEENEEDTSHVQPQRGQRQNNFGNYFAQQQPRDEVEIEVKDRKFDRLYAPLEEDYEENYEDEDIVSP

SEQ ID NO: 8818 - protein, 72 aa, Glycine max
  Coding DNA Sequence Number=SeqID_5338
  Gene Ontology: Mol. function=alpha,alpha-trehalose-phosphate synthase (UDP-forming) activity; Biological process=trehalose biosynthetic process
  Homolog annotation: Hit_ID=A7PD38; Match level="QueryCoverage=97%, HitCoverage=8%, E-value=3e-22, Identity=65%"; Hit description =Chromosome chr17 scaffold_12, whole genome shotgun sequence
PEHGYYLKWSQQSAWEMNHISTGSSWKEIVEPVMRLYTEATNGSYIETKESALVWHYYDADPDFGSWQAKQG

SEQ ID NO: 8819 - protein, 89 aa, Glycine max
  Coding DNA Sequence Number=SeqID_5339
ARRRQLGSLGDALHFLPVERVTVASTAFALTPLLPIVPMNLRFRHLFIGGDFSVMIVVCCSMGLTVVLGSPSSFPRAVGWLRACRPPDE

SEQ ID NO: 8820 - protein, 199 aa, Glycine max
  misc_feature (71)..(71): Xaa can be any naturally occurring amino acid
  misc_feature (86)..(86): Xaa can be any naturally occurring amino acid
  misc_feature (133)..(133): Xaa can be any naturally occurring amino acid
  misc_feature (152)..(152): Xaa can be any naturally occurring amino acid
  Coding DNA Sequence Number=SeqID_5341
  Gene Ontology: Mol. function=transferase activity, transferring glycosyl groups; Biological process=metabolic process
  Homolog annotation: Hit_ID=Q8S3B8; Match level="QueryCoverage=99%, HitCoverage=42%, E-value=1e-50, Identity=55%"; Hit description =Zeatin O-glucosyltransferase
HNRQVIVRAQGWDPNSIYNIQIHDFNVPPFVSPAPNPHAETRFPSHLLPSFGASTSLPEPVYSLLPSLSTXAKRAVVFFNSLMALXARILFMCPNCESYTFHSVSAFTMFLYFWDAMGRPPVEKGSNLFLEVXFLGGCFTTQFINIITLHSXFHKCPKGTIYNTTRVIESPYLELIKRIIISKTHWALGPFNPLSIEKG

SEQ ID NO: 8821 - protein, 176 aa, Glycine max
  Coding DNA Sequence Number=SeqID_5342
SYVGPPPPPKDHISYINSQQGPYKGPIDIKVFSELDNVRDAKMYFSKKDMMSIENLKLGITGYEKESKKQSAAQKAQNQLKMSESMSKFNFSRQETEEAESRDSRGSTDSLPSPIKARSDLPPLKKLPEKLKSEVSSTLQDFPNTGESPLLMKDIKANASMGPSSNFFKGVSNSAT

SEQ ID NO: 8822 - protein, 128 aa, Glycine max; identical to SEQ ID NO: 7913
  Coding DNA Sequence Number=SeqID_5344

SEQ ID NO: 8823 - protein, 144 aa, Glycine max
  misc_feature (65)..(65): Xaa can be any naturally occurring amino acid
  misc_feature (67)..(67): Xaa can be any naturally occurring amino acid
  misc_feature (121)..(121): Xaa can be any naturally occurring amino acid
  Coding DNA Sequence Number=SeqID_5346
CILRHINTIYSTNILGGANYNSPVLLLHCSDHTVYILVACGGRVLYKYNRHTYNIRRAGETESNXNXIGGDSRLYRVMHEIYYFYNIYERRGGLYSARPKRTNIPHDMSYTIHRVSCCVWXGRGGVATAPRRRFDKEGRDYHTR

SEQ ID NO: 8824 - protein, 234 aa, Glycine max
  Coding DNA Sequence Number=SeqID_5348
  Gene Ontology: Mol. function=transcription factor activity; Cellular component=nucleus; Biological process=regulation of transcription, DNA-dependent
  Homolog annotation: Hit_ID=A7NZQ3; Match level="QueryCoverage=90%, HitCoverage=71%, E-value=4e-59, Identity=52%"; Hit description =Chromosome chr6 scaffold_3, whole genome shotgun sequence
  Pfam annotation: Domain name=CBFB_NFYA; Domain location=139-195; Score=131.6; E_value=2.2e-36; Accession=PF02045.6; Description=CCAAT- binding transcription factor (CBF-BNF-YA) subunit B
MQSKSETANQLRSDPRSFAPNQSYSEPWWRGIQCNPVPQAMLGVNASNSSSLERPNGDSESSEEDDDATKESQPTAPNQSGNYGQDHQAMQHSSSSAPLVRDDCLTQAPQVELVGHSIGYTPFIGMPHARMALPLEMAQEPVYVNAKQYQGILRRRQARAKAELEKKLIKVRKPYLHESRHQHAIRRARGNGGRFAKKTEVEASNHMNKEKDMVLPGPIARQLVHLVWITTLAL

SEQ ID NO: 8825 - protein, 90 aa, Glycine max
  Coding DNA Sequence Number=SeqID_5349
  Gene Ontology: Mol. function=alpha-1,4-glucan-protein synthase (UDP -forming) activity; Cellular component=cellulose and pectin -containing cell wall; Biological process=cellulose biosynthetic process
  Homolog annotation: Hit_ID=O82705; Match level="QueryCoverage=68%, HitCoverage=17%, E-value=2e-16, Identity=67%"; Hit description=RGP1 protein
  Subcellular localization annotation: CTP_CleavageSite=36; ConfidenceScore=5.17e-01
HLSLLPPLPPPPGTARSRARDRDPGQASLAGTVTVPGSSVPSTPLLTDELDIVIPPLRVLDYLQTRRPFCQPYHLFTAQHGYPTYAIKVP

SEQ ID NO: 8826 - protein, 99 aa, Glycine max
  Coding DNA Sequence Number=SeqID_5350
CRVSARVSAAVLVSPLPHALVAEGPFPTLPAVALCRGCWPPDLPCLALGHTSLAAPVTVLAASTPLPVPCACCFPSICGYVLLIFELGPSYLNFISALA

SEQ ID NO: 8827 - protein, 149 aa, Glycine max; identical to SEQ ID NO: 7921
  misc_feature (18)..(19): Xaa can be any naturally occurring amino acid
  misc_feature (36)..(36): Xaa can be any naturally occurring amino acid
  misc_feature (41)..(42): Xaa can be any naturally occurring amino acid
  misc_feature (44)..(44): Xaa can be any naturally occurring amino acid
  misc_feature (54)..(55): Xaa can be any naturally occurring amino acid
  misc_feature (62)..(62): Xaa can be any naturally occurring amino acid
  misc_feature (68)..(68): Xaa can be any naturally occurring amino acid
  misc_feature (73)..(74): Xaa can be any naturally occurring amino acid
  misc_feature (77)..(77): Xaa can be any naturally occurring amino acid
  misc_feature (79)..(79): Xaa can be any naturally occurring amino acid
  misc_feature (87)..(87): Xaa can be any naturally occurring amino acid
  misc_feature (100)..(100): Xaa can be any naturally occurring amino acid
  misc_feature (102)..(102): Xaa can be any naturally occurring amino acid
  misc_feature (113)..(113): Xaa can be any naturally occurring amino acid
  misc_feature (116)..(116): Xaa can be any naturally occurring amino acid
  misc_feature (148)..(148): Xaa can be any naturally occurring amino acid
  Coding DNA Sequence Number=SeqID_5352
  Subcellular localization annotation: CTP_CleavageSite=11; ConfidenceScore=5.14e-01

SEQ ID NO: 8828 - protein, 154 aa, Glycine max
  Coding DNA Sequence Number=SeqID_5353
FHRCDGLRTRLLHANPESLLEARGDGQRAPGPGRRIRKRRGGRSHSDASPRKRAQDQHTKRSQRLQCGRPGHGGSPGNRQPTEGSPAWPRSGEGDRGGQAGDGGPGGGAGGRGGGGRGGGGTGGGGGRGAGGGAEEAAGGAGPGARQQQQEGLD

SEQ ID NO: 8829 - protein, 225 aa, Glycine max
  misc_feature (93)..(93): Xaa can be any naturally occurring amino acid
  misc_feature (156)..(156): Xaa can be any naturally occurring amino acid
  misc_feature (166)..(166): Xaa can be any naturally occurring amino acid
  Coding DNA Sequence Number=SeqID_5354
  Homolog annotation: Hit_ID=A7PHP9; Match level="QueryCoverage=92%, HitCoverage=37%, E-value=5e-72, Identity=69%"; Hit description =Chromosome chr17 scaffold_16, whole genome shotgun sequence
ICADIAQSKHEHWSSLAPLPFELVISAGQKAKEESWNKSADGPDRSKLVRDLNDLAGEGNIESMLSVELGLRELANLKVEDAVVLALAQHRRXHSVRQSVFLSKSHGDAQYPEAFELSEKHAVRVLFKEGWGAYCCSRALLQGVEEDIVESRLSFXILRSGHSPCXHDAVDVERGLLELRKLSIEQQLWEASRKGMEQLQGSANANHKHATDSDASSCLSEPFSS

SEQ ID NO: 8830 - protein, 280 aa, Glycine max
  misc_feature (26)..(26): Xaa can be any naturally occurring amino acid
  misc_feature (29)..(30): Xaa can be any naturally occurring amino acid
  misc_feature (92)..(92): Xaa can be any naturally occurring amino acid
  misc_feature (135)..(135): Xaa can be any naturally occurring amino acid
  misc_feature (153)..(153): Xaa can be any naturally occurring amino acid
  misc_feature (166)..(167): Xaa can be any naturally occurring amino acid
  misc_feature (179)..(179): Xaa can be any naturally occurring amino acid
  misc_feature (183)..(183): Xaa can be any naturally occurring amino acid
  misc_feature (186)..(186): Xaa can be any naturally occurring amino acid
  misc_feature (188)..(188): Xaa can be any naturally occurring amino acid
  misc_feature (239)..(239): Xaa can be any naturally occurring amino acid
  misc_feature (242)..(242): Xaa can be any naturally occurring amino acid
  Coding DNA Sequence Number=SeqID_5355
LCVGYVYVSCASSRRNNLYIACGPRXGWXXLSRSVGVFRCGLFLQSFWLCGYLSVLIRYIECDLVIGCTGRTTLCCVCQFLLCVVRAYCVCXVVFIYDSCSLPLLCGLCSGLSLTLRSILPSPRSLSPTRSRCCXLSYRVVSVRLQHTHALAXSVCVIASCDGVDXXGGGSRTVCRCQXAVCXRCXSXVSLALRFDVVVSSVSCVAARGVACARYLTYHDDRVVSLRLFDSMTALRSRXSSXTRDLCVWSATRRTVPCASRRRARDSGARRAMFADAAGR

SEQ ID NO: 8831 - protein, 81 aa, Glycine max
  misc_feature (50)..(50): Xaa can be any naturally occurring amino acid
  misc_feature (62)..(63): Xaa can be any naturally occurring amino acid
  Coding DNA Sequence Number=SeqID_5357
KGPAITGTKLTIPRFVSCVNYHDYHLLPYHQLTIQRRSIIKSSLTTSLAXSEHSYPPLTILXXTFGASTPVRPNYTPPIFF

SEQ ID NO: 8832 - protein, 80 aa, Glycine max
  misc_feature (40)..(40): Xaa can be any naturally occurring amino acid
  Coding DNA Sequence Number=SeqID_5359
  Subcellular localization annotation: CTP_CleavageSite=53; ConfidenceScore=5.29e-01
SLRSHTAAHYRALTKMSPRFNNDNNIRPGSGNARLRALSXMISDNLYVISSIEAPTVSLTLRLQRALYNAERATRAPHTL

SEQ ID NO: 8833 - protein, 126 aa, Glycine max
  misc_feature (30)..(30): Xaa can be any naturally occurring amino acid
  misc_feature (90)..(91): Xaa can be any naturally occurring amino acid
  misc_feature (99)..(99): Xaa can be any naturally occurring amino acid
  Coding DNA Sequence Number=SeqID_5361
  Subcellular localization annotation: CTP_CleavageSite=42; ConfidenceScore=5.19e-01
RIYIGDMQKTHLANTTPHHLISSHTNQTAXHSRHTAHLYFTSSSLYSPTRISVSQRNIMIHSIYAIHHTSTYTRILQRRAPYGCSPTLTXXIAIFTLLXTRLSSSTLYTNLRLHETRGDSIDTTRM

SEQ ID NO: 8834 - protein, 155 aa, Glycine max
  misc_feature (33)..(33): Xaa can be any naturally occurring amino acid
  misc_feature (77)..(77): Xaa can be any naturally occurring amino acid
  Coding DNA Sequence Number=SeqID_5363
  Homolog annotation: Hit_ID=Q25BM6; Match level="QueryCoverage=96%, HitCoverage=33%, E-value=3e-36, Identity=56%"; Hit description =Putative uncharacterized protein
  Pfam annotation: Domain name=DUF537; Domain location=40-149; Score =3.4; E_value=3.8e-05; Accession=PF04396.4; Description=Protein of unknown function, DUF537
ELYASHASEYDISFEKYVEIKEDVSKMVDFSEXIPTVRGPRTAVFWDAVDCPFPPSSSPDAIYQSISSALAERCFSXNVTIWAYLDDADKKGSALLGGDKTWASRIYFLPGGDKASRRIRMLNDMFLWARDSPRGMRYEASLVLFADQFIGAGGY

SEQ ID NO: 8835 - protein, 98 aa, Glycine max
  misc_feature (28)..(28): Xaa can be any naturally occurring amino acid
  misc_feature (96)..(96): Xaa can be any naturally occurring amino acid
  Coding DNA Sequence Number=SeqID_5364
CYIDAPCLMCERRSLYIYICSIHALFYXVVDEYIHISLTYIYVYIRYTHEERYSICIRHLQIYESSVRESRVSGMMLEYSIDRTYCVISNINHILXQV

SEQ ID NO: 8836 - protein, 150 aa, Glycine max; identical to SEQ ID NO: 6064
  misc_feature (98)..(98): Xaa can be any naturally occurring amino acid
  misc_feature (105)..(105): Xaa can be any naturally occurring amino acid
  misc_feature (108)..(108): Xaa can be any naturally occurring amino acid
  misc_feature (125)..(125): Xaa can be any naturally occurring amino acid
  misc_feature (133)..(134): Xaa can be any naturally occurring amino acid
  Coding DNA Sequence Number=SeqID_5365
  Coding DNA Sequence Number=SeqID_5365
  Gene Ontology: Mol. function=catalytic activity; Cellular component =endoplasmic reticulum membrane; Biological process=metabolic process
  Homolog annotation: Hit_ID=A7PIP4; Match level="QueryCoverage=92%, HitCoverage=50%, E-value=2e-59, Identity=77%"; Hit description =Chromosome chr13 scaffold_17, whole genome shotgun sequence

SEQ ID NO: 8837 - protein, 125 aa, Glycine max; identical to SEQ ID NO: 7960
  misc_feature (37)..(37): Xaa can be any naturally occurring amino acid
  misc_feature (64)..(64): Xaa can be any naturally occurring amino acid
  Coding DNA Sequence Number=SeqID_5366

SEQ ID NO: 8838 - protein, 247 aa, Glycine max
  Coding DNA Sequence Number=SeqID_5368
INLKTHPDLMKTFIAVFFILISCAFAGRSYTQLSQSTIANSSLIQDLQQLGAEYVLEQGIFRSTKAPLPNGSWEVNETVSVFKKDNCGTTIYNFTVILRCISETKLVRARYLISYNRKNFNALVTWFIYTDITPDGDNFAISDLPSFIDVRDLNDSDSPYQEYLDQGLNYTVANATSNGLLPEGDYRVARVFSIKDTGFSYPYGYRYLVKLANDDNGKYYRALITVWNTENVEEDQQEFTPEFVIYP

SEQ ID NO: 8839 - protein, 156 aa, Glycine max; identical to SEQ ID NO: 7963
  misc_feature (42)..(42): Xaa can be any naturally occurring amino acid
  misc_feature (61)..(61): Xaa can be any naturally occurring amino acid
  misc_feature (87)..(87): Xaa can be any naturally occurring amino acid
  misc_feature (89)..(89): Xaa can be any naturally occurring amino acid
  misc_feature (144)..(144): Xaa can be any naturally occurring amino acid
  Coding DNA Sequence Number=SeqID_5370

SEQ ID NO: 8840 - protein, 89 aa, Glycine max
  misc_feature (3)..(3): Xaa can be any naturally occurring amino acid
  misc_feature (18)..(18): Xaa can be any naturally occurring amino acid
  misc_feature (86)..(89): Xaa can be any naturally occurring amino acid
  Coding DNA Sequence Number=SeqID_5372
APXIQDLLKDTKLLNPAXITLPKRSGIFGDMISTWQNRSVQNEDNQHRHTTETHAVNDHTNNDMMGMPFMNFWKPKDSSKEPLSDXXXX

SEQ ID NO: 8841 - protein, 33 aa, Glycine max
  Coding DNA Sequence Number=SeqID_5374
KPRVGWSVQSILLYPINDYRCFLTPLVHGFYMK

SEQ ID NO: 8842 - protein, 163 aa, Glycine max
  misc_feature (21)..(21): Xaa can be any naturally occurring amino acid
  misc_feature (33)..(33): Xaa can be any naturally occurring amino acid
  misc_feature (68)..(68): Xaa can be any naturally occurring amino acid
  misc_feature (88)..(88): Xaa can be any naturally occurring amino acid
  misc_feature (114)..(114): Xaa can be any naturally occurring amino acid
  misc_feature (151)..(151): Xaa can be any naturally occurring amino acid
  Coding DNA Sequence Number=SeqID_5376
RQSPDVLHSCFILLCVCRREXITPHPPVWLNDXLYRTIQIERGVLALYPVLIYPPTRCVLHSTTRSLXRASPQAHNMYISTTLPRCYXPQLIPSYLSSLCKDITRAHNQPRHTXIRFLCALTLRTQDVITVILFYVVTHDCPPLLRPSLIXHPHPALHAASGN

SEQ ID NO: 8843 - protein, 101 aa, Glycine max; identical to SEQ ID NO: 7909
  misc_feature (9)..(9): Xaa can be any naturally occurring amino acid
  misc_feature (48)..(48): Xaa can be any naturally occurring amino acid
  misc_feature (79)..(79): Xaa can be any naturally occurring amino acid
  Coding DNA Sequence Number=SeqID_5377

SEQ ID NO: 8844 - protein, 113 aa, Glycine max
  Coding DNA Sequence Number=SeqID_5379
  Homolog annotation: Hit_ID=Q53JF1; Match level="QueryCoverage=88%, HitCoverage=100%, E-value=2e-08, Identity=33%"; Hit description =Expressed protein
  Pfam annotation: Domain name=RALF; Domain location=55-112; Score=5.3; E_value=0.0059; Accession=PF05498.2; Description=Rapid ALkalinization Factor (RALF)
RAAAPLEAETMRLQTQLLILASITAAMIMSHDVLAGTTHAIPVRTLGGVEEDDVGFAEREEEAYPRRRVLYGDQYISYKGVQASRPACPGSCAGRGQPYTGSGCQAIFGCRGR

SEQ ID NO: 8845 - protein, 88 aa, Glycine max
  misc_feature (44)..(44): Xaa can be any naturally occurring amino acid
  misc_feature (52)..(52): Xaa can be any naturally occurring amino acid
  misc_feature (61)..(61): Xaa can be any naturally occurring amino acid
  Coding DNA Sequence Number=SeqID_5380
  Gene Ontology: Mol. function=translation elongation factor activity; Cellular component=cytoplasm; Biological process=translational elongation
  Homolog annotation: Hit_ID=Q56YZ4; Match level="QueryCoverage=87%, HitCoverage=53%, E-value=9e-20, Identity=70%"; Hit description =Translation elongation factor eEF-1 alpha chain
  Pfam annotation: Domain name=GTP_EFTU_D3; Domain location=1-71; Score= 35.3; E_value=2.2e-07; Accession=PF03143.7; Description=Elongation factor Tu C-terminal domain
SEILIKIDRRSGKELEKEGKFLKNGDAGMVKMISAKPMVVETFXEYPPLGRXAVRDMRQTXVAVGVIKSVEKKETAGGKVHKVVTKKK

SEQ ID NO: 8846 - protein, 119 aa, Glycine max
  misc_feature (7)..(7): Xaa can be any naturally occurring amino acid
  misc_feature (9)..(10): Xaa can be any naturally occurring amino acid
  misc_feature (14)..(15): Xaa can be any naturally occurring amino acid
  misc_feature (18)..(18): Xaa can be any naturally occurring amino acid
  misc_feature (48)..(51): Xaa can be any naturally occurring amino acid
  misc_feature (60)..(61): Xaa can be any naturally occurring amino acid
  misc_feature (64)..(64): Xaa can be any naturally occurring amino acid
  misc_feature (67)..(67): Xaa can be any naturally occurring amino acid
  misc_feature (69)..(69): Xaa can be any naturally occurring amino acid
  misc_feature (72)..(72): Xaa can be any naturally occurring amino acid
  misc_feature (79)..(80): Xaa can be any naturally occurring amino acid
  misc_feature (93)..(93): Xaa can be any naturally occurring amino acid
  misc_feature (100)..(100): Xaa can be any naturally occurring amino acid
  misc_feature (102)..(102): Xaa can be any naturally occurring amino acid
  misc_feature (110)..(110): Xaa can be any naturally occurring amino acid
  misc_feature (117)..(117): Xaa can be any naturally occurring amino acid
  misc_feature (119)..(119): Xaa can be any naturally occurring amino acid
  Coding DNA Sequence Number=SeqID_5381
KPKINLXVXXSGGXXHTXYTTTTSTQLCDTIIAHSRGEEDVRENTHPXXXXPSLYVYCFXXSSXPVXEXRLXTSALITXXHLCSHQLTMTCAXHANTNTXAXRMSVAPSXCSNYMEXGX

SEQ ID NO: 8847 - protein, 285 aa, Glycine max
  Coding DNA Sequence Number=SeqID_5383
  Gene Ontology: Mol. function=sequence-specific DNA binding; Cellular component=nucleus; Biological process=regulation of transcription, DNA-dependent
  Homolog annotation: Hit_ID=Q8LC03; Match level="QueryCoverage=100%, HitCoverage=100%, E-value=1e-128, Identity=80%"; Hit description =Homeobox-leucine zipper protein ATHB-13
  Pfam annotation: Domain name=HALZ; Domain location=133-177; Score =73.9; E_value=5.1e-19; Accession=PF02183.8; Description=Homeobox associated leucine zipper
  Pfam annotation: Domain name=Homeobox; Domain location=78-132; Score =74.5; E_value=3.4e-19; Accession=PF00046.19; Description=Homeobox domain
  Pfam module annotation: Pfam domain module=HALZ::Homeobox; Domain location=133-177::78-132
MSCNNGMSFFPSNFMIQTSYEDLPPSLSPLLPSCSIPQDLHGFASFLGKRSPVEGLEAGNIMNGEEDYSDDGSQMGEKKRRLNMEQVKTLEKNFELGNKLDPERKMQLARALGLQPRQIAIWFQNRRARWKTKQLEKDYDTLKRQFDSLKAENDHLQTHNQKLQAEIMSSRNREQTESINLNKETEGSCSNRSDNSSDNFRLDISTAVPSVDSTITGGHPPAPQTVGRHFFPPATATTTTTTMQFFQNSSSGQSMVKEENSISNMFCAMDDHSGFWPWLDQQQYN

SEQ ID NO: 8848 - protein, 218 aa, Glycine max
  Coding DNA Sequence Number=SeqID_5384
  Gene Ontology: Mol. function=protein binding; Cellular component =integral to membrane; Biological process=signal transduction
  Homolog annotation: Hit_ID=Q54U77; Match level="QueryCoverage=97%, HitCoverage=26%, E-value=7e-18, Identity=26%"; Hit description =Putative uncharacterized protein
  Pfam annotation: Domain name=DSL; Domain location=151-208; Score= -9.4; E_value=0.095; Accession=PF01414.9; Description=Delta serrate ligand
  Pfam annotation: Domain name=EGF; Domain location=100-129; Score=7.6; E_value=1.7; Accession=PF00008.17; Description=EGF-like domain
  Pfam annotation: Domain name=EGF; Domain location=133-179; Score =13.3; E_value=0.58; Accession=PF00008.17; Description=EGF-like domain
  Pfam annotation: Domain name=EGF; Domain location=183-212; Score=9.8; E_value=1.1; Accession=PF00008.17; Description=EGF-like domain
  Pfam annotation: Domain name=EGF; Domain location=34-63; Score=16.5; E_value=0.1; Accession=PF00008.17; Description=EGF-like domain
  Pfam annotation: Domain name=EGF; Domain location=68-96; Score=10.7; E_value=0.93; Accession=PF00008.17; Description=EGF-like domain
  Pfam annotation: Domain name=EGF_2; Domain location=100-129; Score =23.7; E_value=0.00067; Accession=PF07974.3; Description=EGF-like domain
  Pfam annotation: Domain name=EGF_2; Domain location=133-179; Score =6.1; E_value=0.54; Accession=PF07974.3; Description=EGF-like domain
  Pfam annotation: Domain name=EGF_2; Domain location=183-212; Score =20.5; E_value=0.0063; Accession=PF07974.3; Description=EGF-like domain
  Pfam annotation: Domain name=EGF_2; Domain location=34-63; Score =11.6; E_value=0.13; Accession=PF07974.3; Description=EGF-like domain
  Pfam annotation: Domain name=EGF_2; Domain location=68-96; Score =27.2; E_value=6.2e-05; Accession=PF07974.3; Description=EGF-like domain
  Pfam module annotation: Pfam domain module=DSL::EGF::EGF::EGF::EGF::EG F::EGF_2::EGF_2::EGF_2::EGF_2::EGF_2; Domain location=151-208::100 -129::133-179::183-212::34-63::68-96::100-129::133-179::183-212::34 -63::68-96
PPPFIFIGKCEFSDDETVCVCYGTYYGSDCSVFCQPSVNCSNNGDCKADGTCNCGENYYGDNCEFTYCPGNCSGNGICNNSTGVCSCSENYFSPSCENYCVASTTCSGQGDCSNNGICECYNNYYGNNCLSFCDSQTTCSNHGTCVEIQNRERKERGEREEIESGVECQCDFNYHNLDCSVYCNDTITCSGHGTCNNTGVCECTGEYFDSACDKLSCH

SEQ ID NO: 8849 - protein, 158 aa, Glycine max
  Coding DNA Sequence Number=SeqID_5385
EAGLVAEIQNKTISEATEILVKQLDQLKAEEKLLKKQRKEEKAKAKALKMMTEMDSESSSSSESSDSDCGKGKVVDMSSLRNNAKPVLEPLQPESSVATLPRNQQDSCKNTTGEALKLALLESAAATTAFPSVVNPGLPLKTVEAVPVVGLPLKRVEV

SEQ ID NO: 8850 - protein, 119 aa, Glycine max
  misc_feature (80)..(80): Xaa can be any naturally occurring amino acid
  Coding DNA Sequence Number=SeqID_5386
MIVCMTLFAVHPDRGYETSHHMWSITSLMSLSLLRVPWGANSVFSTEYLTDSLSRRRGVPILFYCHGMTWGECALILSTXLIRAYYYNYIDMAPTDSCHEASYTPEYVLCGTLYRCVYI

SEQ ID NO: 8851 - protein, 134 aa, Glycine max
  misc_feature (22)..(22): Xaa can be any naturally occurring amino acid
  Coding DNA Sequence Number=SeqID_5388
  Homolog annotation: Hit_ID=Q7XDY7; Match level="QueryCoverage=84%, HitCoverage=27%, E-value=1e-10, Identity=39%"; Hit description =Expressed protein
MRIRRSASRLLGSTAASSCPKXEPPRFELPRLEPPPPPPPPPAPAHESGAGFVGPKTSSGGEPCCELSRSPWDLMAQLDLSDPQVEKLFVETSFMSVSWRGCWLFPAGITMPAGSIKEEEDLAVDMVDGVILKL

SEQ ID NO: 8852 - protein, 134 aa, Glycine max
  Coding DNA Sequence Number=SeqID_5389
  Gene Ontology: Mol. function=NADH dehydrogenase (ubiquinone) activity; Cellular component=mitochondrial respiratory chain complex I; Biological process=mitochondrial electron transport, NADH to ubiquinone
  Homolog annotation: Hit_ID=Q9FIJ2; Match level="QueryCoverage=100%, HitCoverage=100%, E-value=5e-35, Identity=58%"; Hit description=NADH dehydrogenase 10.5K chain-like protein
  Pfam annotation: Domain name=L51_S25_CI-B8; Domain location=57-129; Score=77.5; E_value=4.4e-20; Accession=PF05047.6; Description =Mitochondrial ribosomal protein L51  S25  CI-B8 domain
  Subcellular localization annotation: CTP_CleavageSite=57; ConfidenceScore=5.05e-01
MAWRGNISKSLKELRILLCQSSPASASARFLLHPSLSLSSPIESNSVKIGGSISVVRDFELFGFRTFVEKNYRDLKSLNPKFPFMIRECTGIQPQLWARYDMGVERCVNLDGMSDSQILKSLEDLVKAGGATKA

SEQ ID NO: 8853 - protein, 220 aa, Glycine max
  misc_feature (106)..(106): Xaa can be any naturally occurring amino acid
  misc_feature (159)..(160): Xaa can be any naturally occurring amino acid
  misc_feature (180)..(183): Xaa can be any naturally occurring amino acid
  misc_feature (187)..(187): Xaa can be any naturally occurring amino acid
  misc_feature (189)..(189): Xaa can be any naturally occurring amino acid
  Coding DNA Sequence Number=SeqID_5390
  Gene Ontology: Mol. function=oxidoreductase activity; Cellular component=integral to membrane; Biological process=metabolic process
  Homolog annotation: Hit_ID=B0ICV5; Match level="QueryCoverage=83%, HitCoverage=42%, E-value=2e-56, Identity=62%"; Hit description =Alcohol dehydrogenase zinc-binding domain protein
  Pfam annotation: Domain name=ADH_N; Domain location=37-118; Score =47.6; E_value=4.3e-11; Accession=PF08240.2; Description=Alcohol dehydrogenase GroES-like domain
LGTGPPLESTMKAVVVQNYTAIDDVQLAHVPMPELTPGSVRVRVRAVGIGFVDGLKVQGLYQTKDPLPFIPGTEFAGEVDGVADGVSEYSAGMQVMGMVRSGALAXYVVVPMEALRILPDGISPEAGASFRVNYLTAHYALTERAKLQSGEQMLVLGAXXGVGTAAIQLGKIFGARVIAXXXXEEKXDXPSGLDHAAIHRLARGLIRLFFPLRSFICLVS

SEQ ID NO: 8854 - protein, 79 aa, Glycine max
  misc_feature (8)..(9): Xaa can be any naturally occurring amino acid
  misc_feature (46)..(46): Xaa can be any naturally occurring amino acid
  misc_feature (65)..(65): Xaa can be any naturally occurring amino acid
  Coding DNA Sequence Number=SeqID_5391
FCRRPSPXXGRLRRDPPGTHTPSSIPYRQTGGPPRSQIPRLINKHXHRPCYYIRVWGPVLLDHHXHVETSRVVLDIIEW

SEQ ID NO: 8855 - protein, 146 aa, Glycine max; identical to SEQ ID NO: 7971
  Coding DNA Sequence Number=SeqID_5393

SEQ ID NO: 8856 - protein, 116 aa, Glycine max
  misc_feature (33)..(33): Xaa can be any naturally occurring amino acid
  misc_feature (56)..(56): Xaa can be any naturally occurring amino acid
  misc_feature (93)..(93): Xaa can be any naturally occurring amino acid
  Coding DNA Sequence Number=SeqID_5395
LCELPAHTRLIRIGDRSCYLSFHIYRLRYHHQXSVCPPLPICEPKRYRDMLSPIYXERTLPCTPRIFARTYVDRAPHPPSHSRLRATPSVCGXNGKDVNFLTARVPLNPIRPAAAP

SEQ ID NO: 8857 - protein, 198 aa, Glycine max
  misc_feature (14)..(15): Xaa can be any naturally occurring amino acid
  misc_feature (21)..(21): Xaa can be any naturally occurring amino acid
  misc_feature (166)..(166): Xaa can be any naturally occurring amino acid
  Coding DNA Sequence Number=SeqID_5397
QLRRPPPQLKEKQXXFVQFHXAGSEDKTKTKTASGLQPTFLESWTKDWKCNPNMISLEFEIYKHKFLSNDLLGRAVLDLQNYTFVTKKPKIIILPVQLVKQKVKSTLTDQPSIVIQITPEDFGYHPSPYVWTWSYEQQEPTLIMDLADVVQVSCSETATYFVTEKXSLYKLAIGEHVPIKIETLTPVLKVAAGFDHVL

SEQ ID NO: 8858 - protein, 95 aa, Glycine max
  misc_feature (53)..(53): Xaa can be any naturally occurring amino acid
  Coding DNA Sequence Number=SeqID_5399
  Subcellular localization annotation: CTP_CleavageSite=46; ConfidenceScore=5.57e-01
NSLTQLINYNPLNNSYYNKLTTPHTTPPTRPETSSPFLPRATSSIRARQGWRXSTHFLQLSPKQQSNPFSPHTLLWQKYINNTRHRRMQTEARNI

SEQ ID NO: 8859 - protein, 88 aa, Glycine max
  Coding DNA Sequence Number=SeqID_5401
  Subcellular localization annotation: CTP_CleavageSite=40; ConfidenceScore=5.43e-01
NLVFSGGRKLYFCSKKKKKKPPLPPPCGAPKKNFFYNGVRAQNVFLKNNTRGGVEKKPLFREKNGGKILTGRNPRLFLPNISGRGVGF

SEQ ID NO: 8860 - protein, 92 aa, Glycine max
  misc_feature (1)..(1): Xaa can be any naturally occurring amino acid
  misc_feature (17)..(17): Xaa can be any naturally occurring amino acid
  Coding DNA Sequence Number=SeqID_5403
XSEKSYEKIMCVVCVVXTRYVGGSQRRHERQINHRKTHNSKIYKNTMIYCIVIGYGRRVQMRPHGAAKLHHSLYFSRRVHTIRQDWRPRVHY

SEQ ID NO: 8861 - protein, 734 aa, Glycine max
  misc_feature (296)..(296): Xaa can be any naturally occurring amino acid
  Coding DNA Sequence Number=SeqID_5405
  Gene Ontology: Mol. function=binding; Cellular component=integral to membrane; Biological process=phagocytosis, engulfment
  Homolog annotation: Hit_ID=A2Q278; Match level="QueryCoverage=97%, HitCoverage=97%, E-value=0.0, Identity=69%"; Hit description =Putative uncharacterized protein
  Pfam annotation: Domain name=DUF625; Domain location=20-210; Score =386.3; E_value=4.9e-113; Accession=PF04802.5; Description=Protein of unknown function (DUF625)
MALFCLYILYMHPFSPVFILQQEFFRKLMEVFRMCEDLENIDGLHMIFKIVKGIVLLNSPAIFERIFSDDFIVDIIGAFEYDPEVPFVQHHRKFLKEHVVFKEAIPIKDPVVLSKIHQTYRVGFLKDVVLARVLDEGIGANLNSIIHSNNAYVVSLLKDDSTFIQELFARLKSPTTSQESKKNLVYFLHEFCSLSKSLQMVQQLRLFRDLMNEGIFDVVTNVLQSQDKKLVLTGTDILILFLNQDPNLLRSYFVRLEGFALLGLLVKGMLTDFGENMHCQFLEILRNLLDSCTLLXFHRDTIIDIFFERHLGQLIEVITASGPSENTADANGKSIGPGRRIQCQSGTKPEILSNICELLCFCVLHHPYRIKCNFLLNNVIEKILLLTRRAERYLVVGAVRFVRTILSRHDEHLINYFVRNNVLKPIIDVFVSNGNRYNLLHSAVLELFEFIRKENLKLLLRYIVDSFWDQLVKFENLASIHSLKVKYEQCLDNGGTNDDATTAVDLRRRNDERALEREEERYFNEDSDEEDTASVPRNLKGHQQPNLSNGVAASYSQLSPRSLVDYEDDEDDEDYKPPPRKQPETSEEDDGIMESLGLKRKLPSKDKEPELVKKQKLSKNSKSKDSVFAALCSTLSQAVLPSKKTSISIPSCARTDGRMSSSEDNQGDVQNISRSSSSNNSNIAAEDNHVEKEGEASRSFSDCLHAKSDSIQLGGEERPLVAPKSSPEMAVNGS

SEQ ID NO: 8862 - protein, 149 aa, Glycine max
  misc_feature (68)..(68): Xaa can be any naturally occurring amino acid
  misc_feature (76)..(76): Xaa can be any naturally occurring amino acid
  misc_feature (91)..(91): Xaa can be any naturally occurring amino acid
  misc_feature (93)..(93): Xaa can be any naturally occurring amino acid
  Coding DNA Sequence Number=SeqID_5406
LVRILVSYASLTESLDHSAVHSRACCGSEEHVTSPFMTRRALCRYMVARGPLFAGQRTSLAYYSRMTXRVRIYQSXLSSSRYVLRVKSVAXLXSSRVDVAVMRQHCAARMISILVWSRTSMCSRFMYLTIDNICLWLRAHDRRYFRGRA

SEQ ID NO: 8863 - protein, 105 aa, Glycine max
  misc_feature (3)..(3): Xaa can be any naturally occurring amino acid
  misc_feature (20)..(20): Xaa can be any naturally occurring amino acid
  misc_feature (25)..(25): Xaa can be any naturally occurring amino acid
  misc_feature (44)..(44): Xaa can be any naturally occurring amino acid
  misc_feature (50)..(50): Xaa can be any naturally occurring amino acid
  misc_feature (90)..(90): Xaa can be any naturally occurring amino acid
  misc_feature (105)..(105): Xaa can be any naturally occurring amino acid
  Coding DNA Sequence Number=SeqID_5408
SMXIYQCTSPRIAATECYAXPSSRXTATRHRRDTQQAQERTYLXCDLYRXPNYVRDPAIHCQALYEHRVDNIVTVLRVRVIGRDTALAFXVEHLHCLVTRGAVPX

SEQ ID NO: 8864 - protein, 95 aa, Glycine max
  Coding DNA Sequence Number=SeqID_5410
  Gene Ontology: Mol. function=damaged DNA binding; Cellular component =nucleus; Biological process=proteasomal ubiquitin-dependent protein catabolic process
  Homolog annotation: Hit_ID=A7P372; Match level="QueryCoverage=98%, HitCoverage=23%, E-value=7e-30, Identity=68%"; Hit description =Chromosome chr1 scaffold_5, whole genome shotgun sequence
KQNPHLMRLIGAHQGDFLRLINNPPKGVEGNILGQMVFGMPQPVTVPLKDRQAIERFEPMGFDRAIVLEVYFACNKNEKLVAPSLLDHRHDFKDQ

SEQ ID NO: 8865 - protein, 125 aa, Glycine max
  misc_feature (48)..(48): Xaa can be any naturally occurring amino acid
  Coding DNA Sequence Number=SeqID_5411
KKFLATNYSEYREPPAETFLKENPSWLGWKPGNPGSIGPGSHNKTPNXNSYSRAGETTVPPPLIGREKKPLTPGGMETFPPPGGTKAPKTLTKNQKFFKGRAPPVGGKSPKPGIHLPKKWDSSEK

SEQ ID NO: 8866 - protein, 150 aa, Glycine max; identical to SEQ ID NO: 6832
  misc_feature (20)..(21): Xaa can be any naturally occurring amino acid
  misc_feature (88)..(88): Xaa can be any naturally occurring amino acid
  misc_feature (91)..(91): Xaa can be any naturally occurring amino acid
  misc_feature (111)..(111): Xaa can be any naturally occurring amino acid
  misc_feature (146)..(146): Xaa can be any naturally occurring amino acid
  Coding DNA Sequence Number=SeqID_1659

SEQ ID NO: 8867 - protein, 60 aa, Glycine max
  Coding DNA Sequence Number=SeqID_1661
  Gene Ontology: Mol. function=oxidoreductase activity; Cellular component=extracellular region; Biological process=response to oxidative stress
  Homolog annotation: Hit_ID=A7PU06; Match level="QueryCoverage=86%, HitCoverage=16%, E-value=1e-14, Identity=73%"; Hit description =Chromosome chr7 scaffold_31, whole genome shotgun sequence
LQIINTILPAWEVLTGRRDGTVSVSGEALANLPAPFYNFTTLKASFASKNLNVHDLVVLS

SEQ ID NO: 8868 - protein, 99 aa, Glycine max
  misc_feature (37)..(37): Xaa can be any naturally occurring amino acid
  Coding DNA Sequence Number=SeqID_1662
MTVSTIRTLPVVVTTTQYSRLYRPTALHYVSVCWVMXNNRVPTADRRANACCVRVHPQARAHAIPSSSLIHLITLSSTYIYTPPTPSPDVALSAPARCP

SEQ ID NO: 8869 - protein, 189 aa, Glycine max; identical to SEQ ID NO: 6522
  misc_feature (72)..(72): Xaa can be any naturally occurring amino acid
  misc_feature (122)..(122): Xaa can be any naturally occurring amino acid
  misc_feature (140)..(140): Xaa can be any naturally occurring amino acid
  misc_feature (187)..(187): Xaa can be any naturally occurring amino acid
  Coding DNA Sequence Number=SeqID_1664

SEQ ID NO: 8870 - protein, 124 aa, Glycine max
  Coding DNA Sequence Number=SeqID_1666
  Homolog annotation: Hit_ID=Q5GAR1; Match level="QueryCoverage=70%, HitCoverage=46%, E-value=2e-13, Identity=49%"; Hit description =Putative uncharacterized protein
MGKNQAYKAMQRARLGSSSGAPGAADAPEDGMEEELKRGELEADPDQMMREYRAQLDAERAQKLANRKKSTQGQTQNHHLPRKESNHKDAKKSKQTEHQAHKFPHSPGSKINLQNLSSSLPMEA

SEQ ID NO: 8871 - protein, 53 aa, Glycine max
  Coding DNA Sequence Number=SeqID_1667
FNPYISMRRFYHVDTFLNATLACIGRDQLSTGFDRGLRITRYQFTRLIISAPM

SEQ ID NO: 8872 - protein, 104 aa, Glycine max
  misc_feature (6)..(6): Xaa can be any naturally occurring amino acid
  Coding DNA Sequence Number=SeqID_157
  Gene Ontology: Mol. function=small conjugating protein ligase activity; Cellular component=proteasome complex; Biological process =ubiquitin-dependent protein catabolic process
  Homolog annotation: Hit_ID=Q9SLE4; Match level="QueryCoverage=97%, HitCoverage=68%, E-value=2e-31, Identity=63%"; Hit description =Ubiquitin carrier protein
  Pfam annotation: Domain name=UQ_con; Domain location=5-104; Score =114.2; E_value=4e-31; Accession=PF00179.16; Description=Ubiquitin -conjugating enzyme
MATRRXLKELRELQRDPPMSCSAGPVGEDMFHWQATIMGPNESPYTGGVFLVTINFSQDYPFKPPKVVFKTKVFHPNINSNGNICLDILKDQWSPCCGVGEFRY

SEQ ID NO: 8873 - protein, 109 aa, Glycine max
  Coding DNA Sequence Number=SeqID_158
AIYFVHYLFLLVLFGLLSGFSFSLLGSLLHFLLLMLSHKHVLLSLLLLIKGGGIRLATGAQATSTHESIRGISFGQQGAQTYDSSTRHCLLLLKLNIKKMVDQTPIILY

SEQ ID NO: 8874 - protein, 112 aa, Glycine max; identical to SEQ ID NO: 7984
  misc_feature (57)..(57): Xaa can be any naturally occurring amino acid
  misc_feature (79)..(79): Xaa can be any naturally occurring amino acid
  Coding DNA Sequence Number=SeqID_5412

SEQ ID NO: 8875 - protein, 100 aa, Glycine max
  misc_feature (56)..(56): Xaa can be any naturally occurring amino acid
  misc_feature (59)..(59): Xaa can be any naturally occurring amino acid
  Coding DNA Sequence Number=SeqID_49
  Gene Ontology: Mol. function=oxidoreductase activity, acting on single donors with incorporation of molecular oxygen, incorporation of two atoms of oxygen; Cellular component=cytoplasm; Biological process=flavonoid biosynthetic process
  Homolog annotation: Hit_ID=A5AZG3; Match level="QueryCoverage=91%, HitCoverage=25%, E-value=3e-24, Identity=56%"; Hit description =Putative uncharacterized protein
LPTSLRSIISEYGEQIVKLGGRILEIMSINLGLREDFLLNAFGGENDLGACLRVNXFPXCPHPDLTLKASFYSDTSGMTMRVPDDNVIGREVAIGDTGHC

SEQ ID NO: 8876 - protein, 127 aa, Glycine max
  misc_feature (37)..(37): Xaa can be any naturally occurring amino acid
  misc_feature (120)..(120): Xaa can be any naturally occurring amino acid
  misc_feature (123)..(124): Xaa can be any naturally occurring amino acid
  Coding DNA Sequence Number=SeqID_50
VSYISDGRDIRAVPTRRILMRSIKTQHNSSTYHHQRXTRQIESSMHPYLHICIMVVGERLGHTTCGERAKETIPTHRKSITLALRVVRIRAGSGGPRHTPRSSPGGRARRPSPYHFGTTXDEXXEKR

SEQ ID NO: 8877 - protein, 121 aa, Glycine max
  misc_feature (13)..(13): Xaa can be any naturally occurring amino acid
  misc_feature (23)..(23): Xaa can be any naturally occurring amino acid
  misc_feature (30)..(30): Xaa can be any naturally occurring amino acid
  misc_feature (39)..(39): Xaa can be any naturally occurring amino acid
  misc_feature (65)..(65): Xaa can be any naturally occurring amino acid
  misc_feature (96)..(96): Xaa can be any naturally occurring amino acid
  misc_feature (99)..(101): Xaa can be any naturally occurring amino acid
  misc_feature (117)..(117): Xaa can be any naturally occurring amino acid
  Coding DNA Sequence Number=SeqID_52
YDRRPRVSMRILXVHILLVNMTXEHIHASXTMPSTVSYXVYKSTSSSGRAYEHCVCGYISCDEIXQGDCSAFSSDSDEVCYSIFDFDRGYSHVQSXSRXXXTLSQVLDILMYVPSTXASGR

SEQ ID NO: 8878 - protein, 118 aa, Glycine max
  misc_feature (1)..(48): Xaa can be any naturally occurring amino acid
  Coding DNA Sequence Number=SeqID_54
XXXXXXXXXXXXXXXXXXXXXXXXXXXXXXXXXXXXXXXXXXXXXXXXSRECPIRAHNMSSRSKLNNGSSREIQMVIPFHSDNRFRRIIYRGARNYPRELSTHSNGHNFSLKGPIHGA

SEQ ID NO: 8879 - protein, 112 aa, Glycine max
  misc_feature (38)..(38): Xaa can be any naturally occurring amino acid
  misc_feature (47)..(47): Xaa can be any naturally occurring amino acid
  misc_feature (60)..(60): Xaa can be any naturally occurring amino acid
  misc_feature (66)..(66): Xaa can be any naturally occurring amino acid
  misc_feature (70)..(71): Xaa can be any naturally occurring amino acid
  misc_feature (90)..(90): Xaa can be any naturally occurring amino acid
  misc_feature (94)..(94): Xaa can be any naturally occurring amino acid
  misc_feature (96)..(96): Xaa can be any naturally occurring amino acid
  misc_feature (99)..(99): Xaa can be any naturally occurring amino acid
  Coding DNA Sequence Number=SeqID_56
KYTGAVTADRRSHMCSDAGVDAIVSSTSRCVNSTYQYXLDHARVPLXRGSATLNSRRICXDRCCIXISYXXLISAYNEAHLGTCASRYPXMLTXTXATXYDALHDTSYARYA

SEQ ID NO: 8880 - protein, 109 aa, Glycine max
  misc_feature (91)..(91): Xaa can be any naturally occurring amino acid
  Coding DNA Sequence Number=SeqID_58
YLIAYQPISIYPVYILYSRLMNSAIISPGLGGYGVRLSHALVCLPEKTQRERCPGIYIREGRAPECALIAATLHENEGPLCTRAVHMIGTXREAAPATSSASAALLKRM

SEQ ID NO: 8881 - protein, 170 aa, Glycine max
  misc_feature (58)..(58): Xaa can be any naturally occurring amino acid
  Coding DNA Sequence Number=SeqID_60
RGWVPSGIETPGLGSVLPACRPTTLTIGSMWPGHYRRAAMYSTVPERRSDGSPGNIGXETDHASAVRHRLPARLCHQHIEPGAPPTRAIRDICGARPPTPHPTRSVVRATRVYATTRSCKTRLHTSQQPALEDCRPAAPLLRALASHRACAARSHRLLTSCTPGKHLSKP

SEQ ID NO: 8882 - protein, 58 aa, Glycine max; identical to SEQ ID NO: 7184
  Coding DNA Sequence Number=SeqID_589
  Gene Ontology: Mol. function=electron carrier activity; Biological process=electron transport
  Homolog annotation: Hit_ID=Q0M2G2; Match level="QueryCoverage=93%, HitCoverage=26%, E-value=7e-22, Identity=87%"; Hit description =Putative uncharacterized protein precursor

SEQ ID NO: 8883 - protein, 124 aa, Glycine max
  misc_feature (31)..(31): Xaa can be any naturally occurring amino acid
  misc_feature (41)..(41): Xaa can be any naturally occurring amino acid
  misc_feature (69)..(69): Xaa can be any naturally occurring amino acid
  misc_feature (76)..(76): Xaa can be any naturally occurring amino acid
  Coding DNA Sequence Number=SeqID_590
GALVYHSMYASTRHIRCVAVATATSIAVSSXHLHFVNIVSXHYTPLTYTSTSSAQHGEAIRCAAISYVXSLFVFLXRHLTFSFSRLSCVLYSRRSPRLGICSCSASRVPFVLHKSPLPHFSVLP

SEQ ID NO: 8884 - protein, 159 aa, Glycine max
  misc_feature (122)..(122): Xaa can be any naturally occurring amino acid
  Coding DNA Sequence Number=SeqID_592
SLAVYLSSKTDLDCPASYHYLADSNGPRFELHPVSAPYNSNLLIDHLRQRQLQIDRKILMQVSTTLPLILFADNLHRWTLTLSFRCPPHSLCLNTPSLLLYLHYLKHNQHIQIANTPKITYXHTTNIVPSLTGVNFYSLTSYAPHIAFNIPSHRYSHFL

SEQ ID NO: 8885 - protein, 97 aa, Glycine max
  Coding DNA Sequence Number=SeqID_594
  Gene Ontology: Mol. function=protein binding; Cellular component =nucleus; Biological process=transcription from RNA polymerase II promoter
  Homolog annotation: Hit_ID=Q8LFH4; Match level="QueryCoverage=100%, HitCoverage=58%, E-value=4e-30, Identity=68%"; Hit description =Putative transcription factor BTF3
  Pfam annotation: Domain name=NAC; Domain location=33-91; Score=86.9; E_value=6.5e-23; Accession=PF01849.8; Description=NAC domain
NREKLMKMAGSVTTGGKGTVRRKKKAVHKTTTTDDKRLQSTLKRIGANAIPAIEEVNIFKDDAVIQFLNPQVQASGAANTWAARGSPPTKKMQETLP

SEQ ID NO: 8886 - protein, 68 aa, Glycine max
  Coding DNA Sequence Number=SeqID_595
  Homolog annotation: Hit_ID=Q84TH1; Match level="QueryCoverage=100%, HitCoverage=76%, E-value=6e-24, Identity=80%"; Hit description =Putative uncharacterized protein At4g23760
  Pfam annotation: Domain name=CHCH; Domain location=3-44; Score=17.8; E_value=0.024; Accession=PF06747.3; Description=CHCH domain
MEKQKHQPVCGQEALLLLNCVTESPFDQEKCLRFLQSLRECVLSKKVNKFVIPSQEHASEGAANKPPS

SEQ ID NO: 8887 - protein, 78 aa, Glycine max; identical to SEQ ID NO: 7186
  misc_feature (31)..(31): Xaa can be any naturally occurring amino acid
  Coding DNA Sequence Number=SeqID_596

SEQ ID NO: 8888 - protein, 151 aa, Glycine max
  misc_feature (146)..(146): Xaa can be any naturally occurring amino acid
  Coding DNA Sequence Number=SeqID_598
SLPLITMWKLWTLLAAIAVASGQYAPPVATYAPPPPPAVEYGPPPPPPVVYGPPPPPPPVEYGPPPPPPPPPPPPPPPPVVYGPPPPPPVVYGPPPPPPPVVYGPPPPPSGGLWPPSTTPSGIWSSTTSSICTPTTNNNLNCRVRXTTSCL

SEQ ID NO: 8889 - protein, 212 aa, Glycine max
  Coding DNA Sequence Number=SeqID_600
  Gene Ontology: Mol. function=pyridoxal phosphate binding; Cellular component=membrane; Biological process=two-component signal transduction system (phosphorelay)
  Homolog annotation: Hit_ID=A7AB18; Match level="QueryCoverage=100%, HitCoverage=58%, E-value=1e-66, Identity=58%"; Hit description =Putative uncharacterized protein
  Pfam annotation: Domain name=DegT_DnrJ_EryC1; Domain location=12-213; Score=73.8; E_value=5.7e-19; Accession=PF01041.8; Description =DegTDnrJEryC1StrS aminotransferase family
MIPYDNLGKVNAGFKVLFQQQFASFLDRGWYILGDEVNAFEQVFAAHNDTNFCIGVANGLDALVLSLQVLNLPKGSEIIVPANTYIASIISIIHAGHIPVLVEPDIQTYNIDPYKIEEAITSKTKAIMVVHLYGKCCEMDRIGEIASKYGLPIIEDCAQAHDATYRGRKAGTFGVLGAFSFYPSKNLGALGDAGAIITNDAQYMGLLKQLRN

SEQ ID NO: 8890 - protein, 170 aa, Glycine max
  misc_feature (47)..(47): Xaa can be any naturally occurring amino acid
  misc_feature (49)..(49): Xaa can be any naturally occurring amino acid
  misc_feature (105)..(105): Xaa can be any naturally occurring amino acid
  misc_feature (129)..(129): Xaa can be any naturally occurring amino acid
  misc_feature (148)..(148): Xaa can be any naturally occurring amino acid
  misc_feature (163)..(163): Xaa can be any naturally occurring amino acid
  Coding DNA Sequence Number=SeqID_5413
EIMLEKRSMSGDREETHESTTDTYNIAWLEQNVWPITIDRCCTRVLXVXAQSLCCCGVLRRLVLSLSSPSTLPQTVPLLHSFISIQRSETRCSLTMSTMISRVYXHGRNATRLLCVTARCVSNVCERVXELPLRSNQLRADRSAVITXLRVTSPATYSHSPPXRVISGVA

SEQ ID NO: 8891 - protein, 150 aa, Glycine max
  misc_feature (149)..(149): Xaa can be any naturally occurring amino acid
  Coding DNA Sequence Number=SeqID_5415
SFIHHSLTQLRTQSSEEDEKKSDRSCHGLQGVQEPTFVSAPGGGARRRGGRGGGGAGDEPAVPAQARARRGAAGEGRRAPPHPPPEARQPPPGHAALPPRPAATAAHRAGAGGRVHVSVAAGPPRTFWISSLSVAHALPRVPLLPRARXF

SEQ ID NO: 8892 - protein, 109 aa, Glycine max
  misc_feature (71)..(71): Xaa can be any naturally occurring amino acid
  Coding DNA Sequence Number=SeqID_5417
  Homolog annotation: Hit_ID=A7Q178; Match level="QueryCoverage=93%, HitCoverage=10%, E-value=4e-23, Identity=55%"; Hit description =Chromosome chr10 scaffold_43, whole genome shotgun sequence
  Subcellular localization annotation: CTP_CleavageSite=62; ConfidenceScore=5.26e-01
MREEVMSYGGTVDATPAASSAGASSPAVPMNVGSIDGSSHGQVSKAASLSCVGSQPPWTSLSTSAGGSAFXSSRSSCRPWERGDLLRRLATFIPSNWLGKPQRTDHESP

SEQ ID NO: 8893 - protein, 205 aa, Glycine max
  misc_feature (64)..(64): Xaa can be any naturally occurring amino acid
  Coding DNA Sequence Number=SeqID_5418
  Subcellular localization annotation: CTP_CleavageSite=29; ConfidenceScore=5.45e-01
LTLLPSPLPVSTSTYLFLYKLSQLQFYTPSSPPNPHILLSFLFLLTRIFFLFLSIFHSYILFLXLPFLSSFFYFSFPILLLSFFGFLTPIFRFYRLILTPSSHLLVLLFDPYIICLLSYIDFCDPQLLCRFSLQFLPAPILSSYYVTPSSFFFISPIIYSSYCITSLCHPTSTTPLTATSVFIFSFLLSLLFCHSFSIFIIGSHP

SEQ ID NO: 8894 - protein, 173 aa, Glycine max
  Coding DNA Sequence Number=SeqID_5420
  Gene Ontology: Mol. function=protein binding; Cellular component =cytosol; Biological process=snoRNA metabolic process
  Homolog annotation: Hit_ID=Q05B18; Match level="QueryCoverage=100%, HitCoverage=28%, E-value=4e-89, Identity=94%"; Hit description =Protein SHQ1 homolog
  Pfam annotation: Domain name=CS; Domain location=1-65; Score=0.4; E _value=0.019; Accession=PF04969.6; Description=CS domain
FLTITIKVPYARASEIDIYIEGDDFKFYAKPYFLRLALPGRIVEDGRQKATYNADDGIITVCVPKETPGQHFEGLELLTSLLAPRGSKSAKPLIEEIGSSQDVLEEEDEFDWQIEQTPFVEPTEEALQSQCTYGFGNLRSGVFGRLQEELNDVIDLRDPDVTPASERTRRRLA

SEQ ID NO: 8895 - protein, 113 aa, Glycine max
  Coding DNA Sequence Number=SeqID_5421
QHCVESDHGCVIIQSKSILVPPPRPSADAGGVPSQGPVKYPKLARAPDRDLSRSILHLGGFCYIPTPPPAPGPPLKIIGFRCVSQFLFRALSLREDVFRKPLLPIVFHPPYFP

SEQ ID NO: 8896 - protein, 64 aa, Glycine max
  misc_feature (46)..(47): Xaa can be any naturally occurring amino acid
  misc_feature (53)..(53): Xaa can be any naturally occurring amino acid
  Coding DNA Sequence Number=SeqID_5423
  Gene Ontology: Mol. function=transferase activity, transferring nitrogenous groups; Biological process=biosynthetic process
  Homolog annotation: Hit_ID=Q45RS3; Match level="QueryCoverage=96%, HitCoverage=12%, E-value=3e-24, Identity=88%"; Hit description=AlaT1
MALEYDLLNENVKKCQYAVRGELYLRASELQKEGKKIIFTNVGNPXXLGQKPXTFPRQVVALCQ

SEQ ID NO: 8897 - protein, 113 aa, Glycine max
  Coding DNA Sequence Number=SeqID_5424
VACGLAQTQYEGGRRRQGYYLVGLWSPISPLRTGYMPLLWLFCRPSHCLFHLSLLDCIVIARPPHSSALPLPNSPLNGLRTNLRFEPNIARHTISSRQSSAVCVGFGLVGKVG

SEQ ID NO: 8898 - protein, 118 aa, Glycine max
  Coding DNA Sequence Number=SeqID_601
PSSSRSSAVDVRVLLEYDTCFTHLQRAPGPVPRLYATHSGSALEPQPPHHLTHYDRPPLLPLAHTSLHASNITLTSAMAAIYSLPPPAADLLLSFGIYTQQSRYIQQTHHTITLSPYT

SEQ ID NO: 8899 - protein, 94 aa, Glycine max
  Coding DNA Sequence Number=SeqID_603
GPRAALPEVEAALLADTSAHPAVRRGKHYRIPRQVIFDLARLHLYISANNVLPFGNTPDIPIIAQTGDKSNLVAKDLVKDLSPVAMMKSCYVQQ

SEQ ID NO: 8900 - protein, 175 aa, Glycine max
  misc_feature (68)..(68): Xaa can be any naturally occurring amino acid
  misc_feature (81)..(81): Xaa can be any naturally occurring amino acid
  misc_feature (134)..(134): Xaa can be any naturally occurring amino acid
  Coding DNA Sequence Number=SeqID_605
  Gene Ontology: Mol. function=phosphotransferase activity, alcohol group as acceptor; Cellular component=cytoplasm; Biological process =metabolic process
  Homolog annotation: Hit_ID=UPI0000162BDC; Match level="QueryCoverage =82%, HitCoverage=13%, E-value=1e-30, Identity=56%"; Hit description =GHMP kinase-related
QEFQNNHHDNCTHLPFHPRRVKVELPVRVDFVGGWSDTPPWSIERAGCVLNMAISLEGSPPIGTIIEXTKAEGILFTDDAXTQLFVGDYKSIWRTIWNGDDPIFGWAKSAFTLGLEIIHGNILGKLGMAHQTWXANVPPGEGNWGTSKILNRRPGVKGASPKKIGGEKPPPKNGP

SEQ ID NO: 8901 - protein, 152 aa, Glycine max
  misc_feature (1)..(1): Xaa can be any naturally occurring amino acid
  misc_feature (18)..(18): Xaa can be any naturally occurring amino acid
  Coding DNA Sequence Number=SeqID_606
XLSIIYISVFSLYCITQXLCVYILSLSSITAQTILYLFSLISKEYVFYVYMPHTHLFTLSIHTPYTSVVCVRYLLIPVQLMNVLVDPLSTNDTCVGAREWDPSSSRAARDIIYNPLKRTSQSRARLVIQSLPALLIEAPRRAPLPNIRSGGT

SEQ ID NO: 8902 - protein, 110 aa, Glycine max
  Coding DNA Sequence Number=SeqID_608
YAAYHVSVRKAPLTLHVPYCPWRAASPAHRSNPRPPYRRHCTAWLEKARCACAHIRLEGARSLFPPVPISPGDAHAGADWRSSTEHHESSVVPPARSASILCVGVSAAES

SEQ ID NO: 8903 - protein, 186 aa, Glycine max; identical to SEQ ID NO: 7198
  Coding DNA Sequence Number=SeqID_610

SEQ ID NO: 8904 - protein, 138 aa, Glycine max
  Coding DNA Sequence Number=SeqID_612
  Gene Ontology: Mol. function=chitinase activity; Cellular component =cellular_component; Biological process=defense response to bacterium
  Homolog annotation: Hit_ID=Q6PWL8; Match level="QueryCoverage=82%, HitCoverage=68%, E-value=8e-66, Identity=98%"; Hit description =Putative vacuolar defense protein precursor
  Pfam annotation: Domain name=Barwin; Domain location=23-138; Score =260.6; E_value=3.4e-75; Accession=PF00967.8; Description=Barwin family
MAARLALVATLLCAGAAAAAAQQASNVRATYHYYRPAENGWDLGAPAVSAYCSTWDAGKPYSWRSKYGWTAFCGPAGPRGQASCGRCIRVTNTGTGAQITARIVDQCANGGLDLDWDTVFVKIDTDGMGYQRGHLIVN

SEQ ID NO: 8905 - protein, 163 aa, Glycine max
  Coding DNA Sequence Number=SeqID_613
  Homolog annotation: Hit_ID=A9PEX1; Match level="QueryCoverage=82%, HitCoverage=50%, E-value=2e-32, Identity=54%"; Hit description =Putative uncharacterized protein
  Pfam annotation: Domain name=DUF212; Domain location=48-163; Score =8.8; E_value=1.3e-06; Accession=PF02681.5; Description=Divergent PAP2 family
  Subcellular localization annotation: CTP_CleavageSite=37; ConfidenceScore=5.45e-01
MLKQSFVSHNTNALCFSISNPKFNPLSPPKKPNRLASCALNVGLQDVTEVIHNKVLIAAGFSGAIGQLLKPFTSVVFYKKKLDFRTALQAGGFPSTHSSSVVAAATAIAFERGFDDSIFGLTVVYAALIMYDAQGVRREVGKHARVLNKLTANARKGESLESD

SEQ ID NO: 8906 - protein, 74 aa, Glycine max
  misc_feature (21)..(21): Xaa can be any naturally occurring amino acid
  Coding DNA Sequence Number=SeqID_614
  Homolog annotation: Hit_ID=A7QRU5; Match level="QueryCoverage=68%, HitCoverage=11%, E-value=1e-16, Identity=84%"; Hit description =Chromosome chr13 scaffold_152, whole genome shotgun sequence
ASKDGDFLMNVGKLKEALPNXEKVMDELTFQSELHGLAALQWSICQDSLSRYCQKLHGISKVLKETTRLCSTQN

SEQ ID NO: 8907 - protein, 95 aa, Glycine max
  Coding DNA Sequence Number=SeqID_615
IAKYRGVQEVYREVRTSKYVQSIAEISFSPVVTLLRHLTLEAQICCYIYLFWCIRVRVFHQFVCTFSGTRKIKNMASSHRCLSSEAVTKSPERNL

SEQ ID NO: 8908 - protein, 245 aa, Glycine max
  Coding DNA Sequence Number=SeqID_617
  Gene Ontology: Mol. function=translation initiation factor activity; Cellular component=cytoplasm; Biological process=mature ribosome assembly
  Homolog annotation: Hit_ID=Q9M060; Match level="QueryCoverage=100%, HitCoverage=100%, E-value=1e-128, Identity=92%"; Hit description =Eukaryotic translation initiation factor 6 (EIF-6)-like protein
  Pfam annotation: Domain name=eIF-6; Domain location=3-204; Score =429.0; E_value=6.9e-126; Accession=PF01912.9; Description=eIF-6 family
MATRLQFENNCEVGVFSKLTNAYCLVAIGGSESFYSVFEAELAGVIPVVKTSIGGTRIIGRLCAGNKNGLLLPHTTTDQELQHLRNSLPDQVVVQRIDERLSALGNCIACNDHVALTHTDLDRETEEMIADVLGVEVFRQTIAGNILVGSYCAFSNRGGLVHPHTSIEDLDELSTLLQVPLVAGTVNRGSEVIAAGMTVNDWTAFCGSDTTATELSVIESVFKLREAQPSAIVDEMRKSLIDTYV

SEQ ID NO: 8909 - protein, 212 aa, Glycine max
  misc_feature (53)..(53): Xaa can be any naturally occurring amino acid
  misc_feature (77)..(77): Xaa can be any naturally occurring amino acid
  Coding DNA Sequence Number=SeqID_618
  Gene Ontology: Mol. function=methyltransferase activity; Cellular component=cytoplasm; Biological process=metabolic process
  Homolog annotation: Hit_ID=Q9AXH3; Match level="QueryCoverage=96%, HitCoverage=41%, E-value=3e-65, Identity=63%"; Hit description =Phosphoethanolamine N-methyltransferase
MNDAFRKSYCIEHTTDLSVESMMLDSNASDLNKEERPEVLSLLPPYEGKSVVXLGAGIGRFTDELAKKADQLLAEDXIESAIQKNESITGHHKNVKIMCADATSPNLYISEGSVDLIFSDRLLMYLSDEEVENLPARMIMWSIAGAYGFFTETCLHQSEDSTREYNPLAIGKTTVYCKVVRERHMSVVTTYSFELSLAGCRSIVAYARDSTI

SEQ ID NO: 8910 - protein, 90 aa, Glycine max
  misc_feature (34)..(34): Xaa can be any naturally occurring amino acid
  misc_feature (52)..(52): Xaa can be any naturally occurring amino acid
  misc_feature (55)..(55): Xaa can be any naturally occurring amino acid
  misc_feature (86)..(86): Xaa can be any naturally occurring amino acid
  Coding DNA Sequence Number=SeqID_619
QRCRIRKYYTDTERTICCPVVDDTYTRSLATHHXLHGDRRARQILCYSCYRXSLXKYCQYVYTSIYYDMLVHESGDARSVRMLCKXVSYL

SEQ ID NO: 8911 - protein, 163 aa, Glycine max; identical to SEQ ID NO: 6049
  misc_feature (8)..(8): Xaa can be any naturally occurring amino acid
  misc_feature (66)..(66): Xaa can be any naturally occurring amino acid
  Coding DNA Sequence Number=SeqID_621

SEQ ID NO: 8912 - protein, 109 aa, Glycine max
  Coding DNA Sequence Number=SeqID_623
IIFKFNSNSRFNSKTKQTLNENEILVGSRFPGHGHRLAGPVLGPGPDCADRRRRDRSGRPQQDRLPGLPKPCAQPLYCQWHSQHLAMESPLEKTIEEWTERRLRMETTE

SEQ ID NO: 8913 - protein, 118 aa, Glycine max
  misc_feature (37)..(37): Xaa can be any naturally occurring amino acid
  Coding DNA Sequence Number=SeqID_625
YRLLISEGADRDGFCLCIYVREPDYHASRETESTTHXAWLSRSRSGAWQISSELCAWTSPSPLYSHTPYVIHGRSTPRVYQDEWMATSVVAASSVARDRAVMLCSGSSQNVMWIVILF

SEQ ID NO: 8914 - protein, 82 aa, Glycine max
  misc_feature (79)..(80): Xaa can be any naturally occurring amino acid
  Coding DNA Sequence Number=SeqID_627
LLSCYIFSTLGVELRAPPSATYSCVSITNDLSFSLRSYLSLLNWILLPADSPSTRREDSSSSVEDPPLSRWGCLLSLCXXKG

SEQ ID NO: 8915 - protein, 139 aa, Glycine max
  misc_feature (3)..(4): Xaa can be any naturally occurring amino acid
  misc_feature (6)..(6): Xaa can be any naturally occurring amino acid
  misc_feature (13)..(13): Xaa can be any naturally occurring amino acid
  misc_feature (18)..(18): Xaa can be any naturally occurring amino acid
  misc_feature (62)..(62): Xaa can be any naturally occurring amino acid
  misc_feature (83)..(83): Xaa can be any naturally occurring amino acid
  misc_feature (97)..(97): Xaa can be any naturally occurring amino acid
  misc_feature (124)..(124): Xaa can be any naturally occurring amino acid
  misc_feature (126)..(126): Xaa can be any naturally occurring amino acid
  misc_feature (129)..(129): Xaa can be any naturally occurring amino acid
  misc_feature (131)..(133): Xaa can be any naturally occurring amino acid
  misc_feature (136)..(136): Xaa can be any naturally occurring amino acid
  misc_feature (139)..(139): Xaa can be any naturally occurring amino acid
  Coding DNA Sequence Number=SeqID_629
LVXXCXRGVILGXAVRWXEPQWCLILVCLYLSMSVSLVCIYVFLILIYAIIYKIMSIYLISXLIYYHILSTFLSVCGSSRLAXYLTLILALSRYILXVLSAVVFLRRALSLHSPARMLKRREYXHXRRXIXXXDTXQIX

SEQ ID NO: 8916 - protein, 126 aa, Glycine max
  misc_feature (4)..(4): Xaa can be any naturally occurring amino acid
  misc_feature (23)..(23): Xaa can be any naturally occurring amino acid
  misc_feature (31)..(31): Xaa can be any naturally occurring amino acid
  misc_feature (55)..(55): Xaa can be any naturally occurring amino acid
  misc_feature (57)..(57): Xaa can be any naturally occurring amino acid
  misc_feature (117)..(117): Xaa can be any naturally occurring amino acid
  misc_feature (122)..(122): Xaa can be any naturally occurring amino acid
  Coding DNA Sequence Number=SeqID_631
YTRXYLVSLHRAAQGDHVVSVEXMRCLVRYXYSGVTLLLSMISHAVTPTSLCLLXHXHRRVSCESSHIEQLMHASYADCAQTTVSHHLSRIAHRRSRLHDTSMRRSYSDTSALVSYXEDVAXAACC

SEQ ID NO: 8917 - protein, 184 aa, Glycine max; identical to SEQ ID NO: 6055
  misc_feature (43)..(43): Xaa can be any naturally occurring amino acid
  misc_feature (145)..(145): Xaa can be any naturally occurring amino acid
  misc_feature (169)..(169): Xaa can be any naturally occurring amino acid
  misc_feature (176)..(177): Xaa can be any naturally occurring amino acid
  Coding DNA Sequence Number=SeqID_633
  Subcellular localization annotation: CTP_CleavageSite=73; ConfidenceScore=5.13e-01

SEQ ID NO: 8918 - protein, 204 aa, Glycine max
  Coding DNA Sequence Number=SeqID_635
RLPTEPQTKQTPQDQRQLKLLLPTTLQQSPLHSLKLSPHGNLNLKLHKNAPQATTLMQNRTYIERIWTQSYNKTHTATNYPRLRTFETPKRSRKAGNTRKPATDIPELRLTRSDGRSTTPHQSRYNLHRTPEKATDRDKAAQATYRMKSKKNPKSKTPLTLKSFISVRLNQKTRQKTSSRHRRSSPETGGDENKDRSFCLLWRL

SEQ ID NO: 8919 - protein, 113 aa, Glycine max
  Coding DNA Sequence Number=SeqID_637
  Gene Ontology: Mol. function=glycerone kinase activity; Cellular component=cytoplasm; Biological process=glycerol metabolic process
  Homolog annotation: Hit_ID=Q9LSH1; Match level="QueryCoverage=80%, HitCoverage=14%, E-value=7e-43, Identity=92%"; Hit description =Dihydroxyacetone/glycerone kinase-like protein
  Pfam annotation: Domain name=Dak1; Domain location=27-113; Score= -191.1; E_value=0.0068; Accession=PF02733.7; Description=Dak1 domain
MISCSSSCFSSKITIQCENVVTEFIEGLVETYPGLQYLDGFPQVKVVLRADVSAATYDKVAIISGGGSGHEPAHAGFVGEGMLTAAICGDIFSSPPVDSILAGIRAVTGLRDV

SEQ ID NO: 8920 - protein, 113 aa, Glycine max; identical to SEQ ID NO: 7216
  misc_feature (29)..(29): Xaa can be any naturally occurring amino acid
  misc_feature (57)..(58): Xaa can be any naturally occurring amino acid
  misc_feature (68)..(68): Xaa can be any naturally occurring amino acid
  misc_feature (84)..(84): Xaa can be any naturally occurring amino acid
  misc_feature (93)..(93): Xaa can be any naturally occurring amino acid
  misc_feature (97)..(97): Xaa can be any naturally occurring amino acid
  Coding DNA Sequence Number=SeqID_638

SEQ ID NO: 8921 - protein, 266 aa, Glycine max
  misc_feature (142)..(266): Xaa can be any naturally occurring amino acid
  Coding DNA Sequence Number=SeqID_640
RFRPHPTLTLPGNHHWRKAAITRRASQRKGGPSQKPTPGRPQKGIVNPHLWRGGPPFGGIGEQKPPPKRTPHFSTPPHSSGLLRQPPPIGGSIYFKRPPPPGEGPFLIYQYKGPKTGAQRKKKNTSLGGEKFCPPPPPTLRXXXXXXXXXXXXXXXXXXXXXXXXXXXXXXXXXXXXXXXXXXXXXXXXXXXXXXXXXXXXXXXXXXXXXXXXXXXXXXXXXXXXXXXXXXXXXXXXXXXXXXXXXXXXXXXXXXXXXXXXXXXXX

SEQ ID NO: 8922 - protein, 168 aa, Glycine max; identical to SEQ ID NO: 6058
  misc_feature (29)..(29): Xaa can be any naturally occurring amino acid
  misc_feature (62)..(62): Xaa can be any naturally occurring amino acid
  misc_feature (79)..(79): Xaa can be any naturally occurring amino acid
  misc_feature (105)..(105): Xaa can be any naturally occurring amino acid
  misc_feature (140)..(140): Xaa can be any naturally occurring amino acid
  Coding DNA Sequence Number=SeqID_642

SEQ ID NO: 8923 - protein, 117 aa, Glycine max
  misc_feature (82)..(82): Xaa can be any naturally occurring amino acid
  Coding DNA Sequence Number=SeqID_644
  Gene Ontology: Mol. function=electron carrier activity; Biological process=electron transport
  Homolog annotation: Hit_ID=Q9ZRV5; Match level="QueryCoverage=97%, HitCoverage=94%, E-value=1e-31, Identity=58%"; Hit description=Basic blue copper protein
  Pfam annotation: Domain name=Cu_bind_like; Domain location=33-111; Score=43.7; E_value=6.4e-10; Accession=PF02298.8; Description =Plastocyanin-like domain
HEGSAVVLLLCFLLLHSQMAHAATYTVGDSGGWTFNTVAWPKRKLFQTDNTLTFNYSPRTHNIITVNKAKYNSYKTPRRAKXYKSETNQIRLTKGQNYFIYNYINHYESEIKITINT

SEQ ID NO: 8924 - protein, 212 aa, Glycine max
  misc_feature (31)..(31): Xaa can be any naturally occurring amino acid
  misc_feature (61)..(61): Xaa can be any naturally occurring amino acid
  misc_feature (80)..(80): Xaa can be any naturally occurring amino acid
  misc_feature (101)..(101): Xaa can be any naturally occurring amino acid
  misc_feature (134)..(134): Xaa can be any naturally occurring amino acid
  misc_feature (146)..(146): Xaa can be any naturally occurring amino acid
  misc_feature (161)..(161): Xaa can be any naturally occurring amino acid
  misc_feature (187)..(187): Xaa can be any naturally occurring amino acid
  misc_feature (203)..(203): Xaa can be any naturally occurring amino acid
  Coding DNA Sequence Number=SeqID_645
  Gene Ontology: Mol. function=nucleoside-triphosphatase activity; Cellular component=integral to membrane; Biological process=response to salicylic acid stimulus
  Homolog annotation: Hit_ID=A7P7L7; Match level="QueryCoverage=93%, HitCoverage=13%, E-value=8e-42, Identity=47%"; Hit description =Chromosome chr9 scaffold_7, whole genome shotgun sequence
VDLLNALWSMYSAVLFLGFKMRYSVQPALAXERTVFYREEADGMYTALPYALAQVMAEIPXYIFPQAETYGSIAYAMIGXTWTASEILLGIYCSAPSNCLXFTIYGMMAEGVTPNHHVAAIEAAAFYAVWNLFXDLSAEELECTCXRTWYYWACPWAGTLXGSIAAHCGDITERMPLDDSLMVKELXRHLGLKHDSIEICAGXGAGIAVAFA

SEQ ID NO: 8925 - protein, 113 aa, Glycine max
  misc_feature (50)..(50): Xaa can be any naturally occurring amino acid
  Coding DNA Sequence Number=SeqID_646
  Gene Ontology: Mol. function=zinc ion binding; Cellular component =nucleus
  Homolog annotation: Hit_ID=Q94FY6; Match level="QueryCoverage=99%, HitCoverage=46%, E-value=9e-28, Identity=58%"; Hit description =Diphosphonucleotide phosphatase 2
  Pfam annotation: Domain name=PNK3P; Domain location=2-113; Score= -22.7; E_value=1.7e-07; Accession=PF08645.1; Description =Polynucleotide kinase 3 phosphatase
MSLEGGHNQRLATQASTIGRLNNPIEKVKGPAQVYIAGGVGTFILLSRQXEDDPFRKPTPGMLHIMEQHFNSGIAIDMDQSFYAGDAAGRESYHNDAVIKSAKAIGLKSHVPE

SEQ ID NO: 8926 - protein, 122 aa, Glycine max; identical to SEQ ID NO: 7223
  misc_feature (8)..(8): Xaa can be any naturally occurring amino acid
  misc_feature (11)..(12): Xaa can be any naturally occurring amino acid
  misc_feature (14)..(14): Xaa can be any naturally occurring amino acid
  misc_feature (19)..(19): Xaa can be any naturally occurring amino acid
  misc_feature (29)..(29): Xaa can be any naturally occurring amino acid
  misc_feature (32)..(32): Xaa can be any naturally occurring amino acid
  misc_feature (65)..(65): Xaa can be any naturally occurring amino acid
  misc_feature (73)..(73): Xaa can be any naturally occurring amino acid
  Coding DNA Sequence Number=SeqID_647

SEQ ID NO: 8927 - protein, 139 aa, Glycine max
  misc_feature (120)..(121): Xaa can be any naturally occurring amino acid
  misc_feature (128)..(128): Xaa can be any naturally occurring amino acid
  Coding DNA Sequence Number=SeqID_649
  Gene Ontology: Mol. function=structural constituent of ribosome; Cellular component=ribonucleoprotein complex; Biological process =translation
  Homolog annotation: Hit_ID=P16181; Match level="QueryCoverage=98%, HitCoverage=85%, E-value=1e-60, Identity=81%"; Hit description=40S ribosomal protein S11-1
  Pfam annotation: Domain name=Ribosomal_S17; Domain location=74-137; Score=107.5; E_value=4.1e-29; Accession=PF00366.10; Description =Ribosomal protein S17
MAEQTEKAFLKQPKVFLSSKKSGKGKRPGKGGNRFWKNIGLSFKTPRDAIDGTYIDRKCPFTGTVSIRGRILAGTCHSAKMQRTIIVRRNYLHFVKKYQRYEKRHSNIPAHVSPCFRVKXXDHVIIGXCRPLSKTVRSC

SEQ ID NO: 8928 - protein, 68 aa, Glycine max
  misc_feature (45)..(45): Xaa can be any naturally occurring amino acid
  misc_feature (53)..(53): Xaa can be any naturally occurring amino acid
  Coding DNA Sequence Number=SeqID_650
  Gene Ontology: Mol. function=structural molecule activity; Cellular component=cytoskeleton; Biological process=multicellular organismal development
  Homolog annotation: Hit_ID=A5CLG6; Match level="QueryCoverage=89%, HitCoverage=14%, E-value=2e-14, Identity=63%"; Hit description=Actin- related protein 3
HACRLYFNPIEYGSDSTTPLPVVIDKVYESDPMDSRRSLYMNAAXCGGSTMFXDTHRRLQRDLIKRHD

SEQ ID NO: 8929 - protein, 99 aa, Glycine max
  misc_feature (77)..(77): Xaa can be any naturally occurring amino acid
  Coding DNA Sequence Number=SeqID_651
  Gene Ontology: Mol. function=structural constituent of ribosome; Cellular component=intracellular; Biological process=translation
  Homolog annotation: Hit_ID=Q10RZ3; Match level="QueryCoverage=100%, HitCoverage=60%, E-value=6e-31, Identity=65%"; Hit description=60S ribosomal protein L21, putative, expressed
  Pfam annotation: Domain name=Ribosomal_L21e; Domain location=1-99; Score=112.6; E_value=1.2e-30; Accession=PF01157.8; Description =Ribosomal protein L21e
PAGHGLRSRTRNSFSCPFAKNGTLSLTSCLKTYHVGDSVDFKGDGAGHKGMPRKFYHGLTGRVWNATKLADGVYLNXHVGNTILRNRIPVRVEHVMPSR

SEQ ID NO: 8930 - protein, 153 aa, Glycine max
  Coding DNA Sequence Number=SeqID_652
EQKPKDGDEDAGKAVVGVTACGGGPELGVGRHGLHANIARRTLWQLWREGWRGLESGVLEQQQRRSWIGSTRIPLLRLLGSTGWTRSHPSTQVDGRTPAVFTGWNRPLLSVARFRSGVDAVSLPLASIGIGLGFKSGWRVDAISLPTASIGIG

SEQ ID NO: 8931 - protein, 71 aa, Glycine max
  misc_feature (22)..(22): Xaa can be any naturally occurring amino acid
  misc_feature (33)..(33): Xaa can be any naturally occurring amino acid
  Coding DNA Sequence Number=SeqID_654
  Gene Ontology: Mol. function=translation elongation factor activity; Cellular component=cytoplasm; Biological process=translational elongation
  Homolog annotation: Hit_ID=Q6L8Q1; Match level="QueryCoverage=85%, HitCoverage=13%, E-value=8e-23, Identity=86%"; Hit description =Elongation factor 1-alpha
  Pfam annotation: Domain name=GTP_EFTU_D3; Domain location=1-71; Score= 46.2; E_value=1.2e-10; Accession=PF03143.7; Description=Elongation factor Tu C-terminal domain
RVSYVGPPHRRTGASVEANPNXVNNGDAAIVKXVPSKPMCVETFTEYPPLGRFAVRDMRQTVAVGVIKSVS

SEQ ID NO: 8932 - protein, 187 aa, Glycine max; identical to SEQ ID NO: 6065
  misc_feature (13)..(13): Xaa can be any naturally occurring amino acid
  misc_feature (16)..(16): Xaa can be any naturally occurring amino acid
  misc_feature (32)..(32): Xaa can be any naturally occurring amino acid
  misc_feature (54)..(54): Xaa can be any naturally occurring amino acid
  misc_feature (105)..(105): Xaa can be any naturally occurring amino acid
  misc_feature (116)..(116): Xaa can be any naturally occurring amino acid
  misc_feature (123)..(123): Xaa can be any naturally occurring amino acid
  misc_feature (128)..(128): Xaa can be any naturally occurring amino acid
  misc_feature (149)..(149): Xaa can be any naturally occurring amino acid
  Coding DNA Sequence Number=SeqID_655
  Subcellular localization annotation: CTP_CleavageSite=70; ConfidenceScore=5.23e-01

SEQ ID NO: 8933 - protein, 195 aa, Glycine max
  Coding DNA Sequence Number=SeqID_657
  Gene Ontology: Mol. function=binding; Cellular component=integral to membrane; Biological process=transport
  Homolog annotation: Hit_ID=O80412; Match level="QueryCoverage=76%, HitCoverage=39%, E-value=1e-58, Identity=77%"; Hit description =Mitochondrial phosphate transporter
  Pfam annotation: Domain name=Mito_carr; Domain location=119-196; Score=-2.5; E_value=0.0052; Accession=PF00153.17; Description =Mitochondrial carrier protein
MEREILTLTLLYRSLSFDASDPCFVCVFLLAFFLSLRDAMALPDSSFRRNSLIPYFIYSSSCKTLPVHHMLNTGSADDDAAPYPTTANLDAGSRGLMTPSPSESRKIELYCPAFYAGCTDGGILHCGLTVMTDAPPDLVKWNMHIDPAKYKSISAGPGGLLKEQGFKGYFRGWVPTLLGYNAQGASLFASILRTL

SEQ ID NO: 8934 - protein, 120 aa, Glycine max; identical to SEQ ID NO: 7230
  misc_feature (13)..(13): Xaa can be any naturally occurring amino acid
  Coding DNA Sequence Number=SeqID_658

SEQ ID NO: 8935 - protein, 164 aa, Glycine max
  Coding DNA Sequence Number=SeqID_660
  Gene Ontology: Mol. function=structural constituent of ribosome; Cellular component=ribonucleoprotein complex; Biological process =translation
  Homolog annotation: Hit_ID=A8MRH4; Match level="QueryCoverage=100%, HitCoverage=89%, E-value=7e-71, Identity=85%"; Hit description =Uncharacterized protein At2g01250.2
  Pfam annotation: Domain name=Ribosomal_L30; Domain location=83-134; Score=82.4; E_value=1.5e-21; Accession=PF00327.10; Description =Ribosomal protein L30pL7e
  Pfam annotation: Domain name=Ribosomal_L30_N; Domain location=11-81; Score=112.6; E_value=1.2e-30; Accession=PF08079.2; Description =Ribosomal L30 N-terminal domain
  Pfam module annotation: Pfam domain module=Ribosomal_L30::Ribosomal _L30_N; Domain location=83-134::11-81
MAESKVVVPESVLKKRKREEEWALAKKQSAEAAKKTNAANRKLIYKRAEQYAKEYAEKEKELISLKREAKLKGGFYVDPEAKLLFIIRIRGINAIDPKTKKILQLLRLRQIFNGVFLKVNKATMNMLRRVEPYVTYGFPNLKSVKELIYKRGYGKLNHQRVALT

SEQ ID NO: 8936 - protein, 110 aa, Glycine max; identical to SEQ ID NO: 6489
  misc_feature (1)..(51): Xaa can be any naturally occurring amino acid
  Coding DNA Sequence Number=SeqID_661

SEQ ID NO: 8937 - protein, 94 aa, Glycine max
  misc_feature (82)..(82): Xaa can be any naturally occurring amino acid
  Coding DNA Sequence Number=SeqID_663
GSVLQKHHQHLHTYSLYLQTTTGLIEYVIRRDRSELTINTQKTQQVISIPVVDAKMGLSPLPNQRQVHLVCSRNTTASTHVXSKVSRKVQGSPI

SEQ ID NO: 8938 - protein, 114 aa, Glycine max; identical to SEQ ID NO: 7234
  Coding DNA Sequence Number=SeqID_665

SEQ ID NO: 8939 - protein, 114 aa, Glycine max
  Coding DNA Sequence Number=SeqID_667
EGKKVYTEVMKQQKSPEKEPKLYSVPWQRKVYILVTTHQFSSVAGLSMNVFLIQSNGWTTQMAPAAAATPHPMAAWISAGWIFGSLGTPPGITCFDLSLSSSLSNRLIPTEILK

SEQ ID NO: 8940 - protein, 253 aa, Glycine max
  misc_feature (133)..(133): Xaa can be any naturally occurring amino acid
  misc_feature (170)..(170): Xaa can be any naturally occurring amino acid
  Coding DNA Sequence Number=SeqID_669
PGVSRRIKGHAPHASAALYLVTAPRSPTTYAPSYINSHQPPECATTPPSAHRPQPAHPRAPAPRRTQSPPDTTSHTVFPRKNSLPTHWYTRFFPPERGPSPILTNGSPPELNPPPRTLPITPGPTPPAPAPLXSMPAHPPPKFATPRRVSSRPPSADRRPPSIYPSPVSXPTPLPITCAAPFTSRSCPLCLRPAHSSPCTPSGSFPTRTLYLIPVLRTSPRPFTHPRPRPPSPTAPTLLPRTPCASYTCSPQQ

SEQ ID NO: 8941 - protein, 90 aa, Glycine max
  misc_feature (21)..(21): Xaa can be any naturally occurring amino acid
  misc_feature (76)..(76): Xaa can be any naturally occurring amino acid
  misc_feature (78)..(79): Xaa can be any naturally occurring amino acid
  misc_feature (81)..(82): Xaa can be any naturally occurring amino acid
  Coding DNA Sequence Number=SeqID_670
IRNNNTTYTHRRQIHGRRPQXVDGIACVIVCAGTAEHHRESLSGLLEHGSTAAASGLSTHALLAYPFVRQLYVTEXRXXEXXGSGGARRN

SEQ ID NO: 8942 - protein, 122 aa, Glycine max
  misc_feature (21)..(21): Xaa can be any naturally occurring amino acid
  misc_feature (37)..(37): Xaa can be any naturally occurring amino acid
  misc_feature (59)..(59): Xaa can be any naturally occurring amino acid
  misc_feature (61)..(61): Xaa can be any naturally occurring amino acid
  misc_feature (86)..(89): Xaa can be any naturally occurring amino acid
  misc_feature (92)..(92): Xaa can be any naturally occurring amino acid
  Coding DNA Sequence Number=SeqID_672
  Subcellular localization annotation: CTP_CleavageSite=54; ConfidenceScore=5.44e-01
RRSSFFIVSLFSRTPIPLTRXKKKKPEPFSSSQFSQXKGLQIFWFFSTDFEPLVEMASXSXQPQFRYTQPAGKGVSFPRLGGGGGXXXXPYXTLETPFEKLLTPRGGVGGKTKSRFFWNLGN

SEQ ID NO: 8943 - protein, 111 aa, Glycine max
  misc_feature (11)..(11): Xaa can be any naturally occurring amino acid
  misc_feature (52)..(52): Xaa can be any naturally occurring amino acid
  Coding DNA Sequence Number=SeqID_673
  Gene Ontology: Mol. function=structural constituent of ribosome; Cellular component=ribonucleoprotein complex; Biological process =translation
  Homolog annotation: Hit_ID=A7Q8E9; Match level="QueryCoverage=100%, HitCoverage=49%, E-value=3e-19, Identity=48%"; Hit description =Chromosome chr5 scaffold_64, whole genome shotgun sequence
  Pfam annotation: Domain name=Ribosomal_L18e; Domain location=1-111; Score=49.2; E_value=1.1e-12; Accession=PF00828.9; Description =Eukaryotic ribosomal protein L18
LYRFLVRRTGXNFNAIILKHLFISKVNKPPLSLSRLIRYTKVKEDKITIIVXTITNNIIIYKVPTLKVTTLKFTKTTITRIKKTNNKYLTFNQLTLRAPLNQNTILLRIPR

SEQ ID NO: 8944 - protein, 209 aa, Glycine max
  misc_feature (3)..(3): Xaa can be any naturally occurring amino acid
  misc_feature (20)..(20): Xaa can be any naturally occurring amino acid
  misc_feature (29)..(29): Xaa can be any naturally occurring amino acid
  misc_feature (62)..(62): Xaa can be any naturally occurring amino acid
  misc_feature (91)..(92): Xaa can be any naturally occurring amino acid
  misc_feature (102)..(102): Xaa can be any naturally occurring amino acid
  misc_feature (144)..(144): Xaa can be any naturally occurring amino acid
  misc_feature (170)..(170): Xaa can be any naturally occurring amino acid
  misc_feature (172)..(172): Xaa can be any naturally occurring amino acid
  misc_feature (176)..(176): Xaa can be any naturally occurring amino acid
  misc_feature (188)..(188): Xaa can be any naturally occurring amino acid
  misc_feature (197)..(197): Xaa can be any naturally occurring amino acid
  misc_feature (209)..(209): Xaa can be any naturally occurring amino acid
  Coding DNA Sequence Number=SeqID_160
CEXYISSLIADVTHWRIDTXLVIQYLSPXLCTYLSLHIVYTCTRHFHSIGSNNSSTTSTRPXFIVLGETLTHILGATDLITTSEYVVHSQXXYTVTHSALHXACCTLYLLLSIKTANTWLVNSDDTTLCCAALSLICIAGFTHXTPIGYVHYTKRSVVTLLFDVYNIHNXHXSCRXLVSTYSSSAHIXTFEFELLIXSSPLIHLLYDTX

SEQ ID NO: 8945 - protein, 122 aa, Glycine max
  misc_feature (39)..(39): Xaa can be any naturally occurring amino acid
  misc_feature (93)..(93): Xaa can be any naturally occurring amino acid
  misc_feature (122)..(122): Xaa can be any naturally occurring amino acid
  Coding DNA Sequence Number=SeqID_162
YTCVYASELATSTRSHNLLLTHHHAPIRTPSKSYVAPIXYIAPARDRSDNRREDSRVRASSHIRLYILYIIYSAYQRRHIIILYIISGAVDDXICVLSLVAPRRDYHIGGARWVMRHSATIX

SEQ ID NO: 8946 - protein, 90 aa, Glycine max
  Coding DNA Sequence Number=SeqID_164
  Subcellular localization annotation: CTP_CleavageSite=71; ConfidenceScore=5.50e-01
GEIYPPGGILFPPKFLKRNSVTLSRGTPNKKNLVPFFSKFFPFKRGVGIPPFGGPKKFKMLPAPPKKKKILAEGPKTKTKELLEKKAPLF

SEQ ID NO: 8947 - protein, 163 aa, Glycine max
  misc_feature (35)..(35): Xaa can be any naturally occurring amino acid
  misc_feature (54)..(54): Xaa can be any naturally occurring amino acid
  misc_feature (63)..(63): Xaa can be any naturally occurring amino acid
  misc_feature (129)..(129): Xaa can be any naturally occurring amino acid
  Coding DNA Sequence Number=SeqID_166
  Gene Ontology: Mol. function=magnesium ion binding; Cellular component=integral to membrane; Biological process=photosynthesis, light harvesting
  Homolog annotation: Hit_ID=Q1EP45; Match level="QueryCoverage=99%, HitCoverage=60%, E-value=2e-54, Identity=67%"; Hit description =Chlorophyll A-B binding protein (CAB), putative
  Pfam annotation: Domain name=Chloroa_b-bind; Domain location=1-131; Score=41.8; E_value=2.5e-09; Accession=PF00504.12; Description =Chlorophyll A-B binding protein
FRWDMLGALACVFLEILYCNGVKFGETVWFKVWYXIFSEGGLDYLGNISMIYVXSILVIWVIXVILMGVVEGYCIDGGFIGEVNDLIYVGGRFDLLGFADDLEAFAELKVKELKNGRLVMLSMFGFFVXVIVIGKGPLENFADHFADPVNNNAWAYATNFVPG

SEQ ID NO: 8948 - protein, 125 aa, Glycine max
  Coding DNA Sequence Number=SeqID_167
  Gene Ontology: Mol. function=structural molecule activity; Cellular component=protein complex; Biological process=microtubule-based movement
  Homolog annotation: Hit_ID=A6NJQ0; Match level="QueryCoverage=100%, HitCoverage=29%, E-value=3e-69, Identity=100%"; Hit description =Uncharacterized protein ENSP00000354037
  Pfam annotation: Domain name=Tubulin; Domain location=49-125; Score= -58.6; E_value=0.0047; Accession=PF00091.15; Description=TubulinFtsZ family, GTPase domain
MRECISIHVGQAGVQIGNACWELYCLEHGIQPDGQMPSDKTIGGGDDSFNTFFSETGAGKHVPRAVFVDLEPTVVDEVRTGTYRQLFHPEQLITGKEDAANNYARGHYTIGKEIVDLVLDRIRKL

SEQ ID NO: 8949 - protein, 174 aa, Glycine max; identical to SEQ ID NO: 7540
  misc_feature (22)..(22): Xaa can be any naturally occurring amino acid
  misc_feature (90)..(90): Xaa can be any naturally occurring amino acid
  misc_feature (136)..(136): Xaa can be any naturally occurring amino acid
  misc_feature (151)..(151): Xaa can be any naturally occurring amino acid
  misc_feature (174)..(174): Xaa can be any naturally occurring amino acid
  Coding DNA Sequence Number=SeqID_168

SEQ ID NO: 8950 - protein, 240 aa, Glycine max
  misc_feature (4)..(4): Xaa can be any naturally occurring amino acid
  misc_feature (29)..(29): Xaa can be any naturally occurring amino acid
  misc_feature (35)..(35): Xaa can be any naturally occurring amino acid
  Coding DNA Sequence Number=SeqID_1669
  Homolog annotation: Hit_ID=A2QB96; Match level="QueryCoverage=98%, HitCoverage=55%, E-value=6e-08, Identity=24%"; Hit description =Remark: C-terminal truncated ORF due to the end of contig. precursor
  Subcellular localization annotation: CTP_CleavageSite=59; ConfidenceScore=5.16e-01
RISXSDTRSAPAAGHETLHTRTPRPLHTXAQRKAXTTAPKQDSPQSGGVHTPTPARLQRSSTSRSLPTQETPTSRTNHLLLKWRWTGDSTTPRAINTETDNTRRARQKRGTRHHQHTPEDNEARRAQHDRSQNTDRQRHTPSSGVRQQQNTDTPTHPHAADKKTHKTGPQRCGHTISTGAHITPKHKHTLNTNIRAGRGECRRHHTRNQHSALRTTLTKQTAGGHARNHTKNANNTAYAT

SEQ ID NO: 8951 - protein, 131 aa, Glycine max
  Coding DNA Sequence Number=SeqID_1670
  Gene Ontology: Mol. function=catalytic activity; Cellular component =mitochondrion; Biological process=signal transduction
  Homolog annotation: Hit_ID=A7Q9Y3; Match level="QueryCoverage=100%, HitCoverage=100%, E-value=1e-59, Identity=86%"; Hit description =Chromosome chr8 scaffold_68, whole genome shotgun sequence
  Pfam annotation: Domain name=HIT; Domain location=27-126; Score =156.0; E_value=1.1e-43; Accession=PF01230.13; Description=HIT domain
MASEKQAALAVTPSDADAPTIFDKIINKEIPSTVVYEDDKVLAFRDITPQAPTHILIIPKFKDGLSGLSKAEERHFEILGRLLYTAKLVAKQEGLDDGFRIVINDGPKGCQSVYHIHVHLLGGRQMNWPPG

SEQ ID NO: 8952 - protein, 78 aa, Glycine max; identical to SEQ ID NO: 6095
  misc_feature (2)..(2): Xaa can be any naturally occurring amino acid
  misc_feature (4)..(4): Xaa can be any naturally occurring amino acid
  misc_feature (49)..(49): Xaa can be any naturally occurring amino acid
  Coding DNA Sequence Number=SeqID_674

SEQ ID NO: 8953 - protein, 51 aa, Glycine max
  Coding DNA Sequence Number=SeqID_676
  Gene Ontology: Mol. function=protein transporter activity; Cellular component=integral to membrane; Biological process=intracellular protein transport across a membrane
  Homolog annotation: Hit_ID=A8FAF7; Match level="QueryCoverage=100%, HitCoverage=86%, E-value=2e-14, Identity=76%"; Hit description=TAT family twin arginine targeting transporter
  Pfam annotation: Domain name=MttA_Hcf106; Domain location=4-51; Score= 90.0; E_value=7.6e-24; Accession=PF02416.7; Description=mttAHcf106 family
MGPIGPGSLILIAIVALIIFGPKKLPELGRAAGDTLREFKNATKGLADDQE

SEQ ID NO: 8954 - protein, 190 aa, Glycine max
  misc_feature (40)..(40): Xaa can be any naturally occurring amino acid
  misc_feature (64)..(64): Xaa can be any naturally occurring amino acid
  misc_feature (91)..(91): Xaa can be any naturally occurring amino acid
  misc_feature (111)..(111): Xaa can be any naturally occurring amino acid
  misc_feature (113)..(113): Xaa can be any naturally occurring amino acid
  misc_feature (121)..(121): Xaa can be any naturally occurring amino acid
  misc_feature (143)..(144): Xaa can be any naturally occurring amino acid
  misc_feature (165)..(168): Xaa can be any naturally occurring amino acid
  misc_feature (171)..(171): Xaa can be any naturally occurring amino acid
  misc_feature (175)..(175): Xaa can be any naturally occurring amino acid
  misc_feature (179)..(179): Xaa can be any naturally occurring amino acid
  misc_feature (186)..(190): Xaa can be any naturally occurring amino acid
  Coding DNA Sequence Number=SeqID_677
LICDISANAPSLIYVGIFICICSIRVVSSCSVSIQLAPTXPSCPVCSVLLCLHGTLHLVSYVFXLRVSLSSHLALPLVCSVRVVARVEGGXEKCSRRLGCVARRRYLSLVXPXVICVSYQXPLVIAQRLSVHVCAQGLYESTXXVTRAAVHGSSGLKGRTRGTRXXXXAVXVCRXVCGXGGGGGGXXXXX

SEQ ID NO: 8955 - protein, 181 aa, Glycine max
  Coding DNA Sequence Number=SeqID_679
  Gene Ontology: Mol. function=catalytic activity; Biological process =Mo-molybdopterin cofactor biosynthetic process
  Homolog annotation: Hit_ID=O22827; Match level="QueryCoverage=98%, HitCoverage=95%, E-value=5e-84, Identity=84%"; Hit description =Putative molybdopterin synthase large subunit
  Pfam annotation: Domain name=MoaE; Domain location=10-126; Score =200.0; E_value=5.9e-57; Accession=PF02391.7; Description=MoaE protein
MSSDEKNLIEILEEGHKVDIVKYIDYVSAPQAGAIATFSGTTRDMFEGKAVLELRYEAYVPMATRTLTSICTSARSNWDIHKIAVAHRLGPVPVGETSVFIAVSSVHRGDGLDACKFLIDELKATVPIWKKEVYTNGEIWKENSEFLEKRDGLVKKEHKRSCCGSKVRVQEDEEEHKDNSS

SEQ ID NO: 8956 - protein, 95 aa, Glycine max
  Coding DNA Sequence Number=SeqID_680
SSSSLRVIATRGERRHCVVFSALEPTICYSNNTHDLHYSLSRQCSHVRATQQCGARTEVCALLLWCCSSTTLCLTYSIILYSRACVNTPECATPH

SEQ ID NO: 8957 - protein, 78 aa, Glycine max
  misc_feature (52)..(52): Xaa can be any naturally occurring amino acid
  Coding DNA Sequence Number=SeqID_682
KMQNYISYKIFISRIMIYVLILSKNNLHIKNFFQFFFFFRFFITRQIFWYSXDFILYSGLGGCPDLHRSQSSHRYGQQ

SEQ ID NO: 8958 - protein, 107 aa, Glycine max
  misc_feature (83)..(83): Xaa can be any naturally occurring amino acid
  misc_feature (86)..(86): Xaa can be any naturally occurring amino acid
  misc_feature (94)..(95): Xaa can be any naturally occurring amino acid
  misc_feature (106)..(106): Xaa can be any naturally occurring amino acid
  Coding DNA Sequence Number=SeqID_684
  Gene Ontology: Mol. function=zinc ion binding; Cellular component =chromatin; Biological process=chromatin assembly or disassembly
  Homolog annotation: Hit_ID=A7P2P8; Match level="QueryCoverage=100%, HitCoverage=12%, E-value=1e-23, Identity=56%"; Hit description =Chromosome chr1 scaffold_5, whole genome shotgun sequence
MKENKSSAPKMLNRNWVLKRKRRKLPLGLDQSSGKEQSNGKEENSLTSESSRNASAKRVLKTEVATDQISSKKKGNDGYYYEXVIXDVGGNLLXXDSCPRTYHLQXL

SEQ ID NO: 8959 - protein, 124 aa, Glycine max; identical to SEQ ID NO: 6109
  misc_feature (46)..(46): Xaa can be any naturally occurring amino acid
  misc_feature (88)..(88): Xaa can be any naturally occurring amino acid
  misc_feature (102)..(102): Xaa can be any naturally occurring amino acid
  misc_feature (108)..(108): Xaa can be any naturally occurring amino acid
  misc_feature (114)..(115): Xaa can be any naturally occurring amino acid
  misc_feature (119)..(119): Xaa can be any naturally occurring amino acid
  misc_feature (121)..(121): Xaa can be any naturally occurring amino acid
  Coding DNA Sequence Number=SeqID_685

SEQ ID NO: 8960 - protein, 100 aa, Glycine max
  misc_feature (4)..(4): Xaa can be any naturally occurring amino acid
  misc_feature (6)..(7): Xaa can be any naturally occurring amino acid
  Coding DNA Sequence Number=SeqID_687
  Subcellular localization annotation: CTP_CleavageSite=42; ConfidenceScore=5.31e-01
GPPXPXXPPRPPPPPALPGPLPPSFCFCMTSYLQENFFLNIRFSAMWYQSRELPTNTSIRMYEFISPYCHSPPQHHTVIIKESPIPTECSDTIITLFSAV

SEQ ID NO: 8961 - protein, 93 aa, Glycine max
  misc_feature (9)..(9): Xaa can be any naturally occurring amino acid
  misc_feature (47)..(48): Xaa can be any naturally occurring amino acid
  misc_feature (84)..(87): Xaa can be any naturally occurring amino acid
  misc_feature (90)..(93): Xaa can be any naturally occurring amino acid
  Coding DNA Sequence Number=SeqID_689
  Subcellular localization annotation: CTP_CleavageSite=62; ConfidenceScore=5.41e-01
HTLNTTQLXQDTNSIPSVGRQSLFVSISVCFSDSRHVPSLHIRSATXXLIIHRSSVSVPHLRSDSSQSICISSSSLLSSSLSLXXXXSPXXXX

SEQ ID NO: 8962 - protein, 89 aa, Glycine max
  misc_feature (8)..(8): Xaa can be any naturally occurring amino acid
  misc_feature (29)..(29): Xaa can be any naturally occurring amino acid
  misc_feature (64)..(64): Xaa can be any naturally occurring amino acid
  misc_feature (81)..(81): Xaa can be any naturally occurring amino acid
  Coding DNA Sequence Number=SeqID_691
RLARHQYXPHISLSLSTTPILSCCLMVQXSRVTMIYTLCVSIITIDIYRGSMCALFTICPYDQXRHHLPSICYIRYCLWCXVMIQHKPR

SEQ ID NO: 8963 - protein, 112 aa, Glycine max
  Coding DNA Sequence Number=SeqID_693
  Subcellular localization annotation: CTP_CleavageSite=36; ConfidenceScore=5.49e-01
IIMSSSSQSRFATRILLGSPQSRSLLRALFDSPKTVGVKVREITHPGVKVSRFVLEFSNLPEEESDRRKRLLNILSTKLRGGARTNADTQEHPECQGDRYSHKRVRTLMSMR

SEQ ID NO: 8964 - protein, 112 aa, Glycine max; identical to SEQ ID NO: 6117
  Coding DNA Sequence Number=SeqID_695

SEQ ID NO: 8965 - protein, 178 aa, Glycine max; identical to SEQ ID NO: 6929
  misc_feature (2)..(2): Xaa can be any naturally occurring amino acid
  misc_feature (36)..(37): Xaa can be any naturally occurring amino acid
  misc_feature (40)..(40): Xaa can be any naturally occurring amino acid
  misc_feature (44)..(44): Xaa can be any naturally occurring amino acid
  misc_feature (53)..(53): Xaa can be any naturally occurring amino acid
  misc_feature (114)..(114): Xaa can be any naturally occurring amino acid
  misc_feature (121)..(121): Xaa can be any naturally occurring amino acid
  Coding DNA Sequence Number=SeqID_697

SEQ ID NO: 8966 - protein, 131 aa, Glycine max
  misc_feature (14)..(14): Xaa can be any naturally occurring amino acid
  misc_feature (97)..(97): Xaa can be any naturally occurring amino acid
  misc_feature (103)..(103): Xaa can be any naturally occurring amino acid
  Coding DNA Sequence Number=SeqID_699
  Gene Ontology: Mol. function=chitinase activity; Cellular component =extracellular region; Biological process=cell wall catabolic process
  Homolog annotation: Hit_ID=Q43686; Match level="QueryCoverage=96%, HitCoverage=51%, E-value=6e-35, Identity=59%"; Hit description =Chitinase class 4
  Pfam annotation: Domain name=Glyco_hydro_19; Domain location=53-131; Score=-97.6; E_value=0.024; Accession=PF00182.9; Description =Chitinase class I
QKERAQNRGRAEGXRRSQHGQRGNGDEHRGTGGKQGPRKTSTPIFFFVNAADIVTPLFFCGIIDQADSGCAGNNFYSRDAFLNAFNSYNDFGRLGSXDDSKRXIATSFVHFILDTGPFCPLADITGASSDF

SEQ ID NO: 8967 - protein, 109 aa, Glycine max
  misc_feature (40)..(40): Xaa can be any naturally occurring amino acid
  misc_feature (49)..(49): Xaa can be any naturally occurring amino acid
  misc_feature (105)..(105): Xaa can be any naturally occurring amino acid
  Coding DNA Sequence Number=SeqID_700
  Gene Ontology: Mol. function=structural constituent of ribosome; Cellular component=ribonucleoprotein complex; Biological process =translation
  Homolog annotation: Hit_ID=P51414; Match level="QueryCoverage=79%, HitCoverage=59%, E-value=1e-18, Identity=57%"; Hit description=60S ribosomal protein L26-1
VTLSSPPSTALSTTYNVRSTPMTKDDESPVVPRTDKEREXRGVHVYRRXWAIRIERSRRETAHGTTVSVRLQPSKVMITRLRLGKGSRSLWGRKARGLCRAGGGXGGTN

SEQ ID NO: 8968 - protein, 125 aa, Glycine max; identical to SEQ ID NO: 6128
  Coding DNA Sequence Number=SeqID_701

SEQ ID NO: 8969 - protein, 182 aa, Glycine max; identical to SEQ ID NO: 6935
  misc_feature (143)..(182): Xaa can be any naturally occurring amino acid
  Coding DNA Sequence Number=SeqID_703
  Subcellular localization annotation: CTP_CleavageSite=28; ConfidenceScore=5.15e-01

SEQ ID NO: 8970 - protein, 131 aa, Glycine max
  misc_feature (24)..(24): Xaa can be any naturally occurring amino acid
  misc_feature (50)..(50): Xaa can be any naturally occurring amino acid
  misc_feature (59)..(59): Xaa can be any naturally occurring amino acid
  misc_feature (100)..(100): Xaa can be any naturally occurring amino acid
  Coding DNA Sequence Number=SeqID_705
HTICTIALSTHIPDRTICVLMCVXFGVLCVSTIYFLGSSVLITRASSDSXAYYSACWCXAVSIMHSIVLRGCSVRRRSRALSLFVYVALSRKLMRWCAAXSSYILVLHSPALLYLLVRRITHQCCKSSYTR

SEQ ID NO: 8971 - protein, 71 aa, Glycine max
  Coding DNA Sequence Number=SeqID_707
  Homolog annotation: Hit_ID=UPI0000D5569B; Match level="QueryCoverage =97%, HitCoverage=13%, E-value=1e-09, Identity=52%"; Hit description =PREDICTED: similar to ubiquitin-like 7 (bone marrow stromal cell -derived)
MTSITLGIRLSLYDFQRVKIENVDLHTKVENFKVEVSKKANLPKESLELVYCGNILDDEATLDVCGIKSGV

SEQ ID NO: 8972 - protein, 124 aa, Glycine max; identical to SEQ ID NO: 6131
  misc_feature (16)..(16): Xaa can be any naturally occurring amino acid
  Coding DNA Sequence Number=SeqID_708

SEQ ID NO: 8973 - protein, 63 aa, Glycine max
  Coding DNA Sequence Number=SeqID_61
YFFTCKRESTLSATNIVMDLFLTQCKCKLGGFRYLDVVYDLPEPVHGTLIDPGVTFCKKKKKK

SEQ ID NO: 8974 - protein, 123 aa, Glycine max
  misc_feature (11)..(11): Xaa can be any naturally occurring amino acid
  Coding DNA Sequence Number=SeqID_63
  Gene Ontology: Mol. function=transferase activity, transferring glycosyl groups; Cellular component=endoplasmic reticulum
  Homolog annotation: Hit_ID=Q9M2R0; Match level="QueryCoverage=100%, HitCoverage=15%, E-value=2e-38, Identity=64%"; Hit description =Anthranilate phosphoribosyltransferase-like protein
  Pfam annotation: Domain name=PRT_C; Domain location=1-123; Score =96.4; E_value=9e-26; Accession=PF08372.1; Description=Plant phosphoribosyltransferase C-terminal
DSSHSGELDEXFDTFPTSRPNDLMRMRYDRLRSMVGRIQTVQGDLTTQDERLQSLLGWQEPRDTSLCLIFCQASATVAGVTPFQVVALYTGIYGQTHSRIPYMLTFVPMNSSRWLAARTDCMV

SEQ ID NO: 8975 - protein, 141 aa, Glycine max
  misc_feature (90)..(90): Xaa can be any naturally occurring amino acid
  Coding DNA Sequence Number=SeqID_64
  Homolog annotation: Hit_ID=A7PQJ6; Match level="QueryCoverage=78%, HitCoverage=54%, E-value=4e-16, Identity=44%"; Hit description =Chromosome chr6 scaffold_25, whole genome shotgun sequence
MRSSVHVPAAVEALLGHPVAALSERPAPRLTRLLVNVTVERSLWPVHVLLGADATVADLARAAVDAYAAEGRRPPLPTDDGATDAAARFXLHLSKYALDALDPEEKVLDLGSRNFFLCAARSTLGSDHHLRLRSSLTCLDV

SEQ ID NO: 8976 - protein, 105 aa, Glycine max
  Coding DNA Sequence Number=SeqID_65
  Gene Ontology: Mol. function=X-Pro aminopeptidase activity; Biological process=proteolysis
  Homolog annotation: Hit_ID=A7PEB4; Match level="QueryCoverage=73%, HitCoverage=15%, E-value=2e-26, Identity=72%"; Hit description =Chromosome chr11 scaffold_13, whole genome shotgun sequence
EGTSKPSPIWPSLCSYPFQNCTLPNTAILESLNQGHVLLADLDDMMASRLGAAFMPHGLGHFLGIDTHDPGGYLKGLERRKEPGLKSLRTIRDLREGMVSYGFSQ

SEQ ID NO: 8977 - protein, 268 aa, Glycine max
  misc_feature (130)..(130): Xaa can be any naturally occurring amino acid
  Coding DNA Sequence Number=SeqID_66
  Subcellular localization annotation: CTP_CleavageSite=62; ConfidenceScore=5.40e-01
VELRLVLAGAPFSSFLSIFSIYIGVGRPLRGPLSGGSTLFSVYMGASVSPERVALQSGVFLRGSYTKNKRSTAALPALSPLRPGLSLLQRRVHICGSARVFCSLACIFRVCPVRISLGRARLGLSFCLCXTSMPSPPLLQVSLAVARPGFRSCLGRGVTGAHWEACVGGERPPPLFLFFSCVPPPGCPPPSLSPCGRVGAVYGASSDLVVCGVLVCLGAASVSRLHIYFSFFFFFLRPSRAVAAFSGSFTAARVASEGPLGQGAPVQG

SEQ ID NO: 8978 - protein, 139 aa, Glycine max
  misc_feature (12)..(13): Xaa can be any naturally occurring amino acid
  misc_feature (16)..(16): Xaa can be any naturally occurring amino acid
  misc_feature (21)..(21): Xaa can be any naturally occurring amino acid
  misc_feature (29)..(29): Xaa can be any naturally occurring amino acid
  misc_feature (50)..(50): Xaa can be any naturally occurring amino acid
  misc_feature (55)..(55): Xaa can be any naturally occurring amino acid
  misc_feature (65)..(65): Xaa can be any naturally occurring amino acid
  misc_feature (77)..(77): Xaa can be any naturally occurring amino acid
  misc_feature (101)..(101): Xaa can be any naturally occurring amino acid
  misc_feature (116)..(116): Xaa can be any naturally occurring amino acid
  misc_feature (127)..(127): Xaa can be any naturally occurring amino acid
  misc_feature (134)..(134): Xaa can be any naturally occurring amino acid
  misc_feature (139)..(139): Xaa can be any naturally occurring amino acid
  Coding DNA Sequence Number=SeqID_68
YISFYTSMVRCXXEFXEVWAXTLCLVSGXVSMCLNSIYIQTISFLYFSSXISLLXFTLLHHTPHXTPLHTQSHSCVXCWLFDIILFVVMFVDDSVWCVYQXSPSMCVVYITYHHHXRECDVNIDSNXVGATSAXCGATX

SEQ ID NO: 8979 - protein, 96 aa, Glycine max
  Coding DNA Sequence Number=SeqID_70
LACRVPSYLINIKKTAAAGVSGWRVSFLSCTVHRSYDPVDPRITSHNTAALALHPHHFILLCLRSQSLIRYIYIIYRGYLSAARVLARPNGFLHTS

SEQ ID NO: 8980 - protein, 135 aa, Glycine max
  misc_feature (78)..(78): Xaa can be any naturally occurring amino acid
  Coding DNA Sequence Number=SeqID_72
  Homolog annotation: Hit_ID=A9P961; Match level="QueryCoverage=85%, HitCoverage=76%, E-value=2e-09, Identity=36%"; Hit description =Putative uncharacterized protein
MPRKISLHLPRLFLFLKKLVKRQELKLLRHYDYGEYQFSASSTPLIHRYHRKEFKNRGHRGLCSFLYLCWCLGNLKVXGSGECQLAEGLPNGNFQIEDGFIGAEDEGEEESVDEKAERFIESFYQQIRMQRQKSL

SEQ ID NO: 8981 - protein, 68 aa, Glycine max; identical to SEQ ID NO: 8273
  misc_feature (8)..(8): Xaa can be any naturally occurring amino acid
  misc_feature (16)..(16): Xaa can be any naturally occurring amino acid
  misc_feature (20)..(21): Xaa can be any naturally occurring amino acid
  misc_feature (25)..(25): Xaa can be any naturally occurring amino acid
  misc_feature (29)..(29): Xaa can be any naturally occurring amino acid
  misc_feature (31)..(32): Xaa can be any naturally occurring amino acid
  misc_feature (51)..(52): Xaa can be any naturally occurring amino acid
  misc_feature (67)..(67): Xaa can be any naturally occurring amino acid
  Coding DNA Sequence Number=SeqID_709

SEQ ID NO: 8982 - protein, 107 aa, Glycine max
  misc_feature (23)..(23): Xaa can be any naturally occurring amino acid
  misc_feature (27)..(27): Xaa can be any naturally occurring amino acid
  misc_feature (29)..(29): Xaa can be any naturally occurring amino acid
  misc_feature (33)..(36): Xaa can be any naturally occurring amino acid
  misc_feature (40)..(42): Xaa can be any naturally occurring amino acid
  misc_feature (87)..(87): Xaa can be any naturally occurring amino acid
  misc_feature (99)..(99): Xaa can be any naturally occurring amino acid
  Coding DNA Sequence Number=SeqID_711
KGRSGPNCDVKQGICHTRQEGLXCSKXEXMWAXXXXSSSXXXPVTVRGRAKLRGTGLSRRGGARRDNFPAKSTILALQEFAVDEKRXRGGESTSGGRRXRRGPLSPG

SEQ ID NO: 8983 - protein, 145 aa, Glycine max; identical to SEQ ID NO: 6944
  misc_feature (67)..(67): Xaa can be any naturally occurring amino acid
  misc_feature (137)..(137): Xaa can be any naturally occurring amino acid
  Coding DNA Sequence Number=SeqID_713

SEQ ID NO: 8984 - protein, 91 aa, Glycine max
  Coding DNA Sequence Number=SeqID_715
  Homolog annotation: Hit_ID=A7P8F8; Match level="QueryCoverage=73%, HitCoverage=13%, E-value=2e-20, Identity=73%"; Hit description =Chromosome chr3 scaffold_8, whole genome shotgun sequence
EIGGFPRGCKEFPPGRHSLGTSLIYNILIEKFVLHPHTREHSSPIEWVKQLDELKKGNLRESRGGLGLFTPYPGDLDSVVLPNVTRTSKAG

SEQ ID NO: 8985 - protein, 116 aa, Glycine max; identical to SEQ ID NO: 6945
  misc_feature (75)..(75): Xaa can be any naturally occurring amino acid
  Coding DNA Sequence Number=SeqID_716
  Subcellular localization annotation: CTP_CleavageSite=43; ConfidenceScore=5.15e-01

SEQ ID NO: 8986 - protein, 168 aa, Glycine max
  Coding DNA Sequence Number=SeqID_718
  Gene Ontology: Cellular component=integral to membrane
  Homolog annotation: Hit_ID=UPI00006A0D29; Match level="QueryCoverage =100%, HitCoverage=14%, E-value=2e-85, Identity=91%"; Hit description= Bromodomain and WD repeat domain-containing protein 2 (WD repeat protein 11).
NGCITLRVARQSCAGSGAPNEETDSDLVPEMTYDLRCQCDAIRVTKTVRPYSISCCPINENVAALIISDGRIMIWELKSSVAGKRMSSISPSLGALYAPLSFCGKPVGPLQKKLPDLSLDSMIAGQSMLAGDALNSGGPLQEVHLKFLLTGLISGLPQPPFVVRMCPP

SEQ ID NO: 8987 - protein, 458 aa, Glycine max
  Coding DNA Sequence Number=SeqID_719
  Gene Ontology: Mol. function=L-isoleucine transmembrane transporter activity; Cellular component=integral to membrane; Biological process=amino acid export from vacuole
  Homolog annotation: Hit_ID=Q24FU6; Match level="QueryCoverage=94%, HitCoverage=90%, E-value=6e-50, Identity=29%"; Hit description =Transmembrane amino acid transporter protein
  Pfam annotation: Domain name=Aa_trans; Domain location=46-449; Score =148.1; E_value=2.4e-41; Accession=PF01490.8; Description =Transmembrane amino acid transporter protein
MAKHDDCGRMIDTKGGQSFEIEMKGSPATPTPAATQDSFKGGVKIQQSSNVQASFTLFKSFLGTGVLALPYAYKTAGLGLSLIVLIIVSAMTTRCFSLLLDVAAQRIGTGKISLQKLTQDVLGTKGKYAVQASIMIMQLGCCIGILIFTRDFLNHILCEFGISSLCNNTLFNVLFCLALTVPLTLINNMHYFYIPSLAANFFILVGLAAQMFYNTQVLQDNPELRSTLGTHLKEFNWKDLPLFFGIATYAFEGVGIIFSIRSSMEKPQDFKFLLKNQMLILTLIYVIFPTFCYIALDDRLTDIIFFTLPTDDPFYLLIQIFYAISALLSFPVQFFPAIRIMENSKIMRYRLFNERGKCNNKPLRYGMRMAVIGVVFLVAYTATSFHLFLNLLGSCVFTFVGFILPVWIYSVHFKGKTGIAKRLINYTMLTVAVVFGAAGFVMSIMEMVNKSSEDVATL

SEQ ID NO: 8988 - protein, 172 aa, Glycine max
  misc_feature (77)..(77): Xaa can be any naturally occurring amino acid
  misc_feature (120)..(120): Xaa can be any naturally occurring amino acid
  misc_feature (164)..(164): Xaa can be any naturally occurring amino acid
  Coding DNA Sequence Number=SeqID_720
PNTPRCGTGRAHPNLCVLGLRCAHAAHTHPHPCGVSSSPPHVVRVKQTPLCVRNPHLSRTNKSVVCPPPTAHSAGPXDHLVCALARVSLVCSPLPHPCRVCAPLTALYTSRPNHRPPPPXSDHIRTVQYIWCVILFCVRTSLISHYPLLCAMSCCFCADVPVPXVAPCAGSH

SEQ ID NO: 8989 - protein, 126 aa, Glycine max
  misc_feature (7)..(7): Xaa can be any naturally occurring amino acid
  misc_feature (14)..(14): Xaa can be any naturally occurring amino acid
  Coding DNA Sequence Number=SeqID_721
  Gene Ontology: Mol. function=metal ion binding; Cellular component =nucleus; Biological process=regulation of transcription, DNA -dependent
  Homolog annotation: Hit_ID=Q9ZWJ0; Match level="QueryCoverage=100%, HitCoverage=26%, E-value=2e-54, Identity=79%"; Hit description=DNA binding zinc finger protein
  Pfam annotation: Domain name=zf-C3HC4; Domain location=73-114; Score =39.2; E_value=1.4e-08; Accession=PF00097.15; Description=Zinc finger, C3HC4 type (RING finger)
MVVERAXVYGSRHXLVQPRTIRMAVHNMSYEELLALGDRIGYVNPGIFEDSLNKCLTETIYCSSEQSQDEGNCVICLEEYKNMDDVGTLKTCGHDYHVSCIKKWLSLRKLCPICKVSALPEDTKDK

SEQ ID NO: 8990 - protein, 142 aa, Glycine max
  misc_feature (121)..(121): Xaa can be any naturally occurring amino acid
  Coding DNA Sequence Number=SeqID_722
  Homolog annotation: Hit_ID=A7QHY8; Match level="QueryCoverage=57%, HitCoverage=17%, E-value=1e-14, Identity=51%"; Hit description =Chromosome chr17 scaffold_101, whole genome shotgun sequence
  Subcellular localization annotation: CTP_CleavageSite=72; ConfidenceScore=5.44e-01
MPPLAPLHLRKLLLRSRSLSFTSPTPIHPPPLFPQQPSSHFHSRTLLTPSSLFIIRHFSSETQTDQIAHSLSSELLKEPDSDALSVSQRLHLSFLHITPTPHFDLQTPKLLPRSGRTGLGXHQWLPSNPIFPKGENFFLFGK

SEQ ID NO: 8991 - protein, 198 aa, Glycine max
  misc_feature (22)..(22): Xaa can be any naturally occurring amino acid
  misc_feature (69)..(69): Xaa can be any naturally occurring amino acid
  misc_feature (74)..(74): Xaa can be any naturally occurring amino acid
  misc_feature (108)..(108): Xaa can be any naturally occurring amino acid
  misc_feature (114)..(114): Xaa can be any naturally occurring amino acid
  misc_feature (122)..(122): Xaa can be any naturally occurring amino acid
  misc_feature (173)..(173): Xaa can be any naturally occurring amino acid
  Coding DNA Sequence Number=SeqID_723
  Gene Ontology: Biological process=multicellular organismal development
  Homolog annotation: Hit_ID=Q208P4; Match level="QueryCoverage=99%, HitCoverage=27%, E-value=3e-38, Identity=46%"; Hit description =RAMOSUS4
CLQHHSLCIQAWDLLTPLPWAXCRIFPYSKRCNMTADRDTWGQPLPLLRDYALSILGCYPHILHMHLDXGDPTXYALSDPWMLMDLSLRERLLPTGLALTRPWKPNYXTPQDEXDVNHRSEXLPARGLLQESYTLQNLLINRTVNQHYMNFLFKMPCLGHVQLKEDHYTSPEXDMTTKRRVRSRNRFENTLHRHLIRD

SEQ ID NO: 8992 - protein, 125 aa, Glycine max
  misc_feature (4)..(5): Xaa can be any naturally occurring amino acid
  misc_feature (13)..(14): Xaa can be any naturally occurring amino acid
  misc_feature (18)..(18): Xaa can be any naturally occurring amino acid
  misc_feature (23)..(25): Xaa can be any naturally occurring amino acid
  misc_feature (27)..(27): Xaa can be any naturally occurring amino acid
  misc_feature (36)..(36): Xaa can be any naturally occurring amino acid
  misc_feature (54)..(54): Xaa can be any naturally occurring amino acid
  misc_feature (56)..(56): Xaa can be any naturally occurring amino acid
  misc_feature (58)..(58): Xaa can be any naturally occurring amino acid
  misc_feature (82)..(82): Xaa can be any naturally occurring amino acid
  misc_feature (114)..(116): Xaa can be any naturally occurring amino acid
  misc_feature (125)..(125): Xaa can be any naturally occurring amino acid
  Coding DNA Sequence Number=SeqID_724
FLLXXRRPPHPTXXNSEXQPANXXXFXLQLYNSRQXDSTTKYITVPLSPSRCSXMXDXCTDPPFAHSCVVFSHRAAPPRRLXYCLAPQLQYITTVSHTNYTNTHIRQSRSTFPXXXATRPANCSX

SEQ ID NO: 8993 - protein, 196 aa, Glycine max
  Coding DNA Sequence Number=SeqID_726
  Gene Ontology: Mol. function=protein disulfide oxidoreductase activity; Cellular component=cytoplasm; Biological process=cell redox homeostasis
  Homolog annotation: Hit_ID=A7NTV9; Match level="QueryCoverage=89%, HitCoverage=85%, E-value=3e-65, Identity=69%"; Hit description =Chromosome chr18 scaffold_1, whole genome shotgun sequence
  Pfam annotation: Domain name=Thioredoxin; Domain location=74-186; Score=36.1; E_value=1.2e-07; Accession=PF00085.10; Description =Thioredoxin
IWQNRAFWFRRFLCLSVFSLVPRHIHGKLCFGGTKVEPLVKIRHTFCPSRIRVAEEYQEGLSDEDDDLCPVECVREFTTDEEFSKILDKAKETGSLVVVDFFRTSCGSCKYIEQGFAKLCKKSGDHEAPVIFLKHNVMDEYDEQSEVADRLRIRAVPLFHFYKDGVLLEAFPTRDKDRILAAILKYSSLEAEDILG

SEQ ID NO: 8994 - protein, 141 aa, Glycine max; identical to SEQ ID NO: 6952
  misc_feature (3)..(3): Xaa can be any naturally occurring amino acid
  misc_feature (19)..(19): Xaa can be any naturally occurring amino acid
  misc_feature (53)..(53): Xaa can be any naturally occurring amino acid
  misc_feature (98)..(98): Xaa can be any naturally occurring amino acid
  misc_feature (135)..(135): Xaa can be any naturally occurring amino acid
  Coding DNA Sequence Number=SeqID_727

SEQ ID NO: 8995 - protein, 79 aa, Glycine max; identical to SEQ ID NO: 6956
  misc_feature (37)..(38): Xaa can be any naturally occurring amino acid
  misc_feature (43)..(43): Xaa can be any naturally occurring amino acid
  misc_feature (50)..(50): Xaa can be any naturally occurring amino acid
  misc_feature (64)..(64): Xaa can be any naturally occurring amino acid
  misc_feature (66)..(66): Xaa can be any naturally occurring amino acid
  Coding DNA Sequence Number=SeqID_729

SEQ ID NO: 8996 - protein, 135 aa, Glycine max
  misc_feature (27)..(27): Xaa can be any naturally occurring amino acid
  misc_feature (33)..(33): Xaa can be any naturally occurring amino acid
  misc_feature (48)..(48): Xaa can be any naturally occurring amino acid
  misc_feature (69)..(72): Xaa can be any naturally occurring amino acid
  misc_feature (110)..(111): Xaa can be any naturally occurring amino acid
  misc_feature (122)..(123): Xaa can be any naturally occurring amino acid
  misc_feature (129)..(129): Xaa can be any naturally occurring amino acid
  misc_feature (132)..(132): Xaa can be any naturally occurring amino acid
  Coding DNA Sequence Number=SeqID_731
AETQTRCYIMPRECRWQSDAMRRLISXRSLVIXLLRWSGTRITPRLAXLLFTIYVSRGLDADRISDDTXXXXGLSDTRAGWALMSVSIWRALDYVILRRCRPCTHSIVIXXSLYDDMDKNDXXEYNMRXDLXQVL

SEQ ID NO: 8997 - protein, 125 aa, Glycine max; identical to SEQ ID NO: 6145
  misc_feature (3)..(5): Xaa can be any naturally occurring amino acid
  misc_feature (10)..(10): Xaa can be any naturally occurring amino acid
  misc_feature (23)..(23): Xaa can be any naturally occurring amino acid
  misc_feature (29)..(29): Xaa can be any naturally occurring amino acid
  misc_feature (56)..(56): Xaa can be any naturally occurring amino acid
  misc_feature (80)..(80): Xaa can be any naturally occurring amino acid
  misc_feature (99)..(99): Xaa can be any naturally occurring amino acid
  Coding DNA Sequence Number=SeqID_733

SEQ ID NO: 8998 - protein, 172 aa, Glycine max
  Coding DNA Sequence Number=SeqID_735
IKMSVIDTTSKDVSFRIGVFYFLILVDIVLSSFVELNISQTVDNSYNATTTIIIFVIQAILQGFIFVWLFSLFWSTVLLKYGLVGLLLKNFKWSIIYILISIVLNIFERLLRLIISGSDKADVETKIWSNVLYRIIYYVRYANLIPFYLALFSVAKRITKPEYYKPSKWLSK

SEQ ID NO: 8999 - protein, 80 aa, Glycine max
  misc_feature (45)..(45): Xaa can be any naturally occurring amino acid
  misc_feature (50)..(53): Xaa can be any naturally occurring amino acid
  misc_feature (56)..(56): Xaa can be any naturally occurring amino acid
  misc_feature (75)..(75): Xaa can be any naturally occurring amino acid
  misc_feature (77)..(77): Xaa can be any naturally occurring amino acid
  Coding DNA Sequence Number=SeqID_737
CCRERGSMSEDFFIDVDGPSKKRKLNGINHHKKAQRLQKEEPVAXVIEEXXXXDGXTADEKRLRLAQDYLARLGXCXGGG

SEQ ID NO: 9000 - protein, 207 aa, Glycine max
  Coding DNA Sequence Number=SeqID_739
  Gene Ontology: Mol. function=serine-type endopeptidase activity; Cellular component=integral to membrane; Biological process =proteolysis
  Homolog annotation: Hit_ID=UPI0000197153; Match level="QueryCoverage =74%, HitCoverage=20%, E-value=8e-61, Identity=69%"; Hit description =prolyl oligopeptidase family protein
  Pfam annotation: Domain name=Peptidase_S9; Domain location=19-205; Score=69.0; E_value=1.6e-17; Accession=PF00326.11; Description =Prolyl oligopeptidase family
YFIYKNIYINPLPSPPSPPEYNWVPGPPSSQLQKPPPPPNFPYVQSDLLSAIGWSAGCLLVGAAMNMHPQLFRAVILKVPFLDVCNTLLDPSLPLTILDYEEFGNPQIQSNFDSIFSYSPYDNIPHSSCFPSVLVTAAVNDSRVGVWEGAKWVAKVRDSTCPHCSQTVIMKTSMIGGHFGEGGHYAQCDETAYEYAFLMKAFGILNE

SEQ ID NO: 9001 - protein, 133 aa, Glycine max
  misc_feature (56)..(56): Xaa can be any naturally occurring amino acid
  misc_feature (119)..(119): Xaa can be any naturally occurring amino acid
  Coding DNA Sequence Number=SeqID_740
  Gene Ontology: Mol. function=nucleotide binding; Cellular component =plasma membrane; Biological process=small GTPase mediated signal transduction
  Homolog annotation: Hit_ID=P34144; Match level="QueryCoverage=87%, HitCoverage=60%, E-value=2e-56, Identity=87%"; Hit description=Rho -related protein rac1A precursor
  Pfam annotation: Domain name=MMR_HSR1; Domain location=4-118; Score= -19.5; E_value=0.065; Accession=PF01926.13; Description=GTPase of unknown function
  Pfam annotation: Domain name=Miro; Domain location=5-118; Score=63.3; E_value=8.1e-16; Accession=PF08477.3; Description=Miro-like protein
  Pfam annotation: Domain name=Ras; Domain location=5-126; Score=162.3; E_value=1.3e-45; Accession=PF00071.12; Description=Ras family
  Pfam module annotation: Pfam domain module=MMR_HSR1::Miro::Ras; Domain location=4-118::5-118::5-126
MQSIKCVVVGDGAVGKSCLLISYTTNAFPAEYVPTVFDNYSANVMVDGKPINLGLXDTAGQEDYDRLRPLSYAQTDVFLVCFSIVSPSSYENVSAKWYPEISHHQPNVPIILVGNKLDXRNDPAPRRPPITYE

SEQ ID NO: 9002 - protein, 148 aa, Glycine max
  misc_feature (21)..(21): Xaa can be any naturally occurring amino acid
  misc_feature (67)..(67): Xaa can be any naturally occurring amino acid
  misc_feature (94)..(94): Xaa can be any naturally occurring amino acid
  misc_feature (107)..(107): Xaa can be any naturally occurring amino acid
  misc_feature (143)..(143): Xaa can be any naturally occurring amino acid
  Coding DNA Sequence Number=SeqID_741
WTVVYRACEIDIADSVEIRQXTHIHLIDMYHPRDARMRGCSRASHEWVTYVYHNTCHEYVDDTRCGXSSCILCMQQLRDIEYALYAVIIESSMXMLYDSCPSRVCDXTLCREYALHTHTSGKCMLRSILSVISNSRVCGRVEXHETQI

SEQ ID NO: 9003 - protein, 106 aa, Glycine max
  Coding DNA Sequence Number=SeqID_743
KQEAEAGATAVVPWKWRVMEAELVSAKLCEAKPGYADKQAEGEGGRVPQMEALGQGGEVKRTGSRAATVRASVPSFVFSPSLPKIYQIIQGKIAEYIYLWLILFFF

SEQ ID NO: 9004 - protein, 120 aa, Glycine max
  Coding DNA Sequence Number=SeqID_745
LKATPGRSGVIPQSPPKAPPPEVAHPFYYYYPPPLLQNRQKGLVSAPRCLQRWCFEGNPPHASESIYRPQKASSQLWLRGEDWGGRPAWKVDAEERMAQVKWAELKRGNVKEERERENEI

SEQ ID NO: 9005 - protein, 44 aa, Glycine max
  misc_feature (15)..(15): Xaa can be any naturally occurring amino acid
  misc_feature (19)..(19): Xaa can be any naturally occurring amino acid
  Coding DNA Sequence Number=SeqID_747
VLLSIGVASRNYSLXSQSXAAQLATFVWSIFLEGQSSSRPCPML

SEQ ID NO: 9006 - protein, 91 aa, Glycine max
  misc_feature (91)..(91): Xaa can be any naturally occurring amino acid
  Coding DNA Sequence Number=SeqID_748
  Gene Ontology: Mol. function=transferase activity, transferring glycosyl groups; Cellular component=integral to membrane; Biological process=protein amino acid glycosylation
  Homolog annotation: Hit_ID=A7QNC0; Match level="QueryCoverage=90%, HitCoverage=23%, E-value=3e-30, Identity=73%"; Hit description =Chromosome chr2 scaffold_132, whole genome shotgun sequence
RKKESLCDLLLDNHVETNGAFQGKAKLLFAHAGDKWDAEFYAKVNDDVYVNIDALGATLATHLDKPRVYMGCMKSGEVFSELNHKWYEPEX

SEQ ID NO: 9007 - protein, 115 aa, Glycine max
  misc_feature (1)..(1): Xaa can be any naturally occurring amino acid
  Coding DNA Sequence Number=SeqID_749
  Gene Ontology: Cellular component=extracellular region; Biological process=sexual reproduction
  Homolog annotation: Hit_ID=A7PCC8; Match level="QueryCoverage=91%, HitCoverage=41%, E-value=2e-39, Identity=73%"; Hit description =Chromosome chr2 scaffold_11, whole genome shotgun sequence
  Pfam annotation: Domain name=DPBB_1; Domain location=10-88; Score =49.9; E_value=9.1e-12; Accession=PF03330.8; Description=Rare lipoprotein A (RlpA)-like double-psi be
XFGAMFNGGDVSAASNLYRNGVGCGACYQVRCSNSALCSDNGVTVVITDSGSGHNTDFILKQRAFGRMGLNTDAAGSLIALGELDIQYRRVSCRYPNKNLTVKIPEKEFNARYLG

SEQ ID NO: 9008 - protein, 98 aa, Glycine max; identical to SEQ ID NO: 6966
  misc_feature (72)..(72): Xaa can be any naturally occurring amino acid
  misc_feature (74)..(74): Xaa can be any naturally occurring amino acid
  misc_feature (80)..(80): Xaa can be any naturally occurring amino acid
  Coding DNA Sequence Number=SeqID_750

SEQ ID NO: 9009 - protein, 66 aa, Glycine max
  Coding DNA Sequence Number=SeqID_752
  Subcellular localization annotation: CTP_CleavageSite=60; ConfidenceScore=5.22e-01
QGYRSAWDRNLASGVGNVDESAVLSALFAVGATGFQRGKLSRSLLRSSRTIRKRFSIRVGQSSVGA

SEQ ID NO: 9010 - protein, 151 aa, Glycine max
  Coding DNA Sequence Number=SeqID_754
  Gene Ontology: Mol. function=sequence-specific DNA binding; Cellular component=cytoplasm; Biological process=regulation of transcription, DNA-dependent
  Homolog annotation: Hit_ID=A7PWH5; Match level="QueryCoverage=66%, HitCoverage=76%, E-value=8e-40, Identity=81%"; Hit description =Chromosome chr8 scaffold_34, whole genome shotgun sequence
  Pfam annotation: Domain name=HSF_DNA-bind; Domain location=19-145; Score=75.2; E_value=2.1e-19; Accession=PF00447.8; Description=HSF -type DNA-binding
MEGTSNKGLLECGRKCTPPPFLLKTYMLVEDPATDDVISWNAKGTAFVVWQPPEFARDLLPTLFKHSNFSSFVRQLNTYVRGFRKVATSRWEFFNDKFKKGERELLHEIRRRKAWSSKQQPNAPNQGTPQDSDEDQRSSSTSSSLVHYSCG

SEQ ID NO: 9011 - protein, 100 aa, Glycine max
  misc_feature (5)..(5): Xaa can be any naturally occurring amino acid
  misc_feature (28)..(28): Xaa can be any naturally occurring amino acid
  misc_feature (49)..(49): Xaa can be any naturally occurring amino acid
  misc_feature (90)..(90): Xaa can be any naturally occurring amino acid
  misc_feature (98)..(98): Xaa can be any naturally occurring amino acid
  Coding DNA Sequence Number=SeqID_755
CLRTXLISCTTSYSPSLYVCDSLGRQHXQLTTIYITTVLTLLCNRVYTXLHLTTPDLARASISQSDIPALSGVSYSLIYIAATRGGAQRXHYADLVSXPT

SEQ ID NO: 9012 - protein, 97 aa, Glycine max
  misc_feature (24)..(24): Xaa can be any naturally occurring amino acid
  Coding DNA Sequence Number=SeqID_757
  Gene Ontology: Mol. function=threonine endopeptidase activity; Cellular component=proteasome core complex; Biological process =ubiquitin-dependent protein catabolic process
  Homolog annotation: Hit_ID=A5BFH7; Match level="QueryCoverage=100%, HitCoverage=44%, E-value=2e-31, Identity=74%"; Hit description =Proteasome subunit alpha type
AEYDRAVTVCSHDGHLFQVEYALXAVPRCNADRGVRGTDNVSLGVEKKCTVKLQYCWSVMKIVNLDYHIALACAELKADARLLINRARVECQSHMLT

SEQ ID NO: 9013 - protein, 179 aa, Glycine max
  Coding DNA Sequence Number=SeqID_758
KILSNNIDLAFGHGHQAHYEIDQTLERGNPHRNSAKKIVNLYNIDQRDMNSSLDQKSALKYKNSYAKGGVGAVSTVLNQYDLPRRIENKNLMKQHQAPWSSLNNVTPVSTEEMEETSSRREMIRANHDLIKESEETKETEEQIDDDDDDESVRSEAKTIQRLYQEGLEKEQQIKKKKKK

SEQ ID NO: 9014 - protein, 144 aa, Glycine max
  misc_feature (26)..(26): Xaa can be any naturally occurring amino acid
  misc_feature (89)..(89): Xaa can be any naturally occurring amino acid
  misc_feature (119)..(119): Xaa can be any naturally occurring amino acid
  misc_feature (124)..(124): Xaa can be any naturally occurring amino acid
  Coding DNA Sequence Number=SeqID_760
GLYYYVRVSSVLFRCIYYNYYSYSRXRTTSLFHPGSSRASVTLLYKRYIRARIYVVSALHYERCSDVLARNQRHKVVVILDGMKYTPTXPLLPSAAQCTEALYYCIVSFPARRVKLYAXIHYGXMLLVVKILTEVRQSPRIPHP

SEQ ID NO: 9015 - protein, 106 aa, Glycine max; identical to SEQ ID NO: 6971
  Coding DNA Sequence Number=SeqID_762
  Subcellular localization annotation: CTP_CleavageSite=65; ConfidenceScore=5.67e-01

SEQ ID NO: 9016 - protein, 122 aa, Glycine max
  Coding DNA Sequence Number=SeqID_764
  Gene Ontology: Mol. function=structural constituent of ribosome; Cellular component=ribonucleoprotein complex; Biological process =translation
  Homolog annotation: Hit_ID=Q9SS17; Match level="QueryCoverage=100%, HitCoverage=91%, E-value=2e-62, Identity=99%"; Hit description=40S ribosomal protein S24-1
  Pfam annotation: Domain name=Ribosomal_S24e; Domain location=24-107; Score=147.1; E_value=4.8e-41; Accession=PF01282.9; Description =Ribosomal protein S24e
MAEKAVTIRTRKFMTNRLLSRKQFVIDVLHPGRANVSKAELKEKLARMYEVKDPNAIFVFKFRTHFGGGKSSGFGLIYDNVESAKKFEPKYRLIRNGLDTKIEKSRKQIKERKNRAKKIRGV

SEQ ID NO: 9017 - protein, 96 aa, Glycine max
  misc_feature (14)..(14): Xaa can be any naturally occurring amino acid
  misc_feature (21)..(22): Xaa can be any naturally occurring amino acid
  misc_feature (34)..(34): Xaa can be any naturally occurring amino acid
  misc_feature (84)..(84): Xaa can be any naturally occurring amino acid
  misc_feature (91)..(91): Xaa can be any naturally occurring amino acid
  Coding DNA Sequence Number=SeqID_765
  Subcellular localization annotation: CTP_CleavageSite=86; ConfidenceScore=5.52e-01
PLLSCHSSLSSSSXYWLSNSXXINIRIVMYNNSXFLPLCSHYPSSPSSSLISAPSSLSRRPYLAPLLLSPSRSVSVLLHLILLXYRATLQXSHCMR

SEQ ID NO: 9018 - protein, 124 aa, Glycine max
  Coding DNA Sequence Number=SeqID_767
  Gene Ontology: Mol. function=transferase activity; Biological process= establishment of competence for transformation
  Homolog annotation: Hit_ID=A8FHY1; Match level="QueryCoverage=86%, HitCoverage=46%, E-value=2e-44, Identity=75%"; Hit description =Competence protein FC
KSPAAEQGNQLICPICDGHFVHAFTWKSLLLLNDERLCVACKNQLVKIERPICPTCGRAQSNDQMCQDCDRWNERIDSTKVLIKNRSVYIYNELMKDVFARFKFRGDTALVELFKRDVPRPRPR

SEQ ID NO: 9019 - protein, 162 aa, Glycine max; identical to SEQ ID NO: 6163
  misc_feature (52)..(52): Xaa can be any naturally occurring amino acid
  Coding DNA Sequence Number=SeqID_768

SEQ ID NO: 9020 - protein, 587 aa, Glycine max
  Coding DNA Sequence Number=SeqID_769
  Gene Ontology: Mol. function=iron ion transmembrane transporter activity; Cellular component=flagellum; Biological process=iron ion transport
  Homolog annotation: Hit_ID=A7PRQ4; Match level="QueryCoverage=98%, HitCoverage=100%, E-value=0.0, Identity=62%"; Hit description =Chromosome chr14 scaffold_27, whole genome shotgun sequence
  Pfam annotation: Domain name=FPN1; Domain location=345-452; Score= -1.2; E_value=0.1; Accession=PF06963.3; Description=Ferroportin1 (FPN1)
  Pfam annotation: Domain name=Sugar_tr; Domain location=128-581; Score= -182.5; E_value=0.075; Accession=PF00083.14; Description=Sugar (and other) transporter
  Pfam module annotation: Pfam domain module=FPN1::Sugar_tr; Domain location=345-452::128-581
  Subcellular localization annotation: CTP_CleavageSite=42; ConfidenceScore=5.32e-01
MAIATATLSLHFAKIPIRQTHSSSPIRHRIPSGRRLNLYYPRTSHRFACFGSKCSLTDTDVHLVHVTTDEDEAQGRGVVEPHCPVPFVKLNTDILETESLNLLAEATFVDTLLTALPVLSEEEQHALSATPAHPAGLHAFYASCLTANVVEQLWNFAWPSAIALIHPSLLPVAVMSFFTKVAIIVGGPLVGKLMDHFPRVSAYNCLTIVQAAAQLLSAAMIIRAHSVQPTSFSTLLLRPWFVILVSAGAIERLCGVALGVANERDWVVLLAGVNRPIALAQANAVLNRIDLLCEIAGAMLFGFLLSKFHPVICLKVASGLMMGLLPVTIVFNYLTNKLSTGVLDRPKPSQTCCRTFNEDSALDASSIVFKGLEAIKLGWKEYLGQPVLPASLAWVLLCFNIVLTPGSLLTAFLTQRGLHPSIIGGFSGMCALMGVAATFVSSRLVKQFGILKAGAVGLVFQALLLSMAVAVYWSGTISHQSPLLTFLFLIILSRLGHMSYDVVGAQILQTGIPSSKANLIGTTEIAVASLAESIMLGVAIIANDPSHFGCLALLSLLSVVGAAWMFCRWLLNPTDAQKNLFSYDPQF

SEQ ID NO: 9021 - protein, 137 aa, Glycine max
  misc_feature (120)..(120): Xaa can be any naturally occurring amino acid
  misc_feature (127)..(127): Xaa can be any naturally occurring amino acid
  Coding DNA Sequence Number=SeqID_770
  Gene Ontology: Cellular component=chloroplast envelope
  Homolog annotation: Hit_ID=Q9LHC4; Match level="QueryCoverage=100%, HitCoverage=55%, E-value=2e-47, Identity=75%"; Hit description =Genomic DNA, chromosome 3, BAC clone: T13O13
  Subcellular localization annotation: CTP_CleavageSite=83; ConfidenceScore=5.75e-01
MPLTLVQAASVSYLRSHSTVPTLFKPSSGLLLKKSIFPDSKLTTFQRIFRSTKKASNGSARASLLETPVLWAGRVCVFYALVKAGLAGSKSNPIVSGLESGGVYVEDDGADLGFSKWIQXIKGKPDXDAADKRKLVS

SEQ ID NO: 9022 - protein, 131 aa, Glycine max; identical to SEQ ID NO: 8685
  misc_feature (4)..(4): Xaa can be any naturally occurring amino acid
  misc_feature (12)..(12): Xaa can be any naturally occurring amino acid
  misc_feature (21)..(21): Xaa can be any naturally occurring amino acid
  misc_feature (23)..(23): Xaa can be any naturally occurring amino acid
  misc_feature (26)..(27): Xaa can be any naturally occurring amino acid
  misc_feature (29)..(30): Xaa can be any naturally occurring amino acid
  misc_feature (35)..(36): Xaa can be any naturally occurring amino acid
  misc_feature (112)..(112): Xaa can be any naturally occurring amino acid
  Coding DNA Sequence Number=SeqID_1671

SEQ ID NO: 9023 - protein, 161 aa, Glycine max
  misc_feature (21)..(21): Xaa can be any naturally occurring amino acid
  misc_feature (77)..(77): Xaa can be any naturally occurring amino acid
  Coding DNA Sequence Number=SeqID_1673
VCIRRRYLAERAGSGGAASRXTHLRRLLITHPYDSLSSCLLLYRRRAHLPCISVVRLSSLPRVFTGCSCTTSIRAPXVHVSLLPFLALILTRSPSFLIRQWSCAAVVSYIVVVLFYYDLYIMTARGVCDLDVLSVARGAASLVRGVIRFICGRRCIRTMPL

SEQ ID NO: 9024 - protein, 142 aa, Glycine max
  Coding DNA Sequence Number=SeqID_1675
  Gene Ontology: Mol. function=small conjugating protein ligase activity; Biological process=regulation of protein metabolic process
  Homolog annotation: Hit_ID=UPI00015B6132; Match level="QueryCoverage =64%, HitCoverage=33%, E-value=8e-13, Identity=39%"; Hit description =PREDICTED: similar to Aktip protein
NAKNLNGENESAPQTTLKNNEIASGFSVSPNLSSQSQSASVRDKFINLELNNLKSYGYYYGIYCVPRHFKPYIWDGIIIIRAGLYKNAKLKFYLELPRGFPKTKPELYFVSKVYHPLVNYETGHLDTKLLSPDWKGNSTISY

SEQ ID NO: 9025 - protein, 152 aa, Glycine max
  misc_feature (20)..(20): Xaa can be any naturally occurring amino acid
  misc_feature (37)..(37): Xaa can be any naturally occurring amino acid
  misc_feature (134)..(134): Xaa can be any naturally occurring amino acid
  Coding DNA Sequence Number=SeqID_1676
  Gene Ontology: Mol. function=RNA binding; Biological process=RNA processing
  Homolog annotation: Hit_ID=A7Q6W4; Match level="QueryCoverage=86%, HitCoverage=19%, E-value=6e-39, Identity=63%"; Hit description =Chromosome chr12 scaffold_57, whole genome shotgun sequence
PLCWISFFLLLVLLLFSLLXHRHPQSFGLPGRPEYDXSSKSFKGVFGPLPSDVAMELSNVLNNLNGTKESIKGAKLWFIQRFAFAAALAEALRDRVFALDEGERQFHIICLANDIIWVILNRRTISNDLGHEAXLAFRDVLGSILGRVYHDA

SEQ ID NO: 9026 - protein, 137 aa, Glycine max; identical to SEQ ID NO: 8698
  misc_feature (68)..(68): Xaa can be any naturally occurring amino acid
  misc_feature (77)..(77): Xaa can be any naturally occurring amino acid
  misc_feature (79)..(79): Xaa can be any naturally occurring amino acid
  misc_feature (137)..(137): Xaa can be any naturally occurring amino acid
  Coding DNA Sequence Number=SeqID_1677

SEQ ID NO: 9027 - protein, 89 aa, Glycine max
  misc_feature (2)..(2): Xaa can be any naturally occurring amino acid
  misc_feature (8)..(9): Xaa can be any naturally occurring amino acid
  misc_feature (16)..(16): Xaa can be any naturally occurring amino acid
  misc_feature (24)..(24): Xaa can be any naturally occurring amino acid
  misc_feature (29)..(29): Xaa can be any naturally occurring amino acid
  misc_feature (49)..(49): Xaa can be any naturally occurring amino acid
  misc_feature (86)..(86): Xaa can be any naturally occurring amino acid
  Coding DNA Sequence Number=SeqID_1679
CXSTQLYXXLSELMYXVPMSADAXIRAHXYLRHTGSLLTYIYDTTHMHXIASCAASNISDVVIATIEFSCSLLYDETRYTYSHQAXAGS

SEQ ID NO: 9028 - protein, 170 aa, Glycine max
  misc_feature (41)..(41): Xaa can be any naturally occurring amino acid
  misc_feature (44)..(44): Xaa can be any naturally occurring amino acid
  misc_feature (85)..(85): Xaa can be any naturally occurring amino acid
  misc_feature (121)..(121): Xaa can be any naturally occurring amino acid
  misc_feature (124)..(124): Xaa can be any naturally occurring amino acid
  misc_feature (166)..(166): Xaa can be any naturally occurring amino acid
  Coding DNA Sequence Number=SeqID_1681
AGRHVRSLVDRYPASQSIRAQTSEVYDLFVLRRFKLVLSWXTLXLRRSAASTCTLHAQPALRDVVCRRTCVSASSVLLYNLGVTXSCISAISLDTRSQIPTLLRASGANDADNTEVHVSLXSIXRICCNMVEHHWPYSYLCVDECDNCCARQHSRETPIPLSSQQXTSYV

SEQ ID NO: 9029 - protein, 113 aa, Glycine max
  misc_feature (9)..(9): Xaa can be any naturally occurring amino acid
  misc_feature (26)..(26): Xaa can be any naturally occurring amino acid
  misc_feature (31)..(31): Xaa can be any naturally occurring amino acid
  misc_feature (48)..(48): Xaa can be any naturally occurring amino acid
  misc_feature (55)..(55): Xaa can be any naturally occurring amino acid
  misc_feature (75)..(75): Xaa can be any naturally occurring amino acid
  misc_feature (84)..(84): Xaa can be any naturally occurring amino acid
  misc_feature (99)..(99): Xaa can be any naturally occurring amino acid
  misc_feature (105)..(105): Xaa can be any naturally occurring amino acid
  misc_feature (112)..(112): Xaa can be any naturally occurring amino acid
  Coding DNA Sequence Number=SeqID_1683
LANDTRTTXSCVTVTQSLYSDQSQQXYSLIXDRNACVATDTQLPLRHXCDTVSRXMCDCLIRVDLHAARGARLLXSRRVLGLNXFVVRSTTSPRIVCCXVANSIXDPRRQSXR

SEQ ID NO: 9030 - protein, 245 aa, Glycine max
  misc_feature (53)..(53): Xaa can be any naturally occurring amino acid
  misc_feature (69)..(69): Xaa can be any naturally occurring amino acid
  misc_feature (88)..(88): Xaa can be any naturally occurring amino acid
  misc_feature (174)..(174): Xaa can be any naturally occurring amino acid
  misc_feature (192)..(192): Xaa can be any naturally occurring amino acid
  Coding DNA Sequence Number=SeqID_771
  Gene Ontology: Mol. function=oxidoreductase activity; Cellular component=extracellular region; Biological process=response to oxidative stress
  Homolog annotation: Hit_ID=Q9XIV9; Match level="QueryCoverage=94%, HitCoverage=68%, E-value=5e-57, Identity=58%"; Hit description =Peroxidase
  Pfam annotation: Domain name=peroxidase; Domain location=4-209; Score= 19.6; E_value=6.8e-08; Accession=PF00141.13; Description=Peroxidase
RKPQQGNLCSWIPEVIDTLNQPRGEKHCPGKLSSCADIPCHLAARETLFRILXRGPSWKWLKLGRRDAXETANPICLLTMAIPPPTSXNLNQLISRFTALGLSTQRLGPLWPVVTPIEQARCTKLRSPHLPREAPLDTAFARDRATKSCPRTIQGQGTNNLAPLDLQTPTEFDXYYFKNLVQKKGLLHSDQXLFNGGSTDSIVRGYSTNPSSFSSDFAAAMIKMGDISPLTGSNGEIRKNCRRIN

SEQ ID NO: 9031 - protein, 117 aa, Glycine max
  Coding DNA Sequence Number=SeqID_772
  Subcellular localization annotation: CTP_CleavageSite=65; ConfidenceScore=5.07e-01
LKLLIYLLPALRKVGGVISFTGCKGSLLQVRSPTLHASFCRDTLSRNLVLVLHRRGDAEDKSLVRGRLAGKGQVRVHLQPPQPLRLAARSTTTVSTTARLFSRKSEEIAENVYQIDR

SEQ ID NO: 9032 - protein, 109 aa, Glycine max; identical to SEQ ID NO: 6980
  misc_feature (45)..(45): Xaa can be any naturally occurring amino acid
  misc_feature (54)..(54): Xaa can be any naturally occurring amino acid
  Coding DNA Sequence Number=SeqID_773

SEQ ID NO: 9033 - protein, 187 aa, Glycine max
  misc_feature (105)..(105): Xaa can be any naturally occurring amino acid
  misc_feature (108)..(108): Xaa can be any naturally occurring amino acid
  misc_feature (117)..(117): Xaa can be any naturally occurring amino acid
  misc_feature (132)..(132): Xaa can be any naturally occurring amino acid
  misc_feature (151)..(151): Xaa can be any naturally occurring amino acid
  misc_feature (154)..(154): Xaa can be any naturally occurring amino acid
  misc_feature (183)..(183): Xaa can be any naturally occurring amino acid
  Coding DNA Sequence Number=SeqID_775
YHKIHTPIAHTHSYIPHTLTIHILPFARNYNSLSHYACRTYFYHILYRIYDYSSTLHTAMSAVLFARSPSKRHSRHLISPAICATCPRHFTLMTLPRILTPYITXHLXHTSLRPYAXCFIKPQSRTTTNIFXSIYHLIHTYSPPTPDRSSXFSXHCHPTLHFHHTSSIQRHTRTEDTNMRIYXSSIK

SEQ ID NO: 9034 - protein, 118 aa, Glycine max
  misc_feature (48)..(48): Xaa can be any naturally occurring amino acid
  misc_feature (114)..(114): Xaa can be any naturally occurring amino acid
  Coding DNA Sequence Number=SeqID_777
  Gene Ontology: Mol. function=diphthine synthase activity; Cellular component=cytoplasm; Biological process=peptidyl-diphthamide biosynthetic process from peptidyl-histidine
  Homolog annotation: Hit_ID=A7NSX0; Match level="QueryCoverage=92%, HitCoverage=38%, E-value=8e-34, Identity=64%"; Hit description =Diphthine synthase
VLVYLESILLDRRGETVRILFCTETGRPASYYDKSRKNLSKGLHTLCXIHSCVKDPTLQSLCRGREAYEPPRYVTINTGIEQLLEIEQAREEPAYTEDTECVGLARLGSEDQMXVAGT

SEQ ID NO: 9035 - protein, 277 aa, Glycine max
  misc_feature (47)..(47): Xaa can be any naturally occurring amino acid
  Coding DNA Sequence Number=SeqID_778
TCSSLHAADHLVLSILLFSLTALPIYCVSCTLKFALRSAYYYRVSSXSLYLFYSLLHIFLDVRARTRPLLFLPLTLVLRTRHTSRLSSILRSSSSTIIYLPFHLPLFSSLLSVLPPRSILLVSVFRILAFSYFAFLPLSPFSSSPPFSSPSGSPRTPSRAVLFCLFYLFSSPPLSTSHSLSLPLSWHSNSTPFFFFGGLKYSSVFFFTPPAPPTLLYFSFSHPLSSRRGNFPSSPSLTPPFFCGKYFLFSSLLSFFPFPISSKPLSHPHLILQILLI

SEQ ID NO: 9036 - protein, 115 aa, Glycine max
  misc_feature (22)..(22): Xaa can be any naturally occurring amino acid
  misc_feature (32)..(32): Xaa can be any naturally occurring amino acid
  misc_feature (37)..(37): Xaa can be any naturally occurring amino acid
  misc_feature (48)..(48): Xaa can be any naturally occurring amino acid
  misc_feature (55)..(56): Xaa can be any naturally occurring amino acid
  misc_feature (96)..(97): Xaa can be any naturally occurring amino acid
  Coding DNA Sequence Number=SeqID_780
SSGRNCCMAGGCSMYMSELLEXSLSLSYVLFXLTTGXIHIHTDDTWYXDSSDITXXPSNGREAMTRASLCVLWRLHMLYMTICDDVCRSSSHCSHXXRRRSLILSHYDTRCAHAS

SEQ ID NO: 9037 - protein, 98 aa, Glycine max; identical to SEQ ID NO: 6992
  misc_feature (18)..(18): Xaa can be any naturally occurring amino acid
  Coding DNA Sequence Number=SeqID_781

SEQ ID NO: 9038 - protein, 317 aa, Glycine max
  misc_feature (201)..(201): Xaa can be any naturally occurring amino acid
  misc_feature (214)..(214): Xaa can be any naturally occurring amino acid
  misc_feature (226)..(226): Xaa can be any naturally occurring amino acid
  misc_feature (241)..(241): Xaa can be any naturally occurring amino acid
  misc_feature (285)..(285): Xaa can be any naturally occurring amino acid
  misc_feature (317)..(317): Xaa can be any naturally occurring amino acid
  Coding DNA Sequence Number=SeqID_783
  Gene Ontology: Mol. function=5-methyltetrahydropteroyltriglutamate -homocysteine S-methyltransferase activity; Cellular component =cytoplasm; Biological process=methionine biosynthetic process
  Homolog annotation: Hit_ID=Q71EW8; Match level="QueryCoverage=99%, HitCoverage=41%, E-value=1e-153, Identity=86%"; Hit description =Methionine synthase
  Pfam annotation: Domain name=Meth_synt_2; Domain location=91-317; Score=218.7; E_value=1.4e-62; Accession=PF01717.8; Description =Cobalamin-independent synthase, Catal
RREEEIKSWLAFAAQKIVEVNALAKALSGHKDEAFFSGNAAALASRKSSPRVTNEAVQKAAAALKGSDHRRATNVSARLDSQQKKLNLPILPTTTIGSFPQTVELRRVRREFKANKISEEEYVKSIKEEIRKVVELQEELDIDVLVHGEPERNDMVEYFGEQLSGFAFTVNGWVQSYGSHCMKPPIIYSDVSHPKPMTIFXSSLAQSFTKHPIXEILTNPITILNXSFIRNNQPRSKTTYXITLSIKDEVKDLKKANITIIQINKATVREDLPLRKSEQAHYLDXTIHTFRITNINIHDTTQIHTHIYYSDFNHIIX

SEQ ID NO: 9039 - protein, 109 aa, Glycine max
  Coding DNA Sequence Number=SeqID_784
  Gene Ontology: Mol. function=acid phosphatase activity; Cellular component=extracellular region; Biological process=biological_process
  Homolog annotation: Hit_ID=Q09131; Match level="QueryCoverage=99%, HitCoverage=23%, E-value=9e-38, Identity=69%"; Hit description =Purple acid phosphatase precursor (EC 3.1.3.2) (Manganese(II) purple acid phosphatase)
VEKAVDMPLDSDVVAIPPGYNVPQQVHITQGDLVGKAVIVSWVTVDDPRSSAARHWSETRDHNAIVEGTLGTSRLFHHSSGFINHTTITPFDHTPNHYYEVGLGNTTQH

SEQ ID NO: 9040 - protein, 555 aa, Glycine max
  misc_feature (74)..(555): Xaa can be any naturally occurring amino acid
  Coding DNA Sequence Number=SeqID_785
  Subcellular localization annotation: CTP_CleavageSite=68; ConfidenceScore=5.23e-01
CRMLSSQNCITSPSMSLADPFCAALFCNPPKAASCHYMSGLGTSPVCFTFGFPYNTDFNTTLFVFSPPLMMTSXXXXXXXXXXXXXXXXXXXXXXXXXXXXXXXXXXXXXXXXXXXXXXXXXXXXXXXXXXXXXXXXXXXXXXXXXXXXXXXXXXXXXXXXXXXXXXXXXXXXXXXXXXXXXXXXXXXXXXXXXXXXXXXXXXXXXXXXXXXXXXXXXXXXXXXXXXXXXXXXXXXXXXXXXXXXXXXXXXXXXXXXXXXXXXXXXXXXXXXXXXXXXXXXXXXXXXXXXXXXXXXXXXXXXXXXXXXXXXXXXXXXXXXXXXXXXXXXXXXXXXXXXXXXXXXXXXXXXXXXXXXXXXXXXXXXXXXXXXXXXXXXXXXXXXXXXXXXXXXXXXXXXXXXXXXXXXXXXXXXXXXXXXXXXXXXXXXXXXXXXXXXXXXXXXXXXXXXXXXXXXXXXXXXXXXXXXXXXXXXXXXXXXXXXXXXXXXXXXXXXXXXXXXXXXXXXXXXXXXXXXXXXXXXXXXXXXXXXXXXXXXXXXXXXXXXXXXXXXXXXX

SEQ ID NO: 9041 - protein, 125 aa, Glycine max; identical to SEQ ID NO: 6996
  misc_feature (18)..(18): Xaa can be any naturally occurring amino acid
  misc_feature (74)..(74): Xaa can be any naturally occurring amino acid
  Coding DNA Sequence Number=SeqID_786

SEQ ID NO: 9042 - protein, 143 aa, Glycine max; identical to SEQ ID NO: 7013
  misc_feature (11)..(11): Xaa can be any naturally occurring amino acid
  misc_feature (22)..(22): Xaa can be any naturally occurring amino acid
  Coding DNA Sequence Number=SeqID_788

SEQ ID NO: 9043 - protein, 93 aa, Glycine max
  Coding DNA Sequence Number=SeqID_790
  Subcellular localization annotation: CTP_CleavageSite=60; ConfidenceScore=5.46e-01
ILALTPTLNPYNSSSPLLTVPVTTPITALLSSLHYVSPLTTSASPLHFGLQNLSHLYSILSSLHRDNLSKLISSHHTILYSARPIIFSMHDLL

SEQ ID NO: 9044 - protein, 69 aa, Glycine max
  Coding DNA Sequence Number=SeqID_792
EIMDFQIFPPASLINTKCFVQFIMCAPDHHMFLLNNPRWKSKALSKYGTNDLLQIHRHLITLSPNKCYV

SEQ ID NO: 9045 - protein, 59 aa, Glycine max
  Coding DNA Sequence Number=SeqID_793
  Gene Ontology: Mol. function=two-component response regulator activity; Biological process=two-component signal transduction system (phosphorelay)
  Homolog annotation: Hit_ID=A5P6E3; Match level="QueryCoverage=98%, HitCoverage=43%, E-value=2e-15, Identity=67%"; Hit description =Response regulator receiver protein
MLPKVKEMRPEVPVIMITAYGDADTIRRALESGASGLLTKPIDFKVLREEIDTRLAQVE

SEQ ID NO: 9046 - protein, 120 aa, Glycine max; identical to SEQ ID NO: 6197
  misc_feature (9)..(9): Xaa can be any naturally occurring amino acid
  misc_feature (14)..(14): Xaa can be any naturally occurring amino acid
  misc_feature (103)..(103): Xaa can be any naturally occurring amino acid
  misc_feature (106)..(106): Xaa can be any naturally occurring amino acid
  Coding DNA Sequence Number=SeqID_794
  Subcellular localization annotation: CTP_CleavageSite=54; ConfidenceScore=5.19e-01

SEQ ID NO: 9047 - protein, 366 aa, Glycine max
  misc_feature (222)..(222): Xaa can be any naturally occurring amino acid
  misc_feature (298)..(298): Xaa can be any naturally occurring amino acid
  misc_feature (313)..(313): Xaa can be any naturally occurring amino acid
  misc_feature (325)..(325): Xaa can be any naturally occurring amino acid
  Coding DNA Sequence Number=SeqID_796
  Gene Ontology: Mol. function=nucleic acid binding; Cellular component= spliceosome; Biological process=mRNA processing
  Homolog annotation: Hit_ID=A7NYL7; Match level="QueryCoverage=93%, HitCoverage=80%, E-value=1e-150, Identity=70%"; Hit description =Chromosome chr6 scaffold_3, whole genome shotgun sequence
  Pfam annotation: Domain name=zf-CCCH; Domain location=158-183; Score =17.3; E_value=0.0071; Accession=PF00642.15; Description=Zinc finger C-x8-C-x5-C-x3-H type (and similar)
MAHRLLRDHEADGWERSDFPIICESCLGDSPYVRMTKAEYDKECKICTRPFTVFRWRPGRDARYKKTEICQTCSKLKNVCQVCLLDLEYGLPVQVRDSALSIDSHDAIPKSDVNREYFAEEHDRRARAGIDYESSYGKVRPNDTILKLQRTTPYYKRNRAHICSFYIRGECTRGAECPYRHEMPVTGELSQQNIKDRYYGVNDQVALKLLGKAGEMSTLEPXKDESIKTPYVGGLDGRGTEQASGEHFNNRDNKVLMIKLMWGRPQSSKPESDGSDQARQQTSVAHSGLLPRASVITXQDQDQTQGMVYYNNXPGPPPLQQLRSXVPSMDPHRMGALIASQECSSMWVFWVMRQKEASGHPWIPEE

SEQ ID NO: 9048 - protein, 125 aa, Glycine max; identical to SEQ ID NO: 8338
  Coding DNA Sequence Number=SeqID_797
  Subcellular localization annotation: CTP_CleavageSite=72; ConfidenceScore=5.69e-01

SEQ ID NO: 9049 - protein, 202 aa, Glycine max
  misc_feature (19)..(19): Xaa can be any naturally occurring amino acid
  misc_feature (35)..(35): Xaa can be any naturally occurring amino acid
  misc_feature (47)..(49): Xaa can be any naturally occurring amino acid
  misc_feature (51)..(52): Xaa can be any naturally occurring amino acid
  misc_feature (138)..(139): Xaa can be any naturally occurring amino acid
  misc_feature (151)..(151): Xaa can be any naturally occurring amino acid
  misc_feature (155)..(155): Xaa can be any naturally occurring amino acid
  misc_feature (157)..(157): Xaa can be any naturally occurring amino acid
  misc_feature (166)..(166): Xaa can be any naturally occurring amino acid
  misc_feature (174)..(174): Xaa can be any naturally occurring amino acid
  misc_feature (177)..(177): Xaa can be any naturally occurring amino acid
  misc_feature (179)..(179): Xaa can be any naturally occurring amino acid
  misc_feature (184)..(184): Xaa can be any naturally occurring amino acid
  Coding DNA Sequence Number=SeqID_799
LSLHSINKAHIRRVASTPXRQLARARIALCDDSVXPFTLVSPTTYSXXXIXXTWDRHVESSITRALCRALYASPSRPHARVRTVISDELTRDRVLRSRRSCALHDRRVLQYIISFLYSLRLLSLIVLYCCLYYRVIAXXRALSRDTSALAXPETXIXNVYAHRRGXTEHTERTXRSXRXADRMXGQCIGASSYPNDSTSINT

SEQ ID NO: 9050 - protein, 95 aa, Glycine max; identical to SEQ ID NO: 8340
  misc_feature (42)..(42): Xaa can be any naturally occurring amino acid
  Coding DNA Sequence Number=SeqID_801
  Subcellular localization annotation: CTP_CleavageSite=71; ConfidenceScore=5.02e-01

SEQ ID NO: 9051 - protein, 94 aa, Glycine max
  misc_feature (85)..(85): Xaa can be any naturally occurring amino acid
  misc_feature (87)..(87): Xaa can be any naturally occurring amino acid
  Coding DNA Sequence Number=SeqID_803
  Subcellular localization annotation: CTP_CleavageSite=78; ConfidenceScore=5.49e-01
DTIRQQRTNRSTGGHNLRHSHSSALAFVMITSTGQEALTMRQSFCGVRARVWLSGRHLTQARRRYVISSFIPTYSSLRLSTAFHXLXLHRERCV

SEQ ID NO: 9052 - protein, 210 aa, Glycine max
  Coding DNA Sequence Number=SeqID_805
  Gene Ontology: Mol. function=methyltransferase activity; Cellular component=nucleus; Biological process=metabolic process
  Homolog annotation: Hit_ID=Q08A71; Match level="QueryCoverage=68%, HitCoverage=41%, E-value=3e-50, Identity=59%"; Hit description =Probable protein arginine N-methyltransferase 6
PRVRRSCRKGERRCFLRRNHSNGYQQGQGVGYSHRERVRRGTRRSRASTSSVRVYDQHQPQHRPPWTDFDVDYYHSYAHLGIHQEMIKDRVRTETYRDAIMQHQSSIAGKANEVVKANNLSDVVVVLHGRVEDVEIDEEVDVIISEWMSYMLLYESMLGSVINARDRWLKLGGLILPSSATEYMAPVTHTGRYSDSVDFWRNVYGIDSRS

SEQ ID NO: 9053 - protein, 156 aa, Glycine max; identical to SEQ ID NO: 6207
  misc_feature (1)..(1): Xaa can be any naturally occurring amino acid
  misc_feature (17)..(17): Xaa can be any naturally occurring amino acid
  misc_feature (22)..(23): Xaa can be any naturally occurring amino acid
  misc_feature (38)..(38): Xaa can be any naturally occurring amino acid
  misc_feature (42)..(44): Xaa can be any naturally occurring amino acid
  misc_feature (75)..(75): Xaa can be any naturally occurring amino acid
  misc_feature (81)..(82): Xaa can be any naturally occurring amino acid
  misc_feature (89)..(91): Xaa can be any naturally occurring amino acid
  misc_feature (99)..(99): Xaa can be any naturally occurring amino acid
  misc_feature (136)..(136): Xaa can be any naturally occurring amino acid
  misc_feature (142)..(144): Xaa can be any naturally occurring amino acid
  misc_feature (146)..(146): Xaa can be any naturally occurring amino acid
  misc_feature (154)..(154): Xaa can be any naturally occurring amino acid
  misc_feature (156)..(156): Xaa can be any naturally occurring amino acid
  Coding DNA Sequence Number=SeqID_806

SEQ ID NO: 9054 - protein, 110 aa, Glycine max
  Coding DNA Sequence Number=SeqID_808
GAAFTEEKTGRPLCLRNYQKPRKKGGCAMGDFSNILPQEIRGPLLFRRARGGKHLLQGGKYALPQKNRRKSPANKSGNKICPPKRIATRQRNAEFIVVISYKRPAPPHKK

SEQ ID NO: 9055 - protein, 90 aa, Glycine max; identical to SEQ ID NO: 6210
  misc_feature (30)..(30): Xaa can be any naturally occurring amino acid
  misc_feature (55)..(55): Xaa can be any naturally occurring amino acid
  misc_feature (73)..(73): Xaa can be any naturally occurring amino acid
  misc_feature (76)..(76): Xaa can be any naturally occurring amino acid
  misc_feature (82)..(83): Xaa can be any naturally occurring amino acid
  Coding DNA Sequence Number=SeqID_810

SEQ ID NO: 9056 - protein, 106 aa, Glycine max; identical to SEQ ID NO: 6213
  misc_feature (3)..(3): Xaa can be any naturally occurring amino acid
  misc_feature (8)..(11): Xaa can be any naturally occurring amino acid
  misc_feature (13)..(20): Xaa can be any naturally occurring amino acid
  misc_feature (22)..(22): Xaa can be any naturally occurring amino acid
  misc_feature (24)..(26): Xaa can be any naturally occurring amino acid
  misc_feature (28)..(28): Xaa can be any naturally occurring amino acid
  misc_feature (31)..(31): Xaa can be any naturally occurring amino acid
  misc_feature (33)..(33): Xaa can be any naturally occurring amino acid
  misc_feature (38)..(39): Xaa can be any naturally occurring amino acid
  misc_feature (42)..(43): Xaa can be any naturally occurring amino acid
  misc_feature (47)..(47): Xaa can be any naturally occurring amino acid
  misc_feature (49)..(49): Xaa can be any naturally occurring amino acid
  misc_feature (52)..(52): Xaa can be any naturally occurring amino acid
  misc_feature (54)..(58): Xaa can be any naturally occurring amino acid
  misc_feature (60)..(61): Xaa can be any naturally occurring amino acid
  misc_feature (64)..(64): Xaa can be any naturally occurring amino acid
  misc_feature (69)..(77): Xaa can be any naturally occurring amino acid
  misc_feature (79)..(80): Xaa can be any naturally occurring amino acid
  misc_feature (92)..(92): Xaa can be any naturally occurring amino acid
  misc_feature (97)..(97): Xaa can be any naturally occurring amino acid
  misc_feature (99)..(100): Xaa can be any naturally occurring amino acid
  misc_feature (102)..(102): Xaa can be any naturally occurring amino acid
  misc_feature (104)..(106): Xaa can be any naturally occurring amino acid
  Coding DNA Sequence Number=SeqID_812

SEQ ID NO: 9057 - protein, 156 aa, Glycine max
  misc_feature (13)..(13): Xaa can be any naturally occurring amino acid
  misc_feature (110)..(110): Xaa can be any naturally occurring amino acid
  misc_feature (112)..(112): Xaa can be any naturally occurring amino acid
  misc_feature (125)..(125): Xaa can be any naturally occurring amino acid
  Coding DNA Sequence Number=SeqID_814
  Gene Ontology: Mol. function=RNA polymerase II transcription factor activity; Cellular component=nucleus; Biological process =transcription from RNA polymerase II promoter
  Homolog annotation: Hit_ID=Q8LFH4; Match level="QueryCoverage=100%, HitCoverage=94%, E-value=1e-41, Identity=60%"; Hit description =Putative transcription factor BTF3
  Pfam annotation: Domain name=NAC; Domain location=33-91; Score=66.7; E_value=7.5e-17; Accession=PF01849.8; Description=NAC domain
NREKLMNMDGSGXTGGRGTVRRKKNAVHKTTTTYDIWLQSTLKRIGVNAIPAIEEVNIFNDDVVIQSVYAIVQASIAANTWVVRGSPQTKKMRDILLSVIHQLGPDNWDXAXKLAVQLHMQAPEXATGSTTVQDENDDDDVRELVACQDEETAADE

SEQ ID NO: 9058 - protein, 131 aa, Glycine max; identical to SEQ ID NO: 6214
  misc_feature (13)..(13): Xaa can be any naturally occurring amino acid
  misc_feature (20)..(20): Xaa can be any naturally occurring amino acid
  misc_feature (30)..(30): Xaa can be any naturally occurring amino acid
  misc_feature (35)..(35): Xaa can be any naturally occurring amino acid
  misc_feature (60)..(60): Xaa can be any naturally occurring amino acid
  misc_feature (74)..(74): Xaa can be any naturally occurring amino acid
  misc_feature (90)..(90): Xaa can be any naturally occurring amino acid
  misc_feature (92)..(92): Xaa can be any naturally occurring amino acid
  misc_feature (107)..(107): Xaa can be any naturally occurring amino acid
  misc_feature (110)..(110): Xaa can be any naturally occurring amino acid
  misc_feature (116)..(116): Xaa can be any naturally occurring amino acid
  Coding DNA Sequence Number=SeqID_815

SEQ ID NO: 9059 - protein, 120 aa, Glycine max
  misc_feature (71)..(71): Xaa can be any naturally occurring amino acid
  Coding DNA Sequence Number=SeqID_817
LLYLPLHRNPPSYCRPDAATNSLTPYLRVMLTYACTSYIYLCICASIVVCLVLYFVYLDVRIYYVQYSLSXRSEHDTYIIEYSTVSHSDECDVMISDLLFYCYVVTNRPLWLRRYLYVSL

SEQ ID NO: 9060 - protein, 124 aa, Glycine max; identical to SEQ ID NO: 7043
  misc_feature (5)..(7): Xaa can be any naturally occurring amino acid
  misc_feature (33)..(33): Xaa can be any naturally occurring amino acid
  misc_feature (39)..(39): Xaa can be any naturally occurring amino acid
  misc_feature (43)..(43): Xaa can be any naturally occurring amino acid
  Coding DNA Sequence Number=SeqID_819

SEQ ID NO: 9061 - protein, 176 aa, Glycine max
  misc_feature (34)..(34): Xaa can be any naturally occurring amino acid
  misc_feature (97)..(97): Xaa can be any naturally occurring amino acid
  misc_feature (109)..(109): Xaa can be any naturally occurring amino acid
  Coding DNA Sequence Number=SeqID_821
  Gene Ontology: Mol. function=phospholipase C activity; Biological process=intracellular signaling cascade
  Homolog annotation: Hit_ID=Q9SZP6; Match level="QueryCoverage=98%, HitCoverage=54%, E-value=1e-48, Identity=58%"; Hit description =Putative uncharacterized protein F20M13.250
TILPIIYIMWIRSHEFHDVSIGIRMITRPLRRCXYLYMYWQLSLGSLVLDMRVQEHTRVCHRILLTYGVDLVLNDVNTLLSYTQSEIIILEIRSEFXHYDPPEFYMYLXEQLGEHLIHHDDAVFGNTVAELLSKRVICVWKPQKSFQPKPWSPLWSAGLSEDYWINTDLTSTKFDG

SEQ ID NO: 9062 - protein, 133 aa, Glycine max
  misc_feature (16)..(16): Xaa can be any naturally occurring amino acid
  misc_feature (32)..(32): Xaa can be any naturally occurring amino acid
  Coding DNA Sequence Number=SeqID_822
  Gene Ontology: Mol. function=translation initiation factor activity; Cellular component=nucleolus; Biological process=translational initiation
  Homolog annotation: Hit_ID=Q9AXJ4; Match level="QueryCoverage=100%, HitCoverage=83%, E-value=5e-39, Identity=62%"; Hit description =Eukaryotic translation initiation factor 5A
  Pfam annotation: Domain name=eIF-5a; Domain location=60-129; Score =105.2; E_value=2e-28; Accession=PF01287.10; Description=Eukaryotic initiation factor 5A hypusine, DNA-binding OB fold
SIRINGYILMDGLSCXVVEVCTSKIVNHVYAXGHFAGMDIITVMNLEYIVSSCLICDVTHVNRTDYQLIDIAEDGYVSLLTENGNTKDDLKLPTDDSWLTLIKDGFADGNDLVRSVVSAVGEEHICASEDIVP

SEQ ID NO: 9063 - protein, 134 aa, Glycine max
  Coding DNA Sequence Number=SeqID_823
  Gene Ontology: Cellular component=extracellular region; Biological process=cellulose and pectin-containing cell wall organization and biogenesis
  Homolog annotation: Hit_ID=Q9LNU3; Match level="QueryCoverage=85%, HitCoverage=45%, E-value=4e-64, Identity=95%"; Hit description =Expansin-A11 precursor
  Pfam annotation: Domain name=DPBB_1; Domain location=61-134; Score =96.6; E_value=7.9e-26; Accession=PF03330.8; Description=Rare lipoprotein A (RlpA)-like double-psi be
MAKSLAGLALLAALVIAVDAFRPSGLTNGHATFYGGSDASGTMGGACGYGDLYSAGYGTMTAALSTALFNNGASCGECYRITCDYAADSRWCKEGASVVITATNFCPPNFALPNNDGGWCNPPLKHFDMAQPAW

SEQ ID NO: 9064 - protein, 162 aa, Glycine max
  misc_feature (61)..(63): Xaa can be any naturally occurring amino acid
  misc_feature (65)..(65): Xaa can be any naturally occurring amino acid
  misc_feature (68)..(69): Xaa can be any naturally occurring amino acid
  misc_feature (71)..(72): Xaa can be any naturally occurring amino acid
  misc_feature (74)..(76): Xaa can be any naturally occurring amino acid
  misc_feature (78)..(81): Xaa can be any naturally occurring amino acid
  misc_feature (83)..(85): Xaa can be any naturally occurring amino acid
  misc_feature (88)..(89): Xaa can be any naturally occurring amino acid
  misc_feature (94)..(97): Xaa can be any naturally occurring amino acid
  misc_feature (99)..(101): Xaa can be any naturally occurring amino acid
  misc_feature (103)..(112): Xaa can be any naturally occurring amino acid
  misc_feature (114)..(115): Xaa can be any naturally occurring amino acid
  misc_feature (117)..(117): Xaa can be any naturally occurring amino acid
  misc_feature (119)..(122): Xaa can be any naturally occurring amino acid
  misc_feature (124)..(143): Xaa can be any naturally occurring amino acid
  misc_feature (145)..(162): Xaa can be any naturally occurring amino acid
  Coding DNA Sequence Number=SeqID_824
  Subcellular localization annotation: CTP_CleavageSite=56; ConfidenceScore=5.81e-01
ISSNLIFPQKHTQTMASLLIGAPPRVTVASSSRLSSSHSETVGVSLPCFTQQLSLSASASXXXIXLVXXGXXRXXXFXXXXVXXXLPXXCLYPXXXXRXXXLXXXXXXXXXXGXXVXRXXXXGXXXXXXXXXXXXXXXXXXXXRXXXXXXXXXXXXXXXXXX

SEQ ID NO: 9065 - protein, 149 aa, Glycine max
  misc_feature (80)..(80): Xaa can be any naturally occurring amino acid
  misc_feature (106)..(108): Xaa can be any naturally occurring amino acid
  misc_feature (110)..(110): Xaa can be any naturally occurring amino acid
  Coding DNA Sequence Number=SeqID_826
  Gene Ontology: Mol. function=oxidoreductase activity; Cellular component=extracellular region; Biological process=response to oxidative stress
  Homolog annotation: Hit_ID=Q40367; Match level="QueryCoverage=85%, HitCoverage=39%, E-value=1e-41, Identity=67%"; Hit description =Peroxidase precursor
  Pfam annotation: Domain name=peroxidase; Domain location=1-113; Score= -87.2; E_value=0.073; Accession=PF00141.13; Description=Peroxidase
  Subcellular localization annotation: CTP_CleavageSite=53; ConfidenceScore=5.34e-01
AANGLTQTEMIALSGAHTVGFSHCNKFTNRVYNFLRKSQVFFFFNEIFASQLRSMGPGNVAPPLAIDLDPATPRSFDNVXFKNLQQGKGLFSSDQVLFTGSRSKAXXXAXASSSKIFQANVAAARTKVGRGKAQFDPNRILSPGQGIFN

SEQ ID NO: 9066 - protein, 90 aa, Glycine max
  misc_feature (38)..(38): Xaa can be any naturally occurring amino acid
  Coding DNA Sequence Number=SeqID_827
  Gene Ontology: Mol. function=two-component sensor activity; Cellular component=membrane; Biological process=signal transduction
  Homolog annotation: Hit_ID=A7P4A7; Match level="QueryCoverage=92%, HitCoverage=21%, E-value=6e-19, Identity=56%"; Hit description =Chromosome chr1 scaffold_5, whole genome shotgun sequence
  Pfam annotation: Domain name=HisKA; Domain location=18-84; Score =16.3; E_value=0.0061; Accession=PF00512.15; Description=His Kinase A (phosphoacceptor) domain
MVMLHLRKAMLIQQSAWQNNVRMANLVEQIRGPLSSIXTLSKILSTETKRTQISYDIVEDLLVQGDRLRDVLHQLQDTVYLTKGMSLQIK

SEQ ID NO: 9067 - protein, 103 aa, Glycine max
  misc_feature (58)..(58): Xaa can be any naturally occurring amino acid
  misc_feature (78)..(78): Xaa can be any naturally occurring amino acid
  Coding DNA Sequence Number=SeqID_828
IHSSDSCVTLGRDRAWWEGTAATTHVGPAAEYAPAPSLQLRYHITSDGKGVWVVCSTXVLREYERCMSEDAIPPRTTXFLIADVGVLLFLEQLDVLYDYKFTP

SEQ ID NO: 9068 - protein, 138 aa, Glycine max
  misc_feature (61)..(62): Xaa can be any naturally occurring amino acid
  misc_feature (109)..(109): Xaa can be any naturally occurring amino acid
  Coding DNA Sequence Number=SeqID_73
  Gene Ontology: Mol. function=nucleoside-triphosphatase activity; Cellular component=endoplasmic reticulum; Biological process =response to abscisic acid stimulus
  Homolog annotation: Hit_ID=A7QI19; Match level="QueryCoverage=91%, HitCoverage=77%, E-value=2e-32, Identity=52%"; Hit description =Chromosome chr17 scaffold_101, whole genome shotgun sequence
MLVFFFIEGLKHLTCSRYNTGPDDKEPPWNPITPAEKDEKACLVTLSGLLNFTDGSWSVCXXERIVIFTTNLVEKLDPALIRRGRMDKHIEMSYCGYEAFKVLTKNYLXVVTADVAENLMPKSILEDSETCLKSLFES

SEQ ID NO: 9069 - protein, 133 aa, Glycine max
  misc_feature (4)..(4): Xaa can be any naturally occurring amino acid
  misc_feature (24)..(24): Xaa can be any naturally occurring amino acid
  misc_feature (55)..(55): Xaa can be any naturally occurring amino acid
  misc_feature (63)..(64): Xaa can be any naturally occurring amino acid
  misc_feature (66)..(66): Xaa can be any naturally occurring amino acid
  misc_feature (82)..(82): Xaa can be any naturally occurring amino acid
  misc_feature (92)..(92): Xaa can be any naturally occurring amino acid
  misc_feature (104)..(106): Xaa can be any naturally occurring amino acid
  misc_feature (113)..(113): Xaa can be any naturally occurring amino acid
  misc_feature (133)..(133): Xaa can be any naturally occurring amino acid
  Coding DNA Sequence Number=SeqID_74
SISXVYPAIRNHFCRTRAVAVWSXRDESDRASKDSGSGVAALEAEHCQPHSYDLXKKRRPAAXXYXLYMRSVSARHPTKSYXARKRREETGXEMCIMQWSGIIXXXTSDTAEXHDVTYMVETQNMQRGAHAMX

SEQ ID NO: 9070 - protein, 107 aa, Glycine max
  Coding DNA Sequence Number=SeqID_76
  Homolog annotation: Hit_ID=Q681A9; Match level="QueryCoverage=81%, HitCoverage=13%, E-value=4e-15, Identity=46%"; Hit description =Histone-H4-like protein
MGRISSAVCLLLLVALSTVYEVQGTFLLRHFLRKIPRRSRGLRPFACKGMLKFVNLLEFKSPLKPEYKNLFGNLRSYVNAISSGSNVDLKGKAEGVQSALSALGGSS

SEQ ID NO: 9071 - protein, 114 aa, Glycine max; identical to SEQ ID NO: 7456
  misc_feature (21)..(21): Xaa can be any naturally occurring amino acid
  misc_feature (33)..(33): Xaa can be any naturally occurring amino acid
  misc_feature (52)..(52): Xaa can be any naturally occurring amino acid
  misc_feature (60)..(60): Xaa can be any naturally occurring amino acid
  misc_feature (68)..(68): Xaa can be any naturally occurring amino acid
  misc_feature (70)..(70): Xaa can be any naturally occurring amino acid
  misc_feature (87)..(87): Xaa can be any naturally occurring amino acid
  misc_feature (95)..(95): Xaa can be any naturally occurring amino acid
  Coding DNA Sequence Number=SeqID_77

SEQ ID NO: 9072 - protein, 108 aa, Glycine max; identical to SEQ ID NO: 7457
  misc_feature (49)..(49): Xaa can be any naturally occurring amino acid
  misc_feature (59)..(59): Xaa can be any naturally occurring amino acid
  Coding DNA Sequence Number=SeqID_79
  Subcellular localization annotation: CTP_CleavageSite=51; ConfidenceScore=5.15e-01

SEQ ID NO: 9073 - protein, 90 aa, Glycine max; identical to SEQ ID NO: 7458
  misc_feature (11)..(11): Xaa can be any naturally occurring amino acid
  misc_feature (48)..(48): Xaa can be any naturally occurring amino acid
  misc_feature (55)..(55): Xaa can be any naturally occurring amino acid
  misc_feature (71)..(71): Xaa can be any naturally occurring amino acid
  Coding DNA Sequence Number=SeqID_81

SEQ ID NO: 9074 - protein, 164 aa, Glycine max
  Coding DNA Sequence Number=SeqID_83
LIIPLSRSLYVAYRSSHYLIRLPTCHNVPAISLYILCTDHTPYVPLYFFSTPFFYFTSLLHSSSPTPLPPEHPPFAPLVPIISLPFSTLHSPLPPHSVSSSPSLPLLSPPFFSYVLLSVSSSFPFAFPRRSLPPPALLSPPPLLSRAWVVFLSVDSLPLNVTTR

SEQ ID NO: 9075 - protein, 130 aa, Glycine max
  misc_feature (100)..(100): Xaa can be any naturally occurring amino acid
  Coding DNA Sequence Number=SeqID_829
  Gene Ontology: Mol. function=structural molecule activity; Cellular component=cell junction; Biological process=spread of virus within host, cell to cell
  Homolog annotation: Hit_ID=P23009; Match level="QueryCoverage=98%, HitCoverage=12%, E-value=3e-53, Identity=76%"; Hit description=RNA2 polyprotein (P2) (Genome polyprotein M) [Contains: Movement protein (MP); Large coat ...
  Homolog annotation: Hit description=protein (LCP) (Coat protein VP37); Small coat protein (SCP) (Coat protein VP23)]
  Pfam annotation: Domain name=Como_SCP; Domain location=1-123; Score =127.8; E_value=3.1e-35; Accession=PF02248.7; Description=Small coat protein
VAVWKKACLMVKIVMSGNAAVKRSDWPSLVQVFLANSNSPEHFYACKWTKSEPHSWELFFPIEGCGPNNGFEMWSFEWANPISGQLSFFFGNPQQCTVFXIFLGISQDFEIGGNTLRPAFFVPQDSARFF

SEQ ID NO: 9076 - protein, 371 aa, Glycine max
  misc_feature (166)..(166): Xaa can be any naturally occurring amino acid
  misc_feature (283)..(283): Xaa can be any naturally occurring amino acid
  misc_feature (287)..(287): Xaa can be any naturally occurring amino acid
  Coding DNA Sequence Number=SeqID_830
  Gene Ontology: Mol. function=cysteine-type peptidase activity; Cellular component=nucleus; Biological process=ubiquitin-dependent protein catabolic process
  Homolog annotation: Hit_ID=O24454; Match level="QueryCoverage=98%, HitCoverage=98%, E-value=1e-128, Identity=61%"; Hit description =Ubiquitin carboxyl-terminal hydrolase 3
  Pfam annotation: Domain name=UCH; Domain location=20-363; Score =308.8; E_value=1e-89; Accession=PF00443.19; Description=Ubiquitin carboxyl-terminal hydrolase
MGLTGSKLEKALGANVPENERYFGLENFGNTCYCNSVLQALYFCSPFRDRLLEYFEKPHKPTEEEDNLLLCLGELFSSINTQRKKTGVIAPKKFVQKLRKENELFRSYMHQDAHEFLNYLLNVVAEILQKEQKDLKELKDKETKKEEESTTANTEKNNIDDTGSTXTFVHDIFEGTLTNETKCLCCECITSKDESFLDLSIDVEQNSSLTNCLSNFSSIETLSRGDKFFCDKCCSLQEAQKRMKIKKLPKILVVHLKRFNFIEQLNQYKKLSYRVVFPLEIIXQNTXHDAVQPENRYNLFAVVVHVGSGPNHGHYVSMIKSANTWLLFDDDNIDVIQESELTACFGSSQDVVANTDCGYLLFYQAASEEAK

SEQ ID NO: 9077 - protein, 195 aa, Glycine max
  misc_feature (161)..(161): Xaa can be any naturally occurring amino acid
  misc_feature (163)..(163): Xaa can be any naturally occurring amino acid
  misc_feature (171)..(171): Xaa can be any naturally occurring amino acid
  misc_feature (174)..(174): Xaa can be any naturally occurring amino acid
  misc_feature (176)..(176): Xaa can be any naturally occurring amino acid
  misc_feature (179)..(179): Xaa can be any naturally occurring amino acid
  Coding DNA Sequence Number=SeqID_831
ILLSLPSIHPPPLDLAQRHGTSSARRCGIGRITAVLPTSGLHIFLPDGGLEQRSVPLPRPHAHGLDPSGAVHRPPPLPPRPWLSSTRGRPPRPWLSSTHCCLPLLLEVAPLPSSSSPPARARGGRNPMEELSGRVKALLVGFSSWMVKRPIHVEAAVTPTXGXGALGFPMXSLXAXGGXPFVVPAMFKQQLVHPD

SEQ ID NO: 9078 - protein, 156 aa, Glycine max; identical to SEQ ID NO: 7046
  misc_feature (5)..(5): Xaa can be any naturally occurring amino acid
  misc_feature (18)..(18): Xaa can be any naturally occurring amino acid
  misc_feature (22)..(22): Xaa can be any naturally occurring amino acid
  misc_feature (24)..(24): Xaa can be any naturally occurring amino acid
  misc_feature (52)..(53): Xaa can be any naturally occurring amino acid
  misc_feature (56)..(57): Xaa can be any naturally occurring amino acid
  misc_feature (61)..(61): Xaa can be any naturally occurring amino acid
  misc_feature (65)..(65): Xaa can be any naturally occurring amino acid
  misc_feature (86)..(87): Xaa can be any naturally occurring amino acid
  misc_feature (109)..(109): Xaa can be any naturally occurring amino acid
  misc_feature (134)..(134): Xaa can be any naturally occurring amino acid
  misc_feature (147)..(147): Xaa can be any naturally occurring amino acid
  Coding DNA Sequence Number=SeqID_832
  Subcellular localization annotation: CTP_CleavageSite=36; ConfidenceScore=5.07e-01

SEQ ID NO: 9079 - protein, 125 aa, Glycine max
  misc_feature (31)..(31): Xaa can be any naturally occurring amino acid
  misc_feature (50)..(50): Xaa can be any naturally occurring amino acid
  misc_feature (94)..(94): Xaa can be any naturally occurring amino acid
  misc_feature (96)..(96): Xaa can be any naturally occurring amino acid
  misc_feature (116)..(116): Xaa can be any naturally occurring amino acid
  Coding DNA Sequence Number=SeqID_834
  Subcellular localization annotation: CTP_CleavageSite=54; ConfidenceScore=5.22e-01
YRQCNRHRQNRRSGLTTSSRRDACAHDASVXRMRYMRATTSRTSARARIXRDCRARSVSTSSYQLFLISTSVHSSDIYDHVVRTVVSSEEGRGXWXVVMFLIGVDIYYILIYILTXSKRTAQCNR

SEQ ID NO: 9080 - protein, 164 aa, Glycine max; identical to SEQ ID NO: 6228
  misc_feature (3)..(3): Xaa can be any naturally occurring amino acid
  misc_feature (18)..(18): Xaa can be any naturally occurring amino acid
  misc_feature (23)..(23): Xaa can be any naturally occurring amino acid
  misc_feature (38)..(39): Xaa can be any naturally occurring amino acid
  misc_feature (72)..(72): Xaa can be any naturally occurring amino acid
  misc_feature (97)..(97): Xaa can be any naturally occurring amino acid
  misc_feature (102)..(102): Xaa can be any naturally occurring amino acid
  misc_feature (108)..(108): Xaa can be any naturally occurring amino acid
  misc_feature (122)..(122): Xaa can be any naturally occurring amino acid
  misc_feature (148)..(148): Xaa can be any naturally occurring amino acid
  Coding DNA Sequence Number=SeqID_836

SEQ ID NO: 9081 - protein, 101 aa, Glycine max
  Coding DNA Sequence Number=SeqID_838
SRRIHMLRLAATDGYAVIRWRGSMFVDSVVRAAILSEFISRAYTAAQLSSSALCLTSRKGETNISDSHAMYLTAQHVHRLCLACNRCDSSDDVNRRASEHI

SEQ ID NO: 9082 - protein, 79 aa, Glycine max; identical to SEQ ID NO: 7051
  misc_feature (35)..(35): Xaa can be any naturally occurring amino acid
  Coding DNA Sequence Number=SeqID_840

SEQ ID NO: 9083 - protein, 104 aa, Glycine max; identical to SEQ ID NO: 6231
  misc_feature (16)..(16): Xaa can be any naturally occurring amino acid
  misc_feature (60)..(60): Xaa can be any naturally occurring amino acid
  misc_feature (100)..(100): Xaa can be any naturally occurring amino acid
  Coding DNA Sequence Number=SeqID_841

SEQ ID NO: 9084 - protein, 46 aa, Glycine max
  Coding DNA Sequence Number=SeqID_843
KHFICFGDFGARDRCFHLLFTHAESLIESVILDCFMEVVQSGLLSC

SEQ ID NO: 9085 - protein, 156 aa, Glycine max
  misc_feature (4)..(10): Xaa can be any naturally occurring amino acid
  misc_feature (44)..(44): Xaa can be any naturally occurring amino acid
  misc_feature (51)..(52): Xaa can be any naturally occurring amino acid
  misc_feature (78)..(78): Xaa can be any naturally occurring amino acid
  misc_feature (80)..(80): Xaa can be any naturally occurring amino acid
  misc_feature (109)..(109): Xaa can be any naturally occurring amino acid
  misc_feature (153)..(153): Xaa can be any naturally occurring amino acid
  Coding DNA Sequence Number=SeqID_845
  Subcellular localization annotation: CTP_CleavageSite=29; ConfidenceScore=5.04e-01
SSFXXXXXXXLLQLITTRERHNTPIVPTAATHNRGQRTNSCLPXAPNTFAXXLSTTRILSHSHDPTATHAHGYPRQYXTXVSIVLRDIIVYAARGIYVSDPRLYPIQRXTCLGTERAERHTNRSKQRIVLFSIRLSTRTFTPSPIRAHVVTIXPCY

SEQ ID NO: 9086 - protein, 48 aa, Glycine max
  Coding DNA Sequence Number=SeqID_847
YTNLETSSNFRPKISQSQDSAAHECLIIDNKEYLFIFHVCHSHSSRYQ

SEQ ID NO: 9087 - protein, 154 aa, Glycine max
  misc_feature (15)..(15): Xaa can be any naturally occurring amino acid
  misc_feature (42)..(43): Xaa can be any naturally occurring amino acid
  misc_feature (78)..(78): Xaa can be any naturally occurring amino acid
  misc_feature (109)..(109): Xaa can be any naturally occurring amino acid
  misc_feature (114)..(114): Xaa can be any naturally occurring amino acid
  misc_feature (119)..(119): Xaa can be any naturally occurring amino acid
  misc_feature (121)..(148): Xaa can be any naturally occurring amino acid
  misc_feature (151)..(154): Xaa can be any naturally occurring amino acid
  Coding DNA Sequence Number=SeqID_849
  Subcellular localization annotation: CTP_CleavageSite=33; ConfidenceScore=5.18e-01
SITAMLTAIEVALSXTSRSHRCRENLSSVGTTRLTQRGGRSXXYTRIYRTSAGTTREIINAHAFYIDLVLFCALLLTXTLYTSKRYASTLRAAHSRAHANNTPHTQTRXPEQAXHYSDXQXXXXXXXXXXXXXXXXXXXXXXXXXXXXPVXXXX

SEQ ID NO: 9088 - protein, 233 aa, Glycine max
  Coding DNA Sequence Number=SeqID_851
  Gene Ontology: Mol. function=calcium-dependent phospholipid binding; Biological process=response to cold
  Homolog annotation: Hit_ID=A0E2M3; Match level="QueryCoverage=61%, HitCoverage=53%, E-value=8e-23, Identity=35%"; Hit description =Chromosome undetermined scaffold_75, whole genome shotgun sequence
  Pfam annotation: Domain name=C2; Domain location=8-88; Score=69.8; E _value=9.3e-18; Accession=PF00168.20; Description=C2 domain
MFSKTGTLTVKPIMAELKKDEDTLTKQDPYVVFYFGDKKVKSKTCRGGGKKPSWQDVFTFQRTSEDMLRIELWDRDYLSRDDFLGEGVVSMSSLMSTGRTTNWVDLTHKGRFAGKLLIETDFRGDQIKTTTTTTMQQPGYAMDKGFPTMQQQGYMPQQPGYPMDKGIPMQQPSYPMQQQNFPMQQQGFPTMQQQSFPMQQGGYPIQQGGYPMQQGGYPMQQGGYQQGYPQGKF

SEQ ID NO: 9089 - protein, 127 aa, Glycine max
  Coding DNA Sequence Number=SeqID_852
  Gene Ontology: Mol. function=metal ion binding; Cellular component =integral to membrane; Biological process=ubiquitin cycle
  Homolog annotation: Hit_ID=A2Y975; Match level="QueryCoverage=46%, HitCoverage=45%, E-value=4e-13, Identity=50%"; Hit description =Putative uncharacterized protein
  Pfam annotation: Domain name=zf-C3HC4; Domain location=32-73; Score =35.7; E_value=1.6e-07; Accession=PF00097.15; Description=Zinc finger, C3HC4 type (RING finger)
MEPSQPELEEFSAATAGEVLKPVEAPSDGEGCPICLGQEEATETTWMKTACGHIFHGRCVERWLKMKGSCPVCRRQLSIPHVGAKQDVPFIHPFDLRTIESMRRFPHIFPDPDGYFSMYTQDMFEGH

SEQ ID NO: 9090 - protein, 138 aa, Glycine max; identical to SEQ ID NO: 7061
  misc_feature (2)..(2): Xaa can be any naturally occurring amino acid
  misc_feature (28)..(29): Xaa can be any naturally occurring amino acid
  misc_feature (49)..(50): Xaa can be any naturally occurring amino acid
  misc_feature (57)..(57): Xaa can be any naturally occurring amino acid
  misc_feature (68)..(68): Xaa can be any naturally occurring amino acid
  misc_feature (71)..(71): Xaa can be any naturally occurring amino acid
  misc_feature (85)..(85): Xaa can be any naturally occurring amino acid
  misc_feature (102)..(102): Xaa can be any naturally occurring amino acid
  misc_feature (105)..(105): Xaa can be any naturally occurring amino acid
  misc_feature (138)..(138): Xaa can be any naturally occurring amino acid
  Coding DNA Sequence Number=SeqID_853

SEQ ID NO: 9091 - protein, 314 aa, Glycine max
  misc_feature (75)..(75): Xaa can be any naturally occurring amino acid
  misc_feature (120)..(120): Xaa can be any naturally occurring amino acid
  misc_feature (138)..(138): Xaa can be any naturally occurring amino acid
  misc_feature (173)..(173): Xaa can be any naturally occurring amino acid
  Coding DNA Sequence Number=SeqID_855
  Gene Ontology: Mol. function=P-P-bond-hydrolysis-driven protein transmembrane transporter activity; Cellular component=mitochondrial inner membrane presequence translocase complex; Biological process =intracellular protein transport
  Homolog annotation: Hit_ID=Q8GXP7; Match level="QueryCoverage=96%, HitCoverage=99%, E-value=2e-82, Identity=53%"; Hit description =Putative uncharacterized protein At5g27390/F21A20_100
  Pfam annotation: Domain name=Tim44; Domain location=145-306; Score =112.1; E_value=1.7e-30; Accession=PF04280.6; Description =Mitochondrial import inner membrane, translocase subunit TIM44
MMTPFKRLHLVRTLYRSSQIGESSSYLLGSCKSYSSALSNGSEGNFRSFHSHLLKGQDGFPFAGVKSLTLRSTMXAELSIFMNNRRISTQVKASAQARLVGQQISLSSLGFIYEPYEPCXKIPFWKRWFTCSGWRRTXNDIMLKLNNAFAIADLRKTGYSKNQFYNEAAILHXECRCMIDNNTLIAKGDKRTLRKAVTENMFSALKNEIKQRETAWSRVYWEMVEPVVKIRTLRARLIGVDRKDLNKTFIQLTLEILAKQKFEAYDSKGSVVAGDKSKEVLVRDIWVFEKSMFHAGATWRLCGRISPKASQLSP

SEQ ID NO: 9092 - protein, 74 aa, Glycine max
  Coding DNA Sequence Number=SeqID_856
  Subcellular localization annotation: CTP_CleavageSite=54; ConfidenceScore=5.65e-01
LFVRAAPLARLLHLSSLRPGRALRVVVSVPASHSKSIRPAPSPPARPSCSPTTRAARPRSRRPAAGASAKKKKK

SEQ ID NO: 9093 - protein, 137 aa, Glycine max
  misc_feature (17)..(17): Xaa can be any naturally occurring amino acid
  misc_feature (26)..(26): Xaa can be any naturally occurring amino acid
  misc_feature (64)..(64): Xaa can be any naturally occurring amino acid
  misc_feature (66)..(66): Xaa can be any naturally occurring amino acid
  misc_feature (74)..(74): Xaa can be any naturally occurring amino acid
  misc_feature (90)..(90): Xaa can be any naturally occurring amino acid
  misc_feature (92)..(93): Xaa can be any naturally occurring amino acid
  misc_feature (95)..(95): Xaa can be any naturally occurring amino acid
  misc_feature (126)..(126): Xaa can be any naturally occurring amino acid
  Coding DNA Sequence Number=SeqID_858
  Subcellular localization annotation: CTP_CleavageSite=36; ConfidenceScore=5.34e-01
RALSLCRASLHPMISVXPPLSSTRHXYPLLTLLLTRSMRTSRHSTPHTCWLHPLTTSPHPVTAXTXSLIATRAXTTLPQPTTTRHTNTPXSXXTXRRYSACWDEFRQWGGVVREWKSESTGARGRXDAYYAKTILNH

SEQ ID NO: 9094 - protein, 137 aa, Glycine max
  misc_feature (7)..(7): Xaa can be any naturally occurring amino acid
  misc_feature (67)..(67): Xaa can be any naturally occurring amino acid
  misc_feature (103)..(103): Xaa can be any naturally occurring amino acid
  misc_feature (105)..(105): Xaa can be any naturally occurring amino acid
  misc_feature (112)..(112): Xaa can be any naturally occurring amino acid
  misc_feature (117)..(117): Xaa can be any naturally occurring amino acid
  misc_feature (123)..(123): Xaa can be any naturally occurring amino acid
  misc_feature (126)..(128): Xaa can be any naturally occurring amino acid
  Coding DNA Sequence Number=SeqID_860
  Subcellular localization annotation: CTP_CleavageSite=30; ConfidenceScore=5.07e-01
SAIPLSXLPTPSCYVCCMLLSWPARACGVAAAVVSRGGLLVARTLSAVTHRARGWRENHTNILFVLXAPSHLDGVCPFRNSNQVRYTPRIGYLVRCAENQSVXGXDNPHPLXHNPTXAAGRGXGGXXXKKKKKKKSP

SEQ ID NO: 9095 - protein, 96 aa, Glycine max
  Coding DNA Sequence Number=SeqID_862
  Subcellular localization annotation: CTP_CleavageSite=26; ConfidenceScore=5.90e-01
PFLLSSQCSMKPNKTTSIRSSLRSTRCSTSALETTRRFFFFLHFSSSIFFSVSVLFYLFVFWMNYYVLSFSINIVSFFFFFFWLGYSLMIDTSLRL

SEQ ID NO: 9096 - protein, 180 aa, Glycine max
  misc_feature (126)..(126): Xaa can be any naturally occurring amino acid
  misc_feature (180)..(180): Xaa can be any naturally occurring amino acid
  Coding DNA Sequence Number=SeqID_864
  Subcellular localization annotation: CTP_CleavageSite=14; ConfidenceScore=5.05e-01
VQDYHCPFHTLLPPAHPGPAPRIPPLPLFFPPIFLFPTPSTHVPPFPPPFHPPLSPLPPFYIPFLSPLIFPPCTTHVPLSSPTIFTPPLYSPPSPPLIPPFVYSPVFLHPTLLPIFLQPTFNTTQXIFPPLISSSRPHFSTTINTQFIPPTPLYPASFHPTGVFAFIAPPPSTPCPLFPX

SEQ ID NO: 9097 - protein, 203 aa, Glycine max
  misc_feature (31)..(31): Xaa can be any naturally occurring amino acid
  misc_feature (44)..(44): Xaa can be any naturally occurring amino acid
  misc_feature (117)..(117): Xaa can be any naturally occurring amino acid
  misc_feature (171)..(171): Xaa can be any naturally occurring amino acid
  Coding DNA Sequence Number=SeqID_865
  Homolog annotation: Hit_ID=A7PU20; Match level="QueryCoverage=98%, HitCoverage=45%, E-value=1e-33, Identity=38%"; Hit description =Chromosome chr7 scaffold_31, whole genome shotgun sequence
  Subcellular localization annotation: CTP_CleavageSite=67; ConfidenceScore=5.17e-01
IFHKGQKMHSSFNLTNLMETMLVEGSLTTTXPFSTMPPLSTASXARQLSHTADQHALSNPPEAITDRCTMLPTRKATDEHLRQLFSKPGPHVSLVGPHVAMECGSADVVADLLRDGXSLMPLAIRVGSLQAVKLLEASGCKIDESVLHEAAAMDRIDTMKFQLERYGTTAXELEVDAVYSEGRTAIHVAAREGHASVIQFHRS

SEQ ID NO: 9098 - protein, 85 aa, Glycine max
  misc_feature (33)..(33): Xaa can be any naturally occurring amino acid
  Coding DNA Sequence Number=SeqID_866
  Gene Ontology: Mol. function=transferase activity
  Homolog annotation: Hit_ID=Q8LGN6; Match level="QueryCoverage=64%, HitCoverage=23%, E-value=3e-10, Identity=60%"; Hit description =Glutathione-S-transferase Cla47
MPPEGDLKLLGLWPSPFVVRVRMALPMQDLTYXNIEQHLFNERELLLKANPGGRRKGPRTSFQGRVGTPRSRNTKQLRAPVTLQK

SEQ ID NO: 9099 - protein, 58 aa, Glycine max
  Coding DNA Sequence Number=SeqID_867
YSCRHLNKFVTLYFTDFIFLYLDKFVAPYIAHAKTEEEGKHRGRYRKQSGYRRGAPGA

SEQ ID NO: 9100 - protein, 170 aa, Glycine max
  misc_feature (29)..(29): Xaa can be any naturally occurring amino acid
  misc_feature (56)..(56): Xaa can be any naturally occurring amino acid
  misc_feature (69)..(69): Xaa can be any naturally occurring amino acid
  misc_feature (98)..(98): Xaa can be any naturally occurring amino acid
  Coding DNA Sequence Number=SeqID_1685
  Subcellular localization annotation: CTP_CleavageSite=65; ConfidenceScore=5.34e-01
YENGDIVGRHLQTTLRTRSVCTVDARCVXLRVSTHSSRSHTPSLRSSFCRLSISSXSTHRITAIYSSYXNTHIQFVRTHTSLYLTCAHCAMLNSNDTXQHVIRDYSYVLYILISYTACSSSYQSHSHQAVSDHVHSRRHARHEASSRTCHTQLPLPSPASIRLSPPHQYG

SEQ ID NO: 9101 - protein, 142 aa, Glycine max
  misc_feature (8)..(8): Xaa can be any naturally occurring amino acid
  misc_feature (15)..(15): Xaa can be any naturally occurring amino acid
  misc_feature (72)..(72): Xaa can be any naturally occurring amino acid
  misc_feature (87)..(87): Xaa can be any naturally occurring amino acid
  misc_feature (107)..(107): Xaa can be any naturally occurring amino acid
  misc_feature (110)..(110): Xaa can be any naturally occurring amino acid
  misc_feature (112)..(112): Xaa can be any naturally occurring amino acid
  misc_feature (115)..(116): Xaa can be any naturally occurring amino acid
  Coding DNA Sequence Number=SeqID_1687
  Gene Ontology: Mol. function=nucleotide binding; Cellular component =endoplasmic reticulum lumen; Biological process=response to stress
  Homolog annotation: Hit_ID=Q3E8J0; Match level="QueryCoverage=82%, HitCoverage=19%, E-value=9e-41, Identity=72%"; Hit description =Uncharacterized protein At5g42020.2
MAGSWARXSLIFFFXISFGCVWAVSIAKEEATKLGTVIGIDLGTTYSCVGVYKNGHVEIIANDQGDRVTPSXVAFTDSGRLIGEAAXNLAGVNPERTMFGVKRLVGXKVXDXEVXXDVKLGPCWIVDMGGKPGVRGGLWVGG

SEQ ID NO: 9102 - protein, 94 aa, Glycine max; identical to SEQ ID NO: 8705
  misc_feature (38)..(38): Xaa can be any naturally occurring amino acid
  misc_feature (53)..(54): Xaa can be any naturally occurring amino acid
  misc_feature (59)..(59): Xaa can be any naturally occurring amino acid
  Coding DNA Sequence Number=SeqID_1688

SEQ ID NO: 9103 - protein, 100 aa, Glycine max
  Coding DNA Sequence Number=SeqID_1690
  Subcellular localization annotation: CTP_CleavageSite=45; ConfidenceScore=5.34e-01
NGRHFEKFNTKPQSRQNGKKKKKRNNRNLYSQSKNKICENSTFKCSQILKNRHQFLSFSVGTNFNFVLFFYVIHIKLTQKTIPKFHQTWYKILKFQITKE

SEQ ID NO: 9104 - protein, 143 aa, Glycine max
  misc_feature (99)..(99): Xaa can be any naturally occurring amino acid
  misc_feature (113)..(113): Xaa can be any naturally occurring amino acid
  Coding DNA Sequence Number=SeqID_1692
  Gene Ontology: Cellular component=integral to membrane
  Homolog annotation: Hit_ID=A7NVD9; Match level="QueryCoverage=81%, HitCoverage=42%, E-value=3e-19, Identity=49%"; Hit description =Chromosome chr18 scaffold_1, whole genome shotgun sequence
MGGGKRNTVETFLLATLILWLASLCSQIFFNKRWELLSVIAGCFFYQTSNCLILLFLSTHKDPLFVNTSVFLLHSFLTSASVIFILPTELFNAPCGLLXHSNLVDNVLPLLTXALTSSSAYFVFDQWDFVSALLSNGRISSLL

SEQ ID NO: 9105 - protein, 221 aa, Glycine max
  Coding DNA Sequence Number=SeqID_1693
  Gene Ontology: Mol. function=metal ion binding; Cellular component =cytoplasm; Biological process=regulation of transcription, DNA -dependent
  Homolog annotation: Hit_ID=Q9S758; Match level="QueryCoverage=79%, HitCoverage=98%, E-value=1e-67, Identity=72%"; Hit description =Squamosa promoter-binding-like protein 5
  Pfam annotation: Domain name=SBP; Domain location=62-140; Score =178.7; E_value=1.5e-50; Accession=PF03110.5; Description=SBP domain
MEGQRSQRWGYLKDKAIATSLAEEEMENSMDGEEDDTGDEDKRKRVMERARGPNTERVPLRLCLVDRCTANLTEAKQYYRRHKVCEVHAKASSATVAGVKQRFCQQCSRFHELAEFDETKRKCRRRLAGHNERRRKISGDSYGEGSGRRAVSLTQTQERNRIDMKLPMTNSPFTRPTDQIKPTSKHPTDSLSSVIHLCSNIPASSSYPKNGPLRYLGSRKL

SEQ ID NO: 9106 - protein, 192 aa, Glycine max
  Coding DNA Sequence Number=SeqID_1694
  Subcellular localization annotation: CTP_CleavageSite=49; ConfidenceScore=5.11e-01
KTKESAWLPAAIAALRSAARRVLGGQAPRTVYRATFAEERQRLSPAFIKAASSVHPRRFSSQGGDDDPLTSEEKMRLFKRGAHLIFRMTKAISTVVACGIVIKWSVTEVFRPYPTSDCARAVRKCREMLQGLRGNPPALEVGPVLGDEMLAAEVAEFKSMVKGYESGEPAEETGRIESSLGKICTLVSQGYS

SEQ ID NO: 9107 - protein, 189 aa, Glycine max
  misc_feature (52)..(52): Xaa can be any naturally occurring amino acid
  misc_feature (73)..(73): Xaa can be any naturally occurring amino acid
  misc_feature (89)..(89): Xaa can be any naturally occurring amino acid
  misc_feature (94)..(94): Xaa can be any naturally occurring amino acid
  misc_feature (106)..(106): Xaa can be any naturally occurring amino acid
  misc_feature (108)..(108): Xaa can be any naturally occurring amino acid
  Coding DNA Sequence Number=SeqID_1696
  Gene Ontology: Mol. function=oxidoreductase activity; Cellular component=cytoplasm; Biological process=L-ascorbic acid biosynthetic process
  Homolog annotation: Hit_ID=A7PNT4; Match level="QueryCoverage=60%, HitCoverage=39%, E-value=1e-43, Identity=73%"; Hit description =Chromosome chr8 scaffold_23, whole genome shotgun sequence
  Pfam annotation: Domain name=Aldo_ket_red; Domain location=21-185; Score=-27.8; E_value=6.4e-07; Accession=PF00248.11; Description =Aldoketo reductase family
IVWIARKKKKENGKDIRFFDLNTGAKIPSVGLGTWQSDPGLVAEAVAAAIRXGYRHIDCAQIYGNEKEMGSFXKNLFEEGVLKREDLWXTSKLXNTDHAPENVPLXLXGTLKDFHLDNENLYLIHWPCSNEERISLLNLEILGATKHTLTPWKGGWKPLLMNSGQRLATNSGVKQFFPPQKKLPRNFAC

SEQ ID NO: 9108 - protein, 112 aa, Glycine max; identical to SEQ ID NO: 7069
  misc_feature (1)..(1): Xaa can be any naturally occurring amino acid
  misc_feature (5)..(5): Xaa can be any naturally occurring amino acid
  misc_feature (12)..(12): Xaa can be any naturally occurring amino acid
  misc_feature (20)..(21): Xaa can be any naturally occurring amino acid
  misc_feature (27)..(27): Xaa can be any naturally occurring amino acid
  misc_feature (33)..(33): Xaa can be any naturally occurring amino acid
  misc_feature (43)..(43): Xaa can be any naturally occurring amino acid
  misc_feature (49)..(49): Xaa can be any naturally occurring amino acid
  misc_feature (52)..(52): Xaa can be any naturally occurring amino acid
  misc_feature (56)..(56): Xaa can be any naturally occurring amino acid
  misc_feature (77)..(77): Xaa can be any naturally occurring amino acid
  misc_feature (80)..(81): Xaa can be any naturally occurring amino acid
  misc_feature (89)..(89): Xaa can be any naturally occurring amino acid
  misc_feature (91)..(91): Xaa can be any naturally occurring amino acid
  misc_feature (99)..(99): Xaa can be any naturally occurring amino acid
  Coding DNA Sequence Number=SeqID_869

SEQ ID NO: 9109 - protein, 117 aa, Glycine max
  misc_feature (59)..(59): Xaa can be any naturally occurring amino acid
  Coding DNA Sequence Number=SeqID_871
  Gene Ontology: Mol. function=gamma-glutamyl hydrolase activity; Cellular component=extracellular region; Biological process =glutamine metabolic process
  Homolog annotation: Hit_ID=P93164; Match level="QueryCoverage=98%, HitCoverage=32%, E-value=2e-31, Identity=66%"; Hit description=Gamma- glutamyl hydrolase precursor
MPNDSVLSLFFFVTLFTCLLSATSHDDHIFLPSQLHDDDSVSCTATDPNPNYQPVIGIXLTHPGDGASGRLSNATGVSYIAASYVKIRGSRVVLKVSPPIHNGVTVKNLNKSLDLGQ

SEQ ID NO: 9110 - protein, 154 aa, Glycine max
  Coding DNA Sequence Number=SeqID_872
  Gene Ontology: Mol. function=oxidoreductase activity; Cellular component=extracellular region; Biological process=hydrogen peroxide catabolic process
  Homolog annotation: Hit_ID=Q9FJR1; Match level="QueryCoverage=81%, HitCoverage=38%, E-value=2e-57, Identity=84%"; Hit description =Peroxidase 65 precursor
LLSTKIDRGDVYLVDLSLNLNSHFLLRTSNMRLSRFVLLICLVLVAPAVSADLAILRTDYYQKTCPDFNKIVREAVSTKQAQQPTTAAGTLRLFFHDCFLEGCDASVLIATNSFNKAERDDDLNESLPGDGFDIVNRIKTALELSCPDVVSCAD

SEQ ID NO: 9111 - protein, 148 aa, Glycine max
  misc_feature (10)..(10): Xaa can be any naturally occurring amino acid
  misc_feature (30)..(30): Xaa can be any naturally occurring amino acid
  misc_feature (33)..(33): Xaa can be any naturally occurring amino acid
  misc_feature (37)..(37): Xaa can be any naturally occurring amino acid
  misc_feature (39)..(40): Xaa can be any naturally occurring amino acid
  misc_feature (54)..(54): Xaa can be any naturally occurring amino acid
  misc_feature (61)..(61): Xaa can be any naturally occurring amino acid
  misc_feature (63)..(64): Xaa can be any naturally occurring amino acid
  misc_feature (69)..(69): Xaa can be any naturally occurring amino acid
  misc_feature (85)..(85): Xaa can be any naturally occurring amino acid
  misc_feature (95)..(95): Xaa can be any naturally occurring amino acid
  misc_feature (122)..(122): Xaa can be any naturally occurring amino acid
  misc_feature (128)..(128): Xaa can be any naturally occurring amino acid
  Coding DNA Sequence Number=SeqID_873
CSRSRVTSHXNEWNMCSDSLSSSRDVAEAXSSXRARXMXXWEQSDSHITFRRHXGVAWGAXAXXKNESXWVGAQQHARRVNRIIXHHIIAISLLXCSAEVGSTEQPHICVFVISRVVLYATXLDILSXTSTVRRHALRLSAAIQTDLS

SEQ ID NO: 9112 - protein, 143 aa, Glycine max
  misc_feature (39)..(39): Xaa can be any naturally occurring amino acid
  misc_feature (85)..(85): Xaa can be any naturally occurring amino acid
  misc_feature (97)..(97): Xaa can be any naturally occurring amino acid
  misc_feature (124)..(124): Xaa can be any naturally occurring amino acid
  Coding DNA Sequence Number=SeqID_875
  Homolog annotation: Hit_ID=Q8S8Z8; Match level="QueryCoverage=97%, HitCoverage=68%, E-value=1e-42, Identity=62%"; Hit description =Syringolide-induced protein B13-1-9
  Pfam annotation: Domain name=Hin1; Domain location=3-123; Score=44.9; E_value=2.9e-10; Accession=PF07320.4; Description=Harpin-induced protein 1 (Hin1)
DCYTSSNTFRCNMVIIFRAHIANKKLTIWLDKVEALAFXEDVRLASCDVITHINSFRQYNKSSSPMRAVFTGQQLLMLNNDPVSXFTQARKTGVYGXYVKLYFRMRFRVGVFISNGYKPKVKCXLKVPFSKNGTFSLFQTANM

SEQ ID NO: 9113 - protein, 132 aa, Glycine max
  Coding DNA Sequence Number=SeqID_876
  Homolog annotation: Hit_ID=Q9SV88; Match level="QueryCoverage=97%, HitCoverage=98%, E-value=2e-22, Identity=48%"; Hit description =Putative uncharacterized protein F24G24.130
MSNGRRSIGDDDKGLLWRLPKVRIKDVGKVGPAFGLGFGCGFGFGAGLIGGVGFGPGVPGLQFGLGFGAGCGIGVGFGYGVGRGAAYDHSRSYYNVGKPSLDEVDSLIDELVVHTKKLVKATTKEIDKWRRT

SEQ ID NO: 9114 - protein, 167 aa, Glycine max
  misc_feature (17)..(19): Xaa can be any naturally occurring amino acid
  misc_feature (29)..(29): Xaa can be any naturally occurring amino acid
  misc_feature (34)..(34): Xaa can be any naturally occurring amino acid
  misc_feature (41)..(41): Xaa can be any naturally occurring amino acid
  misc_feature (91)..(91): Xaa can be any naturally occurring amino acid
  misc_feature (101)..(101): Xaa can be any naturally occurring amino acid
  Coding DNA Sequence Number=SeqID_877
  Gene Ontology: Mol. function=glyceraldehyde-3-phosphate dehydrogenase (phosphorylating) activity; Cellular component=cytoplasm; Biological process=glucose metabolic process
  Homolog annotation: Hit_ID=P26521; Match level="QueryCoverage=66%, HitCoverage=32%, E-value=4e-19, Identity=50%"; Hit description =Glyceraldehyde-3-phosphate dehydrogenase, cytosolic
  Pfam annotation: Domain name=Gp_dh_N; Domain location=11-144; Score= -70.1; E_value=0.0013; Accession=PF00044.14; Description =Glyceraldehyde 3-phosphate dehydrogenase, NA
MARFKNRNQILGRIGRXXXQSRSARDDVXLVAVXPFHTTDXLTYMFNNHGGHGPWKDHEVPVKEEKDPFLRGKTNSLFLGTGNPEKNPWGXTGAELFVGAXGDFHQKRKGPPQILKGGGKKIYFFFPPKRGPPVFVVGVFKGPKKTPVVFFFFSRGGGEKIWGFVPF

SEQ ID NO: 9115 - protein, 128 aa, Glycine max; identical to SEQ ID NO: 7080
  misc_feature (16)..(16): Xaa can be any naturally occurring amino acid
  misc_feature (19)..(20): Xaa can be any naturally occurring amino acid
  misc_feature (43)..(45): Xaa can be any naturally occurring amino acid
  misc_feature (47)..(47): Xaa can be any naturally occurring amino acid
  misc_feature (57)..(58): Xaa can be any naturally occurring amino acid
  misc_feature (70)..(70): Xaa can be any naturally occurring amino acid
  misc_feature (75)..(75): Xaa can be any naturally occurring amino acid
  misc_feature (85)..(86): Xaa can be any naturally occurring amino acid
  misc_feature (105)..(105): Xaa can be any naturally occurring amino acid
  Coding DNA Sequence Number=SeqID_878

SEQ ID NO: 9116 - protein, 135 aa, Glycine max
  misc_feature (127)..(127): Xaa can be any naturally occurring amino acid
  misc_feature (132)..(132): Xaa can be any naturally occurring amino acid
  Coding DNA Sequence Number=SeqID_880
  Homolog annotation: Hit_ID=A2WQL3; Match level="QueryCoverage=100%, HitCoverage=67%, E-value=6e-51, Identity=70%"; Hit description =Putative uncharacterized protein
  Pfam annotation: Domain name=DUF260; Domain location=4-109; Score =109.5; E_value=1e-29; Accession=PF03195.5; Description=Protein of unknown function DUF260
MRMSCNGCRVLRKGCGEGCTIRPCLEWIRSPDAQANATVFLAKFYGRAGLLNLLAAEDAALRPALFRSLLYEACGRMVNPVYGSVGLLWSGQWGACQAAVEAVLKGRPIVRVTSDAPLTACDIRHVXKADRXAAA

SEQ ID NO: 9117 - protein, 227 aa, Glycine max
  misc_feature (111)..(111): Xaa can be any naturally occurring amino acid
  misc_feature (148)..(148): Xaa can be any naturally occurring amino acid
  misc_feature (151)..(151): Xaa can be any naturally occurring amino acid
  misc_feature (153)..(153): Xaa can be any naturally occurring amino acid
  misc_feature (158)..(158): Xaa can be any naturally occurring amino acid
  misc_feature (163)..(163): Xaa can be any naturally occurring amino acid
  misc_feature (165)..(165): Xaa can be any naturally occurring amino acid
  misc_feature (168)..(168): Xaa can be any naturally occurring amino acid
  misc_feature (184)..(184): Xaa can be any naturally occurring amino acid
  misc_feature (194)..(194): Xaa can be any naturally occurring amino acid
  misc_feature (200)..(200): Xaa can be any naturally occurring amino acid
  misc_feature (213)..(213): Xaa can be any naturally occurring amino acid
  misc_feature (216)..(216): Xaa can be any naturally occurring amino acid
  misc_feature (224)..(224): Xaa can be any naturally occurring amino acid
  Coding DNA Sequence Number=SeqID_881
EGPTPFEDTTTNIFAVFSKALRILELCLVLVLLSWILTRLPFALALSAEFLRRLIAFAASPLVVFAVSNAIIAALLAQSRRLSAPHSADSLYREFLHTRTAVTETHAPPSXPPSPPPPEPEFSRKSRSSSKKCMKRLPPERPRNYRRXQRXKXRWTPXGNCRXEXVRXSENEKEGECLPEICSXGRLSNEDFNXPKTFIXKQLRFWEKNSSAXVVXNPPKFKTXGKK

SEQ ID NO: 9118 - protein, 96 aa, Glycine max
  misc_feature (91)..(91): Xaa can be any naturally occurring amino acid
  misc_feature (93)..(93): Xaa can be any naturally occurring amino acid
  Coding DNA Sequence Number=SeqID_883
APPPLNENTASLLGRSAAYDNNFGKTSLTLQEKYGLAPENRTLSFGASNYSSDLKNLGLGKEEYKTSLTTENRFTSKDASPSANLKYSDYXKXKPS

SEQ ID NO: 9119 - protein, 115 aa, Glycine max
  misc_feature (32)..(32): Xaa can be any naturally occurring amino acid
  misc_feature (37)..(37): Xaa can be any naturally occurring amino acid
  misc_feature (39)..(39): Xaa can be any naturally occurring amino acid
  misc_feature (46)..(46): Xaa can be any naturally occurring amino acid
  misc_feature (56)..(56): Xaa can be any naturally occurring amino acid
  misc_feature (66)..(66): Xaa can be any naturally occurring amino acid
  misc_feature (77)..(77): Xaa can be any naturally occurring amino acid
  misc_feature (86)..(86): Xaa can be any naturally occurring amino acid
  misc_feature (88)..(88): Xaa can be any naturally occurring amino acid
  Coding DNA Sequence Number=SeqID_885
  Gene Ontology: Mol. function=structural constituent of ribosome; Cellular component=intracellular; Biological process=translation
  Homolog annotation: Hit_ID=Q201Z2; Match level="QueryCoverage=100%, HitCoverage=99%, E-value=3e-30, Identity=58%"; Hit description =Putative ribosomal protein S26
  Pfam annotation: Domain name=Ribosomal_S26e; Domain location=1-115; Score=202.1; E_value=1.4e-57; Accession=PF01283.9; Description =Ribosomal protein S26e
MTTKRRNGGRSKHGRGHVNPVRCTNCARCVPXDKAIXKXVIRNIVXAAAVRDITEXSVYSMYQLPXLYAKLHYCVSXAIHSKVVRXRXKAERRNRNPPQRNFARGPRPGGQQPRK

SEQ ID NO: 9120 - protein, 102 aa, Glycine max; identical to SEQ ID NO: 6258
  misc_feature (12)..(12): Xaa can be any naturally occurring amino acid
  misc_feature (15)..(15): Xaa can be any naturally occurring amino acid
  misc_feature (18)..(18): Xaa can be any naturally occurring amino acid
  Coding DNA Sequence Number=SeqID_886

SEQ ID NO: 9121 - protein, 135 aa, Glycine max
  misc_feature (17)..(17): Xaa can be any naturally occurring amino acid
  misc_feature (44)..(44): Xaa can be any naturally occurring amino acid
  misc_feature (53)..(53): Xaa can be any naturally occurring amino acid
  misc_feature (96)..(96): Xaa can be any naturally occurring amino acid
  misc_feature (126)..(126): Xaa can be any naturally occurring amino acid
  Coding DNA Sequence Number=SeqID_888
  Gene Ontology: Mol. function=ATPase activity, coupled to transmembrane movement of substances; Cellular component=integral to membrane; Biological process=transport
  Homolog annotation: Hit_ID=A5BW35; Match level="QueryCoverage=77%, HitCoverage=10%, E-value=1e-10, Identity=40%"; Hit description =Putative uncharacterized protein
  Subcellular localization annotation: CTP_CleavageSite=62; ConfidenceScore=5.29e-01
RLAGLRFAGWLCAVLGXVGAAFFGSFPPLLACVFGLVVPAFCGXGGARPLGRXVVRWCLFVGCVGVVALVAGFLRPFCFGFVGASLAAGVRRVVFXALLRPWVGGVPLLAFRPPPLSLRLAGGAKXKRAAFCVGL

SEQ ID NO: 9122 - protein, 88 aa, Glycine max
  Coding DNA Sequence Number=SeqID_889
  Subcellular localization annotation: CTP_CleavageSite=61; ConfidenceScore=5.66e-01
CNNSYSTVQDAMQSIPWSVAGTTPSQRRSSSCHQTTLSFLCGSLMFVYVHLSSQYLLVGARATTHVDIMLPAEKGGRPLSSSILLSVE

SEQ ID NO: 9123 - protein, 61 aa, Glycine max
  Coding DNA Sequence Number=SeqID_891
  Subcellular localization annotation: CTP_CleavageSite=27; ConfidenceScore=5.02e-01
RVKQRRGSKKKTPEQAVRRHRRTSRLRQSQKPAVKFQDRESPESKVQVKTSTKPLLRETNL

SEQ ID NO: 9124 - protein, 86 aa, Glycine max
  misc_feature (51)..(51): Xaa can be any naturally occurring amino acid
  misc_feature (63)..(63): Xaa can be any naturally occurring amino acid
  misc_feature (76)..(76): Xaa can be any naturally occurring amino acid
  Coding DNA Sequence Number=SeqID_893
SLSPSVTTDPLRARESDQRTAHDAEGVHNQGSSIKRQREVVAKQTRDALLXYLAHKQAHSGLXILGLPIISVHTIXFVFVKYEVSR

SEQ ID NO: 9125 - protein, 204 aa, Glycine max
  misc_feature (198)..(198): Xaa can be any naturally occurring amino acid
  Coding DNA Sequence Number=SeqID_895
  Gene Ontology: Biological process=electron transport
  Homolog annotation: Hit_ID=Q0UFB8; Match level="QueryCoverage=95%, HitCoverage=20%, E-value=2e-74, Identity=70%"; Hit description =Putative uncharacterized protein
  Subcellular localization annotation: CTP_CleavageSite=39; ConfidenceScore=5.07e-01
SSQLRRAPPPELKTKGTFATSTSDANVYFTRLTEDEVTVFSSVSHGVLGRWNVRGSPTLAGAYPVHGQSEVVLKSGVASAVRSAVLYSNGQWALLRNDEIAWTRPEFLSGTVSAIWAGLPEEEALAQALADESHRNLVSAYIHRVQRHIEDLKYFPEWAQNIPQRILGSVVGKPKETTVDDIQQDTFGFHKLVVVATXTGRIAA

SEQ ID NO: 9126 - protein, 138 aa, Glycine max; identical to SEQ ID NO: 8726
  misc_feature (1)..(2): Xaa can be any naturally occurring amino acid
  misc_feature (18)..(18): Xaa can be any naturally occurring amino acid
  misc_feature (23)..(23): Xaa can be any naturally occurring amino acid
  misc_feature (40)..(40): Xaa can be any naturally occurring amino acid
  misc_feature (54)..(54): Xaa can be any naturally occurring amino acid
  misc_feature (67)..(67): Xaa can be any naturally occurring amino acid
  misc_feature (71)..(72): Xaa can be any naturally occurring amino acid
  misc_feature (83)..(83): Xaa can be any naturally occurring amino acid
  misc_feature (88)..(88): Xaa can be any naturally occurring amino acid
  misc_feature (95)..(95): Xaa can be any naturally occurring amino acid
  misc_feature (105)..(105): Xaa can be any naturally occurring amino acid
  misc_feature (118)..(118): Xaa can be any naturally occurring amino acid
  misc_feature (127)..(127): Xaa can be any naturally occurring amino acid
  Coding DNA Sequence Number=SeqID_896
  Subcellular localization annotation: CTP_CleavageSite=55; ConfidenceScore=5.10e-01

SEQ ID NO: 9127 - protein, 125 aa, Glycine max
  misc_feature (20)..(20): Xaa can be any naturally occurring amino acid
  misc_feature (95)..(95): Xaa can be any naturally occurring amino acid
  Coding DNA Sequence Number=SeqID_898
RNHYRRGRQTIYQFVWAEIXTTTTQYIMRASLCTPSTNNPNTHNYASPHTVTTCPHIDRKRQREDVDSILLASIRVICMSAISRQSPVFALTTHXINPDTPKTLLQLTPYTQQRTSHPLITSFSY

SEQ ID NO: 9128 - protein, 80 aa, Glycine max
  misc_feature (35)..(35): Xaa can be any naturally occurring amino acid
  misc_feature (43)..(43): Xaa can be any naturally occurring amino acid
  misc_feature (62)..(62): Xaa can be any naturally occurring amino acid
  Coding DNA Sequence Number=SeqID_900
LSAPHCEPSVTLLHSADSHTGRDSNSDDVCRQPNXTRCNKRYXMPAQRDQVLSLRITCASIXLITLSSVSEHHASASRHD

SEQ ID NO: 9129 - protein, 128 aa, Glycine max
  misc_feature (39)..(39): Xaa can be any naturally occurring amino acid
  Coding DNA Sequence Number=SeqID_901
  Gene Ontology: Mol. function=structural molecule activity; Cellular component=protein complex; Biological process=microtubule-based movement
  Homolog annotation: Hit_ID=Q002H1; Match level="QueryCoverage=98%, HitCoverage=31%, E-value=3e-42, Identity=68%"; Hit description=Alpha tubulin
  Pfam annotation: Domain name=Tubulin_C; Domain location=1-127; Score =71.3; E_value=3.2e-18; Accession=PF03953.7; Description=TubulinFtsZ family, C-terminal domain
LDLPPFVSDISAAKADREQLKVPAFTKAEIEPVSMTAKXDPRHGKYMARCMKYRGDVAPKDVNAAVAPTNTKRTVQIVDWCPTGFKCGINYQPPLDVPGGDLAKEQQSEYMNSNNTADAEVISRIDHK

SEQ ID NO: 9130 - protein, 111 aa, Glycine max
  Coding DNA Sequence Number=SeqID_902
FFFFFLFFITAFIIYHNNIIFHSKRFITDTTSFCTKDNADKCIHLLVSWSSSIENLGEIYSSSLFIVASFGACEPPGRKPVCWRSNTGVEASGRRAELGGGEEAGGVRWDE

SEQ ID NO: 9131 - protein, 108 aa, Glycine max; identical to SEQ ID NO: 8735
  misc_feature (24)..(24): Xaa can be any naturally occurring amino acid
  misc_feature (53)..(53): Xaa can be any naturally occurring amino acid
  misc_feature (75)..(77): Xaa can be any naturally occurring amino acid
  misc_feature (83)..(83): Xaa can be any naturally occurring amino acid
  misc_feature (85)..(85): Xaa can be any naturally occurring amino acid
  Coding DNA Sequence Number=SeqID_904

SEQ ID NO: 9132 - protein, 127 aa, Glycine max; identical to SEQ ID NO: 8736
  misc_feature (82)..(82): Xaa can be any naturally occurring amino acid
  misc_feature (123)..(124): Xaa can be any naturally occurring amino acid
  Coding DNA Sequence Number=SeqID_906

SEQ ID NO: 9133 - protein, 156 aa, Glycine max
  misc_feature (9)..(9): Xaa can be any naturally occurring amino acid
  misc_feature (16)..(16): Xaa can be any naturally occurring amino acid
  misc_feature (46)..(46): Xaa can be any naturally occurring amino acid
  misc_feature (51)..(51): Xaa can be any naturally occurring amino acid
  misc_feature (72)..(72): Xaa can be any naturally occurring amino acid
  misc_feature (90)..(90): Xaa can be any naturally occurring amino acid
  misc_feature (110)..(110): Xaa can be any naturally occurring amino acid
  misc_feature (119)..(119): Xaa can be any naturally occurring amino acid
  misc_feature (127)..(127): Xaa can be any naturally occurring amino acid
  misc_feature (130)..(130): Xaa can be any naturally occurring amino acid
  Coding DNA Sequence Number=SeqID_908
LYSGDRVKXCIYMVVXSCVVRCAHKRRFARRPLYICLEQHRIITYXYQYIXSLSDEVSYVLSMHHREEARGXRDCDTVIAIRVLQSYKIXLLRALLAPARRANGRVSLRXPHARDAIRXCDVSRRGXFRXRRRRARRRAAREGVRVGRMPRYHQGE

SEQ ID NO: 9134 - protein, 125 aa, Glycine max
  misc_feature (64)..(64): Xaa can be any naturally occurring amino acid
  Coding DNA Sequence Number=SeqID_910
  Homolog annotation: Hit_ID=A7QE27; Match level="QueryCoverage=77%, HitCoverage=14%, E-value=1e-12, Identity=42%"; Hit description =Chromosome chr4 scaffold_83, whole genome shotgun sequence
EVEDSFRSSEWIASARLRVTLRLLATWLDIKWAKMVFLETILASSAMSFIKEQEASKEETHSKXDKRAKWKRGGIIGAAALTGGTLMAVTGGITSPAIACRLVAFASTLGTLIPAIGASGFAAPA

SEQ ID NO: 9135 - protein, 106 aa, Glycine max
  misc_feature (100)..(100): Xaa can be any naturally occurring amino acid
  Coding DNA Sequence Number=SeqID_911
FIYTLSYTMHFLFLIKIYFSLFSFYFNTLCHSISISHVFFLFLYPRLSFRWAKKIFINFFSTLLLTLCLVYRCITLCLSRDIVIFVTAPALLFSRNTSPXLHKHPE

SEQ ID NO: 9136 - protein, 90 aa, Glycine max
  misc_feature (51)..(51): Xaa can be any naturally occurring amino acid
  misc_feature (60)..(60): Xaa can be any naturally occurring amino acid
  Coding DNA Sequence Number=SeqID_913
IRKKAYCRLSRDYEVWSDGARLAGSAVTLLSCSLVLLIMSPRSCVHDTHVXTLRLDACLXPSSCSRIVRLTRVLGLEAEIHVYSLYACVE

SEQ ID NO: 9137 - protein, 96 aa, Glycine max
  misc_feature (84)..(84): Xaa can be any naturally occurring amino acid
  Coding DNA Sequence Number=SeqID_915
  Gene Ontology: Mol. function=protein-tyrosine kinase activity; Cellular component=plasma membrane; Biological process=protein amino acid phosphorylation
  Homolog annotation: Hit_ID=A7PNX5; Match level="QueryCoverage=81%, HitCoverage=15%, E-value=2e-31, Identity=83%"; Hit description =Chromosome chr8 scaffold_23, whole genome shotgun sequence
TLALVTYLYLILFFFQFIDGGTMVSPTVYARRCLSYLMNDMAQEALGDAMQAQVVSPEWPTSLYLQAACLFSLGMENDAQETLXDGTNMEARKNQN

SEQ ID NO: 9138 - protein, 102 aa, Glycine max; identical to SEQ ID NO: 8739
  misc_feature (10)..(10): Xaa can be any naturally occurring amino acid
  misc_feature (12)..(12): Xaa can be any naturally occurring amino acid
  misc_feature (46)..(46): Xaa can be any naturally occurring amino acid
  misc_feature (96)..(97): Xaa can be any naturally occurring amino acid
  Coding DNA Sequence Number=SeqID_916

SEQ ID NO: 9139 - protein, 147 aa, Glycine max; identical to SEQ ID NO: 6296
  misc_feature (66)..(66): Xaa can be any naturally occurring amino acid
  misc_feature (71)..(71): Xaa can be any naturally occurring amino acid
  misc_feature (73)..(73): Xaa can be any naturally occurring amino acid
  Coding DNA Sequence Number=SeqID_918

SEQ ID NO: 9140 - protein, 110 aa, Glycine max
  misc_feature (1)..(1): Xaa can be any naturally occurring amino acid
  misc_feature (5)..(5): Xaa can be any naturally occurring amino acid
  misc_feature (8)..(9): Xaa can be any naturally occurring amino acid
  misc_feature (11)..(15): Xaa can be any naturally occurring amino acid
  misc_feature (36)..(36): Xaa can be any naturally occurring amino acid
  misc_feature (38)..(38): Xaa can be any naturally occurring amino acid
  misc_feature (72)..(72): Xaa can be any naturally occurring amino acid
  misc_feature (80)..(80): Xaa can be any naturally occurring amino acid
  misc_feature (82)..(82): Xaa can be any naturally occurring amino acid
  misc_feature (89)..(89): Xaa can be any naturally occurring amino acid
  misc_feature (91)..(91): Xaa can be any naturally occurring amino acid
  Coding DNA Sequence Number=SeqID_920
XPPVXMAXXVXXXXXGHERTGCVGCTSPHTPSSRSXLXLLLLCVLRIYWYRLWCSFSVPLYHDSATTTRQAXKIEYVFAXHXYTIIWYXSXSRFAELPFLTTPHNQHSAS

SEQ ID NO: 9141 - protein, 110 aa, Glycine max
  Coding DNA Sequence Number=SeqID_922
GGRSILGFVVVVHPSRDARAPGDESTSAPARLLPNRVTHASACYGGRCSDPLQLPAMFLLKVKVGTHICFSLLFPLSLTFPLMHALGFFLTQAGWVGSSSASAFLPATAF

SEQ ID NO: 9142 - protein, 832 aa, Glycine max
  misc_feature (27)..(27): Xaa can be any naturally occurring amino acid
  misc_feature (114)..(114): Xaa can be any naturally occurring amino acid
  Coding DNA Sequence Number=SeqID_924
  Gene Ontology: Mol. function=serine-type endopeptidase activity; Cellular component=cell wall; Biological process=negative regulation of catalytic activity
  Homolog annotation: Hit_ID=A7QXN3; Match level="QueryCoverage=99%, HitCoverage=100%, E-value=0.0, Identity=76%"; Hit description =Chromosome undetermined scaffold_226, whole genome shotgun sequence
  Pfam annotation: Domain name=DUF1034; Domain location=715-832; Score =117.3; E_value=4.4e-32; Accession=PF06280.2; Description=Domain of Unknown Function (DUF1034)
  Pfam annotation: Domain name=PA; Domain location=407-520; Score=53.3; E_value=8.5e-13; Accession=PF02225.12; Description=PA domain
  Pfam annotation: Domain name=Peptidase_S8; Domain location=156-681; Score=96.0; E_value=1.2e-25; Accession=PF00082.12; Description =Subtilase family
  Pfam annotation: Domain name=Subtilisin_N; Domain location=67-144; Score=29.9; E_value=9.5e-06; Accession=PF05922.7; Description =Subtilisin N-terminal Region
  Pfam module annotation: Pfam domain module=DUF1034::PA::Peptidase _S8::Subtilisin_N; Domain location=715-832::407-520::156-681::67-144
RLWWFLEFGCVFIVVLLFGLVKFGRAXVYIVTVEGEPIISYKGGIDGFEATAVESDDDDDEKLDSTSEVVVSYARHLEKRHDMLLGMLFERGTYNKLYSYRHLINGFTTSRNSXAVHISPEQAETLRHAPGVKSVERDWKVKRLTTHTPQFLGLPTGVWPTGGGFDRAGEDIVIGLVDSGIYPQHPSFATHNSEPYGPVPRYRGKCEADPETKRSYCNGKIVGAQHFAHAAIAAGSFNPSIDFASPLDGDGHGSHTASIAAGNNGIPVRMNGHEFGRASGMAPRARIAVYKAIYRLFGGFIADVVAAIDQAVHDGVDILNLSVGPNSPPANTKTTFLNPFDATLLGAVKAGVFVAQAAGNGGPFPKTLVSYSPWIASVAAAIDDRRYKNHLILGNGKILAGIGLSPSTHLNETYTLVAANDVLLDSSLMKYSPTDCQRPELLNKNLIKGNILLCGYSFNFVVGTASIKKVSETAKALGAVGFVLCVENISLGTKFNPVPVGLPGILIIDVSNSKELIDYYNITTPRDWTGRVKSFEGKGKIGDGLMPILHKSAPQVALFSARGPNIKDFSFQEADLLKPDILAPGSLIWAAWCPNGTDEPNYVGEAFAMISGTSMAAPHIAGIAALIKQKHPHWSPAAIKSALMTTSTTLDRAGDPLLAQQTSESEAMRLVKATPFDYGSGHVDPTAALDPGLIFDAGYEDYIGFLCTTPSIDVHEIRNYTHTPCNTTMGKPSNLNTPSITISHLVRTQVVTRTVTNVAEEETYVITARMEPAVAIEVNPPAMTIKAGASRQFSVSLTVRSVTGRYSFGEVLMKGSRGHKVRIPVLANGYRR

SEQ ID NO: 9143 - protein, 137 aa, Glycine max
  Coding DNA Sequence Number=SeqID_925
  Gene Ontology: Mol. function=methyltransferase activity
  Homolog annotation: Hit_ID=Q4SSJ5; Match level="QueryCoverage=37%, HitCoverage=14%, E-value=6e-10, Identity=58%"; Hit description =Chromosome 15 SCAF14367, whole genome shotgun sequence
MWKLFYLSASEHPMKELAGCYQLDTPSAPVSTPEVGEEDEEIDPRFPPPTKDRTGLLTHYLLDAASVITARALGARSGHKVLDLCAAPGGKSLVIAYDMFSKGQPNAIDVENDSDESEEESDSENESEGEESDEEAV

SEQ ID NO: 9144 - protein, 165 aa, Glycine max
  misc_feature (1)..(52): Xaa can be any naturally occurring amino acid
  misc_feature (126)..(127): Xaa can be any naturally occurring amino acid
  misc_feature (129)..(130): Xaa can be any naturally occurring amino acid
  misc_feature (132)..(132): Xaa can be any naturally occurring amino acid
  misc_feature (134)..(134): Xaa can be any naturally occurring amino acid
  misc_feature (145)..(145): Xaa can be any naturally occurring amino acid
  misc_feature (150)..(150): Xaa can be any naturally occurring amino acid
  misc_feature (153)..(154): Xaa can be any naturally occurring amino acid
  Coding DNA Sequence Number=SeqID_926
XXXXXXXXXXXXXXXXXXXXXXXXXXXXXXXXXXXXXXXXXXXXXXXXXXXXPCQFSFLDGNTPYNYTPLFSPSQLPSPPLLSEDAAIFQSGSKPLPHLWFSAFATGMLFNHEPSKMCLTWLGELXXRXXKXRXVGIGMCQMASXCGKTXPLXXVNSICIATNAH

SEQ ID NO: 9145 - protein, 324 aa, Glycine max
  misc_feature (32)..(32): Xaa can be any naturally occurring amino acid
  misc_feature (39)..(39): Xaa can be any naturally occurring amino acid
  misc_feature (58)..(58): Xaa can be any naturally occurring amino acid
  misc_feature (68)..(68): Xaa can be any naturally occurring amino acid
  misc_feature (142)..(143): Xaa can be any naturally occurring amino acid
  misc_feature (176)..(176): Xaa can be any naturally occurring amino acid
  misc_feature (194)..(194): Xaa can be any naturally occurring amino acid
  misc_feature (271)..(271): Xaa can be any naturally occurring amino acid
  misc_feature (296)..(296): Xaa can be any naturally occurring amino acid
  Coding DNA Sequence Number=SeqID_928
PRSCCCACCRSVYVGLYALEWHILMSMACYLXSRCQGAXRSLVTQSCHYTLVFSLLFXIYLVVAVTSXLLCRTLHHLARRRGVGARCAVVLCGCIPRRPAAAQHVGCGAVLTEACSCTVSGVLHLSRVGRGACVSSLHVSSXXSCVVLSPLSFTSGHSILDADAYVLSSLCASLLXMCTTHLRVLSVVSCEWRXALVVRCHCASSRGDASPHIFSLLRLLVIRWWRLRLRFAVARTLCSSPLSLLYLWCCHVDLHPSSTSHSTLQCVRSVXLCAPAREYLGRWTMSRRRCLLIVSXLLARLFMRYVRVVGAYCTLIRSDDSRRV

SEQ ID NO: 9146 - protein, 90 aa, Glycine max; identical to SEQ ID NO: 8448
  misc_feature (40)..(40): Xaa can be any naturally occurring amino acid
  misc_feature (42)..(42): Xaa can be any naturally occurring amino acid
  Coding DNA Sequence Number=SeqID_930

SEQ ID NO: 9147 - protein, 135 aa, Glycine max
  Coding DNA Sequence Number=SeqID_932
NNVLVILSSCHLLFCFFVKYLAYLPVISLILYNDLGICGFSSFSHISWNIFKLLYFTLKLLPCLPFPESLKILNSLYSFGQTHILYIFSFEADRGSARQGSWRNVGLFSVSVRFFRLLKLSDFSRDTFLSYIYLV

SEQ ID NO: 9148 - protein, 150 aa, Glycine max; identical to SEQ ID NO: 6310
  misc_feature (4)..(5): Xaa can be any naturally occurring amino acid
  misc_feature (7)..(7): Xaa can be any naturally occurring amino acid
  misc_feature (18)..(18): Xaa can be any naturally occurring amino acid
  misc_feature (22)..(22): Xaa can be any naturally occurring amino acid
  misc_feature (24)..(24): Xaa can be any naturally occurring amino acid
  misc_feature (105)..(105): Xaa can be any naturally occurring amino acid
  misc_feature (121)..(121): Xaa can be any naturally occurring amino acid
  misc_feature (124)..(124): Xaa can be any naturally occurring amino acid
  misc_feature (135)..(135): Xaa can be any naturally occurring amino acid
  misc_feature (137)..(137): Xaa can be any naturally occurring amino acid
  Coding DNA Sequence Number=SeqID_934

SEQ ID NO: 9149 - protein, 122 aa, Glycine max
  misc_feature (108)..(108): Xaa can be any naturally occurring amino acid
  Coding DNA Sequence Number=SeqID_936
  Pfam annotation: Domain name=GRP; Domain location=22-99; Score=-16.7; E_value=0.0039; Accession=PF07172.2; Description=Glycine rich protein family
TYCSSRLVINNKMAMCKSIKPMAQMLLLLLAIHWHILTVGSTTETSASFAKHSSVTVNKPSSEIDFIVWRRELRGGGGGGRGGGGGGRSGSGGTSSGNCLKHYGLSKXLLFIGILSYLLGVW

SEQ ID NO: 9150 - protein, 102 aa, Glycine max
  Coding DNA Sequence Number=SeqID_937
  Homolog annotation: Hit_ID=A8D2S5; Match level="QueryCoverage=100%, HitCoverage=31%, E-value=2e-24, Identity=50%"; Hit description =Transglutaminase, N-terminal domain protein
  Pfam annotation: Domain name=Bact_transglu_N; Domain location=2-82; Score=105.5; E_value=1.6e-28; Accession=PF08379.1; Description =Bacterial transglutaminase-like N-ter
MRIQIEHTTEYHYDAPIRSAVQVLRLTPRPNASQHIVRWRVEADGEVRLRSCDDAYGNLTHWLEVEGPLDALRIHVSGEVETSDTGGILRGAVERAPVLTYL

SEQ ID NO: 9151 - protein, 173 aa, Glycine max
  misc_feature (10)..(10): Xaa can be any naturally occurring amino acid
  misc_feature (41)..(41): Xaa can be any naturally occurring amino acid
  misc_feature (63)..(63): Xaa can be any naturally occurring amino acid
  misc_feature (66)..(66): Xaa can be any naturally occurring amino acid
  misc_feature (77)..(77): Xaa can be any naturally occurring amino acid
  misc_feature (91)..(91): Xaa can be any naturally occurring amino acid
  misc_feature (96)..(96): Xaa can be any naturally occurring amino acid
  misc_feature (110)..(110): Xaa can be any naturally occurring amino acid
  misc_feature (130)..(130): Xaa can be any naturally occurring amino acid
  misc_feature (132)..(132): Xaa can be any naturally occurring amino acid
  Coding DNA Sequence Number=SeqID_938
SLVAHCVSAXIRSRCSARCISRYHTLQLRMRSSEHLISALXIHPTRALIRVHQSIRGEMSVPXCSXAHGPLTQSHIXQSRSETSTWDTLNXSPQHXRGFCCTVTVTRIAXGASRTQCLKSTSGGSHVDTXIXSYAVHCSVVSSTASMLYALASSRASWRSHHSIETGRKSISE

SEQ ID NO: 9152 - protein, 113 aa, Glycine max
  misc_feature (36)..(36): Xaa can be any naturally occurring amino acid
  misc_feature (64)..(64): Xaa can be any naturally occurring amino acid
  Coding DNA Sequence Number=SeqID_940
  Gene Ontology: Mol. function=amino acid binding; Biological process =metabolic process
  Homolog annotation: Hit_ID=Q3ECF7; Match level="QueryCoverage=96%, HitCoverage=24%, E-value=1e-26, Identity=61%"; Hit description =Uncharacterized protein At1g69040.2
FTAGFKLEICTTARVGLLSDDTRIFIENSLTVTRAXLATQRSKAVNTFYVRGASCFPVDCNTIXSIWQTIGIAILKVYGIPCQMKSDTQDSPTTSLFIGLFKTTSFVNFGLVN

SEQ ID NO: 9153 - protein, 137 aa, Glycine max
  misc_feature (17)..(17): Xaa can be any naturally occurring amino acid
  misc_feature (22)..(22): Xaa can be any naturally occurring amino acid
  misc_feature (28)..(28): Xaa can be any naturally occurring amino acid
  misc_feature (31)..(31): Xaa can be any naturally occurring amino acid
  misc_feature (90)..(90): Xaa can be any naturally occurring amino acid
  misc_feature (94)..(94): Xaa can be any naturally occurring amino acid
  misc_feature (98)..(98): Xaa can be any naturally occurring amino acid
  misc_feature (101)..(101): Xaa can be any naturally occurring amino acid
  Coding DNA Sequence Number=SeqID_941
SHIYVTAASRGTYILAXDRIIXKRSRSXVYXSYEESMRRDTSVDRGDEKYLSCATLSFMLVVTGSYAYTCLSVVRESVAYACHVRYVRYXRRLXTKIXEAXAMLMFSCSLSRTLDAVYCMSAAISYVSRAAQPIART

SEQ ID NO: 9154 - protein, 95 aa, Glycine max
  Coding DNA Sequence Number=SeqID_943
  Gene Ontology: Mol. function=transcription factor binding; Cellular component=intracellular; Biological process=regulation of transcription, DNA-dependent
  Homolog annotation: Hit_ID=Q4G2I9; Match level="QueryCoverage=85%, HitCoverage=38%, E-value=4e-26, Identity=77%"; Hit description=Rab -type small GTP-binding protein
  Pfam annotation: Domain name=Miro; Domain location=17-95; Score=1.7; E_value=0.007; Accession=PF08477.3; Description=Miro-like protein
  Pfam annotation: Domain name=Ras; Domain location=17-95; Score=54.6; E_value=1.7e-13; Accession=PF00071.12; Description=Ras family
  Pfam module annotation: Pfam domain module=Miro::Ras; Domain location= 17-95::17-95
MAAPPARARADYDYLIKLLLIGDSGVGKSCLLLRFSDGSFTTSFITTIGIDFKIRTIELDGKRIKLQIWDTAGQERFRTITTAYYRGAMGILLVY

SEQ ID NO: 9155 - protein, 135 aa, Glycine max
  misc_feature (91)..(91): Xaa can be any naturally occurring amino acid
  misc_feature (101)..(101): Xaa can be any naturally occurring amino acid
  misc_feature (114)..(114): Xaa can be any naturally occurring amino acid
  Coding DNA Sequence Number=SeqID_944
PLGMAPFSKDQNLSQFLDSLASFVFLVEIKSPKQYGGLTKFAAHQISLPRIFLYSLPTMLLRWPKPRVRSNYRETFWAQRIPLGVSVDAAXGTVLFEVSVXVNSEFLRCFRAAXVGTHYAENSRSRKFYRTRMGT

SEQ ID NO: 9156 - protein, 189 aa, Glycine max
  misc_feature (158)..(158): Xaa can be any naturally occurring amino acid
  misc_feature (170)..(170): Xaa can be any naturally occurring amino acid
  Coding DNA Sequence Number=SeqID_946
  Gene Ontology: Mol. function=catalytic activity; Cellular component =membrane; Biological process=metabolic process
  Homolog annotation: Hit_ID=Q9C8Z1; Match level="QueryCoverage=90%, HitCoverage=31%, E-value=1e-59, Identity=63%"; Hit description =Neutral invertase, putative; 73674-70896
  Pfam annotation: Domain name=Invertase_neut; Domain location=1-189; Score=-129.5; E_value=8.9e-10; Accession=PF04853.3; Description =Plant neutral invertase
HHSISSSPFILLKLIAVDILLRAYGKLTGDYALQERVDAHTGIRLILKWDLGGGFDLFPSLLPTDGSCMIDRRMGIHGLPVEIQALFYSGSRCSHEMLIVNDAPMSLVAAVGSRSECTLLSHDRVYWVAVKKVNEVYRVSTEDCSTVAASTFNIYPEXLPSWLVDWICEXGGYFIGTSEPAHVDFKFLS

SEQ ID NO: 9157 - protein, 127 aa, Glycine max; identical to SEQ ID NO: 6314
  Coding DNA Sequence Number=SeqID_947
  Subcellular localization annotation: CTP_CleavageSite=20; ConfidenceScore=5.07e-01

SEQ ID NO: 9158 - protein, 75 aa, Glycine max
  Coding DNA Sequence Number=SeqID_85
WFFPYGVADKVEAWREDQILDLRKKKNEKGWEKETDDGQLVSTVVVLLPMPDINDGERRLGVVVVGVAGEIKTEE

SEQ ID NO: 9159 - protein, 164 aa, Glycine max
  misc_feature (57)..(57): Xaa can be any naturally occurring amino acid
  misc_feature (67)..(67): Xaa can be any naturally occurring amino acid
  misc_feature (83)..(83): Xaa can be any naturally occurring amino acid
  misc_feature (139)..(141): Xaa can be any naturally occurring amino acid
  misc_feature (143)..(145): Xaa can be any naturally occurring amino acid
  misc_feature (148)..(148): Xaa can be any naturally occurring amino acid
  misc_feature (154)..(154): Xaa can be any naturally occurring amino acid
  misc_feature (156)..(156): Xaa can be any naturally occurring amino acid
  misc_feature (158)..(158): Xaa can be any naturally occurring amino acid
  Coding DNA Sequence Number=SeqID_87
ITTRETETDYSLIRDTHSNVQVSPCIRFDCLSFFSPTSILKYTSYRRKRTRGRLCIXERSYVRGGTXPPRQRETQHPINTDTXQTIGNLFVDMHVHYTLSPLLHTKHTHYHRTDIGYDMNITRPKRNTRTRGGHGVYCXXXIXXXYYXIYPLIXFXFXFSSLFP

SEQ ID NO: 9160 - protein, 62 aa, Glycine max
  misc_feature (15)..(15): Xaa can be any naturally occurring amino acid
  Coding DNA Sequence Number=SeqID_89
  Subcellular localization annotation: CTP_CleavageSite=44; ConfidenceScore=5.54e-01
NLESANSSSKNISSXTQVNKNQHTLNLKLANSLFFPVFPRNHACSQQIKSLNKRSYKSFLSL

SEQ ID NO: 9161 - protein, 177 aa, Glycine max
  Coding DNA Sequence Number=SeqID_91
  Gene Ontology: Mol. function=lipid binding; Cellular component =anchored to membrane; Biological process=lipid transport
  Homolog annotation: Hit_ID=Q8VYI9; Match level="QueryCoverage=78%, HitCoverage=77%, E-value=2e-38, Identity=60%"; Hit description=Non -specific lipid-transfer protein-like protein At5g64080 precursor
  Pfam annotation: Domain name=Tryp_alpha_amyl; Domain location=39-117; Score=51.6; E_value=2.8e-12; Accession=PF00234.12; Description =Protease inhibitorseed storageLTP f
MATSFPTLTPFLFILLLSIPSVLEAAHHHTAAPAPAVDCSMLILNMADCLSFVSAGGTEAKPASSCCNGLKTVLKTDAECLCEAFKSSASLGVTLNMTKAATLPAACKLHAPSMAACGLSAAPTMAPGLAPGGAAGPDLSFLSPNPSPGNRGSSLLPFSFTTVLGAMSFVLLFLSRV

SEQ ID NO: 9162 - protein, 181 aa, Glycine max; identical to SEQ ID NO: 7477
  misc_feature (7)..(7): Xaa can be any naturally occurring amino acid
  misc_feature (124)..(124): Xaa can be any naturally occurring amino acid
  Coding DNA Sequence Number=SeqID_92

SEQ ID NO: 9163 - protein, 97 aa, Glycine max
  misc_feature (13)..(13): Xaa can be any naturally occurring amino acid
  Coding DNA Sequence Number=SeqID_94
  Gene Ontology: Cellular component=extracellular region; Biological process=defense response
  Homolog annotation: Hit_ID=Q9SBK8; Match level="QueryCoverage=95%, HitCoverage=69%, E-value=2e-25, Identity=67%"; Hit description =Thionin precursor [Contains: Thionin; Acidic protein]
  Pfam annotation: Domain name=Thionin; Domain location=1-33; Score =4.9; E_value=0.09; Accession=PF00321.8; Description=Plant thionin
GRPVLLGASMTNXASLSGGKIVSGRTCPPGYTHDILQNCGDAVNECCKLGGASSGCGALATLKSSDASEIVKGAVSQCTNACSNFCTKGSAKAVETA

SEQ ID NO: 9164 - protein, 127 aa, Glycine max
  misc_feature (9)..(9): Xaa can be any naturally occurring amino acid
  misc_feature (31)..(31): Xaa can be any naturally occurring amino acid
  misc_feature (62)..(62): Xaa can be any naturally occurring amino acid
  misc_feature (94)..(94): Xaa can be any naturally occurring amino acid
  Coding DNA Sequence Number=SeqID_95
  Gene Ontology: Mol. function=oxidoreductase activity; Biological process=response to oxidative stress
  Homolog annotation: Hit_ID=O24081; Match level="QueryCoverage=98%, HitCoverage=35%, E-value=2e-17, Identity=45%"; Hit description =Peroxidase1A precursor
MLCRIGVLXTLPHFSYAQLDPSFSRLVFLNXTPILWGGRSNVSHPDPLLLARRRRVPCHHCXGHGRYASNLLNYTNSIVSDQSAEPNNSSLSRXYVVNHIKTPSENALTGITTRAHILALAAQLSPD

SEQ ID NO: 9165 - protein, 126 aa, Glycine max
  Coding DNA Sequence Number=SeqID_96
DIVGVFLRGFEDVFGELFLVMFPFSCKCFIIPYCTTIVILKLVYLELPFCYCLMLDDNGIYSLSSKTNNPTLKSLLKETAYVCVVSYDEVIVITGIFTGGRRSKREEVGGGGSHLLYFEGFRRREC

SEQ ID NO: 9166 - protein, 186 aa, Glycine max
  misc_feature (64)..(64): Xaa can be any naturally occurring amino acid
  misc_feature (97)..(98): Xaa can be any naturally occurring amino acid
  misc_feature (113)..(114): Xaa can be any naturally occurring amino acid
  misc_feature (122)..(122): Xaa can be any naturally occurring amino acid
  misc_feature (152)..(152): Xaa can be any naturally occurring amino acid
  Coding DNA Sequence Number=SeqID_949
QLPRIFTVVHRTTNIYIIYYSRVRAPHIYLYYIHPAHNIISTRAGGERDITILLSRISRAMTQXIFYFASVQLFQYYSLHRAAGSPLISRIVENIHXXIDENVVYINTLLLLXXLSERTGGXGSAHNHSRPIYNINPRAQYTRRHHHTPNSXDAHAILYNDNKHARAGRCRDILYIYSPERRSRMI

SEQ ID NO: 9167 - protein, 292 aa, Glycine max
  misc_feature (118)..(118): Xaa can be any naturally occurring amino acid
  misc_feature (157)..(157): Xaa can be any naturally occurring amino acid
  misc_feature (169)..(169): Xaa can be any naturally occurring amino acid
  misc_feature (249)..(249): Xaa can be any naturally occurring amino acid
  Coding DNA Sequence Number=SeqID_951
  Gene Ontology: Mol. function=cysteine-type peptidase activity; Biological process=proteolysis
  Homolog annotation: Hit_ID=A7QZ27; Match level="QueryCoverage=72%, HitCoverage=73%, E-value=1e-55, Identity=52%"; Hit description =Chromosome chr17 scaffold_263, whole genome shotgun sequence
  Subcellular localization annotation: CTP_CleavageSite=92; ConfidenceScore=5.35e-01
MESGFWSNVPQRLQTKRKSKFNGKGALSTSKAVLSKTKEALSRSNEALSAPKEALSKPKEAHSRPNKAHSRPNKALSTPKKALSTLKEALSRSKEKLNSGDFDIYLKKIWKIFSEDRXGIVHTDSLWFSLYRTSSSKDKVLTWIKKEPIFSKSYVFXVPIVCWGHWSLXCHFGESLESTTRSRCMLLLDSLEMANPRRLKPKIRRFVLDIYRTGDRPEAKHLISRIPFLVPKVIITLSIIFISSVTKYXRKNKLLYVPQQRDGNECGFFILYFINLFLECAPDNFSMEGYPL

SEQ ID NO: 9168 - protein, 112 aa, Glycine max; identical to SEQ ID NO: 8765
  misc_feature (2)..(2): Xaa can be any naturally occurring amino acid
  misc_feature (11)..(11): Xaa can be any naturally occurring amino acid
  misc_feature (28)..(28): Xaa can be any naturally occurring amino acid
  misc_feature (56)..(57): Xaa can be any naturally occurring amino acid
  misc_feature (62)..(62): Xaa can be any naturally occurring amino acid
  misc_feature (73)..(73): Xaa can be any naturally occurring amino acid
  misc_feature (76)..(76): Xaa can be any naturally occurring amino acid
  misc_feature (80)..(84): Xaa can be any naturally occurring amino acid
  misc_feature (87)..(88): Xaa can be any naturally occurring amino acid
  Coding DNA Sequence Number=SeqID_952

SEQ ID NO: 9169 - protein, 169 aa, Glycine max
  misc_feature (100)..(100): Xaa can be any naturally occurring amino acid
  misc_feature (163)..(163): Xaa can be any naturally occurring amino acid
  Coding DNA Sequence Number=SeqID_954
PAVGEVTSTLFMTLCGVCVICCLLWWRCLRCHYGGDMHIPLPLRAPSPCRALLYSSGLPLLLPALTAPRATPLLSMCCLSCSLPSSPQLFSRLRSSRRLXTAALRHRCLLLLSACHDPSYNLRMNDIFSYITTPSTTITRILRCPYIMRYVSYPLSLCLFLLXFYCVLH

SEQ ID NO: 9170 - protein, 186 aa, Glycine max
  Coding DNA Sequence Number=SeqID_956
  Gene Ontology: Mol. function=protein binding; Cellular component =cytoskeleton; Biological process=phagocytosis
  Homolog annotation: Hit_ID=A7Q9Z2; Match level="QueryCoverage=96%, HitCoverage=55%, E-value=2e-80, Identity=81%"; Hit description =Chromosome chr8 scaffold_68, whole genome shotgun sequence
  Pfam annotation: Domain name=ELMO_CED12; Domain location=5-167; Score= 280.4; E_value=3.7e-81; Accession=PF04727.4; Description=ELMOCED-12 family
MVSKAVLQDALKQLWKLDLPGQGSFLALKSDLWKEMGWQGSDPSTDFRGGGFISLENLIFFAMKYPDSFQRLLHKQDGTRAEWEYPFAVAGINISFMLAQMLDLQAGLPSSLSGIRFLKLLEEDEMAFDILFCVAFQMMDAQWLAKRASYMEFNDVLRSTRTQLERELGLEDIFSVKDLPAYNMLR

SEQ ID NO: 9171 - protein, 154 aa, Glycine max
  misc_feature (14)..(14): Xaa can be any naturally occurring amino acid
  misc_feature (22)..(22): Xaa can be any naturally occurring amino acid
  misc_feature (31)..(31): Xaa can be any naturally occurring amino acid
  Coding DNA Sequence Number=SeqID_957
  Gene Ontology: Mol. function=acetate-CoA ligase activity; Cellular component=mitochondrion; Biological process=metabolic process
  Homolog annotation: Hit_ID=Q23CU3; Match level="QueryCoverage=90%, HitCoverage=20%, E-value=8e-40, Identity=55%"; Hit description=AMP -binding enzyme family protein
VDDVINTAGHRLSXSQMEEVLXSHDDIVEAXVIGALDELKGEIPVGFVVLKSGRQRDPMELEAECIKKIRYEIGPVASFRYCLVVDKLPKTRSGKIIRNVLRELSNGNEPKIPPTIEDASVVDVVRDLLKKRGMAKQVNIDYGETVEGEVNIDY

SEQ ID NO: 9172 - protein, 144 aa, Glycine max; identical to SEQ ID NO: 6324
  misc_feature (2)..(2): Xaa can be any naturally occurring amino acid
  misc_feature (8)..(8): Xaa can be any naturally occurring amino acid
  misc_feature (23)..(23): Xaa can be any naturally occurring amino acid
  misc_feature (34)..(35): Xaa can be any naturally occurring amino acid
  misc_feature (38)..(38): Xaa can be any naturally occurring amino acid
  misc_feature (51)..(51): Xaa can be any naturally occurring amino acid
  misc_feature (57)..(58): Xaa can be any naturally occurring amino acid
  misc_feature (63)..(63): Xaa can be any naturally occurring amino acid
  misc_feature (81)..(81): Xaa can be any naturally occurring amino acid
  misc_feature (85)..(85): Xaa can be any naturally occurring amino acid
  misc_feature (108)..(108): Xaa can be any naturally occurring amino acid
  misc_feature (121)..(121): Xaa can be any naturally occurring amino acid
  Coding DNA Sequence Number=SeqID_958

SEQ ID NO: 9173 - protein, 51 aa, Glycine max
  Coding DNA Sequence Number=SeqID_960
SFRERGFDSSVRRMCFSGNRLPRRRALTLASGGYLSAAWPATASSVCHRSS

SEQ ID NO: 9174 - protein, 164 aa, Glycine max
  Coding DNA Sequence Number=SeqID_961
  Gene Ontology: Mol. function=DNA binding; Cellular component =cytoplasm; Biological process=phosphate transport
  Homolog annotation: Hit_ID=Q4MFS1; Match level="QueryCoverage=87%, HitCoverage=99%, E-value=1e-12, Identity=36%"; Hit description =Col3a1 protein
INASHLGLGMCAAGGPTGKRGEAGRVERPPGRHGYGTKPGSGQGATAGRGANGPKAQRENRTNPDGAKGKTAQTGHGGTGAKGTSAPRGTGATPTRGKQANSARDGKGPKARGGATRPMGRKGAQRKGGDEPTGAERATRRKRGEQRAKRETEPARRDKADAGA

SEQ ID NO: 9175 - protein, 137 aa, Glycine max
  misc_feature (116)..(116): Xaa can be any naturally occurring amino acid
  Coding DNA Sequence Number=SeqID_962
  Gene Ontology: Mol. function=DNA binding; Cellular component =chromosome; Biological process=nucleosome assembly
  Homolog annotation: Hit_ID=P59169; Match level="QueryCoverage=100%, HitCoverage=100%, E-value=6e-69, Identity=99%"; Hit description =Histone H3.3
  Pfam annotation: Domain name=Histone; Domain location=58-133; Score =128.6; E_value=1.8e-35; Accession=PF00125.14; Description=Core histone H2AH2BH3H4
  Subcellular localization annotation: CTP_CleavageSite=24; ConfidenceScore=5.41e-01
MARTKQTARKSTGGKAPRKQLATKAARKSAPTTGGVKKPHRYRPGTVALREIRKYQKSTELLIRKLPFQRLVREIAQDFKTDLRFQSHAVLALQEAAEAYLVGLFEDTNLCAIHAXKRVTIMPKDIQLARRIRGERA

SEQ ID NO: 9176 - protein, 127 aa, Glycine max; identical to SEQ ID NO: 6326
  misc_feature (44)..(44): Xaa can be any naturally occurring amino acid
  misc_feature (91)..(91): Xaa can be any naturally occurring amino acid
  misc_feature (118)..(118): Xaa can be any naturally occurring amino acid
  Coding DNA Sequence Number=SeqID_963
  Subcellular localization annotation: CTP_CleavageSite=26; ConfidenceScore=5.19e-01

SEQ ID NO: 9177 - protein, 162 aa, Glycine max; identical to SEQ ID NO: 9064
  misc_feature (61)..(63): Xaa can be any naturally occurring amino acid
  misc_feature (65)..(65): Xaa can be any naturally occurring amino acid
  misc_feature (68)..(69): Xaa can be any naturally occurring amino acid
  misc_feature (71)..(72): Xaa can be any naturally occurring amino acid
  misc_feature (74)..(76): Xaa can be any naturally occurring amino acid
  misc_feature (78)..(81): Xaa can be any naturally occurring amino acid
  misc_feature (83)..(85): Xaa can be any naturally occurring amino acid
  misc_feature (88)..(89): Xaa can be any naturally occurring amino acid
  misc_feature (94)..(97): Xaa can be any naturally occurring amino acid
  misc_feature (99)..(101): Xaa can be any naturally occurring amino acid
  misc_feature (103)..(112): Xaa can be any naturally occurring amino acid
  misc_feature (114)..(115): Xaa can be any naturally occurring amino acid
  misc_feature (117)..(117): Xaa can be any naturally occurring amino acid
  misc_feature (119)..(122): Xaa can be any naturally occurring amino acid
  misc_feature (124)..(143): Xaa can be any naturally occurring amino acid
  misc_feature (145)..(162): Xaa can be any naturally occurring amino acid
  Coding DNA Sequence Number=SeqID_965
  Subcellular localization annotation: CTP_CleavageSite=56; ConfidenceScore=5.81e-01

SEQ ID NO: 9178 - protein, 79 aa, Glycine max
  Coding DNA Sequence Number=SeqID_1697
LELHRGGGRSRTSGSPGLQEFARDHYLEHPNRKFSFFLSSPFYYYSETLLCVLCHLFCVFVNLPFLPLSLPHLLLFSSA

SEQ ID NO: 9179 - protein, 49 aa, Glycine max
  Coding DNA Sequence Number=SeqID_1699
  Homolog annotation: Hit_ID=Q8GZ92; Match level="QueryCoverage=61%, HitCoverage=7%, E-value=1e-08, Identity=86%"; Hit description =Putative uncharacterized protein At5g20540/F7C8_130
  Pfam annotation: Domain name=DZC; Domain location=17-48; Score=39.2; E_value=1.5e-08; Accession=PF08381.1; Description=Disease resistancezinc fingerchromosome co
MRIFEFIFVTVFLFLLVFPRIWCSREKFGEMHARLWWEENRARIHEQYL

SEQ ID NO: 9180 - protein, 339 aa, Glycine max
  Coding DNA Sequence Number=SeqID_1700
  Gene Ontology: Mol. function=kinase activity
  Homolog annotation: Hit_ID=A7NYF7; Match level="QueryCoverage=91%, HitCoverage=85%, E-value=1e-101, Identity=59%"; Hit description =Chromosome chr6 scaffold_3, whole genome shotgun sequence
  Pfam annotation: Domain name=PfkB; Domain location=16-284; Score =12.0; E_value=1.9e-07; Accession=PF00294.14; Description=pfkB family carbohydrate kinase
MTLTPPPSQQTPNSPHRRVLIVGNYCHDVLIQNGTVVAETLGGAASFISNVLDSSSVSCDLISKVGRDFKYDVAHPPIVAPEKETTVFKAYFDLAADRVLKRVAACDPILPSDIPDSRFDIGMAVGVGGEILPETLEKMVEICDVVAVDIQALIRGFDPVDGAVKLVDLKESGFRHLMGKIGFLKASSDEALFMDVEEMRRLCCVVVTSGEKGCRIYDKDDETVVPPFVAKQVDPTGAGDSFLGGLVVGLVEGLDVPDAALLGNLFGSVTVEHIGQPKFDLTMLQRVKDEVQRRKKQCNLSSSHNNDHDEFHARLSPARFQESPLQPKILVNGHLCDRS

SEQ ID NO: 9181 - protein, 100 aa, Glycine max
  Coding DNA Sequence Number=SeqID_1701
  Gene Ontology: Biological process=signal transduction
  Homolog annotation: Hit_ID=P82621; Match level="QueryCoverage=100%, HitCoverage=100%, E-value=8e-10, Identity=38%"; Hit description =Uncharacterized protein SCRL2 precursor
  Pfam annotation: Domain name=SCRL; Domain location=15-98; Score=15.6; E_value=0.00066; Accession=PF06876.3; Description=Plant self -incompatibility response (SCRL
MRLSVILMVSCVLTFLILNNGKVEVEAGRKLGCETLPSNYLGTCGKNGINLCVDDVKKMIVKNTGKAVPKGYGVRCDKCIDEPPKPGYARMHKCVCRYDC

SEQ ID NO: 9182 - protein, 116 aa, Glycine max
  misc_feature (1)..(1): Xaa can be any naturally occurring amino acid
  misc_feature (95)..(96): Xaa can be any naturally occurring amino acid
  misc_feature (100)..(101): Xaa can be any naturally occurring amino acid
  Coding DNA Sequence Number=SeqID_1702
XREDASSIVAPDILVPRLRRKLKRLRKTRQKDLSALACSSQSTRFKLPPNTILQPTQLFSPHTHTLQQSIYGVYRCVVHLLSFRIHTGKAEPLLXXNRSXXSDGVRRPRLYERVYL

SEQ ID NO: 9183 - protein, 143 aa, Glycine max
  misc_feature (12)..(12): Xaa can be any naturally occurring amino acid
  misc_feature (62)..(62): Xaa can be any naturally occurring amino acid
  misc_feature (117)..(117): Xaa can be any naturally occurring amino acid
  misc_feature (139)..(139): Xaa can be any naturally occurring amino acid
  Coding DNA Sequence Number=SeqID_1704
  Subcellular localization annotation: CTP_CleavageSite=24; ConfidenceScore=5.32e-01
FNYTHQILKPQXHHNTMTLSFIPVASQRSETIAVTSRSFLPPFVGVLCPGHVSVRAAIRPTXKHKVLKYCVALAVYCIASPPTRSFPSLTLSLLSSSPPRTQHSWCCRVHHTAQDTXLAISSHLSAISAFFSQSKPTIXIRYI

SEQ ID NO: 9184 - protein, 99 aa, Glycine max
  Coding DNA Sequence Number=SeqID_1705
RAHAAVAAGWACGVREGRHFPPPRHNRHDRHGYGGRHGAAIPNPPGHRYSVAFFRKTAMAPPCPPFNNILSQGCWPLLRKLRYPGFKNLQQFQSINMFC

SEQ ID NO: 9185 - protein, 207 aa, Glycine max
  misc_feature (6)..(6): Xaa can be any naturally occurring amino acid
  misc_feature (10)..(10): Xaa can be any naturally occurring amino acid
  misc_feature (12)..(12): Xaa can be any naturally occurring amino acid
  misc_feature (19)..(19): Xaa can be any naturally occurring amino acid
  misc_feature (31)..(31): Xaa can be any naturally occurring amino acid
  misc_feature (36)..(36): Xaa can be any naturally occurring amino acid
  misc_feature (38)..(39): Xaa can be any naturally occurring amino acid
  misc_feature (42)..(42): Xaa can be any naturally occurring amino acid
  misc_feature (53)..(53): Xaa can be any naturally occurring amino acid
  misc_feature (55)..(55): Xaa can be any naturally occurring amino acid
  misc_feature (58)..(58): Xaa can be any naturally occurring amino acid
  misc_feature (63)..(63): Xaa can be any naturally occurring amino acid
  misc_feature (67)..(68): Xaa can be any naturally occurring amino acid
  misc_feature (71)..(72): Xaa can be any naturally occurring amino acid
  misc_feature (79)..(80): Xaa can be any naturally occurring amino acid
  misc_feature (83)..(83): Xaa can be any naturally occurring amino acid
  misc_feature (88)..(89): Xaa can be any naturally occurring amino acid
  misc_feature (95)..(96): Xaa can be any naturally occurring amino acid
  misc_feature (109)..(111): Xaa can be any naturally occurring amino acid
  misc_feature (116)..(116): Xaa can be any naturally occurring amino acid
  misc_feature (134)..(134): Xaa can be any naturally occurring amino acid
  misc_feature (136)..(136): Xaa can be any naturally occurring amino acid
  misc_feature (142)..(142): Xaa can be any naturally occurring amino acid
  misc_feature (147)..(147): Xaa can be any naturally occurring amino acid
  misc_feature (149)..(149): Xaa can be any naturally occurring amino acid
  misc_feature (166)..(166): Xaa can be any naturally occurring amino acid
  misc_feature (186)..(186): Xaa can be any naturally occurring amino acid
  Coding DNA Sequence Number=SeqID_1707
  Subcellular localization annotation: CTP_CleavageSite=54; ConfidenceScore=5.21e-01
YYALAXISVXSXATLSSPXATLYLPALHAAXSSTLXQXXLHXAHSSARDSLLXSXSPXNSPSXLITXXLCXXSHSLYLXXAAXDLSPXXHSHHTXXSRAHHFIIATAAXXXSTPVXSLARSWLLSPSLSHCAPXPXSNSSQXPHYPXLXLQPTRLSRALASYNYSXSSSPTLLLSAALPSSDVLIXCSSRHTLLLVLSLLRSPFIRP

SEQ ID NO: 9186 - protein, 149 aa, Glycine max
  misc_feature (71)..(71): Xaa can be any naturally occurring amino acid
  misc_feature (76)..(76): Xaa can be any naturally occurring amino acid
  misc_feature (82)..(82): Xaa can be any naturally occurring amino acid
  Coding DNA Sequence Number=SeqID_967
HMINIGQIDTACAASCPAVQSIDRKPDRTRAGTTFCRGGYHLRRTGDGIYVVFVRATRSVSDRCMSLLCPXCTPEXPLSFSXLSSVVVAQRHPHTILIRSPFIRHSYQLHMYCLAPLNPAHVTHHCAILTHSRTTHTRSQESTRRYVMA

SEQ ID NO: 9187 - protein, 177 aa, Glycine max
  misc_feature (177)..(177): Xaa can be any naturally occurring amino acid
  Coding DNA Sequence Number=SeqID_969
  Gene Ontology: Mol. function=DNA binding; Cellular component=nascent polypeptide-associated complex; Biological process=protein transport
  Homolog annotation: Hit_ID=Q9LHG9; Match level="QueryCoverage=62%, HitCoverage=53%, E-value=3e-31, Identity=70%"; Hit description =Nascent polypeptide-associated complex subunit alpha-like protein 1
  Pfam annotation: Domain name=NAC; Domain location=59-118; Score=98.0; E_value=2.9e-26; Accession=PF01849.8; Description=NAC domain
MTTEEKEILAAKLEEQKIDLDKPEVEDADDNDEDDSEDDDKDDDAEGQDGEGGKSKQSRSEKKSRKAMLKLGMKPITGVSRVTIKKSKNIMFVISKPDVFKSPASDTYVIFGEAKIEDLSSQIQSQAAEQFKAPDLSNVVSQGESSSSAAVVQDDDEEIDEDGVDAKDVELVMTQAX

SEQ ID NO: 9188 - protein, 129 aa, Glycine max
  misc_feature (25)..(25): Xaa can be any naturally occurring amino acid
  Coding DNA Sequence Number=SeqID_970
  Gene Ontology: Mol. function=peptidase activity; Cellular component =membrane
  Homolog annotation: Hit_ID=Q9ZRU2; Match level="QueryCoverage=99%, HitCoverage=44%, E-value=9e-33, Identity=57%"; Hit description =Putative uncharacterized protein
DQGDQQNEDIKEHIGKYDEELEDVXQCVSWCLGYQIGDRMAVRVFLLEDQCETKSKDNVNDNVVASVQYRAEYEKASDAFYRVTNTREHIQAYVYDDVRDSVTEREPESDFEHKNDIKKDVEKELEKDM

SEQ ID NO: 9189 - protein, 140 aa, Glycine max; identical to SEQ ID NO: 6330
  misc_feature (10)..(11): Xaa can be any naturally occurring amino acid
  misc_feature (18)..(18): Xaa can be any naturally occurring amino acid
  misc_feature (24)..(25): Xaa can be any naturally occurring amino acid
  misc_feature (39)..(39): Xaa can be any naturally occurring amino acid
  misc_feature (43)..(43): Xaa can be any naturally occurring amino acid
  misc_feature (67)..(67): Xaa can be any naturally occurring amino acid
  misc_feature (85)..(85): Xaa can be any naturally occurring amino acid
  misc_feature (130)..(130): Xaa can be any naturally occurring amino acid
  Coding DNA Sequence Number=SeqID_971

SEQ ID NO: 9190 - protein, 364 aa, Glycine max
  Coding DNA Sequence Number=SeqID_973
  Gene Ontology: Mol. function=protein serine/threonine kinase activity; Cellular component=extracellular region; Biological process=protein amino acid phosphorylation
  Homolog annotation: Hit_ID=A0CW61; Match level="QueryCoverage=84%, HitCoverage=91%, E-value=1e-115, Identity=65%"; Hit description =Chromosome undetermined scaffold_3, whole genome shotgun sequence
  Pfam annotation: Domain name=Pkinase; Domain location=25-282; Score =360.3; E_value=3.3e-105; Accession=PF00069.15; Description=Protein kinase domain
  Pfam annotation: Domain name=Pkinase_C; Domain location=302-347; Score=22.5; E_value=0.0015; Accession=PF00433.14; Description =Protein kinase C terminal domain
  Pfam annotation: Domain name=Pkinase_Tyr; Domain location=25-276; Score=35.5; E_value=1.4e-14; Accession=PF07714.7; Description =Protein tyrosine kinase
  Pfam module annotation: Pfam domain module=Pkinase::Pkinase _C::Pkinase_Tyr; Domain location=25-282::302-347::25-276
MNAMVETYGQEVALHANEKLSIDSFTLMCVIGKGSYAEVILARKKDTGKIYALKILKKKKIEQRNQKEHVRTERNILTEMNHPFLIKMAFAFQTEKKLYFALEYCPGGELFNLLQKKRRFSEDHARFYATQIVLALEHLHKYDIIYRDLKPENVLIDSDGYIRLTDFGLSKTGIQGNKGAYSVCGTPEYLAPEILFQRGHGKAVDWWTLGAILFEMLTGLPPFYTNNREELFQKIKYYALKYPPYLSPNARALLDGLFQKEPSKRLGSGTTGAEEIKAHPWFHGVDWNMIYNKEFKAPFTPVIKNDVDVSNFDAEFTEAPIGSLGSITDTTADVDASYTGWSYCGNELEQQGQGLDRPSTMEIE

SEQ ID NO: 9191 - protein, 109 aa, Glycine max
  misc_feature (19)..(19): Xaa can be any naturally occurring amino acid
  misc_feature (22)..(22): Xaa can be any naturally occurring amino acid
  misc_feature (28)..(28): Xaa can be any naturally occurring amino acid
  misc_feature (35)..(35): Xaa can be any naturally occurring amino acid
  misc_feature (55)..(55): Xaa can be any naturally occurring amino acid
  misc_feature (65)..(65): Xaa can be any naturally occurring amino acid
  misc_feature (89)..(89): Xaa can be any naturally occurring amino acid
  Coding DNA Sequence Number=SeqID_974
YHLRDSALGGWHIRARALXEQXYRERSXLLRSAYXGRVILLISRVGVICAARPCXVFSNTYSTQXRYGERALQRGSGFCGASTPPLAGXCSTTICSNRRLLPFALPLGR

SEQ ID NO: 9192 - protein, 99 aa, Glycine max
  misc_feature (9)..(9): Xaa can be any naturally occurring amino acid
  Coding DNA Sequence Number=SeqID_976
CVSEDIWLXREPENVPSQAAYCMCSQCSKYKKYYMRHCRIDIISVSYIPLGYDVIDISMSEEAIVRYTRHRYYSVQSQEERKKYTRYNYTAWYTISIPI

SEQ ID NO: 9193 - protein, 109 aa, Glycine max
  misc_feature (14)..(14): Xaa can be any naturally occurring amino acid
  misc_feature (19)..(19): Xaa can be any naturally occurring amino acid
  misc_feature (42)..(42): Xaa can be any naturally occurring amino acid
  misc_feature (56)..(56): Xaa can be any naturally occurring amino acid
  misc_feature (72)..(72): Xaa can be any naturally occurring amino acid
  Coding DNA Sequence Number=SeqID_978
LEKLAKHTVSLSVXVGIVXRCVHFYSIVFICCLTNRVIDSRXNEVSILSGVCIHIXSSYTLSLHLNLDILRXDRDNNNRSGAWSPEPARPRAVARTSCLPCENDDEEGV

SEQ ID NO: 9194 - protein, 84 aa, Glycine max; identical to SEQ ID NO: 6335
  misc_feature (6)..(6): Xaa can be any naturally occurring amino acid
  misc_feature (24)..(24): Xaa can be any naturally occurring amino acid
  misc_feature (26)..(29): Xaa can be any naturally occurring amino acid
  misc_feature (42)..(44): Xaa can be any naturally occurring amino acid
  misc_feature (47)..(48): Xaa can be any naturally occurring amino acid
  misc_feature (77)..(78): Xaa can be any naturally occurring amino acid
  Coding DNA Sequence Number=SeqID_980

SEQ ID NO: 9195 - protein, 111 aa, Glycine max
  Coding DNA Sequence Number=SeqID_982
QCASTHELGQEHTENRTRERESNPNVFRTLAPTHTLPRHSLVALGTFRRSYSSLPRVRLAHKHSVCHAIIELLAEPIVTSVFLYCVQNKFMGLLEVLFFLSRRGKIQSPRH

SEQ ID NO: 9196 - protein, 142 aa, Glycine max
  misc_feature (5)..(5): Xaa can be any naturally occurring amino acid
  misc_feature (45)..(45): Xaa can be any naturally occurring amino acid
  misc_feature (47)..(47): Xaa can be any naturally occurring amino acid
  misc_feature (94)..(94): Xaa can be any naturally occurring amino acid
  misc_feature (126)..(126): Xaa can be any naturally occurring amino acid
  misc_feature (132)..(132): Xaa can be any naturally occurring amino acid
  misc_feature (134)..(134): Xaa can be any naturally occurring amino acid
  Coding DNA Sequence Number=SeqID_984
YILCXMLFTYIIIADAATAVQAGEADTTAARRSCPPVGRTGAREXRXRVPARWRRDAVEIRREEADKGLGACAVATRMAPVGGEEDTVPGAMRXGGRRAGACERVECGSDCISVCRVCVLLCLSVXLSVVAXCXTIGQERRP

SEQ ID NO: 9197 - protein, 129 aa, Glycine max; identical to SEQ ID NO: 6338
  Coding DNA Sequence Number=SeqID_985

SEQ ID NO: 9198 - protein, 104 aa, Glycine max; identical to SEQ ID NO: 8796
  misc_feature (26)..(26): Xaa can be any naturally occurring amino acid
  Coding DNA Sequence Number=SeqID_987
  Subcellular localization annotation: CTP_CleavageSite=12; ConfidenceScore=5.15e-01

SEQ ID NO: 9199 - protein, 96 aa, Glycine max
  misc_feature (4)..(4): Xaa can be any naturally occurring amino acid
  misc_feature (11)..(11): Xaa can be any naturally occurring amino acid
  misc_feature (16)..(16): Xaa can be any naturally occurring amino acid
  misc_feature (18)..(18): Xaa can be any naturally occurring amino acid
  misc_feature (23)..(25): Xaa can be any naturally occurring amino acid
  misc_feature (28)..(28): Xaa can be any naturally occurring amino acid
  misc_feature (30)..(30): Xaa can be any naturally occurring amino acid
  misc_feature (32)..(32): Xaa can be any naturally occurring amino acid
  misc_feature (44)..(44): Xaa can be any naturally occurring amino acid
  misc_feature (48)..(48): Xaa can be any naturally occurring amino acid
  misc_feature (61)..(61): Xaa can be any naturally occurring amino acid
  misc_feature (84)..(84): Xaa can be any naturally occurring amino acid
  misc_feature (86)..(86): Xaa can be any naturally occurring amino acid
  Coding DNA Sequence Number=SeqID_989
CVAXRISSTAXRGQLXYXHRMIXXXVRXNXDXCHSRTSDTRPTXVYGXLDSLRTPTIVYCXAVRARDVHAVDYASTHVIYVIAXSXYIRMIERVRL

SEQ ID NO: 9200 - protein, 134 aa, Glycine max
  misc_feature (89)..(89): Xaa can be any naturally occurring amino acid
  Coding DNA Sequence Number=SeqID_991
  Gene Ontology: Cellular component=integral to membrane; Biological process=photosynthesis
  Homolog annotation: Hit_ID=A7PUM2; Match level="QueryCoverage=85%, HitCoverage=82%, E-value=1e-29, Identity=64%"; Hit description =Chromosome chr7 scaffold_31, whole genome shotgun sequence
  Pfam annotation: Domain name=PsbW; Domain location=1-134; Score =172.7; E_value=9.4e-49; Accession=PF03912.4; Description=Photosystem II reaction centre W protein, PsbW
  Subcellular localization annotation: CTP_CleavageSite=42; ConfidenceScore=5.33e-01
TISAAITTPSITRACLVQKRSLGFSFPLLGLPSMGKVGRESCSMEEKPFFVKEINLYMFGDGASLMATGHAAFMSGSIMALVDERLITXGTGLPFGLINNPLGWILFRVFGLICALYFVYTSSLEEDYDHGLSL

SEQ ID NO: 9201 - protein, 87 aa, Glycine max
  misc_feature (44)..(44): Xaa can be any naturally occurring amino acid
  misc_feature (85)..(85): Xaa can be any naturally occurring amino acid
  Coding DNA Sequence Number=SeqID_992
MDVYVRSIFILHRRCCCAALIGCQSSAGSGTPSAAPAYAGLHQXASGAQRLARCNDYVSRHVLCAYAPSVSQTPHQLRVLYYIFXKL

SEQ ID NO: 9202 - protein, 161 aa, Glycine max; identical to SEQ ID NO: 6351
  misc_feature (16)..(16): Xaa can be any naturally occurring amino acid
  misc_feature (80)..(80): Xaa can be any naturally occurring amino acid
  misc_feature (105)..(105): Xaa can be any naturally occurring amino acid
  misc_feature (110)..(110): Xaa can be any naturally occurring amino acid
  misc_feature (137)..(137): Xaa can be any naturally occurring amino acid
  misc_feature (145)..(145): Xaa can be any naturally occurring amino acid
  Coding DNA Sequence Number=SeqID_994

SEQ ID NO: 9203 - protein, 127 aa, Glycine max
  misc_feature (5)..(5): Xaa can be any naturally occurring amino acid
  Coding DNA Sequence Number=SeqID_996
REKCXGRCGWNGRSFAVLGKCSGCVGGGKSGFVRSGMGGGRKERLEHMRGTMKRSVGAGGDTVFFFRCSRGKAILQVGGIPVTVPHLFCQGSPLFRIPGFELWPSTRGWASLDLVRRSAVMPLEGVS

SEQ ID NO: 9204 - protein, 70 aa, Glycine max
  misc_feature (28)..(28): Xaa can be any naturally occurring amino acid
  Coding DNA Sequence Number=SeqID_997
DFPPFMYHRHGYDKNCHSLLTFFNYFCXTLGKQKAYVVPMLRLEPLGHLSCIMMSRNQVNSESFIFLINA

SEQ ID NO: 9205 - protein, 309 aa, Glycine max
  Coding DNA Sequence Number=SeqID_999
  Gene Ontology: Mol. function=binding; Cellular component=integral to membrane; Biological process=transport
  Homolog annotation: Hit_ID=Q22CY1; Match level="QueryCoverage=86%, HitCoverage=89%, E-value=2e-24, Identity=26%"; Hit description =Mitochondrial carrier protein
  Pfam annotation: Domain name=Mito_carr; Domain location=119-209; Score=53.7; E_value=6.6e-13; Accession=PF00153.17; Description =Mitochondrial carrier protein
  Pfam annotation: Domain name=Mito_carr; Domain location=216-307; Score=51.4; E_value=3.2e-12; Accession=PF00153.17; Description =Mitochondrial carrier protein
  Pfam annotation: Domain name=Mito_carr; Domain location=27-115; Score= 70.2; E_value=6.7e-18; Accession=PF00153.17; Description =Mitochondrial carrier protein
  Pfam module annotation: Pfam domain module=Mito_carr::Mito_carr::Mito_ carr; Domain location=119-209::216-307::27-115
  Subcellular localization annotation: CTP_CleavageSite=20; ConfidenceScore=5.03e-01
MQDTQFQAFNFAGSSLAIPVQQTSQPGHAMYGFLGGFAGLLMDTVLHPIDTVRTRIKTNTQESVALLSQIKYMYRNEGFSSYVRGLTCTLGGSFLANGAYFFAYEKLKNTFTQRETFNEGVAPFVAAFTSGVLANVLYLPFIVVRTRMQTASGFYDYRNAFDGIKKVIKYEGFRSLYLGGPVFLTQTALDLSLTFGFYEIFHKTIKSLFQIESDSSLPITMASSVMAASLSAIIANPLDVLVARMQTMHTSAHSKCTIPAMAKRIYAREGLAGFMKGVTGTMSHYSMAALILFPTYQALKDFYNLDSDL

SEQ ID NO: 9206 - protein, 153 aa, Glycine max
  misc_feature (13)..(13): Xaa can be any naturally occurring amino acid
  misc_feature (27)..(27): Xaa can be any naturally occurring amino acid
  misc_feature (104)..(104): Xaa can be any naturally occurring amino acid
  misc_feature (135)..(136): Xaa can be any naturally occurring amino acid
  Coding DNA Sequence Number=SeqID_1000
HTTAVSRCVGVAXLRMLLVCLLYHMQXKRRWRGFAAYCDVVDLRVSYSCCATLSSRQCNRRITLSLYFATIIAELVRANALPSFACLYYPRTIPPSPHKQIRNXTTHTQQTTEHTETKREPATRARTTHMTHASXXEHNNIHEHEVVELHIMR

SEQ ID NO: 9207 - protein, 134 aa, Glycine max; identical to SEQ ID NO: 6355
  misc_feature (1)..(58): Xaa can be any naturally occurring amino acid
  misc_feature (128)..(128): Xaa can be any naturally occurring amino acid
  Coding DNA Sequence Number=SeqID_1002

SEQ ID NO: 9208 - protein, 91 aa, Glycine max
  Coding DNA Sequence Number=SeqID_1004
QFKYNSCYATPMKRTGRPQATSPSIPGGQHNHRGEEGNERERRGRRVVVLGRVMVRIHSYQISTALMTCRIERMMRRYTDRMYVTHLRGLR

SEQ ID NO: 9209 - protein, 123 aa, Glycine max
  Coding DNA Sequence Number=SeqID_1006
  Gene Ontology: Biological process=response to stress
  Homolog annotation: Hit_ID=O65149; Match level="QueryCoverage=75%, HitCoverage=95%, E-value=4e-15, Identity=45%"; Hit description=Late embryogenis abundant protein 5
  Pfam annotation: Domain name=LEA_3; Domain location=30-120; Score =174.1; E_value=3.7e-49; Accession=PF03242.4; Description=Late embryogenesis abundant protein
  Subcellular localization annotation: CTP_CleavageSite=74; ConfidenceScore=5.69e-01
KEQNLPNNKKSFNLLLSVPSLSLSHISINMARSLSSVKFVSAFVSQELSNAIFRRGFAATTAQPSGGKGGAVVSAVMKKGMEESNQKLSAWIPDPKTGYYRPETGSNEIDPAELRAALLNKKQ

SEQ ID NO: 9210 - protein, 110 aa, Glycine max
  Coding DNA Sequence Number=SeqID_1007
  Gene Ontology: Mol. function=single-stranded DNA binding; Cellular component=mitochondrion
  Homolog annotation: Hit_ID=Q84J78; Match level="QueryCoverage=80%, HitCoverage=36%, E-value=3e-16, Identity=59%"; Hit description =Single-stranded DNA-binding protein, mitochondrial precursor
  Subcellular localization annotation: CTP_CleavageSite=37; ConfidenceScore=5.57e-01
KMNSLAIRVSKLLRSSPISPPLGNQSPLLSPKSSGSVAVTAWRSWFSTGPIDEEGLEEDFEETISERPAELQPHGVDPRKGWGFRGVHRVNLIFNLLLFSLLKIVVTIKP

SEQ ID NO: 9211 - protein, 116 aa, Glycine max; identical to SEQ ID NO: 6357
  misc_feature (5)..(5): Xaa can be any naturally occurring amino acid
  misc_feature (62)..(62): Xaa can be any naturally occurring amino acid
  misc_feature (78)..(78): Xaa can be any naturally occurring amino acid
  Coding DNA Sequence Number=SeqID_1008

SEQ ID NO: 9212 - protein, 103 aa, Glycine max
  misc_feature (29)..(29): Xaa can be any naturally occurring amino acid
  misc_feature (64)..(64): Xaa can be any naturally occurring amino acid
  misc_feature (71)..(72): Xaa can be any naturally occurring amino acid
  misc_feature (81)..(81): Xaa can be any naturally occurring amino acid
  misc_feature (89)..(89): Xaa can be any naturally occurring amino acid
  Coding DNA Sequence Number=SeqID_1009
PRTGPRKRTREPETRSTKRRRAGDPHKKXGRRNKAEQPGRTTKERTQDKQPTTGTKTAQQRGNXKKHTTEXXPRPTPESRXEQQRNTNXPNNKEQGQKQETNK

SEQ ID NO: 9213 - protein, 687 aa, Glycine max
  misc_feature (405)..(405): Xaa can be any naturally occurring amino acid
  misc_feature (456)..(456): Xaa can be any naturally occurring amino acid
  Coding DNA Sequence Number=SeqID_1011
  Gene Ontology: Mol. function=1,3-beta-glucan synthase activity; Cellular component=1,3-beta-glucan synthase complex; Biological process=1,3-beta-glucan biosynthetic process
  Homolog annotation: Hit_ID=A7PCJ8; Match level="QueryCoverage=100%, HitCoverage=82%, E-value=0.0, Identity=86%"; Hit description =Chromosome chr17 scaffold_12, whole genome shotgun sequence
  Pfam annotation: Domain name=Glucan_synthase; Domain location=1-576; Score=398.0; E_value=1.4e-116; Accession=PF02364.6; Description=1,3 -beta-glucan synthase component
IYGQQKQRKAPEAADIALLLQRNEALRVAFIHVDESTTDGNTSKVFYSKLVKADINGKDQEIYSIKLPGDPKLGEGKPENQNHAIVFTRGEAVQTIDMNQDNYLEEAMKMRNLLEEFHANHGLRPPSILGVREHVFTGSVSSLAWFMSNQETSFVTLAQRVLANPLKVRMHYGHPDVFDRIFHITRGGISKASRVINISEDIYAGFNSTLRLGNVTHHEYIQVGKGRDVGLNQIALFEGKVAGGNGEQVLSRDIYRLGQLFDFFRMLSFFFTTVGYYVCTMMTVLTVYIFLYGRAYLAFSGLDEDVSKNAKLQGNTALDAALNAQFLVQIGVFTAVPMIMGFILELGLLKAVFSFITMQLQLCSVFFTFSLGTRTHYFGRTILHGGAKYRATGRGFVVRHIKFAXNYYRLYSRSHFVKALEVALLLIVYIAYGYAKGGADTYVLLTLSSWFLVIYXFFDPYLFNLSGFEWQKTVEDFDDWTSWLFYKGGVGVKGENSWESWWDEEQMHIQTLRGRILETILSARFFLFQYGVVYKLHLTGNNTSLAIYGFSWAVLVGIVLIFKIFTYSPKKSADFQLVLRFSQGVASIGLVAAVCLVVAFTPLSIADLFASILAFIPTGWGILSLAIAWKKIVWSLGMWDSVREFARMYDAGMGMIIFAPIAFLSWFPFISTFQSRLLFNQAFSRGL

SEQ ID NO: 9214 - protein, 108 aa, Glycine max
  misc_feature (15)..(15): Xaa can be any naturally occurring amino acid
  misc_feature (54)..(54): Xaa can be any naturally occurring amino acid
  misc_feature (57)..(57): Xaa can be any naturally occurring amino acid
  Coding DNA Sequence Number=SeqID_1012
ILRFLIILACGFGVXYNRGEKIINERAGRGHNQYMIGAGRLLIQPSYTHLLASXPVXHLRSLIAGVVDGTALSKHTEPPPARVAVCTIENTRRRRAERRLAVSAISYL

SEQ ID NO: 9215 - protein, 121 aa, Glycine max; identical to SEQ ID NO: 6376
  misc_feature (24)..(24): Xaa can be any naturally occurring amino acid
  misc_feature (40)..(40): Xaa can be any naturally occurring amino acid
  misc_feature (72)..(72): Xaa can be any naturally occurring amino acid
  misc_feature (95)..(95): Xaa can be any naturally occurring amino acid
  misc_feature (113)..(114): Xaa can be any naturally occurring amino acid
  Coding DNA Sequence Number=SeqID_1014

SEQ ID NO: 9216 - protein, 146 aa, Glycine max
  misc_feature (26)..(26): Xaa can be any naturally occurring amino acid
  misc_feature (101)..(101): Xaa can be any naturally occurring amino acid
  misc_feature (122)..(122): Xaa can be any naturally occurring amino acid
  Coding DNA Sequence Number=SeqID_1016
  Gene Ontology: Mol. function=protein binding; Cellular component =cytoskeleton; Biological process=ubiquitin-dependent protein catabolic process
  Homolog annotation: Hit_ID=Q155U2; Match level="QueryCoverage=100%, HitCoverage=93%, E-value=3e-44, Identity=64%"; Hit description=SKP1 -like b
  Pfam annotation: Domain name=Skp1; Domain location=78-146; Score =82.7; E_value=1.2e-21; Accession=PF01466.9; Description=Skp1 family, dimerisation domain
  Pfam annotation: Domain name=Skp1_POZ; Domain location=5-65; Score =47.7; E_value=4.1e-11; Accession=PF03931.5; Description=Skp1 family, tetramerisation domain
  Pfam module annotation: Pfam domain module=Skp1::Skp1_POZ; Domain location=78-146::5-65
MTSLKKITLKSADGEAFEEKEAEMLXSQTIKHMVEDHCPYGAIPLSNVTSKIQANGIENCKINDEDVNPQDEPSEDDLKDWDVEFAEVHQATLFDLILAGXNTVNIESLLHLRCETVHDMIXVKTPEEIRKTFNIKNDFTPEEEEE

SEQ ID NO: 9217 - protein, 77 aa, Glycine max
  misc_feature (2)..(2): Xaa can be any naturally occurring amino acid
  misc_feature (18)..(18): Xaa can be any naturally occurring amino acid
  Coding DNA Sequence Number=SeqID_1017
TXMMATLPEIWLFAKCLXLCRELFIEHSAKYTLSSATEHTLDKSSSPSFIAVTTTFFVECQMTLGNNKGGGAYVADS

SEQ ID NO: 9218 - protein, 87 aa, Glycine max; identical to SEQ ID NO: 6380
  Coding DNA Sequence Number=SeqID_1019

SEQ ID NO: 9219 - protein, 142 aa, Glycine max
  misc_feature (91)..(91): Xaa can be any naturally occurring amino acid
  misc_feature (98)..(98): Xaa can be any naturally occurring amino acid
  misc_feature (129)..(129): Xaa can be any naturally occurring amino acid
  Coding DNA Sequence Number=SeqID_1021
RNTTPKFSNHFHLTPPKPNFPREIKIRGMVGYNFGPYPQFRKPRNRFLAFSGGSYIYIAFVQKEIFQALVVSAVSAGFSSFLSSSLSWFFXPLFSHHXSRLLVVFLFLFSSSTTVSLSLTTLLVSSSVXVSTAGGASTSFLV

SEQ ID NO: 9220 - protein, 125 aa, Glycine max
  misc_feature (91)..(91): Xaa can be any naturally occurring amino acid
  Coding DNA Sequence Number=SeqID_1023
  Gene Ontology: Mol. function=enzyme inhibitor activity
  Homolog annotation: Hit_ID=Q8L9U8; Match level="QueryCoverage=100%, HitCoverage=77%, E-value=1e-28, Identity=52%"; Hit description =Putative uncharacterized protein
  Pfam annotation: Domain name=PMEI; Domain location=21-125; Score =21.7; E_value=0.00024; Accession=PF04043.6; Description=Plant invertasepectin methylesterase inhibitor
MSINLLMTLHGTTFLLLVASSQALKLSLGDPCTVADYPKLCRRTIKGQTNVNAATDMAIKELMKRTMQAKDMAKKEPKGDGGVAVCLSTFXSAFDNLDKALKNIQGNDGFSLNINLSAALTDYDT

SEQ ID NO: 9221 - protein, 140 aa, Glycine max
  Coding DNA Sequence Number=SeqID_1024
  Gene Ontology: Mol. function=enzyme inhibitor activity
  Homolog annotation: Hit_ID=A0MET9; Match level="QueryCoverage=100%, HitCoverage=64%, E-value=1e-62, Identity=82%"; Hit description =Putative uncharacterized protein
MNTPIKLTFLILCIALTATAFLVPAKRADVTPEHEKTVAGICNVVEDKNLCSITLKTVPSNDPAFLVRYLATAAESSVKKGLNFLSEIKPKYKGNSFATNCITGCEKQLNNALEDFADFWKAAGKNITSMADNYFTCKKK

SEQ ID NO: 9222 - protein, 123 aa, Glycine max
  Coding DNA Sequence Number=SeqID_1025
YYILQHNLIILRINHSASETIEGPSLPLERINHIILHTFTYQSFLTLHLTRPLSHQKYEGGLAKKRPLPRTLRGTPFVGGGIFSTRNAIVLPLKHNPLPLGMEQVRDAFHGNTGLSGSPRTSC

SEQ ID NO: 9223 - protein, 138 aa, Glycine max
  misc_feature (10)..(10): Xaa can be any naturally occurring amino acid
  misc_feature (46)..(46): Xaa can be any naturally occurring amino acid
  misc_feature (53)..(53): Xaa can be any naturally occurring amino acid
  misc_feature (57)..(57): Xaa can be any naturally occurring amino acid
  misc_feature (59)..(59): Xaa can be any naturally occurring amino acid
  misc_feature (67)..(67): Xaa can be any naturally occurring amino acid
  misc_feature (69)..(69): Xaa can be any naturally occurring amino acid
  misc_feature (73)..(73): Xaa can be any naturally occurring amino acid
  misc_feature (88)..(90): Xaa can be any naturally occurring amino acid
  misc_feature (92)..(92): Xaa can be any naturally occurring amino acid
  misc_feature (94)..(94): Xaa can be any naturally occurring amino acid
  misc_feature (100)..(100): Xaa can be any naturally occurring amino acid
  misc_feature (102)..(102): Xaa can be any naturally occurring amino acid
  misc_feature (115)..(115): Xaa can be any naturally occurring amino acid
  misc_feature (124)..(124): Xaa can be any naturally occurring amino acid
  misc_feature (133)..(133): Xaa can be any naturally occurring amino acid
  Coding DNA Sequence Number=SeqID_1027
RRTCTRSAQXSQRHPDDVCAWEWWQAYDAATSSTTLHYTLYISIIXFSREYTXHLSXSXRAASIIYXLXSCVXLASNHITQPTLLHLXXXPXSXHHVIVXVXEVRLVERYLHVSXQHTPTKTTXHINIIYVSXIVRDV

SEQ ID NO: 9224 - protein, 105 aa, Glycine max
  misc_feature (1)..(1): Xaa can be any naturally occurring amino acid
  Coding DNA Sequence Number=SeqID_1029
  Subcellular localization annotation: CTP_CleavageSite=68; ConfidenceScore=5.28e-01
XNERLRLVFTFTSPFQVGTPLWSFILFAKLGLINGATATALPVLAHLSGVVSLLSAVHRSRRRAMVTRAPSKSSFAKKMGSIAPHRAVQARPSNDSPGSDWKIEA

SEQ ID NO: 9225 - protein, 82 aa, Glycine max; identical to SEQ ID NO: 6391
  misc_feature (30)..(30): Xaa can be any naturally occurring amino acid
  misc_feature (42)..(42): Xaa can be any naturally occurring amino acid
  misc_feature (48)..(48): Xaa can be any naturally occurring amino acid
  misc_feature (51)..(51): Xaa can be any naturally occurring amino acid
  misc_feature (58)..(58): Xaa can be any naturally occurring amino acid
  Coding DNA Sequence Number=SeqID_1031

SEQ ID NO: 9226 - protein, 139 aa, Glycine max
  Coding DNA Sequence Number=SeqID_1033
  Homolog annotation: Hit_ID=A7P0P0; Match level="QueryCoverage=90%, HitCoverage=16%, E-value=3e-29, Identity=53%"; Hit description =Chromosome chr19 scaffold_4, whole genome shotgun sequence
ELARFSASLGPIAWKIASHRIQHALPAGCKFGRGWVGEYEPLSTPILMVNNRVQKENSLVMKLHSTTELPKGNQNCKNVESSIMHPVNGQMLEGKRPSMPDFKGKPLFGSAGVRLSAPVNILNQEQNAQCQILHLFVFS

SEQ ID NO: 9227 - protein, 144 aa, Glycine max; identical to SEQ ID NO: 8823
  misc_feature (65)..(65): Xaa can be any naturally occurring amino acid
  misc_feature (67)..(67): Xaa can be any naturally occurring amino acid
  misc_feature (121)..(121): Xaa can be any naturally occurring amino acid
  Coding DNA Sequence Number=SeqID_1034

SEQ ID NO: 9228 - protein, 62 aa, Glycine max
  Coding DNA Sequence Number=SeqID_1036
  Gene Ontology: Mol. function=iron-sulfur cluster binding; Cellular component=mitochondrial matrix; Biological process=iron-sulfur cluster assembly
  Homolog annotation: Hit_ID=A7QNZ0; Match level="QueryCoverage=79%, HitCoverage=31%, E-value=2e-16, Identity=81%"; Hit description =Chromosome chr1 scaffold_135, whole genome shotgun sequence
  Pfam annotation: Domain name=NifU_N; Domain location=15-63; Score= -33.2; E_value=0.0032; Accession=PF01592.7; Description=NifU-like N terminal domain
MGTTSSGALGFRRRLYHERVVDHYDNPRNVGSLDKNDPIVGTGLVGAPACGHVMQLHINVRD

SEQ ID NO: 9229 - protein, 436 aa, Glycine max
  misc_feature (36)..(36): Xaa can be any naturally occurring amino acid
  misc_feature (93)..(93): Xaa can be any naturally occurring amino acid
  misc_feature (103)..(103): Xaa can be any naturally occurring amino acid
  misc_feature (177)..(177): Xaa can be any naturally occurring amino acid
  misc_feature (202)..(202): Xaa can be any naturally occurring amino acid
  misc_feature (216)..(216): Xaa can be any naturally occurring amino acid
  misc_feature (251)..(251): Xaa can be any naturally occurring amino acid
  misc_feature (255)..(255): Xaa can be any naturally occurring amino acid
  misc_feature (293)..(293): Xaa can be any naturally occurring amino acid
  misc_feature (296)..(296): Xaa can be any naturally occurring amino acid
  misc_feature (308)..(308): Xaa can be any naturally occurring amino acid
  misc_feature (379)..(379): Xaa can be any naturally occurring amino acid
  misc_feature (393)..(393): Xaa can be any naturally occurring amino acid
  Coding DNA Sequence Number=SeqID_1037
  Homolog annotation: Hit_ID=A2FBI1; Match level="QueryCoverage=85%, HitCoverage=43%, E-value=2e-09, Identity=17%"; Hit description =Smooth muscle caldesmon, putative
  Subcellular localization annotation: CTP_CleavageSite=41; ConfidenceScore=5.01e-01
VSPRNTAEGANKARSTANQRTEQRRPERRRTREERXTRTPTASRDRKQTQTGRNREKEDRQHNERKTTQRRRREAGGGKRDKAQQKQATPKEXASGGGRRRKXRRGEQAAETRRQRRDDSTATPTTSKRERGARQQETTRRKRKRKKHTKDTAHRSRNAERKRKGTEERNSKGTRKXESRGQADEQAAKRRRRERAGAKRRXRGQEERRANEADEXREVNSKHAAERETKKHSTRPKKREDAKEEANTRMXEGQXDGAEMKSEQTPRRDDAKDRTKKKKRQRGIDEERIRTRXRPXRRNRQKKEEHRXDNTTRNQRSVQTRTKRARYERAETDSTAACKQQQRRSVPYGDSRGVAHRRPAEPHYQQRQRTDKRGRKHLXMRPRAVKGGMRKVXRNTTARRDHEEVERNRRNTECTSRTAQRRARRRHRERTDSYTM

SEQ ID NO: 9230 - protein, 129 aa, Glycine max
  misc_feature (17)..(19): Xaa can be any naturally occurring amino acid
  Coding DNA Sequence Number=SeqID_1038
  Homolog annotation: Hit_ID=Q8LGE7; Match level="QueryCoverage=65%, HitCoverage=79%, E-value=6e-45, Identity=98%"; Hit description =NADH:ubiquinone oxidoreductase-like protein
FSGEDPNRSVEKGYRVXXXAVDATGNPIPTSAVLTASAKHIGLRCMPENVAFLKCKKNDPNPEKCLDKGRDVTRCVLGLLKDLHQKCQKEMDDYVGCMYYYTNGVRKAVGIWGCDCGVAGGAYTMNTAS

SEQ ID NO: 9231 - protein, 125 aa, Glycine max
  misc_feature (58)..(58): Xaa can be any naturally occurring amino acid
  Coding DNA Sequence Number=SeqID_1039
  Homolog annotation: Hit_ID=A2XNF5; Match level="QueryCoverage=52%, HitCoverage=40%, E-value=7e-16, Identity=63%"; Hit description =Putative uncharacterized protein
  Pfam annotation: Domain name=zf-C2H2; Domain location=63-85; Score =19.4; E_value=0.013; Accession=PF00096.16; Description=Zinc finger, C2H2 type
MGAGMKRAREEEPTVSLALSLSTDSSASTTTSDDSGTGAPTPAAPGKRTRRRRVVATXGEGDFVCKTCGRAFETFQALGGHRTSHLRGRHGLELGVGVARAIKERQRREDRQQHDCHICGLGFET

SEQ ID NO: 9232 - protein, 145 aa, Glycine max
  misc_feature (7)..(7): Xaa can be any naturally occurring amino acid
  misc_feature (10)..(10): Xaa can be any naturally occurring amino acid
  misc_feature (20)..(20): Xaa can be any naturally occurring amino acid
  misc_feature (25)..(25): Xaa can be any naturally occurring amino acid
  misc_feature (42)..(42): Xaa can be any naturally occurring amino acid
  misc_feature (59)..(59): Xaa can be any naturally occurring amino acid
  misc_feature (62)..(62): Xaa can be any naturally occurring amino acid
  misc_feature (80)..(80): Xaa can be any naturally occurring amino acid
  misc_feature (89)..(89): Xaa can be any naturally occurring amino acid
  misc_feature (95)..(95): Xaa can be any naturally occurring amino acid
  misc_feature (100)..(100): Xaa can be any naturally occurring amino acid
  misc_feature (122)..(122): Xaa can be any naturally occurring amino acid
  misc_feature (125)..(125): Xaa can be any naturally occurring amino acid
  misc_feature (128)..(128): Xaa can be any naturally occurring amino acid
  misc_feature (130)..(131): Xaa can be any naturally occurring amino acid
  misc_feature (135)..(135): Xaa can be any naturally occurring amino acid
  misc_feature (140)..(142): Xaa can be any naturally occurring amino acid
  misc_feature (145)..(145): Xaa can be any naturally occurring amino acid
  Coding DNA Sequence Number=SeqID_1040
YTHSLYXVRXVACARRVAHXMIVGXLARIDVPCLLRGCIHDXISVRRTAPLHFRGYRRXSLXACTVYIGRARSRRPVHHXAFRAARAPXCATDAXCPHAXCRLSLHPELTVSSRRLCRKDSXTNXTNXTXXLSVXDRVWXXXWHX

SEQ ID NO: 9233 - protein, 244 aa, Glycine max
  misc_feature (95)..(95): Xaa can be any naturally occurring amino acid
  misc_feature (104)..(104): Xaa can be any naturally occurring amino acid
  misc_feature (115)..(115): Xaa can be any naturally occurring amino acid
  misc_feature (153)..(153): Xaa can be any naturally occurring amino acid
  Coding DNA Sequence Number=SeqID_1042
  Gene Ontology: Mol. function=protein binding; Cellular component =nucleus; Biological process=abscisic acid mediated signaling
  Homolog annotation: Hit_ID=A7P0G6; Match level="QueryCoverage=88%, HitCoverage=72%, E-value=1e-72, Identity=62%"; Hit description =Chromosome chr19 scaffold_4, whole genome shotgun sequence
  Pfam annotation: Domain name=Pirin; Domain location=4-72; Score=45.0; E_value=2.6e-10; Accession=PF02678.6; Description=Pirin
  Pfam annotation: Domain name=Pirin_C; Domain location=125-230; Score =53.5; E_value=7.1e-13; Accession=PF05726.3; Description=Pirin C -terminal region
  Pfam module annotation: Pfam domain module=Pirin::Pirin_C; Domain location=4-72::125-230
MSVNSFVHGHLFFINSVQSFVSFREALMHEDFEGHKGTIEAGDLQWMTAGKGIVHSEMPAAQGTRKGLQLWINLASKYKMIETRYQEMLSKDIAXAEDDGIKFXVLAGEALGIMXPIYTKILNMFWVFSLRRGCFLKPNIPTCGNSSYYILWXGGILGNMEPKLSNSYHIFVLGPGDGLKAWNKCSKLLRFILVGAEPLGEPLVQFGPFVMNSQEEIDQTIDDFENFANGFEKARHWTFESQIN

SEQ ID NO: 9234 - protein, 280 aa, Glycine max; identical to SEQ ID NO: 8830
  misc_feature (26)..(26): Xaa can be any naturally occurring amino acid
  misc_feature (29)..(30): Xaa can be any naturally occurring amino acid
  misc_feature (92)..(92): Xaa can be any naturally occurring amino acid
  misc_feature (135)..(135): Xaa can be any naturally occurring amino acid
  misc_feature (153)..(153): Xaa can be any naturally occurring amino acid
  misc_feature (166)..(167): Xaa can be any naturally occurring amino acid
  misc_feature (179)..(179): Xaa can be any naturally occurring amino acid
  misc_feature (183)..(183): Xaa can be any naturally occurring amino acid
  misc_feature (186)..(186): Xaa can be any naturally occurring amino acid
  misc_feature (188)..(188): Xaa can be any naturally occurring amino acid
  misc_feature (239)..(239): Xaa can be any naturally occurring amino acid
  misc_feature (242)..(242): Xaa can be any naturally occurring amino acid
  Coding DNA Sequence Number=SeqID_1043

SEQ ID NO: 9235 - protein, 94 aa, Glycine max
  Coding DNA Sequence Number=SeqID_1045
EELGASQRISLRRGELSTSHVEPKTCGRGLPQLHREEAHTTGMRGRLYSYEIQGEAYELTTTASCESLSIKRCPGGHVYHIDSRYLPPLASVLL

SEQ ID NO: 9236 - protein, 127 aa, Glycine max
  misc_feature (87)..(87): Xaa can be any naturally occurring amino acid
  misc_feature (89)..(90): Xaa can be any naturally occurring amino acid
  Coding DNA Sequence Number=SeqID_1047
ITRDTFFLFHTLQIKSTLPTLYIASSRPYDKKYLVWSSESGQWFSPDPTLLLGVEERDAFTGLCSIDTYVGNCVCRTLPSDRPTAEXAXXHHRRSFRPLKRYVTDSGGLLSSICCQPRDSARFLTIS

SEQ ID NO: 9237 - protein, 106 aa, Glycine max
  Coding DNA Sequence Number=SeqID_1049
FWEDKGLTRMRMGYQITTVEARTWICSCSQREYWMFSKLCHTHVLLLALAWAPVCVNAICICQRIMASLVIGLQGAPPMVKIPHRMMLDIILQTLGLPVAEYRSKM

SEQ ID NO: 9238 - protein, 112 aa, Glycine max
  misc_feature (31)..(32): Xaa can be any naturally occurring amino acid
  misc_feature (59)..(59): Xaa can be any naturally occurring amino acid
  misc_feature (73)..(73): Xaa can be any naturally occurring amino acid
  misc_feature (104)..(104): Xaa can be any naturally occurring amino acid
  Coding DNA Sequence Number=SeqID_1051
  Subcellular localization annotation: CTP_CleavageSite=58; ConfidenceScore=5.07e-01
IFRSRRFFQVDSVGVLLLSRCDFRRRLVGFXXSPEASFSSWALHPSAGDGSPVSSGVCXSGYRCCHRVRFQCXLALERVSSPVVAVCLHPPPTTLKLCLSTSMXSLLLLCPL

SEQ ID NO: 9239 - protein, 209 aa, Glycine max
  misc_feature (85)..(85): Xaa can be any naturally occurring amino acid
  misc_feature (108)..(108): Xaa can be any naturally occurring amino acid
  Coding DNA Sequence Number=SeqID_1053
  Gene Ontology: Mol. function=structural constituent of ribosome; Cellular component=intracellular; Biological process=translation
  Homolog annotation: Hit_ID=A5AI30; Match level="QueryCoverage=83%, HitCoverage=96%, E-value=1e-35, Identity=47%"; Hit description =Putative uncharacterized protein
  Pfam annotation: Domain name=Ribosomal_S21; Domain location=117-174; Score=41.2; E_value=3.7e-09; Accession=PF01165.10; Description =Ribosomal protein S21
  Subcellular localization annotation: CTP_CleavageSite=33; ConfidenceScore=5.68e-01
TLLLRPTNPPRSPLIAQYTLFPCSSSSLSFLVATSTINNFLSFFLRTKPPPPPSPPQFSPTTTQNQKPSSSQPLIAQYNTPSPSXALARSSSELSSVICPSMAYSNTXLFFRSPYNVQVVVAEDESEEKLLGRFRREVIKAGIVQECRRRRYFENKHEEKKRKSREAARCNRKRRPMSKTVGQKKQDVSATKREDDEDNWDLPEGDTLN

SEQ ID NO: 9240 - protein, 162 aa, Glycine max
  Coding DNA Sequence Number=SeqID_1054
APPPSYNIKNITLYNKLFLLKMDPELQGDQNKEFKPSYDVEVTREEAPELRETHQDFSQLAKEEAEFDKQDMQEGGFENDYASTGEHLTKSGEPDKRFKENQSGESYQEQNQGQSRGNNQSDNRNYDRNEQDNRNNQQSEHLTKAGEPDMRFKENQEAYGQS

SEQ ID NO: 9241 - protein, 52 aa, Glycine max
  Coding DNA Sequence Number=SeqID_1056
  Gene Ontology: Mol. function=dihydrolipoyllysine-residue succinyltransferase activity; Cellular component=oxoglutarate dehydrogenase complex; Biological process=tricarboxylic acid cycle
  Homolog annotation: Hit_ID=Q17H89; Match level="QueryCoverage=100%, HitCoverage=10%, E-value=3e-20, Identity=90%"; Hit description =Dihydrolipoamide succinyltransferase component of 2-oxoglutarate dehydrogenase
RPIAVKGQVVIRPMMYIALTYDHRLVDGREAVMFLRKIKAAVEDPRIVLAGL

SEQ ID NO: 9242 - protein, 126 aa, Glycine max; identical to SEQ ID NO: 8833
  misc_feature (30)..(30): Xaa can be any naturally occurring amino acid
  misc_feature (90)..(91): Xaa can be any naturally occurring amino acid
  misc_feature (99)..(99): Xaa can be any naturally occurring amino acid
  Coding DNA Sequence Number=SeqID_1057
  Subcellular localization annotation: CTP_CleavageSite=42; ConfidenceScore=5.19e-01

SEQ ID NO: 9243 - protein, 205 aa, Glycine max
  Coding DNA Sequence Number=SeqID_1059
  Gene Ontology: Mol. function=protein binding; Cellular component =cytoplasm; Biological process=establishment and/or maintenance of cell polarity
  Homolog annotation: Hit_ID=Q9GQQ6; Match level="QueryCoverage=74%, HitCoverage=10%, E-value=5e-36, Identity=59%"; Hit description=DX11
QLRRPPPQSDTGSLENLNEIDEKNADSNYIGQRLAKVPAANNKDYNTTSVYESPKLRYANNYSNQPSDEYENNDVELYLDSNSRSSGELADTELELNQQRRYSRHFTLSPETTDYDSNCGDLDSLSNDLNGCIGMNSHCLSGSGLNSSNAIIPDYSRLYTSMPVLEDGLSSGHASDTENNNPVPYSLNSVSAVAAVAAAATPTTT

SEQ ID NO: 9244 - protein, 145 aa, Glycine max
  misc_feature (24)..(24): Xaa can be any naturally occurring amino acid
  Coding DNA Sequence Number=SeqID_1060
  Gene Ontology: Mol. function=structural constituent of ribosome; Cellular component=ribonucleoprotein complex; Biological process =translation
  Homolog annotation: Hit_ID=Q08770; Match level="QueryCoverage=100%, HitCoverage=65%, E-value=3e-80, Identity=97%"; Hit description=60S ribosomal protein L10-2
  Pfam annotation: Domain name=Ribosomal_L16; Domain location=5-144; Score=141.7; E_value=2.1e-39; Accession=PF00252.8; Description =Ribosomal protein L16
MGRRPARCYRQIKGKPYPKSRYCXGVPDPKIRIYDVGMKKKGVDEFPFCVHLVSWEKENVSSEALEAARIACNKYMVKSAGKDAFHLRIRVHPFHVLRINKMLSCAGADRLQTGMRGAFGKALGTCARVAIGQVLLSVRCKDAHG

SEQ ID NO: 9245 - protein, 174 aa, Glycine max
  misc_feature (70)..(70): Xaa can be any naturally occurring amino acid
  misc_feature (76)..(76): Xaa can be any naturally occurring amino acid
  misc_feature (130)..(130): Xaa can be any naturally occurring amino acid
  Coding DNA Sequence Number=SeqID_1061
  Gene Ontology: Cellular component=membrane; Biological process =nodulation
  Homolog annotation: Hit_ID=P08961; Match level="QueryCoverage=95%, HitCoverage=77%, E-value=6e-49, Identity=62%"; Hit description =Nodulin 22 precursor
  Pfam annotation: Domain name=Nodulin; Domain location=7-171; Score =31.1; E_value=1.4e-10; Accession=PF02451.6; Description=Nodulin
MEKMRVVLITLLLFIGGEVAEKVGNGKVANNPEEDASDGEAINLVEEADGIGDAVTPAEGKATNLQAYEXLDAERXVSPCNSPGAQRCIGNEALHQRERRRGMNGPRATTCCIFDSMRKCLGDSEGRLVXTHRAPMSAIGFLTGMFQILSKTVKCRIVFETDARVNDELTVNCC

SEQ ID NO: 9246 - protein, 145 aa, Glycine max
  Coding DNA Sequence Number=SeqID_1062
  Gene Ontology: Mol. function=structural constituent of ribosome; Cellular component=ribonucleoprotein complex; Biological process =translation
  Homolog annotation: Hit_ID=Q2PMT2; Match level="QueryCoverage=95%, HitCoverage=58%, E-value=4e-57, Identity=78%"; Hit description =Chloroplast 30S ribosomal protein S2
  Pfam annotation: Domain name=Ribosomal_S2; Domain location=1-133; Score=85.0; E_value=2.4e-22; Accession=PF00318.10; Description =Ribosomal protein S2
NKKWLGGMLTNWYTTKTRLQKFRDLRIHQKTGRLNSFPKKDPPILKSPLALLETYLGGLKYMPGFPDIVIIVDPQKKYPAFRKCITLEIPPICLIDPNCAPALPDISIPANDDAIPPIRLIFTKLVFPICEGRSPHIRNFCLIIK

SEQ ID NO: 9247 - protein, 182 aa, Glycine max
  Coding DNA Sequence Number=SeqID_1063
APPPFFNYTIQEGSHCHLVRSMARVAAVLVALLALFAVAATAQAPAASPKRAPAPAPPKMAPLPPPPTRAPMASPPSPPTMSPASAPSADAPAMSPAGARSADAMAPAGASALTPAAAPLTHKTTAASASAITFVAIPPPLAPAAPAFLSSGRGSDALHLPLPPEPPPACRPQTAPPLCPRL

SEQ ID NO: 9248 - protein, 122 aa, Glycine max
  misc_feature (56)..(56): Xaa can be any naturally occurring amino acid
  misc_feature (66)..(66): Xaa can be any naturally occurring amino acid
  misc_feature (111)..(111): Xaa can be any naturally occurring amino acid
  Coding DNA Sequence Number=SeqID_1065
  Subcellular localization annotation: CTP_CleavageSite=49; ConfidenceScore=5.60e-01
YSSCTSIHSNPTPYASYPSHNSSTTLSTMTHSPPLYHLHLSKVRTLNPYCSTTARXTLIVTLNDDXLLSRYTSTISFDIIHASMSTESERTRYSTTPHAIDVTRSSTHIEXSHDIHHHVLSR

SEQ ID NO: 9249 - protein, 106 aa, Glycine max
  Coding DNA Sequence Number=SeqID_1067
VQNMIPSRRKPGPLVLPPRHYVTPRKKGHQGKKKLMSRVITIDRPCSKCWPPHPRTCLQPALTLFPLGGNPNTPPGVKKKISPPGEKINLVTCYLKKKRGHCVLGL

SEQ ID NO: 9250 - protein, 78 aa, Glycine max
  misc_feature (41)..(41): Xaa can be any naturally occurring amino acid
  misc_feature (43)..(43): Xaa can be any naturally occurring amino acid
  Coding DNA Sequence Number=SeqID_97
YQSIVFSVLIDVCFHSHDPTQKTMKKKQLLYRFFMHHFISXNXFVQNKKKEDNSYYCFYFFKLINFLSYAFQNHFERY

SEQ ID NO: 9251 - protein, 142 aa, Glycine max
  Coding DNA Sequence Number=SeqID_99
  Gene Ontology: Mol. function=DNA binding; Cellular component =chromosome; Biological process=nucleosome assembly
  Homolog annotation: Hit_ID=O65759; Match level="QueryCoverage=88%, HitCoverage=90%, E-value=2e-47, Identity=78%"; Hit description =Histone H2AX
  Pfam annotation: Domain name=CBFD_NFYB_HMF; Domain location=31-95; Score=19.2; E_value=0.0027; Accession=PF00808.13; Description =Histone-like transcription factor (CBFNF-Y) and archaeal histone
  Pfam annotation: Domain name=Histone; Domain location=25-98; Score =112.3; E_value=1.5e-30; Accession=PF00125.14; Description=Core histone H2AH2BH3H4
  Pfam module annotation: Pfam domain module=CBFD_NFYB_HMF::Histone; Domain location=31-95::25-98
  Subcellular localization annotation: CTP_CleavageSite=43; ConfidenceScore=5.56e-01
MSTGAASGTTKGGRGKPKATKSVSRSSKAGLQFPVGRIARFLKAGKYAERVGAGAPVYLSAVLEYLAAEVLELAGNAARDNKKTRIVPRHIQLAVRNDEELSKLLGAVTIANGGVLPNIHSNLLPSKVGKNKGDIGSASQEF

SEQ ID NO: 9252 - protein, 246 aa, Glycine max
  misc_feature (104)..(104): Xaa can be any naturally occurring amino acid
  misc_feature (136)..(136): Xaa can be any naturally occurring amino acid
  misc_feature (155)..(155): Xaa can be any naturally occurring amino acid
  misc_feature (210)..(210): Xaa can be any naturally occurring amino acid
  misc_feature (246)..(246): Xaa can be any naturally occurring amino acid
  Coding DNA Sequence Number=SeqID_100
  Gene Ontology: Mol. function=oxidoreductase activity, acting on single donors with incorporation of molecular oxygen, incorporation of two atoms of oxygen; Cellular component=cytoplasm; Biological process=fatty acid biosynthetic process
  Homolog annotation: Hit_ID=P24095; Match level="QueryCoverage=99%, HitCoverage=28%, E-value=1e-111, Identity=80%"; Hit description=Seed lipoxygenase
  Pfam annotation: Domain name=Lipoxygenase; Domain location=1-246; Score=-92.6; E_value=2.4e-14; Accession=PF00305.9; Description =Lipoxygenase
PKSTLDPTLYGDQTSTITKEQLEINMGGVTVEEALSTQRLFILYYQNAFIPYLTRINSLPTAKAYATRTILFLKDDGTLKPLAIELSKPHPNKDNLGPESVVVXPATEGVDSTIWLLAKAHVIVNDSGYHQLINHXLNTHTVIKPFTISTNIHLXILHPIYKLLYPHYHDTININKLTIQSLINTHSMIHKSLLPREYSIKMVLSIYKNXIFTNQTLPANLIKRRLTIKNPSTPHNLHLIIEDYPX

SEQ ID NO: 9253 - protein, 286 aa, Glycine max
  misc_feature (7)..(8): Xaa can be any naturally occurring amino acid
  misc_feature (11)..(11): Xaa can be any naturally occurring amino acid
  misc_feature (13)..(13): Xaa can be any naturally occurring amino acid
  misc_feature (20)..(20): Xaa can be any naturally occurring amino acid
  misc_feature (26)..(26): Xaa can be any naturally occurring amino acid
  misc_feature (37)..(38): Xaa can be any naturally occurring amino acid
  misc_feature (43)..(43): Xaa can be any naturally occurring amino acid
  misc_feature (45)..(46): Xaa can be any naturally occurring amino acid
  misc_feature (48)..(48): Xaa can be any naturally occurring amino acid
  misc_feature (50)..(50): Xaa can be any naturally occurring amino acid
  misc_feature (52)..(52): Xaa can be any naturally occurring amino acid
  misc_feature (57)..(57): Xaa can be any naturally occurring amino acid
  misc_feature (67)..(67): Xaa can be any naturally occurring amino acid
  misc_feature (69)..(71): Xaa can be any naturally occurring amino acid
  misc_feature (80)..(80): Xaa can be any naturally occurring amino acid
  misc_feature (82)..(82): Xaa can be any naturally occurring amino acid
  misc_feature (91)..(93): Xaa can be any naturally occurring amino acid
  misc_feature (96)..(96): Xaa can be any naturally occurring amino acid
  misc_feature (106)..(106): Xaa can be any naturally occurring amino acid
  misc_feature (120)..(120): Xaa can be any naturally occurring amino acid
  misc_feature (133)..(133): Xaa can be any naturally occurring amino acid
  misc_feature (161)..(161): Xaa can be any naturally occurring amino acid
  misc_feature (230)..(230): Xaa can be any naturally occurring amino acid
  misc_feature (232)..(232): Xaa can be any naturally occurring amino acid
  misc_feature (283)..(283): Xaa can be any naturally occurring amino acid
  misc_feature (285)..(285): Xaa can be any naturally occurring amino acid
  Coding DNA Sequence Number=SeqID_101
GCPMAYXXVIXTXMTVVARXSGRSVXHLGHYLYVSIXXCAKTXVXXTXDXSXIWRPXYISIYIYIYXGXXXWSIYIYIYXIXIYIYIYIYXXXSSXIYIYIYIYLXYIYIYISIFSLSLXSIYIYIYIYLYLXDIYIYIYIYIYMSLYIYIYIYIYICTIXIYIYIYIYIYIYLSLYISIYIYIYIYIYLYIYIYIYIYIYISLIYIYIYIYIYIYLSLTYIYIYIYIYXTXSLIYISIYIYIYISLSIYIYIYIYIYILTLSHLYIYIYHMYTETQTNLLYXYXK

SEQ ID NO: 9254 - protein, 96 aa, Glycine max; identical to SEQ ID NO: 7484
  Coding DNA Sequence Number=SeqID_103

SEQ ID NO: 9255 - protein, 84 aa, Glycine max
  misc_feature (23)..(23): Xaa can be any naturally occurring amino acid
  misc_feature (45)..(45): Xaa can be any naturally occurring amino acid
  Coding DNA Sequence Number=SeqID_105
DRWSGQTIMTYYVSRWFSCLACXCDVLSLALRRSCLEHRADGRLXDGAINTLQRGSGGLANKRQSDDGQKRAVGCCASRVATRV

SEQ ID NO: 9256 - protein, 159 aa, Glycine max; identical to SEQ ID NO: 6862
  misc_feature (89)..(89): Xaa can be any naturally occurring amino acid
  misc_feature (131)..(131): Xaa can be any naturally occurring amino acid
  misc_feature (142)..(142): Xaa can be any naturally occurring amino acid
  Coding DNA Sequence Number=SeqID_1709

SEQ ID NO: 9257 - protein, 117 aa, Glycine max
  misc_feature (5)..(5): Xaa can be any naturally occurring amino acid
  misc_feature (24)..(24): Xaa can be any naturally occurring amino acid
  misc_feature (58)..(58): Xaa can be any naturally occurring amino acid
  Coding DNA Sequence Number=SeqID_1711
LHLYXSTMMEPISCLTTISTARIXLSLTHSSVAFCLVIYDTQIYDIFLSHNHSYDMSXYEYIPTGATSVWPPSTIHILRRPLSDISLRSAHTLPGHDQINLTYYLNSLCTSFLLSIH

SEQ ID NO: 9258 - protein, 130 aa, Glycine max
  misc_feature (77)..(77): Xaa can be any naturally occurring amino acid
  Coding DNA Sequence Number=SeqID_1713
  Gene Ontology: Mol. function=oxidoreductase activity, acting on single donors with incorporation of molecular oxygen, incorporation of two atoms of oxygen; Cellular component=cytoplasm; Biological process=fatty acid biosynthetic process
  Homolog annotation: Hit_ID=P24095; Match level="QueryCoverage=100%, HitCoverage=14%, E-value=8e-45, Identity=73%"; Hit description=Seed lipoxygenase
HAAVNFGQYPYGGLILNRPTLAIKFIPTEGTQDYDEMVINPQKAYLITITSKFETLIDLSLIEILSRHALDEIYLGXRETPTCTIDNNALEAFKTFGCILTGIERLVIARNIDPGLDKPRSGQFCVTYTI

SEQ ID NO: 9259 - protein, 174 aa, Glycine max
  misc_feature (173)..(173): Xaa can be any naturally occurring amino acid
  Coding DNA Sequence Number=SeqID_1714
LIFVFMANRLKKKTPSPPSPEQLTPDKETQVTVTEVVKDERTAKIIGAVSLLLTVFLFVAFTSYLFTWQEDQDKVYRFGIKIFATDDVHVSNLLGVLGAYVAHLLFYKGFGLASYLFCTFFFVLGVNLLFGKKIFNLVRNLKYVLAGLLVLSMGFAFVARNSSFSGGPGTQSXQ

SEQ ID NO: 9260 - protein, 178 aa, Glycine max; identical to SEQ ID NO: 6004
  misc_feature (1)..(2): Xaa can be any naturally occurring amino acid
  misc_feature (8)..(8): Xaa can be any naturally occurring amino acid
  misc_feature (23)..(23): Xaa can be any naturally occurring amino acid
  misc_feature (50)..(50): Xaa can be any naturally occurring amino acid
  misc_feature (103)..(103): Xaa can be any naturally occurring amino acid
  misc_feature (111)..(111): Xaa can be any naturally occurring amino acid
  misc_feature (141)..(141): Xaa can be any naturally occurring amino acid
  misc_feature (166)..(167): Xaa can be any naturally occurring amino acid
  misc_feature (176)..(176): Xaa can be any naturally occurring amino acid
  Coding DNA Sequence Number=SeqID_1716

SEQ ID NO: 9261 - protein, 115 aa, Glycine max
  Coding DNA Sequence Number=SeqID_1717
  Gene Ontology: Mol. function=structural constituent of ribosome; Cellular component=ribonucleoprotein complex; Biological process =translation
  Homolog annotation: Hit_ID=Q2QM60; Match level="QueryCoverage=83%, HitCoverage=56%, E-value=6e-42, Identity=89%"; Hit description =Ribosomal protein L14 containing protein, expressed
  Pfam annotation: Domain name=Ribosomal_L14; Domain location=52-114; Score=-0.9; E_value=6.4e-05; Accession=PF00238.10; Description =Ribosomal protein L14pL23e
  Subcellular localization annotation: CTP_CleavageSite=31; ConfidenceScore=5.15e-01
MAAFLRSKCSSVGRTLMGSVGNNLNGGINSSAETVTRPSHCDAISQQIRTFIQMRTNLKVVDNSGAKRVMCIQSLRGKKGARLGDMIIGSVKEAQPRGKVKKGDVVYGVVVRVRY

SEQ ID NO: 9262 - protein, 140 aa, Glycine max
  misc_feature (115)..(115): Xaa can be any naturally occurring amino acid
  Coding DNA Sequence Number=SeqID_1718
  Homolog annotation: Hit_ID=Q8LG60; Match level="QueryCoverage=53%, HitCoverage=78%, E-value=1e-14, Identity=53%"; Hit description =Putative uncharacterized protein
QTLFHKPTPTPTGPTELSLPAQKYTRSQVGAGEVDLVAEPVECLLAEGLTEEEGTLQGMRGCVVDLKLRAVGPRWLTGIEGSIACHHSRPLMMTSVGRIHARLHAQALTRSGLGXSALLEYYDHQTDSAKRTPCRRGSKL

SEQ ID NO: 9263 - protein, 324 aa, Glycine max
  Coding DNA Sequence Number=SeqID_1719
  Homolog annotation: Hit_ID=B0ERD3; Match level="QueryCoverage=62%, HitCoverage=76%, E-value=3e-07, Identity=21%"; Hit description =Putative uncharacterized protein
  Pfam annotation: Domain name=SNARE_assoc; Domain location=84-204; Score=29.2; E_value=1.5e-05; Accession=PF09335.1; Description=SNARE associated Golgi protein
MQFASEENMSRPNTSITQEEKKKETPWKLVIFCFLFVFLFLMVMFWPPAKQILLNTEAYLQDQGWYGRILMTLVIGFIIVPIGLPYSMFQMLFALVVKGYWLSLLLTCVAQTIGAGIAYILTKYVMRDQIRGWFHKHKMFRGVEAILMKDPVKFSVILNLTNIPTIIKNYALAMPENIGAKVYMSTAILGIVFTSAPQIYVFQEASELGELFDHKRSTLSTCFTCITTLLSIAVIVYVMWYTKKILNDLDNEVVHLNKSVDHHHDIQDIESGIPVEKKETKETASSERKSADSNSPPRVDQFKLIKNQRGSLEMVEPYLDNLAC

SEQ ID NO: 9264 - protein, 101 aa, Glycine max
  misc_feature (2)..(2): Xaa can be any naturally occurring amino acid
  misc_feature (19)..(19): Xaa can be any naturally occurring amino acid
  misc_feature (22)..(22): Xaa can be any naturally occurring amino acid
  misc_feature (41)..(41): Xaa can be any naturally occurring amino acid
  misc_feature (78)..(79): Xaa can be any naturally occurring amino acid
  misc_feature (81)..(81): Xaa can be any naturally occurring amino acid
  Coding DNA Sequence Number=SeqID_107
PXGMSVGAVVERGETIYIXSPXRYAVCVKPSTARARRKKNXTQIVDHAARRPLYYISRPLAVARGERRDINQILLMLXXVXCVREGYGERGARNTNILESR

SEQ ID NO: 9265 - protein, 168 aa, Glycine max; identical to SEQ ID NO: 6409
  misc_feature (27)..(27): Xaa can be any naturally occurring amino acid
  misc_feature (53)..(55): Xaa can be any naturally occurring amino acid
  misc_feature (65)..(65): Xaa can be any naturally occurring amino acid
  misc_feature (92)..(92): Xaa can be any naturally occurring amino acid
  misc_feature (97)..(98): Xaa can be any naturally occurring amino acid
  misc_feature (100)..(100): Xaa can be any naturally occurring amino acid
  misc_feature (103)..(103): Xaa can be any naturally occurring amino acid
  misc_feature (166)..(166): Xaa can be any naturally occurring amino acid
  Coding DNA Sequence Number=SeqID_1069

SEQ ID NO: 9266 - protein, 133 aa, Glycine max
  misc_feature (17)..(17): Xaa can be any naturally occurring amino acid
  Coding DNA Sequence Number=SeqID_1071
  Gene Ontology: Mol. function=protoheme IX farnesyltransferase activity; Cellular component=integral to membrane; Biological process=heme biosynthetic process
  Homolog annotation: Hit_ID=Q3SUL3; Match level="QueryCoverage=80%, HitCoverage=30%, E-value=1e-48, Identity=87%"; Hit description =Protoheme IX farnesyltransferase
AVQIIFFWTPPHFWALXLFRSDDYARAGIPMLPVVAGPDATRLQILLYTVVLVAIALAPWPLGYFDAIYGVTSLVLGAGMLWLAIEVYRRREGTVANRATRRLFAFSILYLFALFAVLLAEVVVRAILPAFIG

SEQ ID NO: 9267 - protein, 59 aa, Glycine max
  misc_feature (17)..(18): Xaa can be any naturally occurring amino acid
  Coding DNA Sequence Number=SeqID_1072
  Gene Ontology: Mol. function=hydrolase activity; Cellular component =chromosome, telomeric region; Biological process=response to DNA damage stimulus
  Homolog annotation: Hit_ID=A7Q735; Match level="QueryCoverage=100%, HitCoverage=5%, E-value=7e-22, Identity=84%"; Hit description =Chromosome chr5 scaffold_58, whole genome shotgun sequence
LNRCRGTMSVYQSNISXXKVDLKQAQYKDIDKRYFDQLIQLKTTEMANRDLDRYYSALD

SEQ ID NO: 9268 - protein, 225 aa, Glycine max
  misc_feature (151)..(151): Xaa can be any naturally occurring amino acid
  misc_feature (217)..(217): Xaa can be any naturally occurring amino acid
  misc_feature (219)..(219): Xaa can be any naturally occurring amino acid
  Coding DNA Sequence Number=SeqID_1073
  Subcellular localization annotation: CTP_CleavageSite=27; ConfidenceScore=5.53e-01
SGCAGSVPFPPPHPSSFLLDDSVPSVVALSGSSSHPVTGDPITASRPFLYLGWCSFLVFAADSCLWWCSPRPPGAAPAPSRESVRLCARRRTSFLACHAVCGCDLSPVPSRRPCLRIAPRNRVPRFLFYRPSLLVFDTLYVMCGLVLCVAXLCASCALDFILFEGEKKRRALRLFQGPRCVFGRCFFFFFCTFCRDNTHREIVWSFVSLSKTTLRGXRXPPLPLI

SEQ ID NO: 9269 - protein, 102 aa, Glycine max
  misc_feature (3)..(3): Xaa can be any naturally occurring amino acid
  misc_feature (12)..(12): Xaa can be any naturally occurring amino acid
  misc_feature (17)..(18): Xaa can be any naturally occurring amino acid
  misc_feature (20)..(20): Xaa can be any naturally occurring amino acid
  misc_feature (24)..(24): Xaa can be any naturally occurring amino acid
  misc_feature (34)..(35): Xaa can be any naturally occurring amino acid
  misc_feature (40)..(40): Xaa can be any naturally occurring amino acid
  misc_feature (42)..(42): Xaa can be any naturally occurring amino acid
  misc_feature (46)..(46): Xaa can be any naturally occurring amino acid
  misc_feature (49)..(49): Xaa can be any naturally occurring amino acid
  misc_feature (58)..(58): Xaa can be any naturally occurring amino acid
  misc_feature (64)..(65): Xaa can be any naturally occurring amino acid
  misc_feature (70)..(72): Xaa can be any naturally occurring amino acid
  misc_feature (74)..(75): Xaa can be any naturally occurring amino acid
  misc_feature (79)..(79): Xaa can be any naturally occurring amino acid
  misc_feature (83)..(83): Xaa can be any naturally occurring amino acid
  misc_feature (89)..(89): Xaa can be any naturally occurring amino acid
  misc_feature (97)..(97): Xaa can be any naturally occurring amino acid
  misc_feature (100)..(100): Xaa can be any naturally occurring amino acid
  Coding DNA Sequence Number=SeqID_1075
YRXVIMTLSIRXIIRYXXDXSRTXVLRVVSSDSXXMQQCXMXMLRXRYXRHSRSTDIXRKSSYXXQCQDXXXMXXRIIXELMXAHGLAXRRNTSSSXHGXYT

SEQ ID NO: 9270 - protein, 133 aa, Glycine max
  misc_feature (1)..(111): Xaa can be any naturally occurring amino acid
  Coding DNA Sequence Number=SeqID_1077
XXXXXXXXXXXXXXXXXXXXXXXXXXXXXXXXXXXXXXXXXXXXXXXXXXXXXXXXXXXXXXXXXXXXXXXXXXXXXXXXXXXXXXXXXXXXXXXXXXXXXXXXXXXXXXXKHPKGSHTSYIQPSSLVEDLSQ

SEQ ID NO: 9271 - protein, 119 aa, Glycine max; identical to SEQ ID NO: 8846
  misc_feature (7)..(7): Xaa can be any naturally occurring amino acid
  misc_feature (9)..(10): Xaa can be any naturally occurring amino acid
  misc_feature (14)..(15): Xaa can be any naturally occurring amino acid
  misc_feature (18)..(18): Xaa can be any naturally occurring amino acid
  misc_feature (48)..(51): Xaa can be any naturally occurring amino acid
  misc_feature (60)..(61): Xaa can be any naturally occurring amino acid
  misc_feature (64)..(64): Xaa can be any naturally occurring amino acid
  misc_feature (67)..(67): Xaa can be any naturally occurring amino acid
  misc_feature (69)..(69): Xaa can be any naturally occurring amino acid
  misc_feature (72)..(72): Xaa can be any naturally occurring amino acid
  misc_feature (79)..(80): Xaa can be any naturally occurring amino acid
  misc_feature (93)..(93): Xaa can be any naturally occurring amino acid
  misc_feature (100)..(100): Xaa can be any naturally occurring amino acid
  misc_feature (102)..(102): Xaa can be any naturally occurring amino acid
  misc_feature (110)..(110): Xaa can be any naturally occurring amino acid
  misc_feature (117)..(117): Xaa can be any naturally occurring amino acid
  misc_feature (119)..(119): Xaa can be any naturally occurring amino acid
  Coding DNA Sequence Number=SeqID_1079

SEQ ID NO: 9272 - protein, 189 aa, Glycine max
  misc_feature (6)..(13): Xaa can be any naturally occurring amino acid
  misc_feature (19)..(21): Xaa can be any naturally occurring amino acid
  misc_feature (24)..(28): Xaa can be any naturally occurring amino acid
  misc_feature (71)..(72): Xaa can be any naturally occurring amino acid
  misc_feature (94)..(94): Xaa can be any naturally occurring amino acid
  misc_feature (104)..(105): Xaa can be any naturally occurring amino acid
  misc_feature (112)..(112): Xaa can be any naturally occurring amino acid
  misc_feature (116)..(116): Xaa can be any naturally occurring amino acid
  misc_feature (119)..(120): Xaa can be any naturally occurring amino acid
  misc_feature (124)..(124): Xaa can be any naturally occurring amino acid
  misc_feature (136)..(136): Xaa can be any naturally occurring amino acid
  misc_feature (187)..(187): Xaa can be any naturally occurring amino acid
  Coding DNA Sequence Number=SeqID_1081
  Subcellular localization annotation: CTP_CleavageSite=57; ConfidenceScore=5.43e-01
GWWVWXXXXXXXXLPPPAXXXRGXXXXXCSCASLLSSLVRPLPTSSCFVGVVALSPRAREAEGDTHARLTXXLFDLVFAFYVSSLHLSPHISGXCALFSSLVIXXRRDVCLXAPSXPRXXRPAXPRCPYSHSPHPXCWVGVPSLVVTLPHLVCEGMQECCATLLTTLISIYLARTPPVLLVSCFRRXSW

SEQ ID NO: 9273 - protein, 150 aa, Glycine max; identical to SEQ ID NO: 7394
  misc_feature (54)..(54): Xaa can be any naturally occurring amino acid
  misc_feature (58)..(58): Xaa can be any naturally occurring amino acid
  misc_feature (77)..(77): Xaa can be any naturally occurring amino acid
  misc_feature (86)..(86): Xaa can be any naturally occurring amino acid
  misc_feature (102)..(102): Xaa can be any naturally occurring amino acid
  Coding DNA Sequence Number=SeqID_1083

SEQ ID NO: 9274 - protein, 69 aa, Glycine max
  misc_feature (27)..(27): Xaa can be any naturally occurring amino acid
  Coding DNA Sequence Number=SeqID_1085
  Gene Ontology: Mol. function=methyltransferase activity; Cellular component=chloroplast; Biological process=metabolic process
  Homolog annotation: Hit_ID=A7PUI5; Match level="QueryCoverage=91%, HitCoverage=18%, E-value=1e-19, Identity=71%"; Hit description =Chromosome chr7 scaffold_31, whole genome shotgun sequence
NSARGAGVEPRSGDSPFVLGSKGEDVXKPVNPFDFRLCYVLGALAATWFVLVPIYMWLKDQVVPKGQPI

SEQ ID NO: 9275 - protein, 229 aa, Glycine max; identical to SEQ ID NO: 6415
  misc_feature (47)..(47): Xaa can be any naturally occurring amino acid
  Coding DNA Sequence Number=SeqID_1086
  Subcellular localization annotation: CTP_CleavageSite=66; ConfidenceScore=5.82e-01

SEQ ID NO: 9276 - protein, 119 aa, Glycine max; identical to SEQ ID NO: 8850
  misc_feature (80)..(80): Xaa can be any naturally occurring amino acid
  Coding DNA Sequence Number=SeqID_1088

SEQ ID NO: 9277 - protein, 79 aa, Glycine max; identical to SEQ ID NO: 8854
  misc_feature (8)..(9): Xaa can be any naturally occurring amino acid
  misc_feature (46)..(46): Xaa can be any naturally occurring amino acid
  misc_feature (65)..(65): Xaa can be any naturally occurring amino acid
  Coding DNA Sequence Number=SeqID_1090

SEQ ID NO: 9278 - protein, 229 aa, Glycine max
  misc_feature (62)..(62): Xaa can be any naturally occurring amino acid
  misc_feature (121)..(121): Xaa can be any naturally occurring amino acid
  misc_feature (152)..(152): Xaa can be any naturally occurring amino acid
  misc_feature (199)..(199): Xaa can be any naturally occurring amino acid
  Coding DNA Sequence Number=SeqID_1092
CLSGRSPSLCGEIRANRRSRLAGTARREEDGGRGRTKGGSTCRVGRPGPASAHRLGSGVSPXARGRSRSADGPAGGEACRSSLLCQRVELGTVPVHDSRVAPRLTTHTSSVVHKPFRCCPXIVFCIGSLHQRIEYLECHITRTIFCPPHCSXKLRRGSTNYTRALPVLIILWYLLSPYPVMQSYYLCRYTTLGMNIAEXEQHAPPARTGRRVWMAPTPPLDSYLSMSGT

SEQ ID NO: 9279 - protein, 134 aa, Glycine max
  misc_feature (30)..(30): Xaa can be any naturally occurring amino acid
  misc_feature (76)..(76): Xaa can be any naturally occurring amino acid
  misc_feature (88)..(88): Xaa can be any naturally occurring amino acid
  misc_feature (98)..(98): Xaa can be any naturally occurring amino acid
  misc_feature (103)..(103): Xaa can be any naturally occurring amino acid
  Coding DNA Sequence Number=SeqID_1093
KFPPSSAAKIGFYPHSFHREKVLMTFCSPXEKQHASRDVTRVCSSIQHPGTRGCERGGVDCAAISRDREGARDELXEQSSHHVCCGFXDRTLTRSKIXSIRFXKEKSKKENHCLYALLQRSNTAQPVPNAKTGP

SEQ ID NO: 9280 - protein, 83 aa, Glycine max
  misc_feature (51)..(51): Xaa can be any naturally occurring amino acid
  misc_feature (61)..(61): Xaa can be any naturally occurring amino acid
  misc_feature (66)..(67): Xaa can be any naturally occurring amino acid
  Coding DNA Sequence Number=SeqID_1095
  Gene Ontology: Mol. function=oxidoreductase activity; Biological process=electron transport
  Homolog annotation: Hit_ID=A2X4Q0; Match level="QueryCoverage=86%, HitCoverage=17%, E-value=3e-16, Identity=62%"; Hit description =Putative uncharacterized protein
MDRTVDADIVIVGGGICGLATALALHRKRIKSLVLERSENLRATGAPIIVXANGWRALDQXGIGSXXRQTAIQIEGGRFISLG

SEQ ID NO: 9281 - protein, 98 aa, Glycine max
  misc_feature (51)..(51): Xaa can be any naturally occurring amino acid
  misc_feature (75)..(75): Xaa can be any naturally occurring amino acid
  Coding DNA Sequence Number=SeqID_1096
DNIGIELQSERRGMKKVDYVGRRTIERKWTQRNPTSRCSSFPLPDPFQTSXCKRPSTPLDILNPIPQRASSLLIXRGLLLLATHHSTCGKTNLAPIFS

SEQ ID NO: 9282 - protein, 200 aa, Glycine max
  misc_feature (28)..(28): Xaa can be any naturally occurring amino acid
  misc_feature (50)..(50): Xaa can be any naturally occurring amino acid
  Coding DNA Sequence Number=SeqID_1098
  Gene Ontology: Mol. function=catalytic activity; Cellular component =chloroplast; Biological process=cellular metabolic process
  Homolog annotation: Hit_ID=O80934; Match level="QueryCoverage=93%, HitCoverage=57%, E-value=2e-81, Identity=82%"; Hit description =Uncharacterized protein At2g37660, chloroplast precursor
IFEAPEFHCFLLCKGIDALVIFSSRRAXRIKPGLVPSKGERREVYFEEGXYLEQVDGIGQKIQIDSVKAAGIKQIVLVGSMGGTNINNPLNSIGNANILVWKRKAEQYLADSGIPYTIIRAGGLQDKEGGIRELIVGKDDEILETEMRTIARADVAEVCVQALQLEEAKYKALDLASKPEGTGTPTKDFKALFTQVTARF

SEQ ID NO: 9283 - protein, 70 aa, Glycine max
  Coding DNA Sequence Number=SeqID_1099
GIVMDGKEERGNVSNLFYVHAWLNMSRKSLNLFIHCPSPTIVPNRTNMLNFLYNKNYSVYFNFWECLTHL

SEQ ID NO: 9284 - protein, 95 aa, Glycine max
  misc_feature (55)..(55): Xaa can be any naturally occurring amino acid
  Coding DNA Sequence Number=SeqID_1101
RCMGGGVRWAVSIYCVPLSASYGVVCCLYIFATKGCEVKRGWIVVWGKAAESGLXGANLVWRGLMMLLWVGTAMRSLDAWEGWCEGLLTCCSMNC

SEQ ID NO: 9285 - protein, 92 aa, Glycine max; identical to SEQ ID NO: 8860
  misc_feature (1)..(1): Xaa can be any naturally occurring amino acid
  misc_feature (17)..(17): Xaa can be any naturally occurring amino acid
  Coding DNA Sequence Number=SeqID_1103

SEQ ID NO: 9286 - protein, 95 aa, Glycine max
  Coding DNA Sequence Number=SeqID_1105
  Gene Ontology: Mol. function=protein serine/threonine kinase activity; Cellular component=integral to membrane; Biological process=protein amino acid phosphorylation
  Homolog annotation: Hit_ID=A5ANJ2; Match level="QueryCoverage=84%, HitCoverage=12%, E-value=2e-30, Identity=77%"; Hit description =Putative uncharacterized protein
TQILNWKQRFNIILGTAEGLAYLHEGTKIRIIHRDIKSSNVLLDENLTPKIADFGLARCFGGDKSHLSTGIAGTLNIIVPDCSYFGSYELFHFSL

SEQ ID NO: 9287 - protein, 229 aa, Glycine max
  Coding DNA Sequence Number=SeqID_1106
  Homolog annotation: Hit_ID=A9PJX9; Match level="QueryCoverage=97%, HitCoverage=98%, E-value=8e-89, Identity=70%"; Hit description =Putative uncharacterized protein
  Subcellular localization annotation: CTP_CleavageSite=40; ConfidenceScore=5.68e-01
MSSTASLGYGAPTCFNNVHHTKKQQAMRNSFLSNKHNSVRVMKGWRGRHGNTNNTSKRVGIVQCRGLGDFIGGDLIKFDLGRWLSDVEEHKALAIYPPHEGGYEGRYLSRLKRQGYYFLDLTARGLGDPETTLTKIHPVCPPHVGKQPIARWYFPPEVDYRLEALPPNAKGLVVWIIEAKVLSKAELQFLALLPTLRPNVRVIAECGNWRKFMWKPLKEIAGLTTSEEA

SEQ ID NO: 9288 - protein, 129 aa, Glycine max
  misc_feature (8)..(8): Xaa can be any naturally occurring amino acid
  misc_feature (58)..(58): Xaa can be any naturally occurring amino acid
  misc_feature (61)..(61): Xaa can be any naturally occurring amino acid
  misc_feature (75)..(75): Xaa can be any naturally occurring amino acid
  misc_feature (79)..(84): Xaa can be any naturally occurring amino acid
  misc_feature (93)..(93): Xaa can be any naturally occurring amino acid
  misc_feature (105)..(106): Xaa can be any naturally occurring amino acid
  misc_feature (114)..(119): Xaa can be any naturally occurring amino acid
  misc_feature (122)..(124): Xaa can be any naturally occurring amino acid
  Coding DNA Sequence Number=SeqID_1107
SFDISYTXEKTYTYIHHIQYNIHNITYTSQRLHIHTHSPHSHSIQHITDNTTTQTTRXTKXIRCYPHIYSPCCPXVYVXXXXXXGCWAHQLNXIPSNHHYPQKRXXTHSFPSAXXXXXXSGXXXQTHGP

SEQ ID NO: 9289 - protein, 85 aa, Glycine max
  misc_feature (4)..(4): Xaa can be any naturally occurring amino acid
  misc_feature (16)..(16): Xaa can be any naturally occurring amino acid
  Coding DNA Sequence Number=SeqID_1109
AEAXRATALAYCAVRXSSTLRCVAQPVMQIAYWIIYIAHIEERRCQSIHVQGSSEVGPRPATMLRAARLTVYSPRNAIAAPRVQR

SEQ ID NO: 9290 - protein, 258 aa, Glycine max
  misc_feature (258)..(258): Xaa can be any naturally occurring amino acid
  Coding DNA Sequence Number=SeqID_1111
  Homolog annotation: Hit_ID=A8FH37; Match level="QueryCoverage=96%, HitCoverage=97%, E-value=1e-136, Identity=98%"; Hit description =Sporulation protein YunB
  Pfam annotation: Domain name=Spore_YunB; Domain location=149-242; Score=150.9; E_value=3.5e-42; Accession=PF05753.5; Description =Sporulation protein YunB (Spo_YunB)
RGRRGDFLLRMNRRYRPYKKGPLPFRYVMLLAILFFVLSTVISLFFINRSIKPTLIHIAELETERIANHLIQYSVQDFADDQENMKDMVVMNTSENGKVTTIDFNAQATSKAMADLSRHLQKNLEDIEKGNFQKEAKEALKDQTDGHDGIIYNIPLGQASGNALIANLGPKVPVRFSVIGDPHTDVEKNIKPYGINNALIDISVLIEVKVRVIIPFASETIVVKNSVPVSIQAVQGDVPDYYNGSGTNSGAPPIVLPX

SEQ ID NO: 9291 - protein, 111 aa, Glycine max
  misc_feature (111)..(111): Xaa can be any naturally occurring amino acid
  Coding DNA Sequence Number=SeqID_1112
  Gene Ontology: Mol. function=nucleotide binding; Cellular component =plasma membrane; Biological process=small GTPase mediated signal transduction
  Homolog annotation: Hit_ID=P28186; Match level="QueryCoverage=99%, HitCoverage=50%, E-value=3e-48, Identity=86%"; Hit description=Ras -related protein ARA-3
  Pfam annotation: Domain name=Ras; Domain location=2-75; Score=4.3; E _value=1e-09; Accession=PF00071.12; Description=Ras family
DIRNWIRNIEQHASDNVNKILVGNKADMDESKRAVPTSKGQALADEYGIKFFETSAKTNMNVEEVIFSIARDIKQRLADTDSRAEPQTIKINQPDQTATGGLAAQRSACCX

SEQ ID NO: 9292 - protein, 202 aa, Glycine max
  misc_feature (72)..(72): Xaa can be any naturally occurring amino acid
  misc_feature (157)..(157): Xaa can be any naturally occurring amino acid
  Coding DNA Sequence Number=SeqID_1113
  Gene Ontology: Mol. function=lipid binding; Cellular component =anchored to membrane; Biological process=lipid transport
  Homolog annotation: Hit_ID=O64865; Match level="QueryCoverage=100%, HitCoverage=99%, E-value=1e-72, Identity=67%"; Hit description=Non -specific lipid-transfer protein
  Pfam annotation: Domain name=Tryp_alpha_amyl; Domain location=34-111; Score=48.5; E_value=2.3e-11; Accession=PF00234.12; Description =Protease inhibitorseed storageLTP f
MESWRISLVAIAIALLMATLVSAGEDKAKDKEECTEQLVGMATCLPYVQGQAKTPTPDCCSGLKQVLKSDKXCLCVIIQDRNDPDLGLQINVSLALALPSVCHAVADVTKCPALLHMDPKSQEAQVFYQLANGLNKTGPASAPTISAPAPTSVSPTXGSEDGNNSGRATSLPSKNHAQSFRKRWLVLEVAAYLFIISFTITL

SEQ ID NO: 9293 - protein, 102 aa, Glycine max
  Coding DNA Sequence Number=SeqID_1114
  Gene Ontology: Mol. function=calcium ion binding
  Homolog annotation: Hit_ID=O81831; Match level="QueryCoverage=100%, HitCoverage=78%, E-value=9e-41, Identity=81%"; Hit description =Putative uncharacterized protein AT4g27280
MASPKSPTRPTQQNPEPSFHDFLPAMAGKLGGEGLIGELCNGFELLMDREKGVITFESLRRNAAAVLGLGDLTDEDVRSMIKEGDFDCDGALNQMEFCVLMF

SEQ ID NO: 9294 - protein, 160 aa, Glycine max
  misc_feature (12)..(14): Xaa can be any naturally occurring amino acid
  misc_feature (17)..(18): Xaa can be any naturally occurring amino acid
  misc_feature (21)..(21): Xaa can be any naturally occurring amino acid
  misc_feature (23)..(24): Xaa can be any naturally occurring amino acid
  misc_feature (29)..(29): Xaa can be any naturally occurring amino acid
  misc_feature (37)..(37): Xaa can be any naturally occurring amino acid
  misc_feature (39)..(41): Xaa can be any naturally occurring amino acid
  misc_feature (43)..(43): Xaa can be any naturally occurring amino acid
  misc_feature (45)..(45): Xaa can be any naturally occurring amino acid
  misc_feature (49)..(49): Xaa can be any naturally occurring amino acid
  misc_feature (52)..(53): Xaa can be any naturally occurring amino acid
  misc_feature (56)..(57): Xaa can be any naturally occurring amino acid
  misc_feature (61)..(61): Xaa can be any naturally occurring amino acid
  misc_feature (64)..(64): Xaa can be any naturally occurring amino acid
  misc_feature (68)..(69): Xaa can be any naturally occurring amino acid
  misc_feature (71)..(74): Xaa can be any naturally occurring amino acid
  misc_feature (77)..(80): Xaa can be any naturally occurring amino acid
  misc_feature (83)..(83): Xaa can be any naturally occurring amino acid
  misc_feature (86)..(86): Xaa can be any naturally occurring amino acid
  misc_feature (89)..(89): Xaa can be any naturally occurring amino acid
  misc_feature (91)..(94): Xaa can be any naturally occurring amino acid
  misc_feature (96)..(102): Xaa can be any naturally occurring amino acid
  misc_feature (104)..(104): Xaa can be any naturally occurring amino acid
  misc_feature (106)..(106): Xaa can be any naturally occurring amino acid
  misc_feature (108)..(109): Xaa can be any naturally occurring amino acid
  misc_feature (111)..(112): Xaa can be any naturally occurring amino acid
  misc_feature (114)..(114): Xaa can be any naturally occurring amino acid
  misc_feature (116)..(118): Xaa can be any naturally occurring amino acid
  misc_feature (122)..(125): Xaa can be any naturally occurring amino acid
  misc_feature (129)..(130): Xaa can be any naturally occurring amino acid
  misc_feature (132)..(135): Xaa can be any naturally occurring amino acid
  misc_feature (137)..(139): Xaa can be any naturally occurring amino acid
  misc_feature (144)..(144): Xaa can be any naturally occurring amino acid
  misc_feature (146)..(146): Xaa can be any naturally occurring amino acid
  misc_feature (148)..(150): Xaa can be any naturally occurring amino acid
  misc_feature (152)..(154): Xaa can be any naturally occurring amino acid
  misc_feature (159)..(159): Xaa can be any naturally occurring amino acid
  Coding DNA Sequence Number=SeqID_1115
FKCSYTPHKLIXXXKGXXDMXQXXSLYLXARHITYAXLXXXTXVXGLIXLNXXEAXXYTLXIHXFRSXXTXXXXNMXXXXTDXAKXNEXYXXXXLXXXXXXXLXTXIXXEXXLXAXXXISAXXXXIRIXXYXXXXMXXXYTWLXNXRXXXSXXXEIILXF

SEQ ID NO: 9295 - protein, 97 aa, Glycine max
  misc_feature (35)..(35): Xaa can be any naturally occurring amino acid
  misc_feature (43)..(43): Xaa can be any naturally occurring amino acid
  misc_feature (68)..(68): Xaa can be any naturally occurring amino acid
  misc_feature (73)..(73): Xaa can be any naturally occurring amino acid
  misc_feature (82)..(82): Xaa can be any naturally occurring amino acid
  Coding DNA Sequence Number=SeqID_1117
  Gene Ontology: Cellular component=protein complex
  Homolog annotation: Hit_ID=Q9FK79; Match level="QueryCoverage=97%, HitCoverage=24%, E-value=2e-24, Identity=68%"; Hit description=26S proteasome subunit-like protein
MAALQYLESLRNSHPELSDRYNSLADLYQKKLWHXQLTLKLEXFVDLAAFPAGDALIPLYHNFFTDFXETIIXFLKLAHFAXVIVPRPDSEKEAACW

SEQ ID NO: 9296 - protein, 124 aa, Glycine max
  Coding DNA Sequence Number=SeqID_1118
  Subcellular localization annotation: CTP_CleavageSite=64; ConfidenceScore=5.39e-01
NGKVLNQTRVFLSVIVGRCTQASQTAFCFLQTPSIIIVRTCFLRVRIFVFCRLLFSKSIRSIFLCSNNNNWKRKLFFKLHLHNIHFRTGLFNVRSGRRSRGEILHFNWRRRLVGIAIACHGNGV

SEQ ID NO: 9297 - protein, 127 aa, Glycine max
  misc_feature (59)..(59): Xaa can be any naturally occurring amino acid
  misc_feature (80)..(80): Xaa can be any naturally occurring amino acid
  Coding DNA Sequence Number=SeqID_1120
SGRYIRTPRSGVDIASVGQSERPLRVVNITIAIINTGCAWVGIITSRYSTDSGTHTHLXAVIVLLHRHRAPHVPSVYIVXRYYRGSRAALMSRSAHLAEAESDPIERAAELQLRATICVQESVRCAL

SEQ ID NO: 9298 - protein, 161 aa, Glycine max
  Coding DNA Sequence Number=SeqID_1122
  Subcellular localization annotation: CTP_CleavageSite=72; ConfidenceScore=5.50e-01
HPPVVAELTVRLLLSGITRPARARHASRTQRRPRQRRAQRNRRETCRPTGGAQSRSGATRHMTSPFPTSPCTSSARAPSFLWLPHIRRALPQPSATLARPALSCPDDLASGWVVSDMAVQEGGRIMTHVIRREQIGVAKDMSCASTTPPTARGWEAGGQRR

SEQ ID NO: 9299 - protein, 188 aa, Glycine max
  Coding DNA Sequence Number=SeqID_1124
  Subcellular localization annotation: CTP_CleavageSite=79; ConfidenceScore=5.73e-01
QSLSSIFFCTFCTLISTILFFLSYPSSSLSGTNPTSTPRSLSPPILCILSFLTFPILLLSFMDVDIVKTSSNNNNMDVMAMMMQMEKFPELFCDPFYTTSYQETDLLSSGSSSTTSASTLFNNNSIVTTTPPPTTTLVDPTPSNVVQFSKIDDLFQHQHQQQPMSQSLQPYPSEKKNSMAAMREMIFR

SEQ ID NO: 9300 - protein, 155 aa, Glycine max; identical to SEQ ID NO: 6438
  misc_feature (62)..(62): Xaa can be any naturally occurring amino acid
  misc_feature (75)..(75): Xaa can be any naturally occurring amino acid
  misc_feature (124)..(124): Xaa can be any naturally occurring amino acid
  misc_feature (148)..(148): Xaa can be any naturally occurring amino acid
  Coding DNA Sequence Number=SeqID_1126

SEQ ID NO: 9301 - protein, 102 aa, Glycine max
  misc_feature (73)..(73): Xaa can be any naturally occurring amino acid
  misc_feature (78)..(78): Xaa can be any naturally occurring amino acid
  misc_feature (96)..(96): Xaa can be any naturally occurring amino acid
  Coding DNA Sequence Number=SeqID_1128
  Gene Ontology: Cellular component=membrane
  Homolog annotation: Hit_ID=A7PFH8; Match level="QueryCoverage=88%, HitCoverage=27%, E-value=1e-16, Identity=51%"; Hit description =Chromosome chr11 scaffold_14, whole genome shotgun sequence
YCKVIDASSTATTAMSKLIPALTEVNAAIAGFEKVDISLRSTAKILGTVCCVAGALTMALVKGQKLLHTEFLXFYTSXGSEGDDWLLGCLMALSKXCGGWDD

SEQ ID NO: 9302 - protein, 111 aa, Glycine max
  misc_feature (48)..(48): Xaa can be any naturally occurring amino acid
  Coding DNA Sequence Number=SeqID_1129
  Subcellular localization annotation: CTP_CleavageSite=78; ConfidenceScore=5.48e-01
PPPGPPPPPRAPAPAPPPPARPPRTAPRPAPPTPPPGPPPHPAPPPPXPPPPPPHPRSPPAPPTRALYTSAVTLSAAQCKAVSPFIVLHQNPMFSHDGAYTHQPYPCTPPV

SEQ ID NO: 9303 - protein, 93 aa, Glycine max; identical to SEQ ID NO: 6440
  misc_feature (33)..(33): Xaa can be any naturally occurring amino acid
  misc_feature (82)..(82): Xaa can be any naturally occurring amino acid
  Coding DNA Sequence Number=SeqID_1131

SEQ ID NO: 9304 - protein, 130 aa, Glycine max
  Coding DNA Sequence Number=SeqID_1133
  Gene Ontology: Mol. function=calcium ion binding
  Homolog annotation: Hit_ID=A9P121; Match level="QueryCoverage=95%, HitCoverage=97%, E-value=2e-15, Identity=39%"; Hit description =Putative uncharacterized protein
  Pfam annotation: Domain name=efhand; Domain location=24-52; Score =17.3; E_value=0.056; Accession=PF00036.22; Description=EF hand
  Pfam annotation: Domain name=efhand; Domain location=64-92; Score =29.0; E_value=1.8e-05; Accession=PF00036.22; Description=EF hand
  Pfam module annotation: Pfam domain module=efhand::efhand; Domain location=24-52::64-92
MSVAVVNSFTITEFVNDKAKFDGFVNEWFARIDENGDGKLSRDKIRGRLGMLLPFGSESPPQQENEEIFKRFDEDGNGALDLNEFKALMTEIMNAAARSIGGSPVIVVLGKDSLLMKAVQHELATPSSHS

SEQ ID NO: 9305 - protein, 218 aa, Glycine max; identical to SEQ ID NO: 8275
  misc_feature (1)..(1): Xaa can be any naturally occurring amino acid
  misc_feature (5)..(7): Xaa can be any naturally occurring amino acid
  misc_feature (9)..(9): Xaa can be any naturally occurring amino acid
  misc_feature (13)..(13): Xaa can be any naturally occurring amino acid
  misc_feature (39)..(40): Xaa can be any naturally occurring amino acid
  misc_feature (49)..(50): Xaa can be any naturally occurring amino acid
  misc_feature (58)..(58): Xaa can be any naturally occurring amino acid
  misc_feature (65)..(65): Xaa can be any naturally occurring amino acid
  misc_feature (71)..(71): Xaa can be any naturally occurring amino acid
  misc_feature (81)..(81): Xaa can be any naturally occurring amino acid
  misc_feature (86)..(86): Xaa can be any naturally occurring amino acid
  misc_feature (96)..(96): Xaa can be any naturally occurring amino acid
  misc_feature (100)..(100): Xaa can be any naturally occurring amino acid
  misc_feature (103)..(103): Xaa can be any naturally occurring amino acid
  misc_feature (114)..(114): Xaa can be any naturally occurring amino acid
  misc_feature (116)..(116): Xaa can be any naturally occurring amino acid
  misc_feature (126)..(127): Xaa can be any naturally occurring amino acid
  misc_feature (131)..(131): Xaa can be any naturally occurring amino acid
  misc_feature (139)..(140): Xaa can be any naturally occurring amino acid
  misc_feature (146)..(146): Xaa can be any naturally occurring amino acid
  misc_feature (153)..(153): Xaa can be any naturally occurring amino acid
  misc_feature (158)..(158): Xaa can be any naturally occurring amino acid
  misc_feature (161)..(162): Xaa can be any naturally occurring amino acid
  misc_feature (182)..(182): Xaa can be any naturally occurring amino acid
  misc_feature (184)..(185): Xaa can be any naturally occurring amino acid
  misc_feature (202)..(202): Xaa can be any naturally occurring amino acid
  misc_feature (217)..(217): Xaa can be any naturally occurring amino acid
  Coding DNA Sequence Number=SeqID_1134

SEQ ID NO: 9306 - protein, 122 aa, Glycine max
  misc_feature (89)..(89): Xaa can be any naturally occurring amino acid
  misc_feature (108)..(108): Xaa can be any naturally occurring amino acid
  Coding DNA Sequence Number=SeqID_1136
  Homolog annotation: Hit_ID=Q69L77; Match level="QueryCoverage=100%, HitCoverage=40%, E-value=7e-33, Identity=59%"; Hit description =Putative brix domain-containing protein
MAKKRKRSSDAPAPAAVEKPDDSAPERPERTLFGFKDSADDPASKDAGQFFRNKEKVLITCSRRIIYRYRHLMQNVVSLLPHAKKDSKXESKQSKGSALNELVELRSXSSCLFFECRKQKDL

SEQ ID NO: 9307 - protein, 137 aa, Glycine max; identical to SEQ ID NO: 6444
  Coding DNA Sequence Number=SeqID_1137

SEQ ID NO: 9308 - protein, 236 aa, Glycine max; identical to SEQ ID NO: 6446
  misc_feature (5)..(5): Xaa can be any naturally occurring amino acid
  misc_feature (11)..(12): Xaa can be any naturally occurring amino acid
  misc_feature (14)..(14): Xaa can be any naturally occurring amino acid
  misc_feature (31)..(31): Xaa can be any naturally occurring amino acid
  misc_feature (33)..(33): Xaa can be any naturally occurring amino acid
  misc_feature (55)..(55): Xaa can be any naturally occurring amino acid
  misc_feature (59)..(59): Xaa can be any naturally occurring amino acid
  misc_feature (66)..(66): Xaa can be any naturally occurring amino acid
  misc_feature (68)..(68): Xaa can be any naturally occurring amino acid
  misc_feature (70)..(70): Xaa can be any naturally occurring amino acid
  misc_feature (75)..(77): Xaa can be any naturally occurring amino acid
  misc_feature (84)..(86): Xaa can be any naturally occurring amino acid
  misc_feature (88)..(88): Xaa can be any naturally occurring amino acid
  misc_feature (91)..(91): Xaa can be any naturally occurring amino acid
  misc_feature (93)..(93): Xaa can be any naturally occurring amino acid
  misc_feature (170)..(171): Xaa can be any naturally occurring amino acid
  misc_feature (187)..(188): Xaa can be any naturally occurring amino acid
  misc_feature (193)..(193): Xaa can be any naturally occurring amino acid
  misc_feature (203)..(203): Xaa can be any naturally occurring amino acid
  misc_feature (209)..(209): Xaa can be any naturally occurring amino acid
  Coding DNA Sequence Number=SeqID_1139

SEQ ID NO: 9309 - protein, 104 aa, Glycine max; identical to SEQ ID NO: 8281
  misc_feature (40)..(40): Xaa can be any naturally occurring amino acid
  Coding DNA Sequence Number=SeqID_1141

SEQ ID NO: 9310 - protein, 115 aa, Glycine max
  Coding DNA Sequence Number=SeqID_1143
  Gene Ontology: Mol. function=microtubule binding; Cellular component =cytoplasmic vesicle; Biological process=protein transport
  Homolog annotation: Hit_ID=Q9LRP7; Match level="QueryCoverage=100%, HitCoverage=100%, E-value=1e-56, Identity=93%"; Hit description =Autophagy-related protein 8i
  Pfam annotation: Domain name=APG12; Domain location=12-115; Score= -27.7; E_value=0.064; Accession=PF04110.4; Description=Autophagy protein Apg12
  Pfam annotation: Domain name=MAP1_LC3; Domain location=12-115; Score =234.6; E_value=2.2e-67; Accession=PF02991.6; Description=Microtubule associated protein 1A1B, light chain 3
  Pfam module annotation: Pfam domain module=APG12::MAP1_LC3; Domain location=12-115::12-115
MKSFKEELTLDERLAESREIIAKYPTRIPVIAEKYSKTDLPAIEKKKFLVPRDMSVGQFIYILSARLHLSPGKALFVFVNNTLPQTAALMDSIYETYKDEDGFVYVCYSSEKTFG

SEQ ID NO: 9311 - protein, 78 aa, Glycine max; identical to SEQ ID NO: 6466
  misc_feature (6)..(6): Xaa can be any naturally occurring amino acid
  misc_feature (20)..(20): Xaa can be any naturally occurring amino acid
  misc_feature (22)..(22): Xaa can be any naturally occurring amino acid
  misc_feature (48)..(48): Xaa can be any naturally occurring amino acid
  Coding DNA Sequence Number=SeqID_1144

SEQ ID NO: 9312 - protein, 110 aa, Glycine max
  Coding DNA Sequence Number=SeqID_1146
  Subcellular localization annotation: CTP_CleavageSite=12; ConfidenceScore=5.03e-01
GFYTTYPHTPKSSMVIFYRFSTISVTPTFPLLHSFLILSCLCYIVFSLLLAFHHPFLSSIHHHRSYACVLKFPLKLKRYLFVVSLTVTVWVPFCLAQGLKEIDIACQIQG

SEQ ID NO: 9313 - protein, 65 aa, Glycine max
  misc_feature (7)..(7): Xaa can be any naturally occurring amino acid
  misc_feature (15)..(15): Xaa can be any naturally occurring amino acid
  misc_feature (41)..(48): Xaa can be any naturally occurring amino acid
  misc_feature (50)..(50): Xaa can be any naturally occurring amino acid
  misc_feature (63)..(63): Xaa can be any naturally occurring amino acid
  Coding DNA Sequence Number=SeqID_1147
SNMDNRXFMLLPVFXGIGDGIQEHTVNNFPGIADVFCFGVXXXXXXXXFXDLFRDGMHHICQXFF

SEQ ID NO: 9314 - protein, 125 aa, Glycine max
  misc_feature (60)..(60): Xaa can be any naturally occurring amino acid
  misc_feature (79)..(79): Xaa can be any naturally occurring amino acid
  Coding DNA Sequence Number=SeqID_1149
  Gene Ontology: Cellular component=endoplasmic reticulum
  Homolog annotation: Hit_ID=A2WJM9; Match level="QueryCoverage=76%, HitCoverage=6%, E-value=5e-25, Identity=64%"; Hit description =Putative uncharacterized protein
  Pfam annotation: Domain name=TRAP_beta; Domain location=3-125; Score=- 37.4; E_value=0.00029; Accession=PF05753.5; Description=Translocon -associated protein beta (TRAPB)
MGTLTTVPVLPSKLNKPSLSPRHNSVSLDLYNQGSATAYDVSLNDDSWPTQAFELVTGEXSKTLERFDPGATATHTYVXLETKTQGRFQGFTKLLFTYPSFPTKIGLQGRPYFNFPFFPTGIFLP

SEQ ID NO: 9315 - protein, 177 aa, Glycine max
  misc_feature (19)..(19): Xaa can be any naturally occurring amino acid
  Coding DNA Sequence Number=SeqID_1150
  Gene Ontology: Mol. function=tubulin-tyrosine ligase activity; Biological process=protein modification process
  Homolog annotation: Hit_ID=Q23QF2; Match level="QueryCoverage=98%, HitCoverage=22%, E-value=7e-37, Identity=45%"; Hit description =Tubulin-tyrosine ligase family protein
RLGDYLYESGKVKDKNWVXNTLKPSFQEAFIHTVRMSAHAFWNQSNVYEMFGLDFMLDDELNLWFIECNSSPQLIGTNEHKTNFLVQMLEDLFEIQYGLYRSRMTRILDVLKKVSRESAENGAVDYTRYRQDYAEASKNRFEKEFQVSRDNSFKLIMDMNEEGKDAYFGNLDDECTY

SEQ ID NO: 9316 - protein, 145 aa, Glycine max
  Coding DNA Sequence Number=SeqID_1151
  Gene Ontology: Mol. function=catalytic activity; Biological process =metabolic process
  Homolog annotation: Hit_ID=A7PKG0; Match level="QueryCoverage=98%, HitCoverage=35%, E-value=5e-21, Identity=37%"; Hit description =Chromosome chr15 scaffold_19, whole genome shotgun sequence
RNGFSRMAILNKPSALNALNTNIAATLHKLYMIWKYDPNIDFVMLKDINQSFTTNKHIITLYHLINKRNLKSYKQFFITAYSFIYLIYTYSKPHITLLNNITITNNTKISIPNTFQFTTDKTIFTTPKYLIRYHPDTTASLYLSH

SEQ ID NO: 9317 - protein, 137 aa, Glycine max
  Coding DNA Sequence Number=SeqID_1152
  Subcellular localization annotation: CTP_CleavageSite=43; ConfidenceScore=5.13e-01
ASSLRHGNTPLATFFSFFPLRHFLIALFLVFSSLGHAFFCILNSSSISCLIYLDLNIYVLKSSTQVPTIPNYACQTCANSVVAHTCSATQTFYFHCPLYTIGGPHGQYTPQCGNLLSNFVFGCYMGGENRSQMNSGC

SEQ ID NO: 9318 - protein, 136 aa, Glycine max
  misc_feature (2)..(2): Xaa can be any naturally occurring amino acid
  Coding DNA Sequence Number=SeqID_1153
  Gene Ontology: Mol. function=transferase activity, transferring nitrogenous groups; Cellular component=mitochondrion; Biological process=biosynthetic process
  Homolog annotation: Hit_ID=Q54MJ7; Match level="QueryCoverage=97%, HitCoverage=25%, E-value=1e-41, Identity=59%"; Hit description =Alanine transaminase
RXGYYLNEEANWRLDTPQLEKALDEAKKKGINTRALVVINPGNPTGNTMDRKAMEEVVDFCYRNKLILMADEVYQDNIYKEGQSFISFKKVLREMEEKYQKLELVSFHSVSKGFYGECGKRGGYLEMVNISEPVKE

SEQ ID NO: 9319 - protein, 105 aa, Glycine max
  Coding DNA Sequence Number=SeqID_1154
PLPPPQFMNDNMTAMADQCIHDPSIERLMDATMSSSSEGMMMLRPTNSHNYTTSGHNLTPKGCAFKPIRRRSRTSKSTPITLLKVNTYHIRALERQLTGCPTTTT

SEQ ID NO: 9320 - protein, 82 aa, Glycine max; identical to SEQ ID NO: 6471
  Coding DNA Sequence Number=SeqID_1156

SEQ ID NO: 9321 - protein, 126 aa, Glycine max
  misc_feature (14)..(14): Xaa can be any naturally occurring amino acid
  misc_feature (22)..(22): Xaa can be any naturally occurring amino acid
  misc_feature (89)..(89): Xaa can be any naturally occurring amino acid
  Coding DNA Sequence Number=SeqID_1158
  Gene Ontology: Mol. function=structural constituent of ribosome; Cellular component=ribonucleoprotein complex; Biological process =translation
  Homolog annotation: Hit_ID=Q9FLF0; Match level="QueryCoverage=100%, HitCoverage=63%, E-value=7e-38, Identity=66%"; Hit description=40S ribosomal protein S9-2
  Pfam annotation: Domain name=S4; Domain location=58-105; Score=27.6; E_value=4.6e-05; Accession=PF01479.15; Description=S4 domain
RIRNNVRNLLTLYXKNPRRIFXGYALLRMMFHLRCSSHDTPNKLDYDLVLTVENFLERRLHTLVFNSGMVKSLHSATALIKHIHIRVGXAAANIPSFLVGVDSHKHIDFSLTNPLGGGRPGRVKRR

SEQ ID NO: 9322 - protein, 141 aa, Glycine max
  Coding DNA Sequence Number=SeqID_1159
  Gene Ontology: Mol. function=structural constituent of ribosome; Cellular component=intracellular; Biological process=translation
  Homolog annotation: Hit_ID=UPI000150A7DC; Match level="QueryCoverage =100%, HitCoverage=100%, E-value=6e-61, Identity=78%"; Hit description=Ribosomal protein L14p/L23e containing protein
  Pfam annotation: Domain name=Ribosomal_L14; Domain location=20-141; Score=180.1; E_value=5.6e-51; Accession=PF00238.10; Description =Ribosomal protein L14pL23e
MASKRGRGGQVGTKLKVSLGLAQGALINCADNTGAKNLFIISAFGIRGHLSRLPSASAGDMVLVSVKKGKPELRKKVLQAVVVRQRKPWRRKEGIFIYCEDNAGVIVNPKGEMKGSAITGPVAKECADIWPKVASAAGSII

SEQ ID NO: 9323 - protein, 148 aa, Glycine max
  misc_feature (5)..(5): Xaa can be any naturally occurring amino acid
  misc_feature (10)..(10): Xaa can be any naturally occurring amino acid
  misc_feature (20)..(20): Xaa can be any naturally occurring amino acid
  misc_feature (94)..(94): Xaa can be any naturally occurring amino acid
  misc_feature (101)..(102): Xaa can be any naturally occurring amino acid
  misc_feature (106)..(106): Xaa can be any naturally occurring amino acid
  Coding DNA Sequence Number=SeqID_1160
VTDTXRDIRXCVTASARPDXPLSYDPVLTTPLSRCSAVNRARRSSWSTALLLSHHSLHHVPYAAHVADHRYVLAMSDYTARLPLTHILYLTLVXYLAYLSXXLRSXCICAHAVLLLDMIICDAYRVSLARHIVYERVRIVTISCSHTS

SEQ ID NO: 9324 - protein, 93 aa, Glycine max; identical to SEQ ID NO: 8295
  misc_feature (24)..(24): Xaa can be any naturally occurring amino acid
  misc_feature (47)..(47): Xaa can be any naturally occurring amino acid
  misc_feature (52)..(53): Xaa can be any naturally occurring amino acid
  misc_feature (56)..(56): Xaa can be any naturally occurring amino acid
  misc_feature (62)..(63): Xaa can be any naturally occurring amino acid
  misc_feature (66)..(66): Xaa can be any naturally occurring amino acid
  Coding DNA Sequence Number=SeqID_1162

SEQ ID NO: 9325 - protein, 69 aa, Glycine max
  Coding DNA Sequence Number=SeqID_1164
MNTDLKVGGEHISSLLEEEITVPTLAVRDKDENDCLAMLDDRRVSNGDLFGAYDTAYSKPPLTVMSSGD

SEQ ID NO: 9326 - protein, 163 aa, Glycine max
  misc_feature (16)..(16): Xaa can be any naturally occurring amino acid
  misc_feature (24)..(24): Xaa can be any naturally occurring amino acid
  misc_feature (26)..(26): Xaa can be any naturally occurring amino acid
  misc_feature (35)..(35): Xaa can be any naturally occurring amino acid
  misc_feature (37)..(37): Xaa can be any naturally occurring amino acid
  misc_feature (70)..(70): Xaa can be any naturally occurring amino acid
  misc_feature (103)..(103): Xaa can be any naturally occurring amino acid
  misc_feature (112)..(112): Xaa can be any naturally occurring amino acid
  misc_feature (117)..(117): Xaa can be any naturally occurring amino acid
  misc_feature (127)..(127): Xaa can be any naturally occurring amino acid
  misc_feature (146)..(146): Xaa can be any naturally occurring amino acid
  Coding DNA Sequence Number=SeqID_1165
YRRSAPYTLLLLILSXQIDLSYCXCXIATGRDDNXSXVYEFSSSSNTLLTSYTTHLMRLIHDLRASRRSXYVLSSTSPATDHSHCSLISHTREHEYIVARLMXATSLWSHRXDTLLXPLSMIYTERXSVSAYDLRYIISTMLFTCXIYILIDRHLSPRTTRQH

SEQ ID NO: 9327 - protein, 151 aa, Glycine max; identical to SEQ ID NO: 6484
  misc_feature (2)..(2): Xaa can be any naturally occurring amino acid
  misc_feature (24)..(24): Xaa can be any naturally occurring amino acid
  misc_feature (29)..(29): Xaa can be any naturally occurring amino acid
  misc_feature (107)..(107): Xaa can be any naturally occurring amino acid
  misc_feature (114)..(115): Xaa can be any naturally occurring amino acid
  misc_feature (129)..(129): Xaa can be any naturally occurring amino acid
  misc_feature (141)..(141): Xaa can be any naturally occurring amino acid
  Coding DNA Sequence Number=SeqID_1167

SEQ ID NO: 9328 - protein, 89 aa, Glycine max; identical to SEQ ID NO: 8627
  Coding DNA Sequence Number=SeqID_1169

SEQ ID NO: 9329 - protein, 144 aa, Glycine max
  Coding DNA Sequence Number=SeqID_1171
  Homolog annotation: Hit_ID=Q658D6; Match level="QueryCoverage=30%, HitCoverage=9%, E-value=3e-12, Identity=77%"; Hit description =Putative uncharacterized protein P0436E04.11
MRFWRGRCRISIPGEGFEAGSSGETGGLSQAGKICTWFSSYHDHCVCCMDSYGLCETPFKLDPGLLCSAACDIETMKIGSLLCCCLLQPSEKGPMYEKGISQHPLDCRNISEGNVLCYCLALMVSTHFDVEALLDVRRCCCSWM

SEQ ID NO: 9330 - protein, 161 aa, Glycine max
  Coding DNA Sequence Number=SeqID_1172
IEPPTPLPDKMAARVAAALALALLVQVASAAPQYTCSCSATPASGPVYIGGGVGPVVYPSGGVTIDTPAPGPVYCGGVGPTVYGGGVAIDSSADAYAAATADASYYGGDVSTDANTVYLGSSSGAVSVTDNSIYATPTVSPSVPVGSPQIVSTSAGPASSY

SEQ ID NO: 9331 - protein, 105 aa, Glycine max; identical to SEQ ID NO: 8302
  misc_feature (4)..(4): Xaa can be any naturally occurring amino acid
  misc_feature (33)..(33): Xaa can be any naturally occurring amino acid
  misc_feature (74)..(75): Xaa can be any naturally occurring amino acid
  misc_feature (94)..(94): Xaa can be any naturally occurring amino acid
  Coding DNA Sequence Number=SeqID_1174

SEQ ID NO: 9332 - protein, 102 aa, Glycine max; identical to SEQ ID NO: 8303
  misc_feature (25)..(25): Xaa can be any naturally occurring amino acid
  misc_feature (100)..(100): Xaa can be any naturally occurring amino acid
  Coding DNA Sequence Number=SeqID_1176

SEQ ID NO: 9333 - protein, 80 aa, Glycine max
  Coding DNA Sequence Number=SeqID_1177
  Subcellular localization annotation: CTP_CleavageSite=52; ConfidenceScore=5.86e-01
SSLLLLLPSSTTKTPPLPPASPLSSSPSSRPSSPPISSTTTTLSSLNTDDVPAAKPPPQNFPAANPAPVHWRVYMLSTTL

SEQ ID NO: 9334 - protein, 164 aa, Glycine max
  misc_feature (118)..(118): Xaa can be any naturally occurring amino acid
  misc_feature (136)..(136): Xaa can be any naturally occurring amino acid
  Coding DNA Sequence Number=SeqID_1215
  Homolog annotation: Hit_ID=A7P4P5; Match level="QueryCoverage=92%, HitCoverage=29%, E-value=2e-45, Identity=61%"; Hit description =Chromosome chr4 scaffold_6, whole genome shotgun sequence
MKKSGEENGGKFKLKGADRSAYFARREAAKVLKVVLEGDAKRRALASIKSLIYQPSVRNKKATFALICQTLKHLPIINYVLEAASILNSKWKRQRELIYIIVYDILFGQAVPHNIGVXEWRMCYQDALRSTLEETXLQRVVKTVKQLIALHQVPDVSVPRYVRV

SEQ ID NO: 9335 - protein, 122 aa, Glycine max; identical to SEQ ID NO: 6516
  misc_feature (34)..(40): Xaa can be any naturally occurring amino acid
  misc_feature (42)..(44): Xaa can be any naturally occurring amino acid
  misc_feature (92)..(92): Xaa can be any naturally occurring amino acid
  Coding DNA Sequence Number=SeqID_1216

SEQ ID NO: 9336 - protein, 130 aa, Glycine max; identical to SEQ ID NO: 8344
  misc_feature (3)..(3): Xaa can be any naturally occurring amino acid
  misc_feature (9)..(9): Xaa can be any naturally occurring amino acid
  misc_feature (32)..(33): Xaa can be any naturally occurring amino acid
  misc_feature (43)..(43): Xaa can be any naturally occurring amino acid
  misc_feature (62)..(63): Xaa can be any naturally occurring amino acid
  misc_feature (97)..(97): Xaa can be any naturally occurring amino acid
  misc_feature (110)..(110): Xaa can be any naturally occurring amino acid
  misc_feature (124)..(124): Xaa can be any naturally occurring amino acid
  Coding DNA Sequence Number=SeqID_1218

SEQ ID NO: 9337 - protein, 103 aa, Glycine max; identical to SEQ ID NO: 6517
  misc_feature (3)..(3): Xaa can be any naturally occurring amino acid
  misc_feature (5)..(5): Xaa can be any naturally occurring amino acid
  misc_feature (19)..(19): Xaa can be any naturally occurring amino acid
  misc_feature (27)..(27): Xaa can be any naturally occurring amino acid
  misc_feature (50)..(50): Xaa can be any naturally occurring amino acid
  misc_feature (55)..(56): Xaa can be any naturally occurring amino acid
  misc_feature (61)..(62): Xaa can be any naturally occurring amino acid
  misc_feature (75)..(75): Xaa can be any naturally occurring amino acid
  Coding DNA Sequence Number=SeqID_1220

SEQ ID NO: 9338 - protein, 99 aa, Glycine max
  misc_feature (29)..(29): Xaa can be any naturally occurring amino acid
  Coding DNA Sequence Number=SeqID_1222
  Gene Ontology: Mol. function=structural constituent of ribosome; Cellular component=ribonucleoprotein complex; Biological process =translation
  Homolog annotation: Hit_ID=Q9ZT03; Match level="QueryCoverage=98%, HitCoverage=79%, E-value=1e-35, Identity=74%"; Hit description=Clone MS56 unknown mRNA
  Pfam annotation: Domain name=Ribosomal_S26e; Domain location=1-92; Score=107.1; E_value=5.3e-29; Accession=PF01283.9; Description =Ribosomal protein S26e
SSNCVKCWPMDKDIDRFLVRNIVEQAAVXDVHEVCVYDQYTLPKVYVNMHYCVSCAIHSHDMRVRSPTDRIKREPPHRFITGKDDAPTPAHPVQAPRPA

SEQ ID NO: 9339 - protein, 96 aa, Glycine max
  Coding DNA Sequence Number=SeqID_1223
KLCRCAICWNFPRRLLVVPILLIISSTVPVLLVVGVVAITIRPPSTPAVVGGTAGLEGREPLVVIPRRLMRPSDGGHKAAPGARQRGVRIRRGTFS

SEQ ID NO: 9340 - protein, 654 aa, Glycine max
  misc_feature (529)..(529): Xaa can be any naturally occurring amino acid
  misc_feature (549)..(549): Xaa can be any naturally occurring amino acid
  misc_feature (556)..(556): Xaa can be any naturally occurring amino acid
  misc_feature (583)..(583): Xaa can be any naturally occurring amino acid
  misc_feature (609)..(609): Xaa can be any naturally occurring amino acid
  misc_feature (627)..(627): Xaa can be any naturally occurring amino acid
  Coding DNA Sequence Number=SeqID_1225
  Gene Ontology: Mol. function=nucleotide binding; Cellular component =endoplasmic reticulum lumen; Biological process=negative regulation of caspase activity
  Homolog annotation: Hit_ID=Q8T869; Match level="QueryCoverage=97%, HitCoverage=96%, E-value=0.0, Identity=72%"; Hit description=Similar to Zea mays (Maize). Luminal binding protein 3
  Pfam annotation: Domain name=HSP70; Domain location=29-633; Score =1264.7; E_value=0; Accession=PF00012.10; Description=Hsp70 protein
  Pfam annotation: Domain name=MreB_Mbl; Domain location=27-410; Score=- 241.6; E_value=0.00022; Accession=PF06723.3; Description=MreBMbl protein
  Pfam module annotation: Pfam domain module=HSP70::MreB_Mbl; Domain location=29-633::27-410
MQRSVLLLVVLFFAAFAFADEEKKVPTNVIGIDLGTTYSCVGIFKKGKVEIIANDQGNRVTPSWVAFTENERLIGEAAKNQATVNPENTVFDVKRLIGRNFNDAEVQRDMKLMPYKIVNKGGKPYVQVKVKGEDKVYSPEEVSAMILTKMKETAEGHIGKKVEYAVVTCPAYFNDAQRQATKDAGTIAGLDVLRIINEPTAAAIAYGLGDMGNEKNILVFDLGGGTFDVSILTIEKGVFEVISTNGDTHLGGEDFDQRVMDYFLKLWQKKTGKDASKDKRAIQKLRKEVEQAKRILSTSHQTSIEIENFHDGQDLTQTLTRAKFEELNADLFKKTLTPVQKALDDAKLKKHEIQEVVLVGGSTRIPKVQQLLKDFFNGKEPNKGVNPDEAVAYGAAVQGGILSKEDDVGDVVLLDITPLTLGIETVGGVMTALITRNSFIPTKKSQVFSTYQDNQDRVLIQVFEGERSMTKDNRLLGKFELSGIPPAARGVPQIEVSFELDVNGILHVSAEDKASGAKESITITNDKGXLSEDEIKRMVEEAEAAAEDXKKAKERXEARNSLENYVYQVRNTINDNEKLGDKXSEEDKETIESTIKDAIEWLEQNSMGXKEEFDDKYKEVEKIVQPXFAKLYGGAQAHHGAPGADEEMPDHDEL

SEQ ID NO: 9341 - protein, 113 aa, Glycine max
  misc_feature (3)..(3): Xaa can be any naturally occurring amino acid
  misc_feature (7)..(7): Xaa can be any naturally occurring amino acid
  misc_feature (16)..(16): Xaa can be any naturally occurring amino acid
  misc_feature (27)..(28): Xaa can be any naturally occurring amino acid
  misc_feature (30)..(30): Xaa can be any naturally occurring amino acid
  misc_feature (45)..(45): Xaa can be any naturally occurring amino acid
  misc_feature (59)..(59): Xaa can be any naturally occurring amino acid
  misc_feature (61)..(61): Xaa can be any naturally occurring amino acid
  misc_feature (68)..(69): Xaa can be any naturally occurring amino acid
  misc_feature (76)..(76): Xaa can be any naturally occurring amino acid
  misc_feature (84)..(84): Xaa can be any naturally occurring amino acid
  misc_feature (86)..(88): Xaa can be any naturally occurring amino acid
  misc_feature (100)..(101): Xaa can be any naturally occurring amino acid
  misc_feature (109)..(112): Xaa can be any naturally occurring amino acid
  Coding DNA Sequence Number=SeqID_1226
SVXGWSXRWSVAERSXKIGEYRAWSVXXVXKSIILLLRYIGDAMXVCSSSRCDRACPAXRXRHHFSPXXVSYSRAXGIVFLLLXRXXXPAPSCSHIQFSXXSSTHIYNXXXXN

SEQ ID NO: 9342 - protein, 115 aa, Glycine max; identical to SEQ ID NO: 6563
  misc_feature (11)..(11): Xaa can be any naturally occurring amino acid
  misc_feature (27)..(27): Xaa can be any naturally occurring amino acid
  misc_feature (33)..(33): Xaa can be any naturally occurring amino acid
  misc_feature (38)..(38): Xaa can be any naturally occurring amino acid
  misc_feature (48)..(48): Xaa can be any naturally occurring amino acid
  misc_feature (58)..(58): Xaa can be any naturally occurring amino acid
  misc_feature (75)..(75): Xaa can be any naturally occurring amino acid
  Coding DNA Sequence Number=SeqID_1720

SEQ ID NO: 9343 - protein, 285 aa, Glycine max
  misc_feature (19)..(19): Xaa can be any naturally occurring amino acid
  misc_feature (21)..(21): Xaa can be any naturally occurring amino acid
  misc_feature (54)..(54): Xaa can be any naturally occurring amino acid
  misc_feature (93)..(93): Xaa can be any naturally occurring amino acid
  misc_feature (97)..(97): Xaa can be any naturally occurring amino acid
  misc_feature (101)..(101): Xaa can be any naturally occurring amino acid
  misc_feature (127)..(127): Xaa can be any naturally occurring amino acid
  misc_feature (222)..(222): Xaa can be any naturally occurring amino acid
  misc_feature (243)..(243): Xaa can be any naturally occurring amino acid
  misc_feature (268)..(268): Xaa can be any naturally occurring amino acid
  misc_feature (278)..(278): Xaa can be any naturally occurring amino acid
  Coding DNA Sequence Number=SeqID_1722
DSLSYTPTHTHTFIYIHIXIXSHRYTYTYSYIHIHTHIYTYILMNILLVRLSHXLFDIYTVSLLSTHYHTVIPLLVTPLLYSHPLYFRLYFNXSTLXYTSXHLHCTTNYSLHIHFLYLITYTLIQPXLIFSPHTLLSYKHASQFYFLVLLPTILLYFRSHDNCSLPTLSTLTRTTHTHTLTLTNPHRTTTLSTNYRTPPTHSHSHHTPLLTYLITQSYHFLXTTSPTPHLDHNLYSSIYSLSXHSTLVTINLVLPYLAYSPHPSSYSXSITTSRTSSXLLTTRPT

SEQ ID NO: 9344 - protein, 110 aa, Glycine max; identical to SEQ ID NO: 6006
  misc_feature (1)..(16): Xaa can be any naturally occurring amino acid
  misc_feature (21)..(21): Xaa can be any naturally occurring amino acid
  misc_feature (24)..(24): Xaa can be any naturally occurring amino acid
  misc_feature (26)..(28): Xaa can be any naturally occurring amino acid
  misc_feature (30)..(35): Xaa can be any naturally occurring amino acid
  misc_feature (37)..(37): Xaa can be any naturally occurring amino acid
  misc_feature (39)..(39): Xaa can be any naturally occurring amino acid
  misc_feature (56)..(56): Xaa can be any naturally occurring amino acid
  misc_feature (59)..(60): Xaa can be any naturally occurring amino acid
  misc_feature (72)..(72): Xaa can be any naturally occurring amino acid
  misc_feature (75)..(75): Xaa can be any naturally occurring amino acid
  misc_feature (82)..(83): Xaa can be any naturally occurring amino acid
  misc_feature (85)..(85): Xaa can be any naturally occurring amino acid
  misc_feature (90)..(90): Xaa can be any naturally occurring amino acid
  Coding DNA Sequence Number=SeqID_1724

SEQ ID NO: 9345 - protein, 106 aa, Glycine max; identical to SEQ ID NO: 6868
  misc_feature (57)..(57): Xaa can be any naturally occurring amino acid
  misc_feature (92)..(92): Xaa can be any naturally occurring amino acid
  Coding DNA Sequence Number=SeqID_1726

SEQ ID NO: 9346 - protein, 111 aa, Glycine max
  misc_feature (42)..(42): Xaa can be any naturally occurring amino acid
  misc_feature (45)..(45): Xaa can be any naturally occurring amino acid
  misc_feature (109)..(109): Xaa can be any naturally occurring amino acid
  Coding DNA Sequence Number=SeqID_1728
CLDTSYAHLIHGSVRPREVSYASFIHNRILSNGRADMTGTRXLCXYRIATCSLADDSTFLSDEDAQQLATGASHSLSPARRRLTTDYVTNRLCSNVSRSQARSCRSSTXSR

SEQ ID NO: 9347 - protein, 150 aa, Glycine max
  Coding DNA Sequence Number=SeqID_1729
  Gene Ontology: Mol. function=fructokinase activity; Cellular component=cytoplasm; Biological process=carbohydrate metabolic process
  Homolog annotation: Hit_ID=Q9SID0; Match level="QueryCoverage=82%, HitCoverage=37%, E-value=1e-55, Identity=90%"; Hit description =Probable fructokinase-1
RFHFGVMLIDFVPTESRVSLAEAPGFLKAPGGAPAIVAITVSCLGGRSAFIVKLGDDEFGHMLAGILRKNGVADQGINFDTGARTALAFVTLKADGDREFMFYRNHSADMLLRPDELNLDLIRSVRKSPLSIPHDLQEIQMEVEIHSLVF

SEQ ID NO: 9348 - protein, 96 aa, Glycine max
  misc_feature (10)..(10): Xaa can be any naturally occurring amino acid
  misc_feature (17)..(17): Xaa can be any naturally occurring amino acid
  misc_feature (59)..(59): Xaa can be any naturally occurring amino acid
  Coding DNA Sequence Number=SeqID_1730
LLCLCVVYYXFFYHLYXVYISCMANSYVRPSAFYQLSTARARTCAARREGSYVSVHPHXRYSRYMIATYRYTTAPTTPYSSSHHAYTRRAQQRSEH

SEQ ID NO: 9349 - protein, 192 aa, Glycine max
  misc_feature (16)..(16): Xaa can be any naturally occurring amino acid
  misc_feature (49)..(49): Xaa can be any naturally occurring amino acid
  misc_feature (82)..(82): Xaa can be any naturally occurring amino acid
  misc_feature (94)..(94): Xaa can be any naturally occurring amino acid
  misc_feature (115)..(115): Xaa can be any naturally occurring amino acid
  Coding DNA Sequence Number=SeqID_1732
  Gene Ontology: Mol. function=peroxidase activity; Cellular component =cytoplasm; Biological process=response to oxidative stress
  Homolog annotation: Hit_ID=Q76LA8; Match level="QueryCoverage=71%, HitCoverage=52%, E-value=4e-32, Identity=58%"; Hit description =Cytosolic ascorbate peroxidase 1
MGKCYPTGSADYQRGXEKAKKKRRGVIAEKRGAPRGRRLGWGSAGTFDXARRAGGPFGTIKHPAELGHSANNGLDIAVRLLXEPLKAEVPIVSXYADFYQGGGVVAGEVTGGPEXHSTLGERTSLSPHQRGRLPDATEGAGHGGDGGGEAVGVAGQDVGARARGGPCGGLGAGGRGGLEGGVGAGMAGVGGG

SEQ ID NO: 9350 - protein, 179 aa, Glycine max; identical to SEQ ID NO: 6266
  Coding DNA Sequence Number=SeqID_1178

SEQ ID NO: 9351 - protein, 266 aa, Glycine max; identical to SEQ ID NO: 8640
  misc_feature (213)..(213): Xaa can be any naturally occurring amino acid
  misc_feature (217)..(217): Xaa can be any naturally occurring amino acid
  Coding DNA Sequence Number=SeqID_1180

SEQ ID NO: 9352 - protein, 94 aa, Glycine max
  misc_feature (19)..(19): Xaa can be any naturally occurring amino acid
  misc_feature (88)..(88): Xaa can be any naturally occurring amino acid
  Coding DNA Sequence Number=SeqID_1182
  Subcellular localization annotation: CTP_CleavageSite=53; ConfidenceScore=5.20e-01
PIKLNRQTGPTCRRDARPXYILQTPVVFILFCNNTVRAVLCVWLCFLFAPSLSASRASRPRFRSSFYPLRTLYAVRVYYRDDYSTIGXQYINLT

SEQ ID NO: 9353 - protein, 203 aa, Glycine max
  misc_feature (25)..(25): Xaa can be any naturally occurring amino acid
  misc_feature (164)..(164): Xaa can be any naturally occurring amino acid
  Coding DNA Sequence Number=SeqID_1184
CAYYRESVSARHSWTYGYDVGVLSXAISRCITRTVSCVAVIIALCRLFIAARSDARTRRVSMIGRVQSMTTIHQCIGLCTRCVYVLILFITQIIFGVVLRLCCTRTCLRAAERAQYITAHLLAIDLLFGLPRFLTSLAIFSLYRFSVTCVLISLVTHAVVVVLXAHRCTIISASQPTYLDAPVTERDLCWICVVKRVVSCCRS

SEQ ID NO: 9354 - protein, 117 aa, Glycine max; identical to SEQ ID NO: 8324
  misc_feature (5)..(5): Xaa can be any naturally occurring amino acid
  misc_feature (10)..(10): Xaa can be any naturally occurring amino acid
  misc_feature (28)..(28): Xaa can be any naturally occurring amino acid
  misc_feature (53)..(53): Xaa can be any naturally occurring amino acid
  misc_feature (62)..(62): Xaa can be any naturally occurring amino acid
  misc_feature (89)..(89): Xaa can be any naturally occurring amino acid
  Coding DNA Sequence Number=SeqID_1186

SEQ ID NO: 9355 - protein, 136 aa, Glycine max
  misc_feature (20)..(20): Xaa can be any naturally occurring amino acid
  misc_feature (26)..(26): Xaa can be any naturally occurring amino acid
  misc_feature (80)..(81): Xaa can be any naturally occurring amino acid
  misc_feature (87)..(87): Xaa can be any naturally occurring amino acid
  misc_feature (99)..(99): Xaa can be any naturally occurring amino acid
  misc_feature (101)..(101): Xaa can be any naturally occurring amino acid
  Coding DNA Sequence Number=SeqID_1188
FFCLVCPLQPPPAENNLLKXSSYYRXSAHLPTTAIYRDKIIILICSLFYTSHYLYGYCALLTRGVFVSMRSYLCGWRVVXXLDTTHXSLYVVNTHILIXYXILPLCLSLTPLHASRADRLRTTNTPLAYYIKLRSS

SEQ ID NO: 9356 - protein, 100 aa, Glycine max
  misc_feature (10)..(11): Xaa can be any naturally occurring amino acid
  misc_feature (17)..(17): Xaa can be any naturally occurring amino acid
  misc_feature (25)..(25): Xaa can be any naturally occurring amino acid
  misc_feature (40)..(40): Xaa can be any naturally occurring amino acid
  Coding DNA Sequence Number=SeqID_1733
  Gene Ontology: Mol. function=electron carrier activity; Cellular component=chloroplast; Biological process=electron transport
  Homolog annotation: Hit_ID=P00289; Match level="QueryCoverage=97%, HitCoverage=57%, E-value=5e-28, Identity=67%"; Hit description =Plastocyanin, chloroplast precursor
  Pfam annotation: Domain name=Copper-bind; Domain location=3-101; Score=88.3; E_value=2.4e-23; Accession=PF00127.11; Description =Copper binding proteins, plastocyanin
MATAVVLGGXXGSLAFXPSNFSVAXGEKIVFISNAGSPPXVVLVENEIPIGVDAGTISMSDEGLLNAPGATYNVTLYVKGAYSLFCSPLQGAGMVGKCPC

SEQ ID NO: 9357 - protein, 104 aa, Glycine max; identical to SEQ ID NO: 6077
  misc_feature (11)..(11): Xaa can be any naturally occurring amino acid
  misc_feature (32)..(32): Xaa can be any naturally occurring amino acid
  misc_feature (35)..(35): Xaa can be any naturally occurring amino acid
  misc_feature (40)..(42): Xaa can be any naturally occurring amino acid
  misc_feature (46)..(46): Xaa can be any naturally occurring amino acid
  misc_feature (63)..(63): Xaa can be any naturally occurring amino acid
  misc_feature (76)..(76): Xaa can be any naturally occurring amino acid
  misc_feature (85)..(85): Xaa can be any naturally occurring amino acid
  misc_feature (92)..(92): Xaa can be any naturally occurring amino acid
  misc_feature (96)..(96): Xaa can be any naturally occurring amino acid
  misc_feature (104)..(104): Xaa can be any naturally occurring amino acid
  Coding DNA Sequence Number=SeqID_1734

SEQ ID NO: 9358 - protein, 128 aa, Glycine max; identical to SEQ ID NO: 6078
  misc_feature (1)..(1): Xaa can be any naturally occurring amino acid
  misc_feature (10)..(10): Xaa can be any naturally occurring amino acid
  misc_feature (17)..(17): Xaa can be any naturally occurring amino acid
  misc_feature (38)..(38): Xaa can be any naturally occurring amino acid
  misc_feature (45)..(45): Xaa can be any naturally occurring amino acid
  misc_feature (112)..(112): Xaa can be any naturally occurring amino acid
  Coding DNA Sequence Number=SeqID_1736

SEQ ID NO: 9359 - protein, 72 aa, Glycine max; identical to SEQ ID NO: 6879
  Coding DNA Sequence Number=SeqID_1738
  Subcellular localization annotation: CTP_CleavageSite=44; ConfidenceScore=5.21e-01

SEQ ID NO: 9360 - protein, 95 aa, Glycine max
  misc_feature (79)..(79): Xaa can be any naturally occurring amino acid
  misc_feature (93)..(93): Xaa can be any naturally occurring amino acid
  Coding DNA Sequence Number=SeqID_1739
GGRLTSITAFYLLQTRSRLSLAEELPGVRSARTRGPRLYSSQGAERAPGRRCSVCASKDAFLVLSGILCSELFPPVPRXGFHLFIIVAVLALXCR

SEQ ID NO: 9361 - protein, 118 aa, Glycine max
  misc_feature (66)..(67): Xaa can be any naturally occurring amino acid
  misc_feature (74)..(74): Xaa can be any naturally occurring amino acid
  misc_feature (92)..(92): Xaa can be any naturally occurring amino acid
  Coding DNA Sequence Number=SeqID_1741
  Gene Ontology: Mol. function=methionine adenosyltransferase activity; Cellular component=cytosol; Biological process=one-carbon compound metabolic process
  Homolog annotation: Hit_ID=P23686; Match level="QueryCoverage=94%, HitCoverage=28%, E-value=1e-34, Identity=67%"; Hit description=S -adenosylmethionine synthetase 1
  Pfam annotation: Domain name=S-AdoMet_synt_N; Domain location=3-102; Score=144.8; E_value=2.3e-40; Accession=PF00438.10; Description=S -adenosylmethionine synthetase, N-te
MAETFLFTSESVNEGHPDKLCDQISDAVLDACLEQDPDCIVACETCTKTNWAMDIGQTTTTVTADXXRIAPDTXWNIGYMMNDGILAADKCXVLVNIEHLSPDIAHAVHLHLTLKTVE

SEQ ID NO: 9362 - protein, 152 aa, Glycine max
  misc_feature (69)..(69): Xaa can be any naturally occurring amino acid
  misc_feature (80)..(80): Xaa can be any naturally occurring amino acid
  misc_feature (111)..(111): Xaa can be any naturally occurring amino acid
  misc_feature (113)..(113): Xaa can be any naturally occurring amino acid
  misc_feature (125)..(125): Xaa can be any naturally occurring amino acid
  misc_feature (129)..(129): Xaa can be any naturally occurring amino acid
  misc_feature (131)..(131): Xaa can be any naturally occurring amino acid
  misc_feature (137)..(137): Xaa can be any naturally occurring amino acid
  misc_feature (146)..(146): Xaa can be any naturally occurring amino acid
  Coding DNA Sequence Number=SeqID_1742
  Subcellular localization annotation: CTP_CleavageSite=40; ConfidenceScore=5.65e-01
ARSRASSLGLSVFHALTRLCSPPTRTLSTLSSLVRACRSRCHMASVRGVRLYMYLLQLYLRLFVSIFTXYTAVATCYTYXSYALLSFTPLCSSRYAHTHDAPVPSFYLHSXSXPGSMHAPVAAYXTLTXPXIRDAVXTMQPLLTSXSQSRPR

SEQ ID NO: 9363 - protein, 142 aa, Glycine max; identical to SEQ ID NO: 6883
  misc_feature (39)..(39): Xaa can be any naturally occurring amino acid
  misc_feature (47)..(48): Xaa can be any naturally occurring amino acid
  misc_feature (53)..(53): Xaa can be any naturally occurring amino acid
  misc_feature (73)..(73): Xaa can be any naturally occurring amino acid
  misc_feature (92)..(92): Xaa can be any naturally occurring amino acid
  misc_feature (99)..(99): Xaa can be any naturally occurring amino acid
  misc_feature (127)..(127): Xaa can be any naturally occurring amino acid
  misc_feature (131)..(138): Xaa can be any naturally occurring amino acid
  Coding DNA Sequence Number=SeqID_1744

SEQ ID NO: 9364 - protein, 157 aa, Glycine max
  misc_feature (15)..(15): Xaa can be any naturally occurring amino acid
  misc_feature (34)..(34): Xaa can be any naturally occurring amino acid
  misc_feature (45)..(45): Xaa can be any naturally occurring amino acid
  misc_feature (78)..(79): Xaa can be any naturally occurring amino acid
  misc_feature (147)..(147): Xaa can be any naturally occurring amino acid
  Coding DNA Sequence Number=SeqID_1746
LSRGSDNSCMLYCGXTATAGEVRGNIHDGVWRTXYTGNGVSACCXLRCVVRLERPQRYARAGSRHDRLDAVGARVHSXXHFVCAPVDERCEWSIHVSRGQPHNYSLPMTALVQLYRRLCSYTVRNTSIVGISYSAEYTRYIYHTTIXADVCKDSGCG

SEQ ID NO: 9365 - protein, 102 aa, Glycine max
  misc_feature (23)..(23): Xaa can be any naturally occurring amino acid
  misc_feature (52)..(52): Xaa can be any naturally occurring amino acid
  misc_feature (95)..(95): Xaa can be any naturally occurring amino acid
  Coding DNA Sequence Number=SeqID_1748
IDEIDPKVNDADVKVEDLRLKLXDKRELRAKLQFKSKEVEEQNIILLSKLTXLQNNIKLEDDMKKFNIEELRNVIETNRTVNDTIKDFMEKWDTXKKFSKQS

SEQ ID NO: 9366 - protein, 110 aa, Glycine max
  Coding DNA Sequence Number=SeqID_1750
  Gene Ontology: Mol. function=translation initiation factor activity; Cellular component=cytoplasm; Biological process=regulation of translation
  Homolog annotation: Hit_ID=Q9VZS3; Match level="QueryCoverage=100%, HitCoverage=100%, E-value=2e-55, Identity=92%"; Hit description =Protein translation factor SUI1 homolog
  Pfam annotation: Domain name=SUI1; Domain location=22-103; Score =156.1; E_value=9.5e-44; Accession=PF01253.13; Description =Translation initiation factor SUI1
MSIQNLNTFDPFADAIRGSDDDVQDGLVHIRIQQRNGRKTLTTVQGLSSEYDLKKIVRACKKEFACNGTMIEHPEYGEVLQLQGDQRENICQWLTKTGLAKPDQLKVHGF

SEQ ID NO: 9367 - protein, 189 aa, Glycine max
  Coding DNA Sequence Number=SeqID_1751
DPIQREREIPNPIHRTLTLTKQAAREMLVQKMPMAAGYEGFPLIPSFQADKEQAEAVLAVRAIKAKAEEASLILKAGCGSKRKAEEDGGEVTVKAKAKAAEEEAAAFTTVKAKAEEDSDEDAEWDDDEFMARITADHAAHVEKMKALYPTIKYGDYDPKVYCHSPDPESDAWNLQKKCLGLAEIAAGLL

SEQ ID NO: 9368 - protein, 86 aa, Glycine max
  Coding DNA Sequence Number=SeqID_1753
  Gene Ontology: Mol. function=structural constituent of ribosome; Cellular component=ribonucleoprotein complex; Biological process =translation
  Homolog annotation: Hit_ID=P16149; Match level="QueryCoverage=97%, HitCoverage=57%, E-value=4e-31, Identity=80%"; Hit description=40S ribosomal protein S16
  Pfam annotation: Domain name=Ribosomal_S9; Domain location=1-86; Score=61.7; E_value=2.4e-15; Accession=PF00380.9; Description =Ribosomal protein S9S16
TSFAGVDMRIIVKGGGNTFQIYPIMHSISNALVAYYQKYVYEQSKKEIKDILVKYYRTLLVSDPSRCKPKKFGGRGARARFQKYYR

SEQ ID NO: 9369 - protein, 89 aa, Glycine max; identical to SEQ ID NO: 7004
  Coding DNA Sequence Number=SeqID_1754

SEQ ID NO: 9370 - protein, 80 aa, Glycine max
  Coding DNA Sequence Number=SeqID_1756
IFPSKNREGPPQISIDLGKCSQTTVGASVTRRAWRPVNLELFVGHHNLARGRINHTRSSPLQAEDEDDVATRGNMWRQSR

SEQ ID NO: 9371 - protein, 133 aa, Glycine max; identical to SEQ ID NO: 6916
  misc_feature (8)..(8): Xaa can be any naturally occurring amino acid
  misc_feature (13)..(13): Xaa can be any naturally occurring amino acid
  misc_feature (15)..(15): Xaa can be any naturally occurring amino acid
  misc_feature (18)..(18): Xaa can be any naturally occurring amino acid
  misc_feature (20)..(21): Xaa can be any naturally occurring amino acid
  misc_feature (25)..(26): Xaa can be any naturally occurring amino acid
  misc_feature (33)..(33): Xaa can be any naturally occurring amino acid
  misc_feature (39)..(39): Xaa can be any naturally occurring amino acid
  misc_feature (54)..(55): Xaa can be any naturally occurring amino acid
  misc_feature (57)..(58): Xaa can be any naturally occurring amino acid
  misc_feature (75)..(75): Xaa can be any naturally occurring amino acid
  misc_feature (89)..(89): Xaa can be any naturally occurring amino acid
  misc_feature (98)..(98): Xaa can be any naturally occurring amino acid
  misc_feature (102)..(102): Xaa can be any naturally occurring amino acid
  misc_feature (105)..(106): Xaa can be any naturally occurring amino acid
  misc_feature (116)..(116): Xaa can be any naturally occurring amino acid
  misc_feature (128)..(128): Xaa can be any naturally occurring amino acid
  Coding DNA Sequence Number=SeqID_1758
  Subcellular localization annotation: CTP_CleavageSite=47; ConfidenceScore=5.11e-01

SEQ ID NO: 9372 - protein, 104 aa, Glycine max
  Coding DNA Sequence Number=SeqID_1760
  Homolog annotation: Hit_ID=O82047; Match level="QueryCoverage=93%, HitCoverage=37%, E-value=6e-27, Identity=61%"; Hit description=PRIB5 protein
MFAVLEQLPKWEEDLDFGSRPRYKQIVKDLADKYHTENLLLVTHGEGVGVALSSFKKDVTVYEVDYCGYVQLRRPIFKKDQSFTAGESEVLNHNGQTGVNFIPN

SEQ ID NO: 9373 - protein, 136 aa, Glycine max
  Coding DNA Sequence Number=SeqID_1761
  Homolog annotation: Hit_ID=Q94K68; Match level="QueryCoverage=100%, HitCoverage=41%, E-value=2e-34, Identity=58%"; Hit description =Putative uncharacterized protein At5g27560
  Subcellular localization annotation: CTP_CleavageSite=63; ConfidenceScore=5.77e-01
MAFSLVPSCFHGYLTSSSFSSTTHFLPTSLSCGGVSVSPVSKLRTCAKFDKFQGDSPLEQTTSASASQEVVPLEAEDPPEEEEDDSCLPNDLVGAVRQSGEASASFVNSGGTRAIVELLIPQLQFLDDEGAQAELW

SEQ ID NO: 9374 - protein, 76 aa, Glycine max
  Coding DNA Sequence Number=SeqID_1762
AFCICSFSVSLSSNILLFVAFSMFYLLSLVILLFICFYLFIHRLVVFFYFHFFSVPKIFSASDQSFFRGIILSRCQ

SEQ ID NO: 9375 - protein, 55 aa, Glycine max
  misc_feature (37)..(39): Xaa can be any naturally occurring amino acid
  Coding DNA Sequence Number=SeqID_1764
  Homolog annotation: Hit_ID=A7P352; Match level="QueryCoverage=87%, HitCoverage=9%, E-value=1e-14, Identity=72%"; Hit description =Chromosome chr1 scaffold_5, whole genome shotgun sequence
MGAIRFQIRGIRSRIGNNECLLCCVDFVFHLVETLVXXXNKYAYVQVQFFVHVIN

SEQ ID NO: 9376 - protein, 116 aa, Glycine max
  misc_feature (22)..(22): Xaa can be any naturally occurring amino acid
  misc_feature (34)..(34): Xaa can be any naturally occurring amino acid
  misc_feature (112)..(112): Xaa can be any naturally occurring amino acid
  Coding DNA Sequence Number=SeqID_1765
YNHSMIVVAACTCRSAQRSDSXCEHAYTRELYHXRHAHFLVSARAYLIIPVIYVRCHRYSAMCHVHHQFIAVRQRASSRSGCYRLMTCPTVSSHLQYSRLVARTRASCSVSXSLCF

SEQ ID NO: 9377 - protein, 123 aa, Glycine max
  misc_feature (35)..(35): Xaa can be any naturally occurring amino acid
  Coding DNA Sequence Number=SeqID_1767
  Gene Ontology: Mol. function=oxidoreductase activity; Biological process=metabolic process
  Homolog annotation: Hit_ID=Q9SXZ7; Match level="QueryCoverage=99%, HitCoverage=25%, E-value=8e-26, Identity=52%"; Hit description=NADPH oxidoreductase homolog
  Pfam annotation: Domain name=ADH_zinc_N; Domain location=10-122; Score=-1.2; E_value=0.00097; Accession=PF00107.16; Description=Zinc -binding dehydrogenase
ALKKAGQMESGKVVLVTAAAGGTVQFAVQLAKIPXSTGVATCGGGAKPKLLKDLGVHIVIDDHSDDVKTGLREELPKCIDVIYDSVGGDTINSCLSAEHDHERHMGINMMAKCTGDNAWTPSN

SEQ ID NO: 9378 - protein, 82 aa, Glycine max
  Coding DNA Sequence Number=SeqID_1768
  Gene Ontology: Mol. function=cellulose synthase (UDP-forming) activity; Cellular component=membrane; Biological process=cellulose biosynthetic process
  Homolog annotation: Hit_ID=A2YJY9; Match level="QueryCoverage=78%, HitCoverage=5%, E-value=3e-15, Identity=59%"; Hit description =Putative uncharacterized protein
GGEFRERFHAVHPHRGPAGPHVAFFDINMEGLHGIQGPVYVGGGCVFSTQAFYGYDAPTSKKAPRRSCSCWPKWCCCLCCAS

SEQ ID NO: 9379 - protein, 196 aa, Glycine max; identical to SEQ ID NO: 7943
  misc_feature (35)..(36): Xaa can be any naturally occurring amino acid
  misc_feature (78)..(78): Xaa can be any naturally occurring amino acid
  misc_feature (100)..(100): Xaa can be any naturally occurring amino acid
  misc_feature (155)..(155): Xaa can be any naturally occurring amino acid
  misc_feature (186)..(186): Xaa can be any naturally occurring amino acid
  misc_feature (195)..(195): Xaa can be any naturally occurring amino acid
  Coding DNA Sequence Number=SeqID_1769

SEQ ID NO: 9380 - protein, 168 aa, Glycine max; identical to SEQ ID NO: 6592
  misc_feature (4)..(4): Xaa can be any naturally occurring amino acid
  misc_feature (14)..(14): Xaa can be any naturally occurring amino acid
  misc_feature (31)..(31): Xaa can be any naturally occurring amino acid
  misc_feature (42)..(42): Xaa can be any naturally occurring amino acid
  misc_feature (64)..(64): Xaa can be any naturally occurring amino acid
  misc_feature (77)..(77): Xaa can be any naturally occurring amino acid
  misc_feature (94)..(94): Xaa can be any naturally occurring amino acid
  misc_feature (152)..(152): Xaa can be any naturally occurring amino acid
  misc_feature (159)..(159): Xaa can be any naturally occurring amino acid
  misc_feature (162)..(163): Xaa can be any naturally occurring amino acid
  Coding DNA Sequence Number=SeqID_1771

SEQ ID NO: 9381 - protein, 88 aa, Glycine max
  Coding DNA Sequence Number=SeqID_1773
  Subcellular localization annotation: CTP_CleavageSite=69; ConfidenceScore=5.32e-01
TCWFTRTSLQVMSFSLTPFVSRKLRMECCGKLRGSGLLHVQHMNALRPSQSANCVRNGDRSSMASIHCRHSSIFEYERLQFPRNCVGV

SEQ ID NO: 9382 - protein, 189 aa, Glycine max
  misc_feature (5)..(5): Xaa can be any naturally occurring amino acid
  misc_feature (8)..(8): Xaa can be any naturally occurring amino acid
  misc_feature (11)..(11): Xaa can be any naturally occurring amino acid
  misc_feature (19)..(21): Xaa can be any naturally occurring amino acid
  misc_feature (30)..(30): Xaa can be any naturally occurring amino acid
  misc_feature (54)..(54): Xaa can be any naturally occurring amino acid
  misc_feature (63)..(63): Xaa can be any naturally occurring amino acid
  misc_feature (66)..(66): Xaa can be any naturally occurring amino acid
  misc_feature (68)..(68): Xaa can be any naturally occurring amino acid
  misc_feature (71)..(71): Xaa can be any naturally occurring amino acid
  misc_feature (87)..(87): Xaa can be any naturally occurring amino acid
  misc_feature (96)..(98): Xaa can be any naturally occurring amino acid
  misc_feature (102)..(102): Xaa can be any naturally occurring amino acid
  misc_feature (104)..(104): Xaa can be any naturally occurring amino acid
  misc_feature (106)..(109): Xaa can be any naturally occurring amino acid
  misc_feature (115)..(118): Xaa can be any naturally occurring amino acid
  misc_feature (121)..(121): Xaa can be any naturally occurring amino acid
  misc_feature (125)..(125): Xaa can be any naturally occurring amino acid
  misc_feature (127)..(127): Xaa can be any naturally occurring amino acid
  misc_feature (131)..(131): Xaa can be any naturally occurring amino acid
  misc_feature (135)..(136): Xaa can be any naturally occurring amino acid
  misc_feature (142)..(142): Xaa can be any naturally occurring amino acid
  misc_feature (144)..(144): Xaa can be any naturally occurring amino acid
  misc_feature (150)..(150): Xaa can be any naturally occurring amino acid
  misc_feature (153)..(153): Xaa can be any naturally occurring amino acid
  misc_feature (156)..(156): Xaa can be any naturally occurring amino acid
  misc_feature (160)..(161): Xaa can be any naturally occurring amino acid
  misc_feature (168)..(168): Xaa can be any naturally occurring amino acid
  misc_feature (171)..(171): Xaa can be any naturally occurring amino acid
  misc_feature (176)..(176): Xaa can be any naturally occurring amino acid
  misc_feature (178)..(179): Xaa can be any naturally occurring amino acid
  misc_feature (182)..(182): Xaa can be any naturally occurring amino acid
  misc_feature (184)..(184): Xaa can be any naturally occurring amino acid
  misc_feature (186)..(186): Xaa can be any naturally occurring amino acid
  Coding DNA Sequence Number=SeqID_1775
  Subcellular localization annotation: CTP_CleavageSite=41; ConfidenceScore=5.04e-01
RGEDXRSXCVXSVSVVGTXXXRTDCTLSGXVSACCLSLASRASARWVARESMYXAKPARASTXLSXLXVGXVSQIRTPHPIHIIIEXDYNVCRTDXXXSSYXLXSXXXXLVNHSXXXXHKXCVVXAXYHLXIYSXXCICLVXPXLNLSTXIGXRTXELRXXLLVFPLXSPXYTHSXIXXLDXNXLXMVS

SEQ ID NO: 9383 - protein, 95 aa, Glycine max
  misc_feature (23)..(23): Xaa can be any naturally occurring amino acid
  misc_feature (59)..(59): Xaa can be any naturally occurring amino acid
  misc_feature (66)..(66): Xaa can be any naturally occurring amino acid
  misc_feature (72)..(72): Xaa can be any naturally occurring amino acid
  misc_feature (79)..(79): Xaa can be any naturally occurring amino acid
  Coding DNA Sequence Number=SeqID_1777
LVSWHGIRWGSDRSRHIHTLTPXRTHTLALGCGGSGVAKTTQPHPSTHITTINATVEGXVRGGVFXIPLSSXSYVYLPXTTYHHSLHSHSSLLST

SEQ ID NO: 9384 - protein, 109 aa, Glycine max; identical to SEQ ID NO: 8880
  misc_feature (91)..(91): Xaa can be any naturally occurring amino acid
  Coding DNA Sequence Number=SeqID_1779

SEQ ID NO: 9385 - protein, 94 aa, Glycine max
  Coding DNA Sequence Number=SeqID_1781
  Gene Ontology: Mol. function=protein kinase activity; Biological process=protein amino acid phosphorylation
  Homolog annotation: Hit_ID=Q2QZ78; Match level="QueryCoverage=55%, HitCoverage=9%, E-value=8e-16, Identity=76%"; Hit description=AT hook motif-containing protein, putative
PQNTVILSLDTVCKATTNYNTMENMCPTEFLNKLTFPGIPNHELKLKVGLPVMLLKSLCHQATRSGPSCLLLQLNSRRGCKHINDLSTVYIQIV

SEQ ID NO: 9386 - protein, 179 aa, Glycine max
  misc_feature (138)..(138): Xaa can be any naturally occurring amino acid
  Coding DNA Sequence Number=SeqID_1782
  Gene Ontology: Mol. function=acetylglutamate kinase activity; Cellular component=cytoplasm; Biological process=amino acid biosynthetic process
  Homolog annotation: Hit_ID=Q8LA25; Match level="QueryCoverage=91%, HitCoverage=47%, E-value=6e-35, Identity=54%"; Hit description =Acetylglutamate kinase-like protein
  Subcellular localization annotation: CTP_CleavageSite=46; ConfidenceScore=5.73e-01
MMMAGAAKTLTNLCPSFPFPTKPQNQLTTSHAFPSTRLRHRAISAVANAEQPPLTSATATEGQYRVYVLSESVTFIQKFRDKTIVRQYGGAAMRSPELQDSVIDDIVLLSCDELRPDLVHGDDPKINSWLGRLNIPAXFRDVLRVTDAGTMENASLVLPRKNNKTLVSLIKRADAPAVA

SEQ ID NO: 9387 - protein, 54 aa, Glycine max
  Coding DNA Sequence Number=SeqID_1783
  Gene Ontology: Cellular component=mitochondrial outer membrane; Biological process=protein transport
  Homolog annotation: Hit_ID=Q9XIA7; Match level="QueryCoverage=100%, HitCoverage=100%, E-value=4e-20, Identity=83%"; Hit description =Mitochondrial import receptor subunit TOM6 homolog
MFSGMFMEKPDKAVALKQLRTHVALFGGWVVVVRAVPYILSYFSDSKDELKLDF

SEQ ID NO: 9388 - protein, 130 aa, Glycine max
  misc_feature (5)..(5): Xaa can be any naturally occurring amino acid
  misc_feature (12)..(12): Xaa can be any naturally occurring amino acid
  misc_feature (19)..(19): Xaa can be any naturally occurring amino acid
  misc_feature (32)..(32): Xaa can be any naturally occurring amino acid
  misc_feature (56)..(56): Xaa can be any naturally occurring amino acid
  misc_feature (75)..(75): Xaa can be any naturally occurring amino acid
  misc_feature (81)..(81): Xaa can be any naturally occurring amino acid
  misc_feature (88)..(88): Xaa can be any naturally occurring amino acid
  misc_feature (112)..(113): Xaa can be any naturally occurring amino acid
  misc_feature (124)..(124): Xaa can be any naturally occurring amino acid
  misc_feature (129)..(129): Xaa can be any naturally occurring amino acid
  Coding DNA Sequence Number=SeqID_1784
DYESXAQYRMRXTIIRYDXLPIVSCHASLSSXSHRPLRLCLLCPLTSYWLDGSRDXNERNDKSRERHTAEHTNSXREHIGXRHTKKKXTPHKSRGQIDLGSATTDSSTNRRXXPITQTYALLSXPYSVXF

SEQ ID NO: 9389 - protein, 57 aa, Glycine max
  Coding DNA Sequence Number=SeqID_1786
FFFFFFDFCLIYFLVNKRFSSSSFALAYLLSISSLLCLRFSFPHGIEGLGVLCLEIS

SEQ ID NO: 9390 - protein, 87 aa, Glycine max
  Coding DNA Sequence Number=SeqID_1788
  Homolog annotation: Hit_ID=Q9LJ47; Match level="QueryCoverage=100%, HitCoverage=100%, E-value=1e-39, Identity=88%"; Hit description =Arabidopsis thaliana genomic DNA, chromosome 3, TAC clone:K17E7
  Pfam annotation: Domain name=B12D; Domain location=1-87; Score=215.4; E_value=1.4e-61; Accession=PF06522.2; Description=B12D protein
MGRWVRPEVYPLLGAMGFVTSMVVFQLTRNALLNPDCRISKENRKMGILENEDEGEKYAQHSLRKHLRTRPPQVTPSLNRFFSEEDN

SEQ ID NO: 9391 - protein, 120 aa, Glycine max
  Coding DNA Sequence Number=SeqID_169
KVESRGRALNRIPAEDSHENLTKILSKAKERNLTGLAFSKLSGGPRPPQPQHQGAVPVALPAHAEPDTQAAALRSCSRPAASERVPSSSSVVSRTFGQGLAQGTETPIKRHDETDSSADQ

SEQ ID NO: 9392 - protein, 234 aa, Glycine max
  misc_feature (1)..(1): Xaa can be any naturally occurring amino acid
  misc_feature (10)..(10): Xaa can be any naturally occurring amino acid
  misc_feature (14)..(14): Xaa can be any naturally occurring amino acid
  misc_feature (42)..(42): Xaa can be any naturally occurring amino acid
  misc_feature (44)..(44): Xaa can be any naturally occurring amino acid
  misc_feature (57)..(57): Xaa can be any naturally occurring amino acid
  misc_feature (71)..(71): Xaa can be any naturally occurring amino acid
  misc_feature (88)..(88): Xaa can be any naturally occurring amino acid
  misc_feature (92)..(92): Xaa can be any naturally occurring amino acid
  misc_feature (98)..(99): Xaa can be any naturally occurring amino acid
  misc_feature (127)..(127): Xaa can be any naturally occurring amino acid
  misc_feature (151)..(151): Xaa can be any naturally occurring amino acid
  misc_feature (153)..(153): Xaa can be any naturally occurring amino acid
  misc_feature (157)..(157): Xaa can be any naturally occurring amino acid
  misc_feature (161)..(163): Xaa can be any naturally occurring amino acid
  misc_feature (168)..(168): Xaa can be any naturally occurring amino acid
  misc_feature (177)..(177): Xaa can be any naturally occurring amino acid
  misc_feature (183)..(183): Xaa can be any naturally occurring amino acid
  misc_feature (186)..(186): Xaa can be any naturally occurring amino acid
  misc_feature (208)..(209): Xaa can be any naturally occurring amino acid
  misc_feature (213)..(214): Xaa can be any naturally occurring amino acid
  misc_feature (219)..(219): Xaa can be any naturally occurring amino acid
  misc_feature (232)..(232): Xaa can be any naturally occurring amino acid
  Coding DNA Sequence Number=SeqID_171
  Subcellular localization annotation: CTP_CleavageSite=48; ConfidenceScore=5.20e-01
XYTSFTRYSXRHYXSDYPVSRSSASQQQQSHPAVAIHVAAVXQXNSVSCTLITARCXVCDYIRLCSLSHIXTDRDASATYDTYRLARXSRTXCISSSXXHVRAIYVTRSPRLDTSLTISAYHSTRLXSCEYSTDSYYDQYWCAVMPYSYIXYXSIVXMCQXXXVLSVXMILSRPAAXSTDCLXVHXIHIPTSQSACLDTCCSIALVAXXRVEXXRAAYXTTYDHIYVVISCXLL

SEQ ID NO: 9393 - protein, 37 aa, Glycine max
  Coding DNA Sequence Number=SeqID_173
  Homolog annotation: Hit_ID=Q10RP7; Match level="QueryCoverage=78%, HitCoverage=6%, E-value=5e-08, Identity=89%"; Hit description=Appr-1- p processing enzyme family protein, expressed
ISTHLYCQGGCRSGMAKVTNAYDLHARKVIHTVGPKY

SEQ ID NO: 9394 - protein, 76 aa, Glycine max; identical to SEQ ID NO: 7543
  Coding DNA Sequence Number=SeqID_174

SEQ ID NO: 9395 - protein, 91 aa, Glycine max
  Coding DNA Sequence Number=SeqID_176
DQFLPSFAQVLSSRQNGSLTGISPGIVSGELSKENSSIGAETGGKTPGITLVIVVCKFNFSPNIVKGGEIMVSNKGVKRGQQGVSRFVNCY

SEQ ID NO: 9396 - protein, 190 aa, Glycine max
  misc_feature (22)..(22): Xaa can be any naturally occurring amino acid
  misc_feature (48)..(48): Xaa can be any naturally occurring amino acid
  misc_feature (62)..(63): Xaa can be any naturally occurring amino acid
  misc_feature (93)..(94): Xaa can be any naturally occurring amino acid
  misc_feature (109)..(109): Xaa can be any naturally occurring amino acid
  misc_feature (140)..(140): Xaa can be any naturally occurring amino acid
  misc_feature (157)..(157): Xaa can be any naturally occurring amino acid
  misc_feature (161)..(161): Xaa can be any naturally occurring amino acid
  misc_feature (176)..(176): Xaa can be any naturally occurring amino acid
  Coding DNA Sequence Number=SeqID_178
LPTRLDVLTVGDCAARRLLRYXVLKRLHEISRPSPVPRRVSGSRYHKXISHTQSTATETRGXXWWIVVLHIMINTPSPPQRIARMSLLLIRWXXYTQLHVTSRDVTRCXIDCICRDKMVQYVTIDTAHCRRTTTPSLLGXQLYVHATVARRMMMLYXMPGXYSYLLDANVSAIACXSSTATRNWRKCAER

SEQ ID NO: 9397 - protein, 72 aa, Glycine max
  misc_feature (46)..(46): Xaa can be any naturally occurring amino acid
  Coding DNA Sequence Number=SeqID_180
  Gene Ontology: Mol. function=receptor activity; Cellular component =mitochondrion
  Homolog annotation: Hit_ID=A7NSU5; Match level="QueryCoverage=91%, HitCoverage=10%, E-value=7e-19, Identity=65%"; Hit description =Chromosome chr18 scaffold_1, whole genome shotgun sequence
  Pfam annotation: Domain name=DUF668; Domain location=1-52; Score=4.3; E_value=8.5e-06; Accession=PF05003.3; Description=Protein of unknown function (DUF668)
TLYHGLPHKIRSALPSQLQTVDDMKEVHHAQIKAEMEKITQWLAPXASNSVKTHQGFGWVGEWANTRLAVNL

SEQ ID NO: 9398 - protein, 148 aa, Glycine max
  misc_feature (6)..(6): Xaa can be any naturally occurring amino acid
  misc_feature (17)..(17): Xaa can be any naturally occurring amino acid
  Coding DNA Sequence Number=SeqID_1789
RRRPWXTRRTWRIRRRXRWTRWIRRPRRTRWTWWRIRRTRRTRWIRRPRRTWRTRRTWRRCWRKAHHLRRINSSRIAPAGKPAQAISKDGKWRRPPGIPIWYLNSVGLAQPLFYGLVLFCNHLLSNSLEWAEVEIKNLTPKKKKKKNS

SEQ ID NO: 9399 - protein, 150 aa, Glycine max
  misc_feature (43)..(43): Xaa can be any naturally occurring amino acid
  misc_feature (58)..(59): Xaa can be any naturally occurring amino acid
  misc_feature (64)..(64): Xaa can be any naturally occurring amino acid
  misc_feature (69)..(69): Xaa can be any naturally occurring amino acid
  misc_feature (92)..(92): Xaa can be any naturally occurring amino acid
  misc_feature (98)..(98): Xaa can be any naturally occurring amino acid
  misc_feature (112)..(112): Xaa can be any naturally occurring amino acid
  Coding DNA Sequence Number=SeqID_1791
CHVVSHDVHITLLIEYNSQYFDSLTYPLHIHSPSIPHYLPNNXTISLSSFSFNFLSLXXVVGYXSYHLXFSSLYLYPYYLKSILIIYPHMYXNSLCIXSSTLKSTSATSLHXHSPLSLSHSSLLINTTSHHLYSCYPSLLYHLLTLHSVT

SEQ ID NO: 9400 - protein, 104 aa, Glycine max
  misc_feature (82)..(82): Xaa can be any naturally occurring amino acid
  Coding DNA Sequence Number=SeqID_1793
PSHPLHHHFNNEAHIPHGTSPHISLRLLSQITQHSVSHATCARLLMFERHNKCCVYPLSRACMTCPLTYNLTYRQPSDTHIXHTTYAIWRRLNVRYAALSCQSV

SEQ ID NO: 9401 - protein, 192 aa, Glycine max
  misc_feature (92)..(94): Xaa can be any naturally occurring amino acid
  Coding DNA Sequence Number=SeqID_1795
  Gene Ontology: Mol. function=hydrolase activity, acting on glycosyl bonds; Cellular component=mitochondrial inner membrane; Biological process=cell wall organization and biogenesis
  Homolog annotation: Hit_ID=A7QNZ8; Match level="QueryCoverage=83%, HitCoverage=24%, E-value=3e-50, Identity=59%"; Hit description =Chromosome chr1 scaffold_135, whole genome shotgun sequence
  Pfam annotation: Domain name=PPR; Domain location=20-54; Score=40.9; E_value=4.6e-09; Accession=PF01535.11; Description=PPR repeat
  Pfam annotation: Domain name=PPR; Domain location=55-88; Score=8.5; E_ value=0.77; Accession=PF01535.11; Description=PPR repeat
  Pfam annotation: Domain name=PPR; Domain location=91-125; Score=4.3; E_value=2.4; Accession=PF01535.11; Description=PPR repeat
  Pfam module annotation: Pfam domain module=PPR::PPR::PPR; Domain location=20-54::55-88::91-125
WGHVELSRRIPESLPSPNAICFTSMINAYARNGAGKEGIAVLQAMIERGLKPDDVTLLCALNGCNHTGLVEEGRLVFESMKSLHGVDPDHRXXXCMVDLFCRAGLLHEAEELLLQAPGKGDCFMWSSLLRSCRVHKNEEVGTRAAQVLVELDPDDPADTIEQKLQIERRLGSVKTRKDRPSPLGPNGKNNSI

SEQ ID NO: 9402 - protein, 58 aa, Glycine max
  Coding DNA Sequence Number=SeqID_1796
CYEKKISYFYLLIIETKGVTFCVLWAHYFVFPLTITFFLLASLVLFSFLLFLESCFSY

SEQ ID NO: 9403 - protein, 148 aa, Glycine max
  misc_feature (147)..(147): Xaa can be any naturally occurring amino acid
  Coding DNA Sequence Number=SeqID_1797
GNGNLFDNFDFLGESLRFESFNFLHDGDRFNDFDFLLDRNVFDDLNSLGDELGFHNFDFLLDDLGFDSFNGLHDGDSFSVLNFLEDLSGFHNFDSLFDRSGFNDINFFHESVGFNVLSLFNKVLTPSSMMGFWLTMISSWGGAYVAXS

SEQ ID NO: 9404 - protein, 159 aa, Glycine max
  misc_feature (3)..(12): Xaa can be any naturally occurring amino acid
  misc_feature (14)..(15): Xaa can be any naturally occurring amino acid
  misc_feature (35)..(35): Xaa can be any naturally occurring amino acid
  misc_feature (42)..(43): Xaa can be any naturally occurring amino acid
  misc_feature (55)..(55): Xaa can be any naturally occurring amino acid
  misc_feature (59)..(59): Xaa can be any naturally occurring amino acid
  misc_feature (75)..(76): Xaa can be any naturally occurring amino acid
  misc_feature (141)..(143): Xaa can be any naturally occurring amino acid
  misc_feature (145)..(145): Xaa can be any naturally occurring amino acid
  Coding DNA Sequence Number=SeqID_1799
FCXXXXXXXXXXIXXSLSYLFYSLSTISLLVSPHXHLPHNTXXATRGRDSAPALXLPLXALCCALCRVPVEVDYXXLNINSYLIHFLSYRYSTLLHDRYVCLASRQSDACVFALRSMLQYRSRYQNVHTPNFSRYLSSYLXXXTXSIYVCIYSYGLVDI

SEQ ID NO: 9405 - protein, 275 aa, Glycine max
  misc_feature (74)..(74): Xaa can be any naturally occurring amino acid
  misc_feature (88)..(88): Xaa can be any naturally occurring amino acid
  misc_feature (268)..(268): Xaa can be any naturally occurring amino acid
  Coding DNA Sequence Number=SeqID_1801
  Subcellular localization annotation: CTP_CleavageSite=41; ConfidenceScore=5.15e-01
STLLRRPPPALCARTRILVSRSAAAGARVCETSCRRLRACVGRAAGSVCGGVACCICEARVRRQSGVRMPAPTXLTSHQACGCPRLCXSVVCVGIIECDAGAHPRVAANDTPRSTRGAASSPCAPLRCTACEPRASCVSGVSCSLRLVCLCSVVSARQLRGFVCSPSCQVRSAGLGAPPPRVGRGLSSGCVAPCRVCRALLGVVWFCGCGGLGCSACCCARVASARRGRRRARPAARCLSLCPILALVLPSPPSLCASPFFVRFVDLXRPPRSAP

SEQ ID NO: 9406 - protein, 134 aa, Glycine max
  Coding DNA Sequence Number=SeqID_1803
  Gene Ontology: Mol. function=carbamoyl-phosphate synthase activity; Cellular component=chloroplast; Biological process=nitrogen compound metabolic process
  Homolog annotation: Hit_ID=A7QBC0; Match level="QueryCoverage=80%, HitCoverage=26%, E-value=6e-39, Identity=72%"; Hit description =Chromosome chr4 scaffold_73, whole genome shotgun sequence
  Pfam annotation: Domain name=CPSase_sm_chain; Domain location=51-135; Score=34.4; E_value=2e-13; Accession=PF00988.13; Description =Carbamoyl-phosphate synthase small chain, CPSase domain
  Subcellular localization annotation: CTP_CleavageSite=66; ConfidenceScore=5.58e-01
METKALSFALSLNDLTNNRFSSNTPHAAAKVSVFTVRCSASGSGERPWTTSDARLVLQDGSIWRARSFGASGTQVGEVVLNTSLTGYQQSLADPGYAGHFGLMTYPHIGNTGVNVDDDESRRCFLAGHAVTNCE

SEQ ID NO: 9407 - protein, 124 aa, Glycine max
  misc_feature (82)..(82): Xaa can be any naturally occurring amino acid
  misc_feature (111)..(111): Xaa can be any naturally occurring amino acid
  misc_feature (115)..(115): Xaa can be any naturally occurring amino acid
  misc_feature (124)..(124): Xaa can be any naturally occurring amino acid
  Coding DNA Sequence Number=SeqID_1804
PLLLSALYNHSTRRITARRHYLCSWTHYACDVRRLTAGGESCVNVAESSHSSVETAHCAHDCMHTSHVSLISFMRLISHTHXPVTLSATHYRRPTHVITTHYLVEIHHQTXTSDXQYSPHTQLX

SEQ ID NO: 9408 - protein, 48 aa, Glycine max
  misc_feature (4)..(4): Xaa can be any naturally occurring amino acid
  misc_feature (10)..(10): Xaa can be any naturally occurring amino acid
  Coding DNA Sequence Number=SeqID_1806
LLIXIAQIMXSHLLLPPFLNNCRAKIKSKSDFIYYIVLFTFFLLKGFF

SEQ ID NO: 9409 - protein, 155 aa, Glycine max
  misc_feature (16)..(17): Xaa can be any naturally occurring amino acid
  misc_feature (71)..(78): Xaa can be any naturally occurring amino acid
  misc_feature (105)..(106): Xaa can be any naturally occurring amino acid
  misc_feature (125)..(126): Xaa can be any naturally occurring amino acid
  misc_feature (139)..(139): Xaa can be any naturally occurring amino acid
  Coding DNA Sequence Number=SeqID_1808
  Gene Ontology: Mol. function=transporter activity; Cellular component= membrane; Biological process=oligopeptide transport
  Homolog annotation: Hit_ID=A7Q2Q4; Match level="QueryCoverage=96%, HitCoverage=24%, E-value=3e-37, Identity=50%"; Hit description =Chromosome chr1 scaffold_46, whole genome shotgun sequence
GMLILTLTAWVPQFHXXRCTSDPSGQQVRLTPTTTQIAILILGLSWMAVGTGGIKPCSITFAIDQFDTTSXXXXXXXXNFFSWYYTAQTLVQLTSLTIIVYIQNXXWVLGFGTLGLLMVCAVILXXAGTRVYAYVPQSXSIFSSIAQVLICCRSI

SEQ ID NO: 9410 - protein, 113 aa, Glycine max
  misc_feature (1)..(1): Xaa can be any naturally occurring amino acid
  Coding DNA Sequence Number=SeqID_1809
XPIWGGFSGRGDRPDAAERKHPWERGARRRQEKGFKHKKQSPVGNFLGLSHLGKAGRIYFPTQCLPLPLFKKWAIAQGIRATSERCSNPNQKVCPARERYPGNPCGGPSRIFL

SEQ ID NO: 9411 - protein, 144 aa, Glycine max; identical to SEQ ID NO: 8139
  misc_feature (14)..(14): Xaa can be any naturally occurring amino acid
  misc_feature (24)..(24): Xaa can be any naturally occurring amino acid
  misc_feature (40)..(40): Xaa can be any naturally occurring amino acid
  misc_feature (63)..(63): Xaa can be any naturally occurring amino acid
  misc_feature (89)..(89): Xaa can be any naturally occurring amino acid
  misc_feature (94)..(94): Xaa can be any naturally occurring amino acid
  misc_feature (132)..(132): Xaa can be any naturally occurring amino acid
  misc_feature (136)..(136): Xaa can be any naturally occurring amino acid
  misc_feature (144)..(144): Xaa can be any naturally occurring amino acid
  Coding DNA Sequence Number=SeqID_1811

SEQ ID NO: 9412 - protein, 105 aa, Glycine max
  misc_feature (9)..(9): Xaa can be any naturally occurring amino acid
  misc_feature (13)..(13): Xaa can be any naturally occurring amino acid
  misc_feature (21)..(21): Xaa can be any naturally occurring amino acid
  misc_feature (36)..(36): Xaa can be any naturally occurring amino acid
  misc_feature (39)..(39): Xaa can be any naturally occurring amino acid
  misc_feature (70)..(70): Xaa can be any naturally occurring amino acid
  misc_feature (86)..(86): Xaa can be any naturally occurring amino acid
  misc_feature (91)..(91): Xaa can be any naturally occurring amino acid
  Coding DNA Sequence Number=SeqID_1813
WSVLIPLDXQRIXHPHIQVSXIHVEFIVDSRGRHTXVTXRHTVHIVRYHIDHHHRPRACDHTNIHSISYXYRRMNHASLFVALLAXPWLAXSFRMRASLLYNGVL

SEQ ID NO: 9413 - protein, 194 aa, Glycine max
  misc_feature (32)..(32): Xaa can be any naturally occurring amino acid
  misc_feature (61)..(61): Xaa can be any naturally occurring amino acid
  misc_feature (68)..(68): Xaa can be any naturally occurring amino acid
  misc_feature (150)..(151): Xaa can be any naturally occurring amino acid
  Coding DNA Sequence Number=SeqID_1815
  Gene Ontology: Mol. function=unfolded protein binding; Cellular component=endoplasmic reticulum; Biological process=protein folding
  Homolog annotation: Hit_ID=A0A762; Match level="QueryCoverage=98%, HitCoverage=45%, E-value=1e-42, Identity=48%"; Hit description =Calreticulin-1
CQGFISDPGDVSQRAMSFPKELPDPECKDPEXWGYVDDAERSPPCIHALEYKDACQAKQIXSPMYDGXGKSPLIDGSDLKDGPDLYVFRNQKYVAIELWQVKSGSLFDNVLFIDHPEYCKHLGQEPWGKHEDVEKASFEEAEKKREEEDXXDDPVGCDADEEEDDHDEAGNISDAESETQPGGGPKEEGVHDEL

SEQ ID NO: 9414 - protein, 74 aa, Glycine max
  Coding DNA Sequence Number=SeqID_1816
  Gene Ontology: Mol. function=metal ion binding
  Homolog annotation: Hit_ID=A7R6M1; Match level="QueryCoverage=94%, HitCoverage=92%, E-value=1e-30, Identity=87%"; Hit description =Chromosome undetermined scaffold_1336, whole genome shotgun sequence
NQNQRRTISQSCPFCRDSLKRVNSGDLWVFTDRRDVVDMATVTRENLRRLFMYIDKLPLIVPDSLFDTYDSHIR

SEQ ID NO: 9415 - protein, 80 aa, Glycine max
  misc_feature (61)..(61): Xaa can be any naturally occurring amino acid
  misc_feature (64)..(64): Xaa can be any naturally occurring amino acid
  Coding DNA Sequence Number=SeqID_1817
  Homolog annotation: Hit_ID=Q9FK64; Match level="QueryCoverage=77%, HitCoverage=14%, E-value=1e-10, Identity=60%"; Hit description =Tyrosine-specific protein phosphatase-like protein
IGAESADDVPRVALFVCTALRLIKTESGLPEDFIDSITARCDRYFKEADLEVVALVDRDSXSHXAWVEEWRVREYTEKWL

SEQ ID NO: 9416 - protein, 95 aa, Glycine max
  misc_feature (29)..(29): Xaa can be any naturally occurring amino acid
  misc_feature (77)..(78): Xaa can be any naturally occurring amino acid
  Coding DNA Sequence Number=SeqID_1818
  Subcellular localization annotation: CTP_CleavageSite=62; ConfidenceScore=5.24e-01
AQTHKPRLPAKLVVHLSPVHGLRGRVWRXCSIGSSRRGTHGRQAAPPAAGPVTAAPAARVPSAAAPRGGVPALRRRXXKAREEGGEMGCGRGRKK

SEQ ID NO: 9417 - protein, 172 aa, Glycine max
  misc_feature (6)..(6): Xaa can be any naturally occurring amino acid
  misc_feature (34)..(34): Xaa can be any naturally occurring amino acid
  misc_feature (86)..(86): Xaa can be any naturally occurring amino acid
  misc_feature (94)..(94): Xaa can be any naturally occurring amino acid
  Coding DNA Sequence Number=SeqID_1820
  Homolog annotation: Hit_ID=A7NZZ2; Match level="QueryCoverage=91%, HitCoverage=43%, E-value=3e-49, Identity=60%"; Hit description =Chromosome chr6 scaffold_3, whole genome shotgun sequence
LPKYNXQMINVLYNNMAVFKVEYTSFFRTLSNVXAHMSIPDDYLLVPLKFVMVHIGKERKEAWASWFKAYIHEVSYSGIPDPERKXVMDSVNPXYTLSNYLCLPAIYASQIGDFGEVCSLFQLVEHPYHELPGMERYAGLPPDWAYRPGVCKSLCYSLRFPLGVKASYNLTL

SEQ ID NO: 9418 - protein, 84 aa, Glycine max; identical to SEQ ID NO: 9255
  misc_feature (23)..(23): Xaa can be any naturally occurring amino acid
  misc_feature (45)..(45): Xaa can be any naturally occurring amino acid
  Coding DNA Sequence Number=SeqID_1821

SEQ ID NO: 9419 - protein, 177 aa, Glycine max
  misc_feature (94)..(94): Xaa can be any naturally occurring amino acid
  misc_feature (154)..(154): Xaa can be any naturally occurring amino acid
  Coding DNA Sequence Number=SeqID_1823
  Gene Ontology: Mol. function=NADH dehydrogenase (ubiquinone) activity; Cellular component=mitochondrial respiratory chain; Biological process=electron transport
  Homolog annotation: Hit_ID=A7PUK9; Match level="QueryCoverage=87%, HitCoverage=61%, E-value=8e-40, Identity=54%"; Hit description =Chromosome chr7 scaffold_31, whole genome shotgun sequence
  Pfam annotation: Domain name=Complex1_24kDa; Domain location=54-175; Score=31.2; E_value=1.4e-09; Accession=PF01257.9; Description =Respiratory-chain NADH dehydrogenase 2
EFCSSFLLLLYISLRLSACRFNGIRQIFRQPSRAFSTALNYHLDTPDNNPKLPWEFTEANQAKVKEILSHYPSNYKQSATIPLLDLTQQQHKDXLPIATINTIAKIIEIPPIQIYKIATFYSIFNQPEVGKYHVWGDRTTPDMIRNSPKMERTXLKHVEINHNEMRRDEWLSVTRME

SEQ ID NO: 9420 - protein, 101 aa, Glycine max; identical to SEQ ID NO: 9264
  misc_feature (2)..(2): Xaa can be any naturally occurring amino acid
  misc_feature (19)..(19): Xaa can be any naturally occurring amino acid
  misc_feature (22)..(22): Xaa can be any naturally occurring amino acid
  misc_feature (41)..(41): Xaa can be any naturally occurring amino acid
  misc_feature (78)..(79): Xaa can be any naturally occurring amino acid
  misc_feature (81)..(81): Xaa can be any naturally occurring amino acid
  Coding DNA Sequence Number=SeqID_1824

SEQ ID NO: 9421 - protein, 114 aa, Glycine max
  misc_feature (10)..(10): Xaa can be any naturally occurring amino acid
  misc_feature (21)..(21): Xaa can be any naturally occurring amino acid
  misc_feature (32)..(32): Xaa can be any naturally occurring amino acid
  misc_feature (51)..(52): Xaa can be any naturally occurring amino acid
  misc_feature (55)..(55): Xaa can be any naturally occurring amino acid
  misc_feature (60)..(60): Xaa can be any naturally occurring amino acid
  misc_feature (69)..(69): Xaa can be any naturally occurring amino acid
  misc_feature (71)..(71): Xaa can be any naturally occurring amino acid
  misc_feature (87)..(87): Xaa can be any naturally occurring amino acid
  misc_feature (93)..(93): Xaa can be any naturally occurring amino acid
  misc_feature (101)..(101): Xaa can be any naturally occurring amino acid
  misc_feature (105)..(105): Xaa can be any naturally occurring amino acid
  misc_feature (109)..(109): Xaa can be any naturally occurring amino acid
  Coding DNA Sequence Number=SeqID_1825
LLIYVVTALXVTLCSLYCMVXVLISHYPSVLXVACMFVRLSDYVPLSRTSXXHAXPSSAXYSATRLHSXIXTALPIFISLCACWVAXYIACVXILALASIXIYLXTRVXFVLNS

SEQ ID NO: 9422 - protein, 172 aa, Glycine max; identical to SEQ ID NO: 6007
  misc_feature (1)..(1): Xaa can be any naturally occurring amino acid
  misc_feature (6)..(6): Xaa can be any naturally occurring amino acid
  misc_feature (8)..(8): Xaa can be any naturally occurring amino acid
  misc_feature (26)..(26): Xaa can be any naturally occurring amino acid
  misc_feature (29)..(30): Xaa can be any naturally occurring amino acid
  misc_feature (33)..(33): Xaa can be any naturally occurring amino acid
  misc_feature (38)..(39): Xaa can be any naturally occurring amino acid
  misc_feature (42)..(43): Xaa can be any naturally occurring amino acid
  misc_feature (60)..(60): Xaa can be any naturally occurring amino acid
  misc_feature (121)..(121): Xaa can be any naturally occurring amino acid
  misc_feature (130)..(130): Xaa can be any naturally occurring amino acid
  Coding DNA Sequence Number=SeqID_1827

SEQ ID NO: 9423 - protein, 98 aa, Glycine max
  Coding DNA Sequence Number=SeqID_1829
  Gene Ontology: Mol. function=protein serine/threonine kinase activity; Cellular component=myosin complex; Biological process =protein amino acid phosphorylation
  Homolog annotation: Hit_ID=Q1PCG0; Match level="QueryCoverage=95%, HitCoverage=26%, E-value=2e-22, Identity=52%"; Hit description =Mitogen-activated protein kinase
MVEAVREPENVEIRHHDQKKCPYNKFWEALLKINDPESPISSIDSITNRIDPILDDVDVGECEILWQDLVLDERMWICSYGEVYHAYWNGTDVAEITI

SEQ ID NO: 9424 - protein, 149 aa, Glycine max
  misc_feature (37)..(37): Xaa can be any naturally occurring amino acid
  misc_feature (44)..(44): Xaa can be any naturally occurring amino acid
  misc_feature (65)..(65): Xaa can be any naturally occurring amino acid
  Coding DNA Sequence Number=SeqID_1830
NVRSSCAVVRVPGATSCRTHTYLCRATINIIQNDGRXGCGRYQXMICVNYSVCIAPITHWMVPRXTERFTMGVETERRGRLLVRRVTYTSTHSSSVSLCNNLGFTDVEIRYITCSSFVLLYVYLMEGLVCIFPVSSLLPRTLAGGRGSL

SEQ ID NO: 9425 - protein, 103 aa, Glycine max
  misc_feature (3)..(3): Xaa can be any naturally occurring amino acid
  misc_feature (24)..(24): Xaa can be any naturally occurring amino acid
  misc_feature (49)..(49): Xaa can be any naturally occurring amino acid
  misc_feature (75)..(75): Xaa can be any naturally occurring amino acid
  Coding DNA Sequence Number=SeqID_1832
YTXLEFPLVYSSVEIVARGVARVXCAFRASSSSWVPSMRYANAHAWRCXLLLMYVLQQSCLCVWVVTSRLDATVXDERRVRWPTHTRLVVCVVARVCAHIESV

SEQ ID NO: 9426 - protein, 78 aa, Glycine max
  Coding DNA Sequence Number=SeqID_1834
YASIITFWIPNHVPQIFKMWVHSKSKGFLLLNHPIVYTKFIYSSSSCFLVYCHFLMLIFIVVSQPCISEVCSEDIKKN

SEQ ID NO: 9427 - protein, 154 aa, Glycine max
  Coding DNA Sequence Number=SeqID_1836
  Gene Ontology: Mol. function=gamma-glutamyl hydrolase activity; Cellular component=extracellular region; Biological process =glutamine metabolic process
  Homolog annotation: Hit_ID=P93164; Match level="QueryCoverage=99%, HitCoverage=44%, E-value=4e-55, Identity=70%"; Hit description=Gamma- glutamyl hydrolase precursor
PNDIKLSVLFVGTVYRCLICVTLHDDHMELPRQLHDDDSVSCTATDPCLNYKPVIGILTHPGDGASGRLNNAIRVCYIADSYVKFMESGGARVIRRIYNETPENLNKKLDWVNGVLFTAGKADLGPYWDTLGNFCKIALDKSYAGEHLSGIDYL

SEQ ID NO: 9428 - protein, 92 aa, Glycine max; identical to SEQ ID NO: 8347
  misc_feature (68)..(68): Xaa can be any naturally occurring amino acid
  Coding DNA Sequence Number=SeqID_1228

SEQ ID NO: 9429 - protein, 65 aa, Glycine max
  Coding DNA Sequence Number=SeqID_1230
  Subcellular localization annotation: CTP_CleavageSite=28; ConfidenceScore=5.61e-01
PPHPPRPPPTPPPPPTTPHSQSSSHLPSSARARGLAPAVPPDPSPPHTVIMHKLIIHARSVSFSS

SEQ ID NO: 9430 - protein, 126 aa, Glycine max
  misc_feature (3)..(4): Xaa can be any naturally occurring amino acid
  misc_feature (7)..(7): Xaa can be any naturally occurring amino acid
  misc_feature (11)..(11): Xaa can be any naturally occurring amino acid
  misc_feature (13)..(13): Xaa can be any naturally occurring amino acid
  misc_feature (16)..(17): Xaa can be any naturally occurring amino acid
  misc_feature (60)..(60): Xaa can be any naturally occurring amino acid
  misc_feature (68)..(69): Xaa can be any naturally occurring amino acid
  Coding DNA Sequence Number=SeqID_1232
  Gene Ontology: Cellular component=extracellular region; Biological process=cell wall organization and biogenesis
  Homolog annotation: Hit_ID=A7QNV3; Match level="QueryCoverage=100%, HitCoverage=20%, E-value=3e-40, Identity=63%"; Hit description =Chromosome chr1 scaffold_135, whole genome shotgun sequence
  Pfam annotation: Domain name=BURP; Domain location=1-125; Score=15.9; E_value=5.3e-10; Accession=PF03181.6; Description=BURP domain
  Subcellular localization annotation: CTP_CleavageSite=19; ConfidenceScore=5.07e-01
FAXXVLXRNVXVXTTXXVNGSKKSVVVGPVRGINGGKVTQSVSCHQSLLPYLLCDCHAVXKVRVCGAXXLDPKTKAAINRGVAVCHLGASDWSATHGAFLSLGSGPGRIEVCHWIFENDVAWATAE

SEQ ID NO: 9431 - protein, 152 aa, Glycine max
  misc_feature (141)..(141): Xaa can be any naturally occurring amino acid
  misc_feature (152)..(152): Xaa can be any naturally occurring amino acid
  Coding DNA Sequence Number=SeqID_1233
  Gene Ontology: Mol. function=chitin binding; Cellular component =extracellular region; Biological process=chitin metabolic process
  Homolog annotation: Hit_ID=A1YR30; Match level="QueryCoverage=86%, HitCoverage=51%, E-value=3e-70, Identity=85%"; Hit description =Obstractor D
  Pfam annotation: Domain name=CBM_14; Domain location=29-84; Score =29.2; E_value=1.5e-05; Accession=PF01607.14; Description=Chitin binding Peritrophin-A domain
  Pfam annotation: Domain name=CBM_14; Domain location=99-151; Score =50.3; E_value=6.7e-12; Accession=PF01607.14; Description=Chitin binding Peritrophin-A domain
  Pfam module annotation: Pfam domain module=CBM_14::CBM_14; Domain location=29-84::99-151
MYTWTTLVAAAATLCAVSGQKTAQQEDPCKAKFRVVGDATYCDRYWECVNGQPELYDCPNGLVYAGKNRGVTEGCDYPWRANYCEDKTQANGPIGREHCDWLYGIFGHETSCTRYWTCWNGTATEQLCIGGLLYNENTHSXCDWPENVDGCX

SEQ ID NO: 9432 - protein, 184 aa, Glycine max
  misc_feature (91)..(91): Xaa can be any naturally occurring amino acid
  misc_feature (107)..(107): Xaa can be any naturally occurring amino acid
  misc_feature (117)..(117): Xaa can be any naturally occurring amino acid
  Coding DNA Sequence Number=SeqID_1234
  Gene Ontology: Mol. function=nucleoside-triphosphatase activity; Cellular component=integral to membrane; Biological process=protein catabolic process
  Homolog annotation: Hit_ID=A7PJL7; Match level="QueryCoverage=100%, HitCoverage=26%, E-value=1e-68, Identity=71%"; Hit description =Chromosome chr12 scaffold_18, whole genome shotgun sequence
  Pfam annotation: Domain name=Peptidase_M41; Domain location=52-182; Score=-0.5; E_value=1.8e-10; Accession=PF01434.8; Description =Peptidase family M41
ILKVHASNKKFDADVSLEVIAMRTPDFSGADLANLLNEAAILSGLRGKTAISSKQIDDSIDRIVAGMEGTLMTDGNTKSLLAYHEFGHAIXGTFTPDHDAVQKVTLXPHSQTHKLTXFIPNNNPTLISKQQLFTKIIRRLSGKTTEKIIFDKPKVTTKAASNLQRITSLTKQIITTLRISNINP

SEQ ID NO: 9433 - protein, 90 aa, Glycine max
  misc_feature (40)..(40): Xaa can be any naturally occurring amino acid
  misc_feature (51)..(51): Xaa can be any naturally occurring amino acid
  Coding DNA Sequence Number=SeqID_1235
  Gene Ontology: Mol. function=transporter activity; Cellular component= intracellular; Biological process=transport
  Homolog annotation: Hit_ID=Q94FN1; Match level="QueryCoverage=94%, HitCoverage=13%, E-value=5e-21, Identity=62%"; Hit description =Phosphatidylinositol transfer-like protein III
MIMPFQSFHDDMRAGIGSLKKKALIAYFKFQTHCREEEKXTKSDGRVNYVXFEDVRDYKELQTVYAFRQSLIMDQLLPEAFDDYHMTLRC

SEQ ID NO: 9434 - protein, 78 aa, Glycine max; identical to SEQ ID NO: 8353
  misc_feature (48)..(48): Xaa can be any naturally occurring amino acid
  misc_feature (51)..(51): Xaa can be any naturally occurring amino acid
  Coding DNA Sequence Number=SeqID_1236

SEQ ID NO: 9435 - protein, 128 aa, Glycine max
  misc_feature (104)..(104): Xaa can be any naturally occurring amino acid
  Coding DNA Sequence Number=SeqID_1237
  Subcellular localization annotation: CTP_CleavageSite=77; ConfidenceScore=5.46e-01
CATLRLLPARLPHVVLSPYVRLLTSTVHPLLTSLALASASVSVARAPAAAASVVPDGCSRAGRQCPGRVDRSSYAICVSMVRRSVAGYGYYSRHRDEVTSWLVXGRHALCVPRAHRLPYAPNVRLFVV

SEQ ID NO: 9436 - protein, 201 aa, Glycine max
  Coding DNA Sequence Number=SeqID_1837
SATQCIYFILRGVVVTKNLCEALCLLIESTAQTIEGQYYLLKHPSSSDALINTITTIYRRRPVVWSEEGSGEWSICFRSSTAGYGSSDTPNTYYGARLVTPPIHIIRHPCRRRAAPHNHKDSCFPRGIVLIAQPIPVCGGSGFSTYYTSPPYVLYNLSGRILSPLVIGTWFTIPRGCLFHLLTPQGRIFAKATHTSEHAPP

SEQ ID NO: 9437 - protein, 87 aa, Glycine max
  misc_feature (3)..(3): Xaa can be any naturally occurring amino acid
  Coding DNA Sequence Number=SeqID_1839
RAXGQFREVFQLLPTFGVIVARFVCASCLLREGPPRTPNCSNPNLHRFYSGWEVGGNAIIGALLPPLYFNFCIVGFAHGAGARREFS

SEQ ID NO: 9438 - protein, 121 aa, Glycine max
  misc_feature (17)..(17): Xaa can be any naturally occurring amino acid
  misc_feature (39)..(39): Xaa can be any naturally occurring amino acid
  misc_feature (43)..(43): Xaa can be any naturally occurring amino acid
  misc_feature (63)..(63): Xaa can be any naturally occurring amino acid
  misc_feature (89)..(89): Xaa can be any naturally occurring amino acid
  Coding DNA Sequence Number=SeqID_1841
  Gene Ontology: Mol. function=DNA binding; Cellular component=nascent polypeptide-associated complex; Biological process=protein transport
  Homolog annotation: Hit_ID=A9PA21; Match level="QueryCoverage=95%, HitCoverage=54%, E-value=6e-16, Identity=46%"; Hit description =Putative uncharacterized protein
  Pfam annotation: Domain name=UBA; Domain location=82-119; Score=19.4; E_value=0.014; Accession=PF00627.21; Description=UBATS-N domain
GRHHKSSSIMFVICKPXVMSTASDTYVIIVEAKIDDVSXQMQXAARRAVMNPDVISVSSQREXSSSTAAVQDDDEEIIEDDVDAKNVEXVMTQPGVASTKTVKALKNADGDIVAAIMELPT

SEQ ID NO: 9439 - protein, 122 aa, Glycine max
  misc_feature (101)..(101): Xaa can be any naturally occurring amino acid
  Coding DNA Sequence Number=SeqID_1842
GEGGSPPFFFWCGALSPFQTQGFFSRGEKLGPLKKTGGTYRGPGRGWWKDPGAKRGGENNRRGACCCWHFRALAAVTASAHEAPLGGGCEGAVRQDELHLXHAIAASVKCRPSQLIITIKEY

SEQ ID NO: 9440 - protein, 118 aa, Glycine max; identical to SEQ ID NO: 8173
  misc_feature (1)..(1): Xaa can be any naturally occurring amino acid
  misc_feature (25)..(25): Xaa can be any naturally occurring amino acid
  misc_feature (43)..(44): Xaa can be any naturally occurring amino acid
  misc_feature (46)..(47): Xaa can be any naturally occurring amino acid
  misc_feature (49)..(50): Xaa can be any naturally occurring amino acid
  misc_feature (60)..(61): Xaa can be any naturally occurring amino acid
  misc_feature (64)..(64): Xaa can be any naturally occurring amino acid
  misc_feature (67)..(67): Xaa can be any naturally occurring amino acid
  misc_feature (76)..(77): Xaa can be any naturally occurring amino acid
  misc_feature (80)..(84): Xaa can be any naturally occurring amino acid
  misc_feature (90)..(90): Xaa can be any naturally occurring amino acid
  misc_feature (95)..(95): Xaa can be any naturally occurring amino acid
  misc_feature (99)..(99): Xaa can be any naturally occurring amino acid
  misc_feature (102)..(103): Xaa can be any naturally occurring amino acid
  misc_feature (107)..(109): Xaa can be any naturally occurring amino acid
  misc_feature (113)..(113): Xaa can be any naturally occurring amino acid
  Coding DNA Sequence Number=SeqID_1844

SEQ ID NO: 9441 - protein, 91 aa, Glycine max
  misc_feature (3)..(3): Xaa can be any naturally occurring amino acid
  misc_feature (30)..(30): Xaa can be any naturally occurring amino acid
  misc_feature (38)..(38): Xaa can be any naturally occurring amino acid
  Coding DNA Sequence Number=SeqID_1846
LRXTTMCISYINSYHIDITIYHAYTEITIXNSLANHNXMYTEHNTSHRCIIGTSNIDNVVFKYRHDTCPTHIQTVINEIDIRISTSHFIPL

SEQ ID NO: 9442 - protein, 110 aa, Glycine max
  misc_feature (4)..(4): Xaa can be any naturally occurring amino acid
  misc_feature (6)..(6): Xaa can be any naturally occurring amino acid
  misc_feature (8)..(8): Xaa can be any naturally occurring amino acid
  misc_feature (12)..(12): Xaa can be any naturally occurring amino acid
  misc_feature (18)..(18): Xaa can be any naturally occurring amino acid
  misc_feature (30)..(30): Xaa can be any naturally occurring amino acid
  misc_feature (50)..(50): Xaa can be any naturally occurring amino acid
  misc_feature (60)..(60): Xaa can be any naturally occurring amino acid
  misc_feature (71)..(72): Xaa can be any naturally occurring amino acid
  misc_feature (83)..(83): Xaa can be any naturally occurring amino acid
  misc_feature (85)..(94): Xaa can be any naturally occurring amino acid
  misc_feature (97)..(104): Xaa can be any naturally occurring amino acid
  misc_feature (107)..(107): Xaa can be any naturally occurring amino acid
  misc_feature (110)..(110): Xaa can be any naturally occurring amino acid
  Coding DNA Sequence Number=SeqID_1848
RRCXIXYXRVGXASVVLXIVLLLRRESSRXNRGHAHNQHIDLSLTIEYTXPCHGRLSFIXLSLREERDPGXXNIIHTNQIACXPXXXXXXXXXXGCXXXXXXXXLFXFFX

SEQ ID NO: 9443 - protein, 114 aa, Glycine max
  misc_feature (14)..(15): Xaa can be any naturally occurring amino acid
  misc_feature (24)..(24): Xaa can be any naturally occurring amino acid
  misc_feature (45)..(45): Xaa can be any naturally occurring amino acid
  misc_feature (57)..(57): Xaa can be any naturally occurring amino acid
  misc_feature (68)..(68): Xaa can be any naturally occurring amino acid
  misc_feature (71)..(71): Xaa can be any naturally occurring amino acid
  misc_feature (75)..(75): Xaa can be any naturally occurring amino acid
  misc_feature (100)..(100): Xaa can be any naturally occurring amino acid
  misc_feature (102)..(102): Xaa can be any naturally occurring amino acid
  Coding DNA Sequence Number=SeqID_1849
SIRRSPSPPTQREXXTCEVWVWEXGCGNDTFERTTPLSLSYTKHXTTPPSLSYQINXRKQQHICGLNXGAXTEYXHPTLSRLLQQIEICHSRALRAYNIXTXTLSYNAAPFNTL

SEQ ID NO: 9444 - protein, 89 aa, Glycine max
  Coding DNA Sequence Number=SeqID_1851
QRQPNMLVVKESSGSDGSRKMHSIDGPCCSSLLISRLLTASPSSIQQCRSPQKTGHQSLDVSCVEVDHPHQHLWQRNNLVVIQLCFINC

SEQ ID NO: 9445 - protein, 120 aa, Glycine max
  Coding DNA Sequence Number=SeqID_1853
FHSIASPLFYLRLSSLQLQSDGKELREEEGEMVTMMLARLTQTTPAGRPEPSAAVVLIEPCQYLSALSCMHVPVPCAPPCLASSSAMAPAGQYTVLTCATGLPCVHASYVFILWTCKLGW

SEQ ID NO: 9446 - protein, 115 aa, Glycine max; identical to SEQ ID NO: 8181
  misc_feature (74)..(74): Xaa can be any naturally occurring amino acid
  misc_feature (92)..(92): Xaa can be any naturally occurring amino acid
  misc_feature (106)..(107): Xaa can be any naturally occurring amino acid
  misc_feature (111)..(111): Xaa can be any naturally occurring amino acid
  Coding DNA Sequence Number=SeqID_1855

SEQ ID NO: 9447 - protein, 53 aa, Glycine max
  misc_feature (21)..(21): Xaa can be any naturally occurring amino acid
  Coding DNA Sequence Number=SeqID_1857
MWKLTSEGVFFTLQNMRSKRXLTCYNNDATGSAFLVMELTKGWDTQRFKLYFI

SEQ ID NO: 9448 - protein, 102 aa, Glycine max
  misc_feature (5)..(5): Xaa can be any naturally occurring amino acid
  misc_feature (99)..(99): Xaa can be any naturally occurring amino acid
  Coding DNA Sequence Number=SeqID_1859
KKISXEDLEGSQRLIQISSAVQGWASGQIFKGWASGQFRDEPVVRCSALGQWSSIKISETDVSRKSWKILKKAQKNANQLGNQDKSRLYYIIKYIQNLXKTL

SEQ ID NO: 9449 - protein, 128 aa, Glycine max
  Coding DNA Sequence Number=SeqID_1861
  Gene Ontology: Mol. function=identical protein binding; Cellular component=extracellular region; Biological process=negative regulation of catalytic activity
  Homolog annotation: Hit_ID=A9QMD5; Match level="QueryCoverage=78%, HitCoverage=39%, E-value=4e-33, Identity=66%"; Hit description =Putative uncharacterized protein
MESYMSLIPIRILIDLYMRAWLSNNFNAGLETVRGWTIPVYTVDKPPHHALTYISGTSMSCPHVSGLSAILIGAHPQWSPAAIRSALMTTAYTSYKNGETIQDVSTGQPATPFDYGAGHVDPVAALDP

SEQ ID NO: 9450 - protein, 143 aa, Glycine max
  misc_feature (61)..(61): Xaa can be any naturally occurring amino acid
  misc_feature (68)..(68): Xaa can be any naturally occurring amino acid
  misc_feature (85)..(85): Xaa can be any naturally occurring amino acid
  misc_feature (100)..(101): Xaa can be any naturally occurring amino acid
  Coding DNA Sequence Number=SeqID_1862
  Gene Ontology: Mol. function=oxidoreductase activity; Biological process=ethylene biosynthetic process
  Homolog annotation: Hit_ID=O65158; Match level="QueryCoverage=99%, HitCoverage=45%, E-value=1e-30, Identity=44%"; Hit description=1 -aminocyclopropane-1-carboxylic acid oxidase
TNFPLINLEKLSGEERNDTMEKIKDACENCRFFELLNHNIPHNILHTITQLTQHHYSKYIXHRFNKLXPTKDLDSIQTIIKHINXYITFHLHHLPKSNIXXIPNLIHNYMTIINNSALNLYKLPLHLLYYVTQNRSLDYKYLN

SEQ ID NO: 9451 - protein, 190 aa, Glycine max
  Coding DNA Sequence Number=SeqID_1863
QLRRPPPPPGDAKSILNFLQLLFEISNMVVDKDDGKKKSKKSKKSKHQKLVKSSANSVDHTSNHSQKSSEADWKQKYNSVLGINAEFSNSSATGESVYDPNQEEEGSEEQHGAEAIHRNAPGSDLKRHPNKSSDEHQIAGSRGDSQSASRMSEANKSGAKQKYDEYSSHQRSSGQKHQSRNSENIQERDE

SEQ ID NO: 9452 - protein, 178 aa, Glycine max
  misc_feature (85)..(85): Xaa can be any naturally occurring amino acid
  misc_feature (171)..(171): Xaa can be any naturally occurring amino acid
  misc_feature (177)..(177): Xaa can be any naturally occurring amino acid
  Coding DNA Sequence Number=SeqID_1865
DSVRSDAFLTSLRRRPSTTPSPHEPYYLPPTSHDAADWTPIPLNTILFSSYIRQLIAVLHVEYYPPILTPLWSGSRECKATSNAXAVDCEPVRLCHHSHRTSHRVTESAGYTSRIFASRCFPLGICCGTRVLLSAAVLQILSPLYSSTRRLGPLCCSDMDSLTLISYVARXHALATXV

SEQ ID NO: 9453 - protein, 114 aa, Glycine max
  misc_feature (3)..(3): Xaa can be any naturally occurring amino acid
  misc_feature (12)..(13): Xaa can be any naturally occurring amino acid
  misc_feature (23)..(23): Xaa can be any naturally occurring amino acid
  misc_feature (35)..(35): Xaa can be any naturally occurring amino acid
  misc_feature (40)..(42): Xaa can be any naturally occurring amino acid
  misc_feature (52)..(53): Xaa can be any naturally occurring amino acid
  misc_feature (57)..(57): Xaa can be any naturally occurring amino acid
  misc_feature (62)..(62): Xaa can be any naturally occurring amino acid
  misc_feature (66)..(66): Xaa can be any naturally occurring amino acid
  misc_feature (68)..(68): Xaa can be any naturally occurring amino acid
  misc_feature (72)..(72): Xaa can be any naturally occurring amino acid
  misc_feature (75)..(75): Xaa can be any naturally occurring amino acid
  misc_feature (81)..(81): Xaa can be any naturally occurring amino acid
  misc_feature (86)..(86): Xaa can be any naturally occurring amino acid
  misc_feature (88)..(88): Xaa can be any naturally occurring amino acid
  misc_feature (93)..(93): Xaa can be any naturally occurring amino acid
  misc_feature (99)..(100): Xaa can be any naturally occurring amino acid
  misc_feature (103)..(103): Xaa can be any naturally occurring amino acid
  misc_feature (109)..(109): Xaa can be any naturally occurring amino acid
  misc_feature (113)..(114): Xaa can be any naturally occurring amino acid
  Coding DNA Sequence Number=SeqID_1867
QTXRLLVYRDSXXRRVSYVGDVXLLRPILVYTVAXIPERXXXRRTQRSYSCXXLTVXPLRTXLLSXLXHPIXLVXTDHLTXTLLRXLXLLTTXYAGRDXXESXMRRSIXSPLXX

SEQ ID NO: 9454 - protein, 1123 aa, Glycine max
  Coding DNA Sequence Number=SeqID_1869
  Gene Ontology: Mol. function=protein serine/threonine kinase activity; Cellular component=membrane; Biological process=protein amino acid phosphorylation
  Homolog annotation: Hit_ID=A5C1H0; Match level="QueryCoverage=97%, HitCoverage=99%, E-value=0.0, Identity=45%"; Hit description =Putative uncharacterized protein
  Pfam annotation: Domain name=LRRNT_2; Domain location=12-53; Score =49.3; E_value=1.3e-11; Accession=PF08263.3; Description=Leucine rich repeat N-terminal domain
  Pfam annotation: Domain name=LRR_1; Domain location=106-128; Score =13.2; E_value=0.99; Accession=PF00560.23; Description=Leucine Rich Repeat
  Pfam annotation: Domain name=LRR_1; Domain location=130-152; Score =12.8; E_value=1.3; Accession=PF00560.23; Description=Leucine Rich Repeat
  Pfam annotation: Domain name=LRR_1; Domain location=154-176; Score =1.0; E_value=2e+02; Accession=PF00560.23; Description=Leucine Rich Repeat
  Pfam annotation: Domain name=LRR_1; Domain location=178-200; Score =13.7; E_value=0.69; Accession=PF00560.23; Description=Leucine Rich Repeat
  Pfam annotation: Domain name=LRR_1; Domain location=202-224; Score =12.7; E_value=1.3; Accession=PF00560.23; Description=Leucine Rich Repeat
  Pfam annotation: Domain name=LRR_1; Domain location=226-249; Score =10.3; E_value=3.8; Accession=PF00560.23; Description=Leucine Rich Repeat
  Pfam annotation: Domain name=LRR_1; Domain location=250-273; Score =8.3; E_value=9; Accession=PF00560.23; Description=Leucine Rich Repeat
  Pfam annotation: Domain name=LRR_1; Domain location=275-297; Score =7.6; E_value=12; Accession=PF00560.23; Description=Leucine Rich Repeat
  Pfam annotation: Domain name=LRR_1; Domain location=301-323; Score =13.6; E_value=0.76; Accession=PF00560.23; Description=Leucine Rich Repeat
  Pfam annotation: Domain name=LRR_1; Domain location=325-347; Score =14.3; E_value=0.47; Accession=PF00560.23; Description=Leucine Rich Repeat
  Pfam annotation: Domain name=LRR_1; Domain location=349-371; Score =9.2; E_value=6; Accession=PF00560.23; Description=Leucine Rich Repeat
  Pfam annotation: Domain name=LRR_1; Domain location=373-395; Score =11.4; E_value=2.4; Accession=PF00560.23; Description=Leucine Rich Repeat
  Pfam annotation: Domain name=LRR_1; Domain location=396-418; Score =11.1; E_value=2.7; Accession=PF00560.23; Description=Leucine Rich Repeat
  Pfam annotation: Domain name=LRR_1; Domain location=420-442; Score =6.9; E_value=16; Accession=PF00560.23; Description=Leucine Rich Repeat
  Pfam annotation: Domain name=LRR_1; Domain location=444-467; Score =3.9; E_value=59; Accession=PF00560.23; Description=Leucine Rich Repeat
  Pfam annotation: Domain name=LRR_1; Domain location=469-491; Score =9.9; E_value=4.6; Accession=PF00560.23; Description=Leucine Rich Repeat
  Pfam annotation: Domain name=LRR_1; Domain location=493-515; Score =2.4; E_value=1.1e+02; Accession=PF00560.23; Description=Leucine Rich Repeat
  Pfam annotation: Domain name=LRR_1; Domain location=517-539; Score =11.5; E_value=2.3; Accession=PF00560.23; Description=Leucine Rich Repeat
  Pfam annotation: Domain name=LRR_1; Domain location=541-563; Score =12.2; E_value=1.6; Accession=PF00560.23; Description=Leucine Rich Repeat
  Pfam annotation: Domain name=LRR_1; Domain location=565-588; Score =7.5; E_value=13; Accession=PF00560.23; Description=Leucine Rich Repeat
  Pfam annotation: Domain name=LRR_1; Domain location=58-80; Score =12.4; E_value=1.6; Accession=PF00560.23; Description=Leucine Rich Repeat
  Pfam annotation: Domain name=LRR_1; Domain location=590-611; Score =11.9; E_value=1.9; Accession=PF00560.23; Description=Leucine Rich Repeat
  Pfam annotation: Domain name=LRR_1; Domain location=613-635; Score =12.1; E_value=1.7; Accession=PF00560.23; Description=Leucine Rich Repeat
  Pfam annotation: Domain name=LRR_1; Domain location=637-659; Score =9.7; E_value=4.9; Accession=PF00560.23; Description=Leucine Rich Repeat
  Pfam annotation: Domain name=LRR_1; Domain location=661-683; Score =20.4; E_value=0.0065; Accession=PF00560.23; Description=Leucine Rich Repeat
  Pfam annotation: Domain name=LRR_1; Domain location=685-707; Score =14.5; E_value=0.41; Accession=PF00560.23; Description=Leucine Rich Repeat
  Pfam annotation: Domain name=LRR_1; Domain location=709-732; Score =11.4; E_value=2.3; Accession=PF00560.23; Description=Leucine Rich Repeat
  Pfam annotation: Domain name=LRR_1; Domain location=82-104; Score =10.3; E_value=3.7; Accession=PF00560.23; Description=Leucine Rich Repeat
  Pfam annotation: Domain name=Pkinase; Domain location=830-1102; Score= 133.6; E_value=5.5e-37; Accession=PF00069.15; Description=Protein kinase domain
  Pfam annotation: Domain name=Pkinase_Tyr; Domain location=830-1102; Score=87.2; E_value=5.1e-23; Accession=PF07714.7; Description =Protein tyrosine kinase
  Pfam module annotation: Pfam domain module=LRRNT_2::LRR_1::LRR_1::LRR_ 1::LRR_1::LRR_1::LRR_1::LRR_1::LRR_1::LRR_1::LRR_1::LRR_1::LRR_1::LRR_ 1::LRR_1::LRR_1::LRR_1::LRR_1::LRR_1::LRR_1::LRR_1::LRR_1::LRR_1::LRR_ 1::LRR_1::...
  Pfam module annotation: Pfam domain module=LRR_1::LRR_1::LRR_1::LRR _1::Pkinase::Pkinase_Tyr; Domain location=12-53::106-128::130 -152::154-176::178-200::202-224::226-249::250-273::275-297::301 -323::325-347::349-371::...
  Pfam module annotation: Domain location=373-395::396-418::420 -442::444-467::469-491::493-515::517-539::541-563::565-588::58 -80::590-611::613-635::637-659::661-683::685-707::709-732::82 -104::830-1102::830-1102
  Subcellular localization annotation: CTP_CleavageSite=51; ConfidenceScore=5.12e-01
MALTLALSGTNFTTDKLALLALKSSITRDPHNFLTHNWSATTSVCNWVGVTCDAYHGRVRTLNLGDMSLSGTMPSHLGNLTFLNKLDLGGNKFHGQLPEELVQLHRLKFLNLSYNEFSGNVSEWIGGLSTLRYLNLGNNDFGGFFPKSISNLTMLEIMDWGNNFIQGTIPPEVGKMTQLRVLSMYSNRLSGTIPRTVSNLSSLEGISLSYNSLSGGIPSEIGELPQLEIMYLGDNPLGGSIPSTIFNNSMLQDIELGSSNLSGSLPSNLCQGLPNIRILYLGFNQLSGKLPYMWNECKLPFLQILSLDNNQFKGSIPRSIGNCTLLEELYLGDNCFTGSIPKEIGDLPMLANLTLGSNHLNGSIPSNIFNMSSLTYLSLEHNSLSGFLPLHIGLENLQELYLLENKLCGNIPSSLSNASKLNYVDLKFNKFDGVIPCSLGNLRYLQCLDVAFNNLTTDASTIELSFLSSLNYLQISGNPMHGSLPISIGNMSNLEQFMADECKIDGKIPSEIGNLSNLFALSLYHNDLSGTIPTTISNLQSLQYLRLGNNQLQGTIIDELCAINRLSELVITENKQISGMIPTCFGNLTSLRKLYLNSNRLNKVSSSLWSLRDILELNLSDNALTGFLPLDVGNLKAVIFLDLSKNQISGSIPRAMTGLQNLQILNLAHNKLEGSIPDSFGSLISLTYLDLSQNYLVDMIPKSLESIRDLKFINLSYNMLEGEIPNGGAFKNFTAQSFIFNKALCGNARLQVPPCSELMKRKRSNAHMFFIKCILPVMLSTILVVLCVFLLKKSRRKKHGGGDPAEVSSSTVLATRTISYNELSRATNGFDESNLLGKGSFGSVFKGILPNRMVVAVKLFNLDLELGSRSFSVECEVMRNLRHRNLIKIICSCSNSDYKLLVMEFMSNGNLERWLYSHNYYLDFLQRLNIMIDVASALEYMHHGASPTVVHCDVKPSNVLLDEDMVAHVSDLGIAKLLDEGQSQEYTKTMATFGYIAPEFGSKGTISTKGDVYSFGILLMETFSRKKPTDEMFVEGLSIKGWISESLPHANTQVVDSNLLEDEEHSADDIISSISSIYRIALNCCADLPEERMNMTDVAASLNKIKVMFQKNNKYMRAQVHAT

SEQ ID NO: 9455 - protein, 243 aa, Glycine max
  misc_feature (226)..(227): Xaa can be any naturally occurring amino acid
  misc_feature (238)..(238): Xaa can be any naturally occurring amino acid
  Coding DNA Sequence Number=SeqID_1870
APPPQPNYPAGHMFKKLLNNVNNLKDGKAATTNKSDSDKTPPANPKKNQAQQSDPFAEIPERPFEVDFEQIWEYEFEELQELVHQYEKYSSSIRNKYNDMVGEFRMTKEKLMLVEEERKRLLIENEQYKTQNENLKTYINQTTSQTQNTQESPKSKSDSPKPKQQNLQKIPSNNDFDQIADDELVSSLKSRVAKLLDELTSAEEPICVNVIGLMANFQQSNQSNTXXKEDSQQVMNTXDYANE

SEQ ID NO: 9456 - protein, 99 aa, Glycine max; identical to SEQ ID NO: 8187
  misc_feature (1)..(1): Xaa can be any naturally occurring amino acid
  misc_feature (37)..(37): Xaa can be any naturally occurring amino acid
  misc_feature (52)..(52): Xaa can be any naturally occurring amino acid
  misc_feature (55)..(55): Xaa can be any naturally occurring amino acid
  Coding DNA Sequence Number=SeqID_1872

SEQ ID NO: 9457 - protein, 439 aa, Glycine max
  Coding DNA Sequence Number=SeqID_1873
  Gene Ontology: Mol. function=nutrient reservoir activity; Cellular component=vacuole; Biological process=defense response to bacterium
  Homolog annotation: Hit_ID=P25974; Match level="QueryCoverage=100%, HitCoverage=100%, E-value=0.0, Identity=94%"; Hit description=Beta -conglycinin, beta chain precursor
  Pfam annotation: Domain name=Cupin_1; Domain location=240-401; Score =135.9; E_value=1.1e-37; Accession=PF00190.13; Description=Cupin
  Pfam annotation: Domain name=Cupin_1; Domain location=42-169; Score =87.8; E_value=3.6e-23; Accession=PF00190.13; Description=Cupin
  Pfam annotation: Domain name=Cupin_2; Domain location=73-151; Score =24.2; E_value=0.00049; Accession=PF07883.2; Description=Cupin domain
  Pfam module annotation: Pfam domain module=Cupin_1::Cupin_1::Cupin_2; Domain location=240-401::42-169::73-151
MMRVRFPLLVLLGTVFLASVCVSLKVREDENNPFYFRSSNSFQTLFENQNGRIRLLQRFNKRSPQLENLRDYRIVQFQSKPNTILLPHHADADFLLFVLSGRAILTLVNNDDRDSYNLHPGDAQRIPAGTTYYLVNPHDHQNLKIIKLAIPVNKPGRYDDFFLSSTQAQQSYLQGFSHNILETSFHSEFEEINRVLFGEEEEQRQQEGVIVELSKEQIRQLSRRAKSSSRKTISSEDEPFNLRSRNPIYSNNFGKFFEITPEKNPQLRDLDIFLSSVDINEGALLLPHFNSKAIVILVINEGDANIELVGIKEQQQKQKQEEEPLEVQRYRAELSEDDVFVIPAAYPFVVNATSNLNFLAFGINAENNQRNFLAGEKDNVVRQIERQVQELAFPGSAQDVERLLKKQRESYFVDAQPQQKEEGSKGRKGPFPSILGALY

SEQ ID NO: 9458 - protein, 118 aa, Glycine max
  misc_feature (17)..(17): Xaa can be any naturally occurring amino acid
  Coding DNA Sequence Number=SeqID_1874
FLLSHLYILSISTDAAXLFYSVPPLPSTQEYTHGPDPAPATHATSPPHPLTCCLTLHTSQHVPSSATLSTRLLRLRRSRLPLFARRTMRLRVELRLTTIRRNHTTHTTHATLIYNTSG

SEQ ID NO: 9459 - protein, 119 aa, Glycine max; identical to SEQ ID NO: 8188
  misc_feature (24)..(24): Xaa can be any naturally occurring amino acid
  misc_feature (35)..(35): Xaa can be any naturally occurring amino acid
  misc_feature (59)..(59): Xaa can be any naturally occurring amino acid
  misc_feature (75)..(75): Xaa can be any naturally occurring amino acid
  misc_feature (83)..(83): Xaa can be any naturally occurring amino acid
  misc_feature (111)..(112): Xaa can be any naturally occurring amino acid
  Coding DNA Sequence Number=SeqID_1876

SEQ ID NO: 9460 - protein, 202 aa, Glycine max
  misc_feature (202)..(202): Xaa can be any naturally occurring amino acid
  Coding DNA Sequence Number=SeqID_1878
SYVGPPPDTLQRKKSKSEGRIITKTELNHINPIPEARADLNQASCTNEINLPIELIKNETVSSDVEHIPFNAYILLRVPSITTSNSLESLYILTSTGLKEWLNPTYFDFFDPCNQQFLRMTVAGGTYSVTLPPNQQLIYPNTFCVAISDDRKIPYDLVLYELSASTSKTWIASSRFSGVLSPNFVANIQLDITTSSTKDKLX

SEQ ID NO: 9461 - protein, 167 aa, Glycine max; identical to SEQ ID NO: 8085
  misc_feature (31)..(31): Xaa can be any naturally occurring amino acid
  misc_feature (36)..(36): Xaa can be any naturally occurring amino acid
  misc_feature (102)..(102): Xaa can be any naturally occurring amino acid
  misc_feature (112)..(112): Xaa can be any naturally occurring amino acid
  misc_feature (136)..(138): Xaa can be any naturally occurring amino acid
  misc_feature (146)..(146): Xaa can be any naturally occurring amino acid
  misc_feature (148)..(149): Xaa can be any naturally occurring amino acid
  misc_feature (154)..(154): Xaa can be any naturally occurring amino acid
  misc_feature (157)..(157): Xaa can be any naturally occurring amino acid
  Coding DNA Sequence Number=SeqID_1880
  Subcellular localization annotation: CTP_CleavageSite=12; ConfidenceScore=5.08e-01

SEQ ID NO: 9462 - protein, 197 aa, Glycine max
  misc_feature (32)..(32): Xaa can be any naturally occurring amino acid
  misc_feature (53)..(53): Xaa can be any naturally occurring amino acid
  misc_feature (61)..(61): Xaa can be any naturally occurring amino acid
  misc_feature (99)..(99): Xaa can be any naturally occurring amino acid
  misc_feature (160)..(160): Xaa can be any naturally occurring amino acid
  misc_feature (190)..(190): Xaa can be any naturally occurring amino acid
  Coding DNA Sequence Number=SeqID_1882
YDVFDLVGDAQSSSSDQTDTYRHLVPAHKIGXTAMRQLRRRLTRAQTDQITYXTRDRLQLXCCIRSVVDDVTLSVVTRAAAHLAHNTTVNLIKSVGRDXRRSTGDSRVVDVEKMAPAGNHVSVKSVRSCDGRWCRDHTHAVVAIVVILDATPCDRVSAHXVVYTRRVYRNYDDSHAHATHVSARETTKAXGQSADDQ

SEQ ID NO: 9463 - protein, 122 aa, Glycine max; identical to SEQ ID NO: 8945
  misc_feature (39)..(39): Xaa can be any naturally occurring amino acid
  misc_feature (93)..(93): Xaa can be any naturally occurring amino acid
  misc_feature (122)..(122): Xaa can be any naturally occurring amino acid
  Coding DNA Sequence Number=SeqID_1884

SEQ ID NO: 9464 - protein, 93 aa, Glycine max
  Coding DNA Sequence Number=SeqID_1885
  Gene Ontology: Mol. function=DNA binding; Cellular component =chromosome; Biological process=nucleosome assembly
  Homolog annotation: Hit_ID=O65759; Match level="QueryCoverage=100%, HitCoverage=66%, E-value=3e-29, Identity=74%"; Hit description =Histone H2AX
  Pfam annotation: Domain name=Histone; Domain location=21-93; Score =46.9; E_value=7e-11; Accession=PF00125.14; Description=Core histone H2AH2BH3H4
  Subcellular localization annotation: CTP_CleavageSite=46; ConfidenceScore=5.15e-01
SSLGSTKGGRGEPKASISVSRSQKAGLQFPVGRIARFLKAGKYPVRVGAGAPVYLSAVLDYFSAHVLYFARNAPMDIKRKRIVSLHIYFAVRN

SEQ ID NO: 9465 - protein, 90 aa, Glycine max; identical to SEQ ID NO: 8946
  Coding DNA Sequence Number=SeqID_1886
  Subcellular localization annotation: CTP_CleavageSite=71; ConfidenceScore=5.50e-01

SEQ ID NO: 9466 - protein, 64 aa, Glycine max
  misc_feature (49)..(50): Xaa can be any naturally occurring amino acid
  Coding DNA Sequence Number=SeqID_1888
  Gene Ontology: Mol. function=unfolded protein binding; Cellular component=endoplasmic reticulum; Biological process=protein folding
  Homolog annotation: Hit_ID=A7QYR7; Match level="QueryCoverage=90%, HitCoverage=13%, E-value=2e-13, Identity=58%"; Hit description =Chromosome chr5 scaffold_253, whole genome shotgun sequence
MATNFCRYYLSFPQSPVTQGYDSIPAGIPDPLAKKPVEWDDRDGALRKXXKIPNPAYKGPWKRK

SEQ ID NO: 9467 - protein, 106 aa, Glycine max
  misc_feature (79)..(79): Xaa can be any naturally occurring amino acid
  misc_feature (93)..(93): Xaa can be any naturally occurring amino acid
  Coding DNA Sequence Number=SeqID_1889
RDAVAHSNSFPISPLLSIFVSSYCSLRSLSRNHIDHLSFHQLRARQCRVIYLLLCQPSSLHPLSLFSHSPHTASCSFHXPSYDLSDAWSLLSXSTTTMISASCDIS

SEQ ID NO: 9468 - protein, 150 aa, Glycine max
  Coding DNA Sequence Number=SeqID_1891
  Gene Ontology: Mol. function=structural molecule activity; Cellular component=chloroplast; Biological process=iron-sulfur cluster assembly
  Homolog annotation: Hit_ID=Q9XIK3; Match level="QueryCoverage=99%, HitCoverage=83%, E-value=5e-52, Identity=72%"; Hit description=Iron -sulfur assembly protein IscA, chloroplast precursor
  Pfam annotation: Domain name=Fe-S_biosyn; Domain location=71-150; Score=82.6; E_value=1.3e-21; Accession=PF01521.11; Description=Iron -sulphur cluster biosynthesis
  Subcellular localization annotation: CTP_CleavageSite=60; ConfidenceScore=5.84e-01
MMALAGITTSNPTFLQLRVSNTSLRHVAPRNSISFPRSSYVNLNRRNRLCVRSSSSSAPVASAVEGLKPAISLTESALKHLNKMRSERGEDLCLRIGVKQGGCSGMSYTMDFENRANARPDDSTIEYEGFAIVCDPKSMLFLFGMQLDYS

SEQ ID NO: 9469 - protein, 131 aa, Glycine max; identical to SEQ ID NO: 8196
  misc_feature (66)..(67): Xaa can be any naturally occurring amino acid
  misc_feature (87)..(87): Xaa can be any naturally occurring amino acid
  misc_feature (92)..(92): Xaa can be any naturally occurring amino acid
  misc_feature (126)..(126): Xaa can be any naturally occurring amino acid
  Coding DNA Sequence Number=SeqID_1892

SEQ ID NO: 9470 - protein, 112 aa, Glycine max
  misc_feature (1)..(1): Xaa can be any naturally occurring amino acid
  misc_feature (7)..(7): Xaa can be any naturally occurring amino acid
  misc_feature (16)..(16): Xaa can be any naturally occurring amino acid
  misc_feature (19)..(19): Xaa can be any naturally occurring amino acid
  misc_feature (21)..(21): Xaa can be any naturally occurring amino acid
  misc_feature (23)..(25): Xaa can be any naturally occurring amino acid
  misc_feature (33)..(33): Xaa can be any naturally occurring amino acid
  misc_feature (37)..(37): Xaa can be any naturally occurring amino acid
  misc_feature (39)..(40): Xaa can be any naturally occurring amino acid
  misc_feature (43)..(44): Xaa can be any naturally occurring amino acid
  misc_feature (49)..(50): Xaa can be any naturally occurring amino acid
  misc_feature (63)..(63): Xaa can be any naturally occurring amino acid
  misc_feature (65)..(65): Xaa can be any naturally occurring amino acid
  misc_feature (70)..(72): Xaa can be any naturally occurring amino acid
  misc_feature (74)..(74): Xaa can be any naturally occurring amino acid
  misc_feature (87)..(87): Xaa can be any naturally occurring amino acid
  misc_feature (89)..(91): Xaa can be any naturally occurring amino acid
  misc_feature (101)..(101): Xaa can be any naturally occurring amino acid
  misc_feature (105)..(105): Xaa can be any naturally occurring amino acid
  misc_feature (112)..(112): Xaa can be any naturally occurring amino acid
  Coding DNA Sequence Number=SeqID_1894
XPVGVLXVHSMIPVLXMRXYXLXXXSLQLIYDXSAAXDXXRAXXAACRXXARLRATRVAAQRXTXASRVXXXRXRARASRDAEAVVXAXXXGSGSGVSAIXQSLXIREHDSX

SEQ ID NO: 9471 - protein, 216 aa, Glycine max; identical to SEQ ID NO: 6689
  misc_feature (117)..(117): Xaa can be any naturally occurring amino acid
  misc_feature (147)..(148): Xaa can be any naturally occurring amino acid
  misc_feature (152)..(152): Xaa can be any naturally occurring amino acid
  misc_feature (167)..(167): Xaa can be any naturally occurring amino acid
  misc_feature (181)..(181): Xaa can be any naturally occurring amino acid
  misc_feature (187)..(187): Xaa can be any naturally occurring amino acid
  misc_feature (206)..(206): Xaa can be any naturally occurring amino acid
  misc_feature (214)..(214): Xaa can be any naturally occurring amino acid
  Coding DNA Sequence Number=SeqID_1896
  Subcellular localization annotation: CTP_CleavageSite=41; ConfidenceScore=5.28e-01

SEQ ID NO: 9472 - protein, 78 aa, Glycine max
  misc_feature (7)..(8): Xaa can be any naturally occurring amino acid
  Coding DNA Sequence Number=SeqID_1897
  Subcellular localization annotation: CTP_CleavageSite=48; ConfidenceScore=5.71e-01
QDNFRRXXLTLSLSLSLSLSLSLSLSLSLSLSLSLSLSLSLSLSLSPRAEFGTSLSLLLSFHTAYLRSSEFEVNLQDG

SEQ ID NO: 9473 - protein, 57 aa, Glycine max
  misc_feature (15)..(15): Xaa can be any naturally occurring amino acid
  misc_feature (27)..(28): Xaa can be any naturally occurring amino acid
  Coding DNA Sequence Number=SeqID_1899
ETKRGNYGSITYLAXIAKRSRTLLLRXXRREAIFKGGYFTLVIYFISWLKYVLPDLL

SEQ ID NO: 9474 - protein, 215 aa, Glycine max
  misc_feature (4)..(5): Xaa can be any naturally occurring amino acid
  misc_feature (7)..(7): Xaa can be any naturally occurring amino acid
  misc_feature (12)..(12): Xaa can be any naturally occurring amino acid
  misc_feature (14)..(14): Xaa can be any naturally occurring amino acid
  misc_feature (16)..(17): Xaa can be any naturally occurring amino acid
  misc_feature (19)..(21): Xaa can be any naturally occurring amino acid
  misc_feature (23)..(23): Xaa can be any naturally occurring amino acid
  misc_feature (29)..(29): Xaa can be any naturally occurring amino acid
  misc_feature (31)..(31): Xaa can be any naturally occurring amino acid
  misc_feature (33)..(33): Xaa can be any naturally occurring amino acid
  misc_feature (35)..(35): Xaa can be any naturally occurring amino acid
  misc_feature (44)..(45): Xaa can be any naturally occurring amino acid
  misc_feature (50)..(50): Xaa can be any naturally occurring amino acid
  misc_feature (53)..(54): Xaa can be any naturally occurring amino acid
  misc_feature (58)..(58): Xaa can be any naturally occurring amino acid
  misc_feature (60)..(60): Xaa can be any naturally occurring amino acid
  misc_feature (65)..(65): Xaa can be any naturally occurring amino acid
  misc_feature (67)..(67): Xaa can be any naturally occurring amino acid
  misc_feature (69)..(69): Xaa can be any naturally occurring amino acid
  misc_feature (71)..(71): Xaa can be any naturally occurring amino acid
  misc_feature (74)..(76): Xaa can be any naturally occurring amino acid
  misc_feature (78)..(78): Xaa can be any naturally occurring amino acid
  misc_feature (83)..(83): Xaa can be any naturally occurring amino acid
  misc_feature (86)..(86): Xaa can be any naturally occurring amino acid
  misc_feature (89)..(89): Xaa can be any naturally occurring amino acid
  misc_feature (91)..(91): Xaa can be any naturally occurring amino acid
  misc_feature (93)..(93): Xaa can be any naturally occurring amino acid
  misc_feature (97)..(97): Xaa can be any naturally occurring amino acid
  misc_feature (115)..(115): Xaa can be any naturally occurring amino acid
  misc_feature (121)..(121): Xaa can be any naturally occurring amino acid
  misc_feature (126)..(126): Xaa can be any naturally occurring amino acid
  misc_feature (132)..(132): Xaa can be any naturally occurring amino acid
  misc_feature (134)..(134): Xaa can be any naturally occurring amino acid
  misc_feature (146)..(146): Xaa can be any naturally occurring amino acid
  misc_feature (148)..(150): Xaa can be any naturally occurring amino acid
  misc_feature (153)..(153): Xaa can be any naturally occurring amino acid
  misc_feature (158)..(158): Xaa can be any naturally occurring amino acid
  misc_feature (160)..(160): Xaa can be any naturally occurring amino acid
  misc_feature (163)..(163): Xaa can be any naturally occurring amino acid
  misc_feature (165)..(165): Xaa can be any naturally occurring amino acid
  misc_feature (171)..(174): Xaa can be any naturally occurring amino acid
  misc_feature (179)..(179): Xaa can be any naturally occurring amino acid
  misc_feature (182)..(183): Xaa can be any naturally occurring amino acid
  misc_feature (187)..(187): Xaa can be any naturally occurring amino acid
  misc_feature (191)..(191): Xaa can be any naturally occurring amino acid
  misc_feature (196)..(196): Xaa can be any naturally occurring amino acid
  misc_feature (200)..(201): Xaa can be any naturally occurring amino acid
  misc_feature (207)..(208): Xaa can be any naturally occurring amino acid
  misc_feature (210)..(210): Xaa can be any naturally occurring amino acid
  misc_feature (212)..(212): Xaa can be any naturally occurring amino acid
  misc_feature (215)..(215): Xaa can be any naturally occurring amino acid
  Coding DNA Sequence Number=SeqID_1901
  Gene Ontology: Mol. function=magnesium ion binding; Cellular component=integral to membrane; Biological process=photosynthesis, light harvesting
  Homolog annotation: Hit_ID=P07371; Match level="QueryCoverage=99%, HitCoverage=79%, E-value=5e-50, Identity=52%"; Hit description =Chlorophyll a-b binding protein AB80, chloroplast precursor
  Pfam annotation: Domain name=Chloroa_b-bind; Domain location=25-182; Score=-23.5; E_value=0.0012; Accession=PF00504.12; Description =Chlorophyll A-B binding protein
RPKXXKXLGPFXGXPXXTXXXVXREIRWXIXGXTXDQNFRQDRXXEVIHXRWXXLVAXGXVFLEXLXRXGXKFXXXVXFKAGXQMXSEXGXDXLGNXSLIHAQSILAIWATQVIXLMGAVXGFRIXGGPLGXVXDPIYPGGSFDPXGXXXDPXAFSEXKXKDXNXRADLAXXXXSGFLXQAXXVGKXPLEXLTDHXVDPXXRIAWAXXTXFXPGX

SEQ ID NO: 9475 - protein, 160 aa, Glycine max
  misc_feature (54)..(55): Xaa can be any naturally occurring amino acid
  misc_feature (93)..(93): Xaa can be any naturally occurring amino acid
  misc_feature (102)..(102): Xaa can be any naturally occurring amino acid
  misc_feature (104)..(104): Xaa can be any naturally occurring amino acid
  misc_feature (112)..(112): Xaa can be any naturally occurring amino acid
  Coding DNA Sequence Number=SeqID_1902
SCVSEKNRKQQHYITYKHLDRKHHHSTPHTHPGSDKTTLNNTLLPRMAAPHTHXXLYCSDYLINSGSPRTPTTHTLLYEQNHTPCIQIERSTXNSSLSQLTXHXPAYCDDHXRRSEPGVRGGAPGHSTHSLPHTQRIRKHSYTQYPTISTPIIESTTVDV

SEQ ID NO: 9476 - protein, 119 aa, Glycine max
  Coding DNA Sequence Number=SeqID_1904
  Gene Ontology: Mol. function=microtubule binding; Cellular component =cytoplasmic vesicle; Biological process=protein transport
  Homolog annotation: Hit_ID=Q8VYK7; Match level="QueryCoverage=98%, HitCoverage=96%, E-value=2e-57, Identity=94%"; Hit description =Autophagy-related protein 8f precursor
  Pfam annotation: Domain name=APG12; Domain location=30-117; Score= -24.8; E_value=0.033; Accession=PF04110.4; Description=Autophagy protein Apg12
  Pfam annotation: Domain name=MAP1_LC3; Domain location=14-117; Score =272.7; E_value=7.7e-79; Accession=PF02991.6; Description=Microtubule associated protein 1A1B, light chain 3
  Pfam module annotation: Pfam domain module=APG12::MAP1_LC3; Domain location=30-117::14-117
MAKSTFKEEHDLEKRSAEAARIREKYPDRIPVIVEKGEKSDIPTIDKKKYLVPADLTVGQFVYVIRKRIKLSAEKAIFIFVDNVLPPTGALMSAVYEEKKDDDGFLYVTYSGENTFGSP

SEQ ID NO: 9477 - protein, 433 aa, Glycine max
  Coding DNA Sequence Number=SeqID_1905
QKTMAAFVYYNPKTNTIERKFPTQPVGFQVPYLLNIQPQDINYAMRNTADVRANPPNFHQTPETFLPQPPQKEEVKSFRLTKKADKETEKSSGAYQQNKASPSKNFGSTTNEFLMMEDLHEEDLNSIPDYYQAPGIETKTRSLKPQSFEPERLTKKKVVIQEPQQNYPEQEAQGDFKLVRHEDIMLKYRPENFSINERILNAKYVREEQEKTRRFMLDRIGNDIKVMEKAANGLEREFEKTGKETHNLEEKTKQIWEEVERKRFELKAQEIMNNIDRAVEIDHELDQEDRINALLNENRALYDEIDRVLEGDEEPEEPVPQSLYTIPETGRSGSSKNAKGSSNARPSTSIGRTTAQKKPGFNVSKSIVEQKFGRKNIVKTVSENKIKGATRVQIGTPEKKNRNTATKDGNAMFKNPKKVEEALQKAREIADLY

SEQ ID NO: 9478 - protein, 118 aa, Glycine max
  misc_feature (1)..(1): Xaa can be any naturally occurring amino acid
  misc_feature (13)..(14): Xaa can be any naturally occurring amino acid
  misc_feature (23)..(23): Xaa can be any naturally occurring amino acid
  misc_feature (25)..(26): Xaa can be any naturally occurring amino acid
  misc_feature (36)..(36): Xaa can be any naturally occurring amino acid
  misc_feature (47)..(47): Xaa can be any naturally occurring amino acid
  misc_feature (67)..(67): Xaa can be any naturally occurring amino acid
  misc_feature (82)..(85): Xaa can be any naturally occurring amino acid
  Coding DNA Sequence Number=SeqID_1906
XWTTVRVGNATMXXLHLSSSCIXSXXSNDDGHRIWXSNAMSSHSFLXSISDVLGHIADISYLCSGSXGCCDIYKASRDVDMXXXXLSFLSPYALLCQLGRAADIVPRISNRILAFYST

SEQ ID NO: 9479 - protein, 119 aa, Glycine max
  misc_feature (81)..(81): Xaa can be any naturally occurring amino acid
  misc_feature (107)..(107): Xaa can be any naturally occurring amino acid
  misc_feature (109)..(109): Xaa can be any naturally occurring amino acid
  Coding DNA Sequence Number=SeqID_1908
SPRHVSTCCMYSHFAPLCSLVWWLYGTISYSEWCRVCAARSCRRLVRVHYCLHCCSTHSHSTIYHKYTSIMRDYVLYQAMXRAQVPTASLISRCACAQTPLTGCACXQXIARLSCSDSR

SEQ ID NO: 9480 - protein, 160 aa, Glycine max; identical to SEQ ID NO: 9475
  misc_feature (54)..(55): Xaa can be any naturally occurring amino acid
  misc_feature (93)..(93): Xaa can be any naturally occurring amino acid
  misc_feature (102)..(102): Xaa can be any naturally occurring amino acid
  misc_feature (104)..(104): Xaa can be any naturally occurring amino acid
  misc_feature (112)..(112): Xaa can be any naturally occurring amino acid
  Coding DNA Sequence Number=SeqID_181

SEQ ID NO: 9481 - protein, 140 aa, Glycine max
  Coding DNA Sequence Number=SeqID_183
  Gene Ontology: Cellular component=integral to membrane; Biological process=late endosome to vacuole transport
  Homolog annotation: Hit_ID=Q69SJ2; Match level="QueryCoverage=95%, HitCoverage=97%, E-value=5e-44, Identity=65%"; Hit description =Vacuolar protein sorting 55 protein-like
  Pfam annotation: Domain name=Vps55; Domain location=17-136; Score =201.2; E_value=2.5e-57; Accession=PF04133.4; Description=Vacuolar protein sorting 55
MADIPRHLRACLDMGKIAFLAILVSGGIVLQILACALYNNWWPMLSVIMYVLLPMPLLFFAGSDSTSLFNESDNSWINAAKFLTGASAVGSIAIPSILKHAGLIGWGALAFDLSSYVVFIVAILSYICIGDDSDNYYSYI

SEQ ID NO: 9482 - protein, 118 aa, Glycine max; identical to SEQ ID NO: 9478
  misc_feature (1)..(1): Xaa can be any naturally occurring amino acid
  misc_feature (13)..(14): Xaa can be any naturally occurring amino acid
  misc_feature (23)..(23): Xaa can be any naturally occurring amino acid
  misc_feature (25)..(26): Xaa can be any naturally occurring amino acid
  misc_feature (36)..(36): Xaa can be any naturally occurring amino acid
  misc_feature (47)..(47): Xaa can be any naturally occurring amino acid
  misc_feature (67)..(67): Xaa can be any naturally occurring amino acid
  misc_feature (82)..(85): Xaa can be any naturally occurring amino acid
  Coding DNA Sequence Number=SeqID_184

SEQ ID NO: 9483 - protein, 182 aa, Glycine max
  misc_feature (7)..(7): Xaa can be any naturally occurring amino acid
  Coding DNA Sequence Number=SeqID_186
QLCGERXPSEMCERQIGISLRNPSVDLLHEILDVTHADAIVYDTSYPRTLQRQSVAIDIVCSSSYTRLGSVIYSRPLLSHVCRPVNKTRDQSYNIVRLLHAFLFCLRRRHRRDTHTPSPSRLACLRPGRTRILHITPISRPDTGGRVGVRADSPHHMRVAAGLVSPYSVASLGVSPLLNVLR

SEQ ID NO: 9484 - protein, 191 aa, Glycine max
  misc_feature (2)..(11): Xaa can be any naturally occurring amino acid
  misc_feature (24)..(25): Xaa can be any naturally occurring amino acid
  misc_feature (38)..(40): Xaa can be any naturally occurring amino acid
  misc_feature (53)..(53): Xaa can be any naturally occurring amino acid
  misc_feature (62)..(62): Xaa can be any naturally occurring amino acid
  misc_feature (71)..(71): Xaa can be any naturally occurring amino acid
  misc_feature (80)..(80): Xaa can be any naturally occurring amino acid
  misc_feature (94)..(94): Xaa can be any naturally occurring amino acid
  misc_feature (103)..(103): Xaa can be any naturally occurring amino acid
  misc_feature (114)..(114): Xaa can be any naturally occurring amino acid
  misc_feature (139)..(139): Xaa can be any naturally occurring amino acid
  misc_feature (148)..(148): Xaa can be any naturally occurring amino acid
  misc_feature (154)..(154): Xaa can be any naturally occurring amino acid
  misc_feature (163)..(166): Xaa can be any naturally occurring amino acid
  Coding DNA Sequence Number=SeqID_188
  Subcellular localization annotation: CTP_CleavageSite=54; ConfidenceScore=5.38e-01
GXXXXXXXXXXPPPHHPHTTNHNXXKTDSRRLYLPRRXXXAVLSRHRRRCTPXAASRGQSSXRRASEAMLXRCGDSYPLXTVYSRHNSAARTHXTCTMCSILXAVLYCPREILXHARYHERDLSVFERAASARVARASXRHRSETLSXSKSRYXSRISSIVSXXXXLSLIKYARASRKSLVHVRYVCSSVI

SEQ ID NO: 9485 - protein, 65 aa, Glycine max
  Coding DNA Sequence Number=SeqID_190
YQKLADPTSWTKCSTCSCLHTLRIHIYYVLHSSQPLMSVVTTQISSSNKQSSLAINKIKQNKNIK

SEQ ID NO: 9486 - protein, 199 aa, Glycine max
  Coding DNA Sequence Number=SeqID_192
EAELVMARGLCRMVMRCEPNSFTEPRPYRPPVRKHNLFQQKRLAELREGSQVSVEIQSDKSLKGTEQDQTTLVSGIDIQEKSSSDVVASTSKPQTPSPSLVGMKKTLGSQVSLLRCSTCMQIIQSDKSLKGSSDQDQTTLVSQIDIQEKLSSDIVSSTSKPHQGKHLRSSSKMHKPKAFLKKKKKKKKKKSSRKAVSTT

SEQ ID NO: 9487 - protein, 191 aa, Glycine max; identical to SEQ ID NO: 9484
  misc_feature (2)..(11): Xaa can be any naturally occurring amino acid
  misc_feature (24)..(25): Xaa can be any naturally occurring amino acid
  misc_feature (38)..(40): Xaa can be any naturally occurring amino acid
  misc_feature (53)..(53): Xaa can be any naturally occurring amino acid
  misc_feature (62)..(62): Xaa can be any naturally occurring amino acid
  misc_feature (71)..(71): Xaa can be any naturally occurring amino acid
  misc_feature (80)..(80): Xaa can be any naturally occurring amino acid
  misc_feature (94)..(94): Xaa can be any naturally occurring amino acid
  misc_feature (103)..(103): Xaa can be any naturally occurring amino acid
  misc_feature (114)..(114): Xaa can be any naturally occurring amino acid
  misc_feature (139)..(139): Xaa can be any naturally occurring amino acid
  misc_feature (148)..(148): Xaa can be any naturally occurring amino acid
  misc_feature (154)..(154): Xaa can be any naturally occurring amino acid
  misc_feature (163)..(166): Xaa can be any naturally occurring amino acid
  Coding DNA Sequence Number=SeqID_1909
  Subcellular localization annotation: CTP_CleavageSite=54; ConfidenceScore=5.38e-01

SEQ ID NO: 9488 - protein, 127 aa, Glycine max
  Coding DNA Sequence Number=SeqID_1911
FCRARGECHSVVHDSVPHSPPIFMLYTLFTPLIYSTYVSACLAISTLKLHYYYIARRPCAFYTHHLSIHRQHARPASIAARAPDSFSSVAIMYIESSSCFMVCRLRDVSACGYINILGDTVARGIFI

SEQ ID NO: 9489 - protein, 65 aa, Glycine max
  Coding DNA Sequence Number=SeqID_1913
  Gene Ontology: Mol. function=protein binding; Biological process =ubiquitin cycle
  Homolog annotation: Hit_ID=A5BZY4; Match level="QueryCoverage=95%, HitCoverage=35%, E-value=2e-24, Identity=82%"; Hit description =Putative uncharacterized protein
  Pfam annotation: Domain name=UFC1; Domain location=1-57; Score=-24.4; E_value=1.7e-07; Accession=PF00112.13; Description=Ubiquitin-fold modifier-conjugating enzyme 1
KMYRGGKICLIVYFKLFWAKNCPRFGIAHALCLGFARWLAAEVPILVDCGMIKHKDDTATTSTEF

SEQ ID NO: 9490 - protein, 143 aa, Glycine max
  Coding DNA Sequence Number=SeqID_1914
  Homolog annotation: Hit_ID=Q9FGZ0; Match level="QueryCoverage=96%, HitCoverage=49%, E-value=2e-49, Identity=75%"; Hit description =Genomic DNA, chromosome 5, TAC clone: K6M13
MENLSPLRDDDEENEVDEAKMLLIGENGTNGDSFSPRSDGAPELQHYTIRSIKSTVVIRQLTSQGLSFQLWPAASTFVALLDNYRLDPANSPLAATLSSLKPAGSTTTPMNILELGSGTGVVGIAAAITLSASVTVTDLPHVL

SEQ ID NO: 9491 - protein, 115 aa, Glycine max
  Coding DNA Sequence Number=SeqID_1915
  Subcellular localization annotation: CTP_CleavageSite=44; ConfidenceScore=5.32e-01
FFYKKKKKTQIFSHLCLLHFICTHFFFLYLLPRLLFFFFFYFLSCSFFSSLYSPFLFMSPVTSFILLFLPILFVFFSLFVSVSFLRTSHISRVRKIIFLKNHFFETSRIYCFFST

SEQ ID NO: 9492 - protein, 147 aa, Glycine max
  misc_feature (34)..(35): Xaa can be any naturally occurring amino acid
  misc_feature (71)..(71): Xaa can be any naturally occurring amino acid
  misc_feature (90)..(90): Xaa can be any naturally occurring amino acid
  misc_feature (126)..(126): Xaa can be any naturally occurring amino acid
  misc_feature (144)..(144): Xaa can be any naturally occurring amino acid
  Coding DNA Sequence Number=SeqID_1917
  Gene Ontology: Mol. function=oxidoreductase activity; Cellular component=Golgi apparatus; Biological process=metabolic process
  Homolog annotation: Hit_ID=A8N8X3; Match level="QueryCoverage=100%, HitCoverage=26%, E-value=3e-37, Identity=48%"; Hit description =Putative uncharacterized protein
  Pfam annotation: Domain name=ADH_N; Domain location=55-142; Score =65.8; E_value=1.4e-16; Accession=PF08240.2; Description=Alcohol dehydrogenase GroES-like domain
MNIAAKLADKILGEVPTSTPAKPLVDESRPMKAXXWMGKKHVEIISAPRPMITDPRDIVLKITATTICGSXLHLFTGAMLDMHKGDVLGXEFMGIVEEVGSEVKNIQQGQRVVVAFDIACGECDYXKRQEYTACDTTNPSKLQXEMY

SEQ ID NO: 9493 - protein, 158 aa, Glycine max
  misc_feature (46)..(46): Xaa can be any naturally occurring amino acid
  Coding DNA Sequence Number=SeqID_1918
KDGLSGAGWIVFDNIIFLYGSGMARVGWAMISLNDKSMWNINVFVXGWGGEGGTRHTRFSKRRGDIITGGCEGGRNIRNKGRDGGIYTARGDDSCGWWVLYYNFTLGVKSGRGDFGGEHGGVERAYLVDRGGGKRRPHMAGARAGTKHNIGNPERGGE

SEQ ID NO: 9494 - protein, 195 aa, Glycine max; identical to SEQ ID NO: 8212
  misc_feature (1)..(1): Xaa can be any naturally occurring amino acid
  misc_feature (23)..(23): Xaa can be any naturally occurring amino acid
  misc_feature (33)..(33): Xaa can be any naturally occurring amino acid
  misc_feature (38)..(38): Xaa can be any naturally occurring amino acid
  misc_feature (57)..(58): Xaa can be any naturally occurring amino acid
  misc_feature (66)..(66): Xaa can be any naturally occurring amino acid
  misc_feature (72)..(72): Xaa can be any naturally occurring amino acid
  misc_feature (88)..(88): Xaa can be any naturally occurring amino acid
  misc_feature (131)..(131): Xaa can be any naturally occurring amino acid
  misc_feature (167)..(167): Xaa can be any naturally occurring amino acid
  misc_feature (185)..(185): Xaa can be any naturally occurring amino acid
  Coding DNA Sequence Number=SeqID_1920
  Subcellular localization annotation: CTP_CleavageSite=41; ConfidenceScore=5.05e-01

SEQ ID NO: 9495 - protein, 214 aa, Glycine max
  Coding DNA Sequence Number=SeqID_1921
  Homolog annotation: Hit_ID=A7PNE8; Match level="QueryCoverage=70%, HitCoverage=99%, E-value=1e-71, Identity=86%"; Hit description =Chromosome chr1 scaffold_22, whole genome shotgun sequence
MNIMSTHQCSWPVRIQDHPDKGSINRAPFSRGSDFLNVGYHTQKYGHSARKCRPVFSSSVSNITDPSDSDNTDKKKPQNGEMGGVNSEMLRESLEKIVGKDDSTFSGFDLATLIRNKYGRSYDVQLIKKEFMGRNLLAMNVMWKYMEQRSFPLTEEEYILRLDDIANNLKCWGAVSHIRNSLEKSKERPRIGKAVSIFIDMDESGARSNEWIYK

SEQ ID NO: 9496 - protein, 66 aa, Glycine max
  Coding DNA Sequence Number=SeqID_1922
YRAIAYYRTTALANAPSTAVHATTSEAQELRLMEDSTQSVYNKRLDSPSTDEAGSLTPAAVATTHV

SEQ ID NO: 9497 - protein, 76 aa, Glycine max
  Coding DNA Sequence Number=SeqID_1924
  Gene Ontology: Mol. function=pyroglutamyl-peptidase I activity; Biological process=proteolysis
  Homolog annotation: Hit_ID=A9PBR6; Match level="QueryCoverage=63%, HitCoverage=21%, E-value=5e-12, Identity=72%"; Hit description =Putative uncharacterized protein
MGSEGPTTPTTTIHVTGFKKFHGVSENPTETIANNLTEYMNKKGLPKGFSERGRRTFSLRLAGSREHLGSHWNPED

SEQ ID NO: 9498 - protein, 78 aa, Glycine max
  Coding DNA Sequence Number=SeqID_1925
YLDLQHILDTYHVTMIKSYICSLSSPHRYKLHIILEVKRRIRYKLKDLYQIINDGSPPTLTSWHAIRRSSPRVVFYFL

SEQ ID NO: 9499 - protein, 178 aa, Glycine max
  misc_feature (147)..(147): Xaa can be any naturally occurring amino acid
  Coding DNA Sequence Number=SeqID_1927
  Gene Ontology: Mol. function=oxidoreductase activity; Cellular component=flagellum; Biological process=negative regulation of transcription
  Homolog annotation: Hit_ID=A9PDW4; Match level="QueryCoverage=100%, HitCoverage=87%, E-value=5e-78, Identity=80%"; Hit description =Putative uncharacterized protein
  Pfam annotation: Domain name=FMN_red; Domain location=3-160; Score= -35.5; E_value=0.018; Accession=PF03358.6; Description=NADPH -dependent FMN reductase
  Pfam annotation: Domain name=Flavodoxin_1; Domain location=7-138; Score=67.0; E_value=6.3e-17; Accession=PF00258.15; Description =Flavodoxin
  Pfam module annotation: Pfam domain module=FMN_red::Flavodoxin_1; Domain location=3-160::7-138
MAVQVYIVYYSMYRHVDRLAEEIKKGVDSVEGVEAKLWQVPETLPEEVLGKMRAPPKSDVPIITPNELSEADGFVFGFPTRFGMMAAQFKAFLDATGGLWKTQQLAGKPAGIFYSTSSQGGGQETTALTAITQLVHHGMHFVPFCYXYGAGCFDFEELLGGRYHGSGIDAGYMSRPPT

SEQ ID NO: 9500 - protein, 126 aa, Glycine max
  misc_feature (11)..(11): Xaa can be any naturally occurring amino acid
  misc_feature (17)..(17): Xaa can be any naturally occurring amino acid
  misc_feature (20)..(20): Xaa can be any naturally occurring amino acid
  misc_feature (108)..(108): Xaa can be any naturally occurring amino acid
  Coding DNA Sequence Number=SeqID_1928
FAVMLGGRPRXARRAVXNMXVSILHSPGAECAGVVCDYISVLDQSVYVCDLGCCSVQRSIFHPLLSVVVRRIRLADDAFVVRFVTLAHVTLRKYVRTLIRLLEHLSHXRAATHKRRARAAEGRTEE

SEQ ID NO: 9501 - protein, 176 aa, Glycine max
  misc_feature (55)..(55): Xaa can be any naturally occurring amino acid
  Coding DNA Sequence Number=SeqID_1930
  Gene Ontology: Mol. function=alcohol dehydrogenase activity; Cellular component=cytoplasm; Biological process=metabolic process
  Homolog annotation: Hit_ID=P12886; Match level="QueryCoverage=73%, HitCoverage=33%, E-value=1e-67, Identity=92%"; Hit description =Alcohol dehydrogenase 1
  Pfam annotation: Domain name=ADH_N; Domain location=76-176; Score =85.9; E_value=1.3e-22; Accession=PF08240.2; Description=Alcohol dehydrogenase GroES-like domain
  Subcellular localization annotation: CTP_CleavageSite=41; ConfidenceScore=5.18e-01
NHYKIKSSLSILPQADTIQYHLSNSLINSRLFSLTITSSCRRAHVGQVIKCKAAXVSWEAGKPLVIEEVEVAPPQAGEVRLKILYTSLCHTDVYFWEAKGQTPLFPRIFGHEAGGIVESVGEGVTHLKPGDHALPVFTGECGECPHCKSEESNMCDLLRINTDRGVMIHDSQTRNL

SEQ ID NO: 9502 - protein, 80 aa, Glycine max
  misc_feature (61)..(61): Xaa can be any naturally occurring amino acid
  misc_feature (75)..(75): Xaa can be any naturally occurring amino acid
  Coding DNA Sequence Number=SeqID_1931
  Gene Ontology: Mol. function=nutrient reservoir activity; Cellular component=cellulose and pectin-containing cell wall
  Homolog annotation: Hit_ID=P10742; Match level="QueryCoverage=93%, HitCoverage=25%, E-value=2e-30, Identity=85%"; Hit description=Stem 31 kDa glycoprotein precursor
HAHSYLANIPYYKKHGYGVEKSNSTLYDEWVNKANAPALPETLKNYNTLESFGFNIIFLSXRTLDIHAVTEANLXKAGYH

SEQ ID NO: 9503 - protein, 80 aa, Glycine max
  misc_feature (24)..(24): Xaa can be any naturally occurring amino acid
  misc_feature (64)..(64): Xaa can be any naturally occurring amino acid
  Coding DNA Sequence Number=SeqID_1932
QTSSSPHIAQMLYEIKAKEESRGXQIQQHSQYNNETIHTLYTLHSTITHHLRLALWVWCCEMVXGSWPLAIRKHRRDSHS

SEQ ID NO: 9504 - protein, 111 aa, Glycine max
  misc_feature (32)..(32): Xaa can be any naturally occurring amino acid
  misc_feature (63)..(63): Xaa can be any naturally occurring amino acid
  Coding DNA Sequence Number=SeqID_1933
IVALPPLARLAAVAHHHLALRMTSSCIDAKSXTLYILLPMYIVGYDLLEPTRRLFYITSVALXSRDPSLSVLLCPCFCVVCRLHWGSVSMFFRVLLVLVFLCDFSIHIPHR

SEQ ID NO: 9505 - protein, 92 aa, Glycine max
  Coding DNA Sequence Number=SeqID_1935
  Subcellular localization annotation: CTP_CleavageSite=82; ConfidenceScore=5.58e-01
PFACPPPHGGVPIQRARSSPPPNAPTSNAKNRPATPHINPPALSETLTIPQVFSYIPSLTSFHSYLPTSLSYSPFRIISSPPCLLIFSIITP

SEQ ID NO: 9506 - protein, 137 aa, Glycine max
  misc_feature (40)..(40): Xaa can be any naturally occurring amino acid
  misc_feature (61)..(61): Xaa can be any naturally occurring amino acid
  misc_feature (64)..(64): Xaa can be any naturally occurring amino acid
  misc_feature (96)..(97): Xaa can be any naturally occurring amino acid
  misc_feature (99)..(99): Xaa can be any naturally occurring amino acid
  misc_feature (104)..(104): Xaa can be any naturally occurring amino acid
  misc_feature (122)..(122): Xaa can be any naturally occurring amino acid
  Coding DNA Sequence Number=SeqID_1937
YDRQLHYILLQYSAYAISHGGRLMQAHDTACSEWFVVVLXTSLAHCIHIDTLDITHHTCAXCVXAAGVGSALSHNTILNIPTHTIYTHESKSTCGXXVXCGCGXLQHSTTVVSDSRAGVDRXRCRGAGACYTSLLVE

SEQ ID NO: 9507 - protein, 160 aa, Glycine max
  Coding DNA Sequence Number=SeqID_1939
  Gene Ontology: Mol. function=metal ion binding; Cellular component =integral to membrane; Biological process=ubiquitin cycle
  Homolog annotation: Hit_ID=A7PZM4; Match level="QueryCoverage=96%, HitCoverage=94%, E-value=6e-41, Identity=53%"; Hit description =Chromosome chr15 scaffold_40, whole genome shotgun sequence
  Pfam annotation: Domain name=zf-C3HC4; Domain location=86-128; Score =36.1; E_value=1.2e-07; Accession=PF00097.15; Description=Zinc finger, C3HC4 type (RING finger)
MGFPVGYSELLFPKLLLHILSLLGLLRKLICSLLRFMGLHDFLEPDIAAWPETRMPEEFESVSATLIREILPVVKFRELVDPPETCAVCLSEFEENDEIRQLANCRHIFHRGCLDRWMGYDQRTCPLCRMPFIPDEMQGAFIERLWAASGIAEYPHVAPF

SEQ ID NO: 9508 - protein, 236 aa, Glycine max
  misc_feature (118)..(118): Xaa can be any naturally occurring amino acid
  Coding DNA Sequence Number=SeqID_1940
  Gene Ontology: Mol. function=translation elongation factor activity; Cellular component=eukaryotic translation elongation factor 1 complex; Biological process=translational elongation
  Homolog annotation: Hit_ID=A9P7W8; Match level="QueryCoverage=95%, HitCoverage=100%, E-value=4e-52, Identity=54%"; Hit description =Putative uncharacterized protein
  Pfam annotation: Domain name=EF1_GNE; Domain location=135-226; Score =44.3; E_value=4.4e-10; Accession=PF00736.9; Description=EF-1 guanine nucleotide exchange doma
MAVTFSNLHTESGLKSLDDFLSGKVYVSGDQFTKDDIKVYGAVLEKPGDSFPNAAKWYEVVSSQLAASFPGNAQGVRFSGKASAPAEAAPAKPDASAAEDDDDLDLFGDETEEAKKAXKERGAAKKSPKKKESGTSSVLLDGNPWDDDPPVEKAGRGWFAVVRMPWSIVGRHPNGRPVGYGIKKFQIILTIVDALVFVDPLVEETFPVLPPKEYVQNCDIVAFNKIWGFMLNSRPF

SEQ ID NO: 9509 - protein, 130 aa, Glycine max; identical to SEQ ID NO: 8243
  misc_feature (21)..(21): Xaa can be any naturally occurring amino acid
  misc_feature (82)..(82): Xaa can be any naturally occurring amino acid
  Coding DNA Sequence Number=SeqID_1941

SEQ ID NO: 9510 - protein, 92 aa, Glycine max
  Coding DNA Sequence Number=SeqID_1943
ATRGITSPLLSNGEAVVNSNTAKSFNTEYVPARQLQKPELSTRQGITLENKKAMNSNETYQKNVKNFFGVAGEDSICFKSKTATEKFDRFIK

SEQ ID NO: 9511 - protein, 159 aa, Glycine max
  Coding DNA Sequence Number=SeqID_1945
  Gene Ontology: Mol. function=Rho guanyl-nucleotide exchange factor activity; Cellular component=condensed nuclear chromosome; Biological process=regulation of Rho protein signal transduction
  Homolog annotation: Hit_ID=UPI00015E0D47; Match level="QueryCoverage =99%, HitCoverage=92%, E-value=4e-34, Identity=27%"; Hit description =titin isoform novex-3
  Pfam annotation: Domain name=I-set; Domain location=3-64; Score=14.8; E_value=0.00025; Accession=PF07679.6; Description=Immunoglobulin I -set domain
  Pfam annotation: Domain name=I-set; Domain location=83-159; Score =19.0; E_value=0.00012; Accession=PF07679.6; Description =Immunoglobulin I-set domain
  Pfam annotation: Domain name=ig; Domain location=97-157; Score=22.4; E_value=0.0017; Accession=PF00047.15; Description=Immunoglobulin domain
  Pfam module annotation: Pfam domain module=I-set::I-set::ig; Domain location=3-64::83-159::97-157
VRSAQGAWLKDSTQLSAGFKCKFLHDGQEYTLLLTEAFPEDEALYTCEARNDSGMASTSASLTVEAVEKVLQYKEMETEAKASVLRTKIESLEAAVGHSAVFTCETEPAPNLSFQWFKSGREIYESDKYSVKTFTYVSTLEVLKAQVVDCGDYSCKDQN

SEQ ID NO: 9512 - protein, 214 aa, Glycine max; identical to SEQ ID NO: 6735
  misc_feature (3)..(3): Xaa can be any naturally occurring amino acid
  misc_feature (89)..(89): Xaa can be any naturally occurring amino acid
  misc_feature (131)..(131): Xaa can be any naturally occurring amino acid
  misc_feature (203)..(203): Xaa can be any naturally occurring amino acid
  Coding DNA Sequence Number=SeqID_1946

SEQ ID NO: 9513 - protein, 239 aa, Glycine max
  Coding DNA Sequence Number=SeqID_1948
  Homolog annotation: Hit_ID=A7PRI4; Match level="QueryCoverage=67%, HitCoverage=52%, E-value=9e-22, Identity=36%"; Hit description =Chromosome chr14 scaffold_27, whole genome shotgun sequence
  Pfam annotation: Domain name=PHD; Domain location=63-112; Score=8.8; E_value=0.0012; Accession=PF00628.19; Description=PHD-finger
MNLPSSTATSTSESPDTAAGAISPETCGGCKSQDSWVIHSARLRGILRFYCTHCLLRNHPASFCPTCFAFYDSSPPHQSRRVSCNDCNSVTHIHCAGDAKSPPYRCPPCRDPDGFSFFRPIVDENGARCMDKALSEAFLCAAKIAASSMSKAVTFFRSEAERKGKDAAVAKKRAREALEDVLKLDEKAKLAVSKPSENRDQKPKQSPASNGGLKQIESSAATAQVKKQSSSVVQVKQEK

SEQ ID NO: 9514 - protein, 120 aa, Glycine max; identical to SEQ ID NO: 6080
  Coding DNA Sequence Number=SeqID_1949

SEQ ID NO: 9515 - protein, 430 aa, Glycine max
  Coding DNA Sequence Number=SeqID_1951
  Homolog annotation: Hit_ID=A5C202; Match level="QueryCoverage=87%, HitCoverage=48%, E-value=1e-128, Identity=63%"; Hit description =Putative uncharacterized protein
  Pfam annotation: Domain name=C2; Domain location=57-144; Score=45.1; E_value=2.5e-10; Accession=PF00168.20; Description=C2 domain
MDSPQSVVSPFRSSVLGEGEKHKSDVFSGNSSPLSKDIEVNGKEVVMSNVEEFLGVLDVYIHQARDIQNICIYHKQDVYAKICLTSNPETTMSTKTINGGGRNPVFNENLRIDVRTVDASLKCEIWMLSRVKNYLEDQLLGFALVPLSEVLVQNGKLEKEFSLSSTDLFHSPSGFVQLSLSYTGASPDVMAISAMPNKVATDGTVQDSDTSESLARDLDKIEFPDPKIVNEDHLMVSEYFGIRCEETQCSDSLATSDAENHSSEAGVQLVESFSACSVESVQPTKVDSPPSSVSTNGVSSPSVPANSESSDAAAAASKSPIQEQVSGTKEDKNVDAKDGESDSSCGVPIDSFPKPVVSVNIEPEPKVVQQDIVDMYMKSMQQFTESLAKMKLPMDLESEPTSSGNSTTEQKLQPSKSNNSRVFYGSRAFF

SEQ ID NO: 9516 - protein, 213 aa, Glycine max
  misc_feature (171)..(171): Xaa can be any naturally occurring amino acid
  misc_feature (183)..(183): Xaa can be any naturally occurring amino acid
  misc_feature (188)..(189): Xaa can be any naturally occurring amino acid
  misc_feature (192)..(193): Xaa can be any naturally occurring amino acid
  misc_feature (199)..(199): Xaa can be any naturally occurring amino acid
  misc_feature (203)..(204): Xaa can be any naturally occurring amino acid
  misc_feature (206)..(206): Xaa can be any naturally occurring amino acid
  misc_feature (209)..(209): Xaa can be any naturally occurring amino acid
  misc_feature (211)..(212): Xaa can be any naturally occurring amino acid
  Coding DNA Sequence Number=SeqID_1239
  Gene Ontology: Mol. function=threonine endopeptidase activity; Cellular component=proteasome core complex; Biological process =ubiquitin-dependent protein catabolic process
  Homolog annotation: Hit_ID=O81148; Match level="QueryCoverage=93%, HitCoverage=80%, E-value=7e-92, Identity=86%"; Hit description =Proteasome subunit alpha type-4
  Pfam annotation: Domain name=Proteasome; Domain location=28-212; Score=175.3; E_value=1.6e-49; Accession=PF00227.16; Description =Proteasome A-type and B-type
MSRRYDSRTTIFSPEGRLYQVEYAMEAIGNAGSAIGILSKDGVVLIGEKKVTSKLLQTSTSSEKMYKIDDHVACAVAGIMSDANILINTARVQAQRYTFMYQEPMPVEQLVQSLCDTKQGYTQFGGLRPFGVSFLFAGWDKNHGFQLYMSDPSGNYGGWKAAAVGANNQGXQSILEQITRMVXTREEXXELXXKVLSKXLAGXXWXPKXLXXG

SEQ ID NO: 9517 - protein, 102 aa, Glycine max; identical to SEQ ID NO: 8356
  misc_feature (24)..(24): Xaa can be any naturally occurring amino acid
  misc_feature (30)..(30): Xaa can be any naturally occurring amino acid
  misc_feature (48)..(48): Xaa can be any naturally occurring amino acid
  misc_feature (59)..(59): Xaa can be any naturally occurring amino acid
  misc_feature (63)..(63): Xaa can be any naturally occurring amino acid
  misc_feature (77)..(77): Xaa can be any naturally occurring amino acid
  misc_feature (81)..(81): Xaa can be any naturally occurring amino acid
  misc_feature (88)..(88): Xaa can be any naturally occurring amino acid
  misc_feature (102)..(102): Xaa can be any naturally occurring amino acid
  Coding DNA Sequence Number=SeqID_1240

SEQ ID NO: 9518 - protein, 84 aa, Glycine max
  misc_feature (29)..(29): Xaa can be any naturally occurring amino acid
  misc_feature (76)..(76): Xaa can be any naturally occurring amino acid
  Coding DNA Sequence Number=SeqID_1242
  Gene Ontology: Mol. function=peptidyl-prolyl cis-trans isomerase activity; Cellular component=endoplasmic reticulum; Biological process=protein folding
  Homolog annotation: Hit_ID=A5C2G6; Match level="QueryCoverage=90%, HitCoverage=37%, E-value=3e-24, Identity=75%"; Hit description =Peptidyl-prolyl cis-trans isomerase
  Pfam annotation: Domain name=Pro_isomerase; Domain location=1-82; Score=16.4; E_value=5.8e-10; Accession=PF00160.11; Description =Cyclophilin type peptidyl-prolyl cis-tr
VGGCFYLDVKTTAPGLLSMANATANTNDXQCFITTATTRWLDGRHVVFGKVLSGMDAVYKIEAERTQSGTPKSKVXVDSGELPL

SEQ ID NO: 9519 - protein, 142 aa, Glycine max
  misc_feature (9)..(9): Xaa can be any naturally occurring amino acid
  misc_feature (13)..(13): Xaa can be any naturally occurring amino acid
  misc_feature (29)..(29): Xaa can be any naturally occurring amino acid
  misc_feature (32)..(33): Xaa can be any naturally occurring amino acid
  misc_feature (40)..(40): Xaa can be any naturally occurring amino acid
  misc_feature (97)..(97): Xaa can be any naturally occurring amino acid
  misc_feature (112)..(112): Xaa can be any naturally occurring amino acid
  Coding DNA Sequence Number=SeqID_1243
PGPQGGQDXPRDXATAVHFEPALSDIPEXAAXXGASPPPXASSSVSDPSASSSSQPRDPAPTVHFDPNLKKPKKGRPSTATALPSDGSPPPPIRPYXKQPPQSLPPTPESEXPEASNAPPAVAEAEASSGKRVSPLRLLGFR

SEQ ID NO: 9520 - protein, 48 aa, Glycine max
  Coding DNA Sequence Number=SeqID_1245
QVPAPNYSRGRPKGGGYPSIISVKPFLAGFYFGLWFPFSFLFFRFFDP

SEQ ID NO: 9521 - protein, 182 aa, Glycine max
  misc_feature (114)..(114): Xaa can be any naturally occurring amino acid
  misc_feature (168)..(168): Xaa can be any naturally occurring amino acid
  Coding DNA Sequence Number=SeqID_1247
  Subcellular localization annotation: CTP_CleavageSite=12; ConfidenceScore=5.28e-01
PAPASASTSSARCVPRPAHPTSSCFDRLSRLLVILYTSAPLSVWCGVDTTAHQNSTSDTTNRTLYSTLSSPLHSLSLRQLRIRTYTLITSLLARARCAISAAFYARSVVMRLTXRAQRTDRLVLHASPRDTIYPLTLPHAPDCSLSRVEYNTLRSAGVACALQSHLRXLSSLHSLSITATCT

SEQ ID NO: 9522 - protein, 142 aa, Glycine max; identical to SEQ ID NO: 6527
  misc_feature (4)..(5): Xaa can be any naturally occurring amino acid
  misc_feature (112)..(112): Xaa can be any naturally occurring amino acid
  Coding DNA Sequence Number=SeqID_1249
  Subcellular localization annotation: CTP_CleavageSite=74; ConfidenceScore=5.40e-01

SEQ ID NO: 9523 - protein, 133 aa, Glycine max
  misc_feature (16)..(16): Xaa can be any naturally occurring amino acid
  misc_feature (109)..(109): Xaa can be any naturally occurring amino acid
  Coding DNA Sequence Number=SeqID_1251
RQQALRNSLFSSRSVXGSNGPDRRASAPCSPLCAPLLVHISISLYISLEHVTLPYALHPARLVHINLALVRTQEKILHPSRTHPHLRPPPRLFSGQGSRQHRSSHQKRXVVGVGFLMYSLLFQLPLPPSSVRL

SEQ ID NO: 9524 - protein, 173 aa, Glycine max
  misc_feature (2)..(2): Xaa can be any naturally occurring amino acid
  misc_feature (35)..(36): Xaa can be any naturally occurring amino acid
  misc_feature (40)..(40): Xaa can be any naturally occurring amino acid
  misc_feature (44)..(44): Xaa can be any naturally occurring amino acid
  misc_feature (50)..(51): Xaa can be any naturally occurring amino acid
  misc_feature (54)..(55): Xaa can be any naturally occurring amino acid
  misc_feature (64)..(64): Xaa can be any naturally occurring amino acid
  misc_feature (92)..(92): Xaa can be any naturally occurring amino acid
  misc_feature (95)..(95): Xaa can be any naturally occurring amino acid
  misc_feature (103)..(103): Xaa can be any naturally occurring amino acid
  misc_feature (111)..(111): Xaa can be any naturally occurring amino acid
  misc_feature (134)..(135): Xaa can be any naturally occurring amino acid
  Coding DNA Sequence Number=SeqID_1952
YXISVIVHIYIVCISTLSLLLFDVSTLVRFHCVLXXLFSXIHTXRAKMYXXRKXXRCTTRLPHXTCSRRLRQQLTSYEHLYAIHDHYSMMRXTCXHRRATHKXVHIDVRHXALPLCDASHVDLSYVYCVRRQCXXLSLHNSLHLRHTVSSDSVTCHLCESSVLYTVIYNASVV

SEQ ID NO: 9525 - protein, 109 aa, Glycine max
  misc_feature (99)..(99): Xaa can be any naturally occurring amino acid
  Coding DNA Sequence Number=SeqID_1954
  Gene Ontology: Mol. function=cysteine-type endopeptidase activity; Cellular component=endoplasmic reticulum; Biological process =proteolysis
  Homolog annotation: Hit_ID=O24323; Match level="QueryCoverage=100%, HitCoverage=23%, E-value=1e-28, Identity=56%"; Hit description =Cysteine proteinase precursor
  Pfam annotation: Domain name=Peptidase_C1; Domain location=2-109; Score=-99.7; E_value=0.00017; Accession=PF00112.13; Description =Papain family cysteine protease
DTEYNQRCHGRLMDYAFDVIIHYGGIKSDEDYPYRDVDGICNAYMKNALLHSIDDYHNVPANNEMSLKNAGANQTANDAIQRGGMKLQLYASGVFTVRXGTSLNHGVMA

SEQ ID NO: 9526 - protein, 158 aa, Glycine max
  misc_feature (7)..(7): Xaa can be any naturally occurring amino acid
  misc_feature (35)..(35): Xaa can be any naturally occurring amino acid
  misc_feature (53)..(53): Xaa can be any naturally occurring amino acid
  misc_feature (82)..(82): Xaa can be any naturally occurring amino acid
  misc_feature (98)..(98): Xaa can be any naturally occurring amino acid
  misc_feature (125)..(125): Xaa can be any naturally occurring amino acid
  misc_feature (128)..(128): Xaa can be any naturally occurring amino acid
  misc_feature (130)..(131): Xaa can be any naturally occurring amino acid
  misc_feature (136)..(136): Xaa can be any naturally occurring amino acid
  misc_feature (151)..(151): Xaa can be any naturally occurring amino acid
  misc_feature (153)..(153): Xaa can be any naturally occurring amino acid
  misc_feature (156)..(157): Xaa can be any naturally occurring amino acid
  Coding DNA Sequence Number=SeqID_1955
  Gene Ontology: Mol. function=protein binding; Cellular component =photosystem I reaction center; Biological process=photosynthesis
  Homolog annotation: Hit_ID=A5Z2K3; Match level="QueryCoverage=100%, HitCoverage=75%, E-value=2e-46, Identity=63%"; Hit description =Photosystem I subunit PsaD
  Pfam annotation: Domain name=PsaD; Domain location=71-159; Score =48.9; E_value=1.7e-11; Accession=PF02531.6; Description=PsaD
  Subcellular localization annotation: CTP_CleavageSite=56; ConfidenceScore=5.50e-01
AMATQAXLLTPPLSGLKASDRASVPWKQNSSLSFXSPNPLRGGRTIFFFAADXYPEAPAKGEAAPAPFTPPELDPNTPSPIXGGRTRGLLRKAQVEEXYVITWDLPKEQIFEMPTGRRRFMREGXNLXKXXRKEQXLGLGTRLRAKYQNQXQXYRXXP

SEQ ID NO: 9527 - protein, 100 aa, Glycine max
  misc_feature (64)..(65): Xaa can be any naturally occurring amino acid
  misc_feature (68)..(68): Xaa can be any naturally occurring amino acid
  misc_feature (94)..(94): Xaa can be any naturally occurring amino acid
  Coding DNA Sequence Number=SeqID_1956
TRERDTFISFSLLRCCCFVQVALLDLKPFFLLFSFFPLSFFPQPVRSTLLVCLYLGSESKARIXXLGXEKRFRRYKCLPMVNSVPDFFSLLQYXLLRICY

SEQ ID NO: 9528 - protein, 108 aa, Glycine max
  Coding DNA Sequence Number=SeqID_1957
HHITNPLFVFFIRYLTHFCKQFVSSRLLFCFYCCCCCCCCFVLTFSYKLHQYKIYTCLFVFFSLFIYFYYYYYFLVVCVYVCVCLFVSLNFCAKSFIFLCKTYDFVCM

SEQ ID NO: 9529 - protein, 155 aa, Glycine max
  misc_feature (23)..(23): Xaa can be any naturally occurring amino acid
  misc_feature (52)..(52): Xaa can be any naturally occurring amino acid
  misc_feature (62)..(62): Xaa can be any naturally occurring amino acid
  misc_feature (65)..(65): Xaa can be any naturally occurring amino acid
  misc_feature (85)..(85): Xaa can be any naturally occurring amino acid
  misc_feature (88)..(89): Xaa can be any naturally occurring amino acid
  misc_feature (92)..(92): Xaa can be any naturally occurring amino acid
  misc_feature (131)..(131): Xaa can be any naturally occurring amino acid
  misc_feature (144)..(144): Xaa can be any naturally occurring amino acid
  misc_feature (151)..(153): Xaa can be any naturally occurring amino acid
  Coding DNA Sequence Number=SeqID_1959
TKQRLHTQLQRVDGAVARTAHYXLEQQYIVRAAVVVTDIMFVCVVSAAIRAXVGDSSDVCLXTSXTYTSKSQARIELRESVNEIXKKXXHYXPHPVTKHGRGRGCVVLFLFSPLSYYHLLLALSCAPRCSXHSPDSHLNDTQQXATRRCLXXXCI

SEQ ID NO: 9530 - protein, 146 aa, Glycine max
  misc_feature (115)..(115): Xaa can be any naturally occurring amino acid
  misc_feature (118)..(119): Xaa can be any naturally occurring amino acid
  Coding DNA Sequence Number=SeqID_1961
  Gene Ontology: Mol. function=nucleic acid binding; Cellular component= ribonucleoprotein complex; Biological process=mRNA processing
  Homolog annotation: Hit_ID=A7PT43; Match level="QueryCoverage=61%, HitCoverage=26%, E-value=3e-11, Identity=49%"; Hit description =Chromosome chr8 scaffold_29, whole genome shotgun sequence
  Subcellular localization annotation: CTP_CleavageSite=66; ConfidenceScore=5.91e-01
MSTSAASLALPTLTLRTRQPLCSPQCFSSSLSLTPNSKPISISAVFLKTTLSSSSPLSLSSRFVPRVSVLEQEEDTFGDGDGPSFSRDLKLFVGNLPFSVDSARLAELFESAGNXEVXXGSSILSYCKGRPCPCGFQILYRPLNFN

SEQ ID NO: 9531 - protein, 139 aa, Glycine max
  misc_feature (27)..(27): Xaa can be any naturally occurring amino acid
  misc_feature (57)..(57): Xaa can be any naturally occurring amino acid
  misc_feature (95)..(96): Xaa can be any naturally occurring amino acid
  misc_feature (127)..(127): Xaa can be any naturally occurring amino acid
  Coding DNA Sequence Number=SeqID_1962
KEKELAASAQNEAKNEEHEQEIKELEXQLGELKSELDGKSKALEKARKAYEDLSLKXQEERVKFGEDLELNQKEIQELRSVIDELKEDVDNAERXXEDLEMERDELQKNVDQLERQLREVERKLKEXEKVGAKEKKKKK

SEQ ID NO: 9532 - protein, 214 aa, Glycine max; identical to SEQ ID NO: 8257
  misc_feature (106)..(106): Xaa can be any naturally occurring amino acid
  misc_feature (152)..(152): Xaa can be any naturally occurring amino acid
  Coding DNA Sequence Number=SeqID_1963
  Subcellular localization annotation: CTP_CleavageSite=37; ConfidenceScore=5.66e-01

SEQ ID NO: 9533 - protein, 113 aa, Glycine max
  misc_feature (9)..(9): Xaa can be any naturally occurring amino acid
  misc_feature (37)..(37): Xaa can be any naturally occurring amino acid
  Coding DNA Sequence Number=SeqID_1965
LSKQIRASXKTEITIRRTSHLHIEDGCVVGCPPQPRXLNSGYLYREILHLSRRHRRVTPTPRLHLRHHDASTDAHTTSASPEHTTIKILHYSSPIGVSIRERSEHHTKTAEAK

SEQ ID NO: 9534 - protein, 151 aa, Glycine max
  misc_feature (35)..(35): Xaa can be any naturally occurring amino acid
  Coding DNA Sequence Number=SeqID_1967
RLHTLLAHVLSNLSPARLRHPLSHNDGSSSIACEXLFFSSFLLYLFYRPLLFRHSPLIPSPPVSSFSMSTLRLCLSITSSATPVRHFYLTSQPLPSLLLSSLLSYPLLLSTWCVILIHYIFYSMGFITHSLMAHHLSSTRALIWRGTHKDK

SEQ ID NO: 9535 - protein, 386 aa, Glycine max
  Coding DNA Sequence Number=SeqID_1969
  Gene Ontology: Mol. function=protein-tyrosine kinase activity; Cellular component=chloroplast; Biological process=protein amino acid phosphorylation
  Homolog annotation: Hit_ID=A7P4V1; Match level="QueryCoverage=97%, HitCoverage=85%, E-value=1e-156, Identity=72%"; Hit description =Chromosome chr4 scaffold_6, whole genome shotgun sequence
  Pfam annotation: Domain name=Pkinase; Domain location=81-358; Score =118.4; E_value=2.2e-32; Accession=PF00069.15; Description=Protein kinase domain
  Pfam annotation: Domain name=Pkinase_Tyr; Domain location=81-358; Score=139.6; E_value=8.8e-39; Accession=PF07714.7; Description =Protein tyrosine kinase
  Pfam module annotation: Pfam domain module=Pkinase::Pkinase_Tyr; Domain location=81-358::81-358
MSTKKNTWKSVILILSCYKVKCSLEESEKQVLKQGSFQRLCLSDVSNSSSTQAIEDISISFAGSKLYAFTLEELREATNSFSWSNMLGEGGFGPVYKGFVDDKLRSGLKAQTVAVKRLDLDGLQGHREWLAEIIFLGQLRHPHLVKLIGYCYEDEHRLLMYEYMPRGSLENQLFRKYSAAMPWSTRMKIALGAAKGLTFLHEADKPVIYRDFKASNILLDSDFTAKLSDFGLAKDGPEGEDTHVTTRIMGTQGYAAPEYIMTGHLTTKSDVYSYGVVLLELLTGRRVVDKSQSNGRKSLVEWARPLLRDQKKVYSIIDRRLEGQFPMKGAMKVAMLAFKCLSHHPNARPSMSDVVKVLEPLQDYDDVFIGPFVYVAVSENGDKHKI

SEQ ID NO: 9536 - protein, 146 aa, Glycine max
  misc_feature (11)..(11): Xaa can be any naturally occurring amino acid
  misc_feature (104)..(104): Xaa can be any naturally occurring amino acid
  Coding DNA Sequence Number=SeqID_1970
  Subcellular localization annotation: CTP_CleavageSite=56; ConfidenceScore=5.64e-01
PRPFPPSIPLXPLLSGSNSSLRARAIIVAPPSLTRPPASSACGGTSWRFVVFVHVRSEHRSKAGSCVDGVVDLFFLRPSSTLSSPTKHASWDGPAALHRLRPPXSPTTIVPASPAATKPLAGLLEPLDPETDAALVIDYVDDNPPP

SEQ ID NO: 9537 - protein, 160 aa, Glycine max
  Coding DNA Sequence Number=SeqID_1972
  Pfam annotation: Domain name=TPR_1; Domain location=104-137; Score =27.0; E_value=7.1e-05; Accession=PF00515.18; Description =Tetratricopeptide repeat
INKQTHQLYLSLKLNTMQDRPIKAAHNYRNEEEDNYDDYDREVEEEKGDDEEKGPSLNFQEDEGVVGGQEPELEKEVENYMHRGEYQDAYNSLKRLEKLDNTRPETYSNMAKCQTELKLFIQAIKSLQCAVDLDPKYSSSNSSKKHYKDNKVILQNSNDI

SEQ ID NO: 9538 - protein, 141 aa, Glycine max
  misc_feature (9)..(9): Xaa can be any naturally occurring amino acid
  misc_feature (18)..(18): Xaa can be any naturally occurring amino acid
  misc_feature (24)..(24): Xaa can be any naturally occurring amino acid
  misc_feature (26)..(26): Xaa can be any naturally occurring amino acid
  misc_feature (28)..(28): Xaa can be any naturally occurring amino acid
  misc_feature (33)..(33): Xaa can be any naturally occurring amino acid
  misc_feature (36)..(36): Xaa can be any naturally occurring amino acid
  misc_feature (44)..(44): Xaa can be any naturally occurring amino acid
  misc_feature (47)..(47): Xaa can be any naturally occurring amino acid
  misc_feature (57)..(58): Xaa can be any naturally occurring amino acid
  misc_feature (68)..(68): Xaa can be any naturally occurring amino acid
  misc_feature (86)..(86): Xaa can be any naturally occurring amino acid
  misc_feature (97)..(97): Xaa can be any naturally occurring amino acid
  misc_feature (104)..(104): Xaa can be any naturally occurring amino acid
  misc_feature (106)..(106): Xaa can be any naturally occurring amino acid
  misc_feature (118)..(118): Xaa can be any naturally occurring amino acid
  misc_feature (121)..(122): Xaa can be any naturally occurring amino acid
  Coding DNA Sequence Number=SeqID_1974
DRRHVTSAXSLICDVALXELHTAXIXLXACSCXALXTTRTSLLXAAXAPTSCCLDVXXCVLLMTVADXARRCSCALAAVTVCQTRXACVVCCISLLXAAIHSHXIXQATVQRGRASSXSNXXHRASQISSLHTTQQPTSDT

SEQ ID NO: 9539 - protein, 257 aa, Glycine max
  misc_feature (9)..(9): Xaa can be any naturally occurring amino acid
  misc_feature (18)..(18): Xaa can be any naturally occurring amino acid
  misc_feature (22)..(22): Xaa can be any naturally occurring amino acid
  misc_feature (24)..(24): Xaa can be any naturally occurring amino acid
  misc_feature (27)..(27): Xaa can be any naturally occurring amino acid
  misc_feature (40)..(40): Xaa can be any naturally occurring amino acid
  misc_feature (48)..(48): Xaa can be any naturally occurring amino acid
  misc_feature (55)..(55): Xaa can be any naturally occurring amino acid
  misc_feature (66)..(66): Xaa can be any naturally occurring amino acid
  misc_feature (82)..(82): Xaa can be any naturally occurring amino acid
  misc_feature (111)..(111): Xaa can be any naturally occurring amino acid
  misc_feature (116)..(116): Xaa can be any naturally occurring amino acid
  misc_feature (122)..(122): Xaa can be any naturally occurring amino acid
  Coding DNA Sequence Number=SeqID_1976
  Subcellular localization annotation: CTP_CleavageSite=62; ConfidenceScore=5.19e-01
ADVVSRWTXVFVVSRHIXRRAXHXAHXHIFSSRRRTARTXPPPSALLXFYSTVYXCVLSLSRSTAXASYAPLCIHILSSCCXTRAVTLIIFRPATFSLFYHTLTRRARTHXPRRYXYRRQVXSLPYSCSTLVFCISLHVSTSSVCLTSYHALCVWLHHVCVCESEIVLRRRTSPLVVELAYLLSGLSHPTIFSRCALLLHTTHLVSFILLIHAHLVPLHMRCALAYFARRVFVIASPTRVYFLPPSSPLFQYSGANI

SEQ ID NO: 9540 - protein, 118 aa, Glycine max
  Coding DNA Sequence Number=SeqID_1978
  Gene Ontology: Biological process=response to desiccation
  Homolog annotation: Hit_ID=O80576; Match level="QueryCoverage=100%, HitCoverage=40%, E-value=1e-45, Identity=75%"; Hit description =Similar to late embryogenesis abundant proteins
  Pfam annotation: Domain name=LEA_2; Domain location=26-118; Score =89.4; E_value=1.2e-23; Accession=PF03168.4; Description=Late embryogenesis abundant protein
MSTSENKVEIVDRGHKEEEEKEEGKGGFLDKVKDFIHDIGEKIEGTIGFGKPTADVSAIHIPKINLERADIVVDVLVKNPNPVPIPLIDIDYLVESDGRKLVSGLIPDAGTIKAHGEE

SEQ ID NO: 9541 - protein, 161 aa, Glycine max
  Coding DNA Sequence Number=SeqID_1979
  Homolog annotation: Hit_ID=A3B8M5; Match level="QueryCoverage=43%, HitCoverage=24%, E-value=8e-09, Identity=47%"; Hit description =Putative uncharacterized protein
  Pfam annotation: Domain name=DUF569; Domain location=1-125; Score= -33.2; E_value=0.001; Accession=PF04601.4; Description=Protein of unknown function (DUF569)
MDFFPDRAFVRLRNRAYGTYLYADDDGARVILKPQRGSLQTAWQVHRVWRHDRIYILLHSAAYGRYLAVSRVTIEGRHPSPCEPHGSRASYDTPKAGRTYLLGRAWPMVRQTHHRPSRLPKAFSHGLSPAAQPTPKKTTPFPIRKNEHSRAGNPRAGRHLY

SEQ ID NO: 9542 - protein, 108 aa, Glycine max
  Coding DNA Sequence Number=SeqID_1980
LPEDFSLHRPISIMEDERSTQSYQGGEAAEQVEVTDRGLLGNLLGKKKAEGGQRRRRRRSWSPAWEKVSVGTARGQEGGPRRSPLTRPHLPLPHTFRHTPSPLRSRRG

SEQ ID NO: 9543 - protein, 150 aa, Glycine max; identical to SEQ ID NO: 7918
  misc_feature (71)..(71): Xaa can be any naturally occurring amino acid
  misc_feature (133)..(134): Xaa can be any naturally occurring amino acid
  misc_feature (136)..(137): Xaa can be any naturally occurring amino acid
  misc_feature (149)..(149): Xaa can be any naturally occurring amino acid
  Coding DNA Sequence Number=SeqID_1981
  Subcellular localization annotation: CTP_CleavageSite=58; ConfidenceScore=5.05e-01

SEQ ID NO: 9544 - protein, 97 aa, Glycine max
  misc_feature (6)..(6): Xaa can be any naturally occurring amino acid
  misc_feature (28)..(28): Xaa can be any naturally occurring amino acid
  misc_feature (95)..(95): Xaa can be any naturally occurring amino acid
  Coding DNA Sequence Number=SeqID_1983
  Subcellular localization annotation: CTP_CleavageSite=36; ConfidenceScore=5.51e-01
CPLIPXTSQHQVKSLTRLVVVNTALTNXDRRGSCVRSEVARRTKNEVNPKRMVGCRMTVQDVTIGPWSDCKLLRDCFVQLRVNAEGELVERRAPXES

SEQ ID NO: 9545 - protein, 142 aa, Glycine max
  Coding DNA Sequence Number=SeqID_1985
PHCHGQLHTYLDKYRTVLPQRADLQLRSINNIHHELALITTVSLTPKSLHNKHRLQRYAANPISPSHPPDRPTTTLYKYPKHHLRTQRLDISTRTTTPPCTLIPHSPNPTSARNCTPYCASANNHKAPPLVPDTTVSNHPHL

SEQ ID NO: 9546 - protein, 138 aa, Glycine max
  misc_feature (2)..(2): Xaa can be any naturally occurring amino acid
  Coding DNA Sequence Number=SeqID_1987
  Gene Ontology: Mol. function=protein binding
  Homolog annotation: Hit_ID=A0CUR2; Match level="QueryCoverage=88%, HitCoverage=23%, E-value=5e-14, Identity=32%"; Hit description =Chromosome undetermined scaffold_28, whole genome shotgun sequence
LXSGYKEADDSLVKKDEGFKHLVEFRMSSTKINSEGAVIKFCNACPNLEILDMNGFVPVGETGINMICKSLSKLKICLINFTDKISDPYLVELRQTYPDVKFVRTIIAPSNPADNELRVPFPRIQQGKKKKKKGKKKK

SEQ ID NO: 9547 - protein, 89 aa, Glycine max; identical to SEQ ID NO: 7933
  misc_feature (3)..(3): Xaa can be any naturally occurring amino acid
  misc_feature (6)..(7): Xaa can be any naturally occurring amino acid
  misc_feature (14)..(14): Xaa can be any naturally occurring amino acid
  misc_feature (27)..(27): Xaa can be any naturally occurring amino acid
  misc_feature (29)..(29): Xaa can be any naturally occurring amino acid
  misc_feature (34)..(34): Xaa can be any naturally occurring amino acid
  misc_feature (48)..(48): Xaa can be any naturally occurring amino acid
  misc_feature (57)..(58): Xaa can be any naturally occurring amino acid
  misc_feature (83)..(85): Xaa can be any naturally occurring amino acid
  misc_feature (87)..(87): Xaa can be any naturally occurring amino acid
  Coding DNA Sequence Number=SeqID_1988

SEQ ID NO: 9548 - protein, 167 aa, Glycine max
  misc_feature (117)..(117): Xaa can be any naturally occurring amino acid
  Coding DNA Sequence Number=SeqID_1990
  Homolog annotation: Hit_ID=A7P0P0; Match level="QueryCoverage=83%, HitCoverage=18%, E-value=1e-32, Identity=53%"; Hit description =Chromosome chr19 scaffold_4, whole genome shotgun sequence
  Subcellular localization annotation: CTP_CleavageSite=45; ConfidenceScore=5.40e-01
LSGSSAQRNDSGNASAAAAHARMSVGAGGFKQGPNNSSSPKNNISADSLYNSARELHQHISRIRGEFPSGGMPFQPFQAVAPQPIHTGAVSQFPNRPMVFPQLASADQSRFQMQPPXGGLSPHSQSRQKQETLPPDLNIDFESPGSPVKQSPGVLVDSQQPDLALQL

SEQ ID NO: 9549 - protein, 101 aa, Glycine max
  Coding DNA Sequence Number=SeqID_1991
  Gene Ontology: Mol. function=carbonate dehydratase activity; Cellular component=extracellular region; Biological process=one-carbon compound metabolic process
  Homolog annotation: Hit_ID=A2YW42; Match level="QueryCoverage=77%, HitCoverage=28%, E-value=8e-18, Identity=48%"; Hit description =Putative uncharacterized protein
ERITDRRKGYEEEIDYEVDPRRPVRGSDTFYRYTGSFTTPPCTEGIAWAVATKVRHVSRHQVELLKDAVHDHARRNARPLQEANGRGIALYDSWPRSGPGN

SEQ ID NO: 9550 - protein, 182 aa, Glycine max
  misc_feature (58)..(58): Xaa can be any naturally occurring amino acid
  misc_feature (69)..(69): Xaa can be any naturally occurring amino acid
  misc_feature (75)..(77): Xaa can be any naturally occurring amino acid
  misc_feature (79)..(80): Xaa can be any naturally occurring amino acid
  misc_feature (83)..(83): Xaa can be any naturally occurring amino acid
  misc_feature (85)..(85): Xaa can be any naturally occurring amino acid
  misc_feature (90)..(90): Xaa can be any naturally occurring amino acid
  misc_feature (104)..(104): Xaa can be any naturally occurring amino acid
  misc_feature (110)..(110): Xaa can be any naturally occurring amino acid
  misc_feature (128)..(128): Xaa can be any naturally occurring amino acid
  misc_feature (132)..(132): Xaa can be any naturally occurring amino acid
  Coding DNA Sequence Number=SeqID_1992
  Gene Ontology: Mol. function=carbohydrate binding; Biological process= carbohydrate metabolic process
  Homolog annotation: Hit_ID=A7PUT1; Match level="QueryCoverage=59%, HitCoverage=39%, E-value=2e-31, Identity=63%"; Hit description =Chromosome chr4 scaffold_32, whole genome shotgun sequence
  Subcellular localization annotation: CTP_CleavageSite=41; ConfidenceScore=5.54e-01
MAMVSMAFCVSTATFPNLNRCRGVAYASLSNKASTTSLGVRVTEGEGNLPKLVLTSPXGSEAEIYLFGXCITSWXXXSXXDLXLXRPDAXFMGNNPISGVFPIXFPQFGXWSNSQHGFCTKMNWTGVXSENXEGNPGGTLELKDVPNSGKGGFPLPGLSRAPLREKLWAWAYGKKPKKNFPF

SEQ ID NO: 9551 - protein, 192 aa, Glycine max; identical to SEQ ID NO: 6458
  misc_feature (11)..(11): Xaa can be any naturally occurring amino acid
  misc_feature (13)..(13): Xaa can be any naturally occurring amino acid
  misc_feature (15)..(16): Xaa can be any naturally occurring amino acid
  misc_feature (19)..(20): Xaa can be any naturally occurring amino acid
  misc_feature (26)..(26): Xaa can be any naturally occurring amino acid
  misc_feature (30)..(30): Xaa can be any naturally occurring amino acid
  misc_feature (33)..(33): Xaa can be any naturally occurring amino acid
  misc_feature (37)..(37): Xaa can be any naturally occurring amino acid
  misc_feature (70)..(70): Xaa can be any naturally occurring amino acid
  misc_feature (99)..(99): Xaa can be any naturally occurring amino acid
  misc_feature (117)..(118): Xaa can be any naturally occurring amino acid
  misc_feature (161)..(161): Xaa can be any naturally occurring amino acid
  misc_feature (163)..(163): Xaa can be any naturally occurring amino acid
  misc_feature (170)..(170): Xaa can be any naturally occurring amino acid
  misc_feature (178)..(178): Xaa can be any naturally occurring amino acid
  misc_feature (184)..(184): Xaa can be any naturally occurring amino acid
  Coding DNA Sequence Number=SeqID_1993

SEQ ID NO: 9552 - protein, 118 aa, Glycine max; identical to SEQ ID NO: 6460
  misc_feature (15)..(15): Xaa can be any naturally occurring amino acid
  misc_feature (18)..(18): Xaa can be any naturally occurring amino acid
  misc_feature (38)..(38): Xaa can be any naturally occurring amino acid
  misc_feature (42)..(42): Xaa can be any naturally occurring amino acid
  misc_feature (74)..(74): Xaa can be any naturally occurring amino acid
  misc_feature (96)..(96): Xaa can be any naturally occurring amino acid
  misc_feature (98)..(98): Xaa can be any naturally occurring amino acid
  misc_feature (106)..(106): Xaa can be any naturally occurring amino acid
  Coding DNA Sequence Number=SeqID_1995

SEQ ID NO: 9553 - protein, 161 aa, Glycine max
  misc_feature (121)..(121): Xaa can be any naturally occurring amino acid
  misc_feature (153)..(153): Xaa can be any naturally occurring amino acid
  Coding DNA Sequence Number=SeqID_1997
  Gene Ontology: Mol. function=receptor binding; Cellular component =cell soma; Biological process=positive regulation of conjugation with cellular fusion
  Homolog annotation: Hit_ID=Q39836; Match level="QueryCoverage=99%, HitCoverage=49%, E-value=1e-56, Identity=70%"; Hit description =Guanine nucleotide-binding protein subunit beta-like protein
  Pfam annotation: Domain name=WD40; Domain location=4-43; Score=8.5; E_ value=2.8; Accession=PF00400.22; Description=WD domain, G-beta repeat
  Pfam annotation: Domain name=WD40; Domain location=52-90; Score=30.9; E_value=4.6e-06; Accession=PF00400.22; Description=WD domain, G-beta repeat
  Pfam annotation: Domain name=WD40; Domain location=94-132; Score =10.8; E_value=1.5; Accession=PF00400.22; Description=WD domain, G -beta repeat
  Pfam module annotation: Pfam domain module=WD40::WD40::WD40; Domain location=4-43::52-90::94-132
EQGLMVRGIMRAHSDFYTVIATPIDNSDMIVTEWCDKSIILWHLNKEDKNYGVHRRRLTGHSHFVHDVVLSFYGHVVLSCFWDGELRLWDLMAGTSVRRFVGHTMDVICVGCCIDNRMIVXAYSERSIYVRNTLCDCKCTIQDGDADSDWCSXVRMSPSTL

SEQ ID NO: 9554 - protein, 174 aa, Glycine max
  misc_feature (46)..(46): Xaa can be any naturally occurring amino acid
  misc_feature (116)..(116): Xaa can be any naturally occurring amino acid
  Coding DNA Sequence Number=SeqID_1998
SATIMSIELQLVRSSFANVSIFPTMRRCVIHQCTLYPPSRTTCIPXNWLVWWPITPKRSTSMDMHMAPPPFPSSSSSSSPSASCSSNPFFSFSQIRGVEGGGREGRRPGGSGEEGXGGVGGEEAARRRERRSGRPGCGGCQAAVGKEEREARVWRRPGGGGEGGEGGAGGEEAA

SEQ ID NO: 9555 - protein, 184 aa, Glycine max
  misc_feature (35)..(35): Xaa can be any naturally occurring amino acid
  misc_feature (47)..(47): Xaa can be any naturally occurring amino acid
  misc_feature (120)..(120): Xaa can be any naturally occurring amino acid
  misc_feature (124)..(124): Xaa can be any naturally occurring amino acid
  Coding DNA Sequence Number=SeqID_1999
  Gene Ontology: Mol. function=protein binding; Cellular component =nucleus; Biological process=red or far red light signaling pathway
  Homolog annotation: Hit_ID=A5Y6J2; Match level="QueryCoverage=100%, HitCoverage=15%, E-value=3e-47, Identity=62%"; Hit description=LATE BLOOMER 1
NWKLMNHGPVAAYDSYVLAAHCALACELQLFPLIXSRGNTYLPYNNXAQIYAYPVRLYGSSHYLLTGLHSPLRDTHTFLPILEALSSLKPSSVVTHCSDSSYEIFVTAIVAVHVSDLFRXDKLXIHALSVLISCILDNEILSTASSSYNLLAIHSIPVASIWFNAQPLEATLIHAPIRKIPCVC

SEQ ID NO: 9556 - protein, 276 aa, Glycine max
  Coding DNA Sequence Number=SeqID_2000
LNMKSFLATTLLVLFLAHSTLAQWEDITEESSETTDRWVLDSLQDLGASYVLQKGVFESTRAPFPADYYFMDQVEKIERRNTSTVSYYRFVGRFIEPTETDGGRGPSAVRVNFTVSYRSSNHNFIVTSYNYRTYSNGYETEQDEAEEEYESDLGSVLNYTVSDLRTLNNGTSEFTPLLNNATDYIIAEAIKEGDLPDSEYNITYVYGAESSEDAMYNDPEIHPNMKFLVKFVNSEGNYFLIEIRANYSTDEEGNHQVTRNPEYQVLINRIVTPGAL

SEQ ID NO: 9557 - protein, 97 aa, Glycine max; identical to SEQ ID NO: 6463
  misc_feature (10)..(10): Xaa can be any naturally occurring amino acid
  misc_feature (33)..(33): Xaa can be any naturally occurring amino acid
  misc_feature (77)..(77): Xaa can be any naturally occurring amino acid
  Coding DNA Sequence Number=SeqID_2002

SEQ ID NO: 9558 - protein, 111 aa, Glycine max
  misc_feature (90)..(90): Xaa can be any naturally occurring amino acid
  Coding DNA Sequence Number=SeqID_2004
TMDFDVSDANPSQWLLKSRCGAMNLGSDKLDDIVDLVQAEHGFQSVRHESLVTVIQIVEVMKLVQIYCRESGAASVKLMTDGFGADLVWXRWRGRRRSQQMRNRSREEGRG

SEQ ID NO: 9559 - protein, 104 aa, Glycine max; identical to SEQ ID NO: 7964
  Coding DNA Sequence Number=SeqID_2005

SEQ ID NO: 9560 - protein, 117 aa, Glycine max
  misc_feature (19)..(19): Xaa can be any naturally occurring amino acid
  misc_feature (51)..(51): Xaa can be any naturally occurring amino acid
  misc_feature (62)..(62): Xaa can be any naturally occurring amino acid
  misc_feature (71)..(71): Xaa can be any naturally occurring amino acid
  Coding DNA Sequence Number=SeqID_2007
KCSRTSTCLRSILVLLSGXCYSEPHAVARHSVSIDSSGAPPLSTAVLLICXSLECISLDIVXWPSHTRTHXYATVAERGLVRAHRLTLTRVWVRSQSGDQESDYARHTSFASRVWCH

SEQ ID NO: 9561 - protein, 166 aa, Glycine max
  Coding DNA Sequence Number=SeqID_2009
  Gene Ontology: Mol. function=phosphotransferase activity, alcohol group as acceptor; Cellular component=cytoplasm; Biological process =isoprenoid biosynthetic process
  Homolog annotation: Hit_ID=Q2HTL9; Match level="QueryCoverage=99%, HitCoverage=42%, E-value=1e-49, Identity=63%"; Hit description =Mevalonate and galactokinase
  Pfam annotation: Domain name=GHMP_kinases_N; Domain location=46-127; Score=55.5; E_value=1.8e-13; Accession=PF00288.16; Description=GHMP kinases N terminal domain
CSVENAKAIAALVQDLNIPEANFGLASGVSAFLWLYSSIQGFKPATVLVTSELPLGSGLGSSASFCVALAAALLAYTDSVSFHVNHQGWLSFGEKDLELVNQWAFEGEKIIHGKPFGIYNTSSAFGNIISLNTGDYIHMNLYGPLYMLISITNFGMNTTALVACVG

SEQ ID NO: 9562 - protein, 183 aa, Glycine max
  misc_feature (76)..(76): Xaa can be any naturally occurring amino acid
  misc_feature (80)..(80): Xaa can be any naturally occurring amino acid
  misc_feature (82)..(85): Xaa can be any naturally occurring amino acid
  misc_feature (87)..(88): Xaa can be any naturally occurring amino acid
  misc_feature (90)..(90): Xaa can be any naturally occurring amino acid
  misc_feature (97)..(97): Xaa can be any naturally occurring amino acid
  misc_feature (120)..(120): Xaa can be any naturally occurring amino acid
  Coding DNA Sequence Number=SeqID_2010
  Gene Ontology: Mol. function=calcium-dependent phospholipid binding; Cellular component=cytoplasm
  Homolog annotation: Hit_ID=O65848; Match level="QueryCoverage=87%, HitCoverage=48%, E-value=1e-49, Identity=65%"; Hit description =Annexin
  Pfam annotation: Domain name=Annexin; Domain location=113-178; Score =29.8; E_value=9.9e-06; Accession=PF00191.10; Description=Annexin
  Pfam annotation: Domain name=Annexin; Domain location=30-103; Score =1.0; E_value=0.037; Accession=PF00191.10; Description=Annexin
  Pfam module annotation: Pfam domain module=Annexin::Annexin; Domain location=113-178::30-103
LVQDRERPPFFFFPQIGPLVLVINPELAQTEAEILHDPVKEKKGSYEETIRVLTTRCRTQLVATFNRYREIHGTSXLLKXKXXXXLXXNXEGSDEFXRALYTAIRGIRLPIKHSEKVVRXAIKKVAPDPDALPRAVVSRAEKPFKIISQVSSKRNSVLLEHAIAKETSGDYKKFLLPLLGKED

SEQ ID NO: 9563 - protein, 93 aa, Glycine max
  misc_feature (4)..(4): Xaa can be any naturally occurring amino acid
  Coding DNA Sequence Number=SeqID_2011
QAAXPRRCVMPKRIARSASTTLDTYYLIYVCIRSISDMHDARCILQISCAIVAWRIVALLTPFLSMRYDVSSYSTTLYAIIDNYTRQSDPDAL

SEQ ID NO: 9564 - protein, 170 aa, Glycine max
  misc_feature (13)..(13): Xaa can be any naturally occurring amino acid
  misc_feature (38)..(38): Xaa can be any naturally occurring amino acid
  Coding DNA Sequence Number=SeqID_2013
  Gene Ontology: Mol. function=chlorophyll binding; Cellular component =chloroplast; Biological process=photosynthesis, light harvesting
  Homolog annotation: Hit_ID=Q9XQB6; Match level="QueryCoverage=96%, HitCoverage=63%, E-value=3e-62, Identity=68%"; Hit description =Chlorophyll a/b-binding protein CP24
  Pfam annotation: Domain name=Chloroa_b-bind; Domain location=19-160; Score=107.1; E_value=5.3e-29; Accession=PF00504.12; Description =Chlorophyll A-B binding protein
AAAPKKTWIPAVXCGGSLIYPKWLDGSLPEDYGFDPLXLGKDPVFLKRYRQSELIHGRRAMAALVGIFIGQAWSGVPWLDAGAYPNAIAPISLGSLLCTHLLLMWWVESKTWVDFFNPDSQSVDCATPWSRTAHIFGNTTVEQGFPGRKFSDPLRFAGAIIDGVIMLHAH

SEQ ID NO: 9565 - protein, 126 aa, Glycine max
  misc_feature (4)..(5): Xaa can be any naturally occurring amino acid
  misc_feature (25)..(25): Xaa can be any naturally occurring amino acid
  misc_feature (31)..(31): Xaa can be any naturally occurring amino acid
  misc_feature (35)..(35): Xaa can be any naturally occurring amino acid
  misc_feature (60)..(61): Xaa can be any naturally occurring amino acid
  misc_feature (73)..(73): Xaa can be any naturally occurring amino acid
  misc_feature (75)..(76): Xaa can be any naturally occurring amino acid
  misc_feature (94)..(94): Xaa can be any naturally occurring amino acid
  misc_feature (106)..(106): Xaa can be any naturally occurring amino acid
  misc_feature (118)..(118): Xaa can be any naturally occurring amino acid
  misc_feature (120)..(120): Xaa can be any naturally occurring amino acid
  misc_feature (124)..(124): Xaa can be any naturally occurring amino acid
  misc_feature (126)..(126): Xaa can be any naturally occurring amino acid
  Coding DNA Sequence Number=SeqID_2014
  Subcellular localization annotation: CTP_CleavageSite=37; ConfidenceScore=5.26e-01
VVSXXVFATHELIQLLTKIALTMSXRSRRAXLGRXVSSRTRRASRLVYRSVLCIVISFHXXVVRDTHKYIHIXTXXAPLPTRTRAADGRSLTSXFVRRGLSSSSAXVVEWSLSLPLFXLXRVRXVX

SEQ ID NO: 9566 - protein, 101 aa, Glycine max; identical to SEQ ID NO: 6632
  misc_feature (34)..(34): Xaa can be any naturally occurring amino acid
  misc_feature (39)..(39): Xaa can be any naturally occurring amino acid
  misc_feature (74)..(74): Xaa can be any naturally occurring amino acid
  misc_feature (94)..(94): Xaa can be any naturally occurring amino acid
  Coding DNA Sequence Number=SeqID_2016

SEQ ID NO: 9567 - protein, 93 aa, Glycine max
  misc_feature (35)..(35): Xaa can be any naturally occurring amino acid
  misc_feature (46)..(46): Xaa can be any naturally occurring amino acid
  misc_feature (52)..(52): Xaa can be any naturally occurring amino acid
  misc_feature (82)..(82): Xaa can be any naturally occurring amino acid
  Coding DNA Sequence Number=SeqID_2017
YDYSVDRVSLVISRSHRNLYQSRSHACVLISCSLXEYTLPGVAYGXVISLSXHYSLHVLGVLKSVAHHIILPPQQTTYQADXHLRRTGLILAL

SEQ ID NO: 9568 - protein, 175 aa, Glycine max
  misc_feature (2)..(2): Xaa can be any naturally occurring amino acid
  Coding DNA Sequence Number=SeqID_2019
  Subcellular localization annotation: CTP_CleavageSite=36; ConfidenceScore=5.09e-01
LXSFNPTPTNKQLAQNNEKKVVNSELNLEQSKKQVSSTSQASSHRYQSPDLQKRGFGNGQNQSGSVPVLPNMMFFKSAERPVSVASNNANPRDYSSTSKEKTNKLLESTYQPFDIRSMEVFWEKILQDDFESKGRKADERDHHSSQYNEDYECSQYKFDFTERNKLWLDKKKKKK

SEQ ID NO: 9569 - protein, 149 aa, Glycine max
  Coding DNA Sequence Number=SeqID_2021
  Subcellular localization annotation: CTP_CleavageSite=40; ConfidenceScore=5.21e-01
LYSAQRNFPSKKKVTLSLSLSLTHLLTSTFPNFETNQLATMSHLNGAYYGPAVPPPKSYHRPSHGGGGGRDGCCCGCLSCFCGCIFDCILGLICKILTTIIIILAVLAFLFWFIVRPNVIKFHVTDASLTRFDYTTNNTLHYDLTLNVS

SEQ ID NO: 9570 - protein, 118 aa, Glycine max
  misc_feature (8)..(9): Xaa can be any naturally occurring amino acid
  misc_feature (73)..(73): Xaa can be any naturally occurring amino acid
  misc_feature (106)..(106): Xaa can be any naturally occurring amino acid
  Coding DNA Sequence Number=SeqID_2023
  Gene Ontology: Mol. function=protein disulfide oxidoreductase activity; Cellular component=extracellular region; Biological process=cell redox homeostasis
  Homolog annotation: Hit_ID=Q0DAE4; Match level="QueryCoverage=74%, HitCoverage=64%, E-value=1e-38, Identity=86%"; Hit description =Glutaredoxin-C8 precursor
  Pfam annotation: Domain name=Glutaredoxin; Domain location=44-108; Score=91.5; E_value=2.6e-24; Accession=PF00462.14; Description =Glutaredoxin
  Subcellular localization annotation: CTP_CleavageSite=12; ConfidenceScore=5.24e-01
MASTTFRXXGVAAAAAAFIALAAFGSASASKTAFVKSTVKAHDVVIFSKSYCPYCKRAKAVFKELELKKDPYXVELDQREDGGDIQDALSDMVGRRTVPQVFIRGXHLGGSDDIVDAY

SEQ ID NO: 9571 - protein, 139 aa, Glycine max
  misc_feature (7)..(7): Xaa can be any naturally occurring amino acid
  Coding DNA Sequence Number=SeqID_2024
TVTAVHXNKHGSEKFDIVMEQPKSTHNRNNSRTESIKSPSTVKIQRNLIEDSSSFKDPIHIYGKEHQLHSRKHSDTSSSKVGGTINAINERMKDLDHYLSQGTRSASKQSNLVSPNPRLNLGVFIIEFISIMKRRVLKI

SEQ ID NO: 9572 - protein, 373 aa, Glycine max
  misc_feature (146)..(146): Xaa can be any naturally occurring amino acid
  misc_feature (256)..(256): Xaa can be any naturally occurring amino acid
  misc_feature (277)..(277): Xaa can be any naturally occurring amino acid
  misc_feature (309)..(309): Xaa can be any naturally occurring amino acid
  Coding DNA Sequence Number=SeqID_2026
  Subcellular localization annotation: CTP_CleavageSite=71; ConfidenceScore=5.40e-01
FVYVHSAYEQRFGCVVLVSSSYLLSISSLSRASPSCGRRPPSRSVYRARDTSPSAVQSRPSFTLSLLFSPRAPHLVSCPSLLLGRCVRCASSSPAVPAHVPLRHSTCYCTPAVISPCSSLFVLPLLPAQYRSLGHVHLRRLRSLVXLSPHGAFLHSSLIDIPPSSSRLASVAASSSRALCSARSLSPVPSPPCLRPRLSAPRPLHRIPRLQHRVVSAALASSRLSLFFRAPLSRSRCVYLSAFALFASLGSVLSSXDAQSYWRAFSLLLWAGLRKRXVSRRCPRGSRSAPRLSPPARYLICVRLCSAGXHKSVRRLRHFASSLALLCYTSLSLAGLWTIRDLLFPIIATAPFFSPLRLFTSSLVAAPSPGATQ

SEQ ID NO: 9573 - protein, 94 aa, Glycine max
  Coding DNA Sequence Number=SeqID_2028
  Gene Ontology: Mol. function=sequence-specific DNA binding; Cellular component=nucleus; Biological process=regulation of transcription, DNA-dependent
  Homolog annotation: Hit_ID=A9CQM4; Match level="QueryCoverage=100%, HitCoverage=38%, E-value=1e-25, Identity=68%"; Hit description =SEPALLATA1 homolog
  Pfam annotation: Domain name=SRF-TF; Domain location=8-58; Score =71.3; E_value=3.2e-18; Accession=PF00319.9; Description=SRF-type transcription factor (DNA-binding and dimerisation domain)
GRGRVLMKRIENKIHTQVTLASTRYGLRKKAYELSVLCVAEVALIIFSKRGKLDEACNSLSKHETLEWDQKSRYGAVELTKPCRELENNYRAIL

SEQ ID NO: 9574 - protein, 67 aa, Glycine max
  Coding DNA Sequence Number=SeqID_193
  Gene Ontology: Mol. function=nucleoside-triphosphatase activity; Cellular component=membrane; Biological process=protein catabolic process
  Homolog annotation: Hit_ID=A7QTW2; Match level="QueryCoverage=91%, HitCoverage=7%, E-value=8e-18, Identity=78%"; Hit description =Chromosome undetermined scaffold_171, whole genome shotgun sequence
RADRSRVVPEGVKLRREAYDRVRALLKKHEKALHVLANALLEYEPLSAEQISRILLPYREGWLPELP

SEQ ID NO: 9575 - protein, 51 aa, Glycine max
  Coding DNA Sequence Number=SeqID_194
  Gene Ontology: Mol. function=structural constituent of ribosome; Cellular component=ribonucleoprotein complex; Biological process =translation
  Homolog annotation: Hit_ID=P51424; Match level="QueryCoverage=100%, HitCoverage=100%, E-value=1e-23, Identity=98%"; Hit description=60S ribosomal protein L39-1
  Pfam annotation: Domain name=Ribosomal_L39; Domain location=9-51; Score=102.3; E_value=1.5e-27; Accession=PF00832.10; Description =Ribosomal L39 protein
MPSHKSFMIKKKLAKKMRQNRPIPHWIRLRTDNTIRYNAKRRHWRRTKLGF

SEQ ID NO: 9576 - protein, 103 aa, Glycine max
  Coding DNA Sequence Number=SeqID_195
  Gene Ontology: Mol. function=hydrolase activity, hydrolyzing O -glycosyl compounds; Cellular component=beta-galactosidase complex; Biological process=carbohydrate metabolic process
  Homolog annotation: Hit_ID=A9C3P2; Match level="QueryCoverage=65%, HitCoverage=36%, E-value=1e-11, Identity=55%"; Hit description=Novel protein similar to H.sapiens ANKRD39, ankyrin repeat domain 39
  Pfam annotation: Domain name=Ank; Domain location=24-56; Score=39.4; E_value=1.3e-08; Accession=PF00023.20; Description=Ankyrin repeat
  Pfam annotation: Domain name=Ank; Domain location=57-89; Score=30.5; E_value=6e-06; Accession=PF00023.20; Description=Ankyrin repeat
  Pfam module annotation: Pfam domain module=Ank::Ank; Domain location =24-56::57-89
SGHLTACERLLGAGADVNACTRSGGVTPLIRAALMGHEKVVQLLLRKGADVFHQDNDGNTALHKAVQNNHQNVIKLLLDSSSDSNRLEGICNNKGHKAKDLSK

SEQ ID NO: 9577 - protein, 72 aa, Glycine max
  Coding DNA Sequence Number=SeqID_196
  Subcellular localization annotation: CTP_CleavageSite=36; ConfidenceScore=5.25e-01
ANGDKILKLGTRVANQKPVPQIRKRTSLKTLATLPNCSPKEEVIVVVLKGKRVRSRSNFCRRLGPPMSIHKH

SEQ ID NO: 9578 - protein, 110 aa, Glycine max
  misc_feature (31)..(31): Xaa can be any naturally occurring amino acid
  Coding DNA Sequence Number=SeqID_198
  Subcellular localization annotation: CTP_CleavageSite=38; ConfidenceScore=5.33e-01
ATHQTPPSPLPSRVTSPAYTPQNRCASPAAXGYNVSPNCEEKKVYRIFSPNPLASTTTTRKPNIATLDAAHLIRHPDSDSSQDQLFSNNLTHGRKTDSAGRCGSRRGYSA

SEQ ID NO: 9579 - protein, 153 aa, Glycine max; identical to SEQ ID NO: 7563
  misc_feature (69)..(69): Xaa can be any naturally occurring amino acid
  misc_feature (107)..(107): Xaa can be any naturally occurring amino acid
  misc_feature (142)..(142): Xaa can be any naturally occurring amino acid
  Coding DNA Sequence Number=SeqID_200

SEQ ID NO: 9580 - protein, 231 aa, Glycine max
  Coding DNA Sequence Number=SeqID_202
  Homolog annotation: Hit_ID=Q9LK31; Match level="QueryCoverage=28%, HitCoverage=15%, E-value=3e-11, Identity=50%"; Hit description=Kelch repeat-containing protein At3g27220
  Pfam annotation: Domain name=Kelch_1; Domain location=134-182; Score =23.1; E_value=0.001; Accession=PF01344.15; Description=Kelch motif
PLFFCVKNLNLLLSLCISRPRPHRQPLPRLPLHSLSRHRHQLGRHQRTPSYSESHRHTSQQQQQQGKRWEDCKKEGSREIPFGYICRLACSRVALEADALGSSASARWVHSQMDVFDFSSNKWVDQIKMPKEMAHSHLGIASDGRYIYIISGQYGIQCSGPTTASFSLDTATKKWKPLPPLPAPRCTINICISTALTHLLFVNVCCMLFFKLQINADDGTAIVVIMWLLQL

SEQ ID NO: 9581 - protein, 91 aa, Glycine max
  misc_feature (31)..(31): Xaa can be any naturally occurring amino acid
  misc_feature (36)..(36): Xaa can be any naturally occurring amino acid
  misc_feature (60)..(60): Xaa can be any naturally occurring amino acid
  misc_feature (78)..(78): Xaa can be any naturally occurring amino acid
  Coding DNA Sequence Number=SeqID_203
ARCPLASGCSRRCCVVWMEWGGGVGYVGVCXVGLKXKYKLYSFIERNIHYERIMSKVKEXIHYHSHNNTTTTTSHVTXSLYLSTPIIIMII

SEQ ID NO: 9582 - protein, 108 aa, Glycine max
  misc_feature (12)..(12): Xaa can be any naturally occurring amino acid
  misc_feature (16)..(16): Xaa can be any naturally occurring amino acid
  misc_feature (38)..(38): Xaa can be any naturally occurring amino acid
  misc_feature (47)..(47): Xaa can be any naturally occurring amino acid
  misc_feature (51)..(51): Xaa can be any naturally occurring amino acid
  misc_feature (54)..(54): Xaa can be any naturally occurring amino acid
  misc_feature (61)..(61): Xaa can be any naturally occurring amino acid
  misc_feature (64)..(64): Xaa can be any naturally occurring amino acid
  misc_feature (66)..(66): Xaa can be any naturally occurring amino acid
  misc_feature (77)..(78): Xaa can be any naturally occurring amino acid
  misc_feature (83)..(83): Xaa can be any naturally occurring amino acid
  misc_feature (88)..(88): Xaa can be any naturally occurring amino acid
  misc_feature (104)..(104): Xaa can be any naturally occurring amino acid
  Coding DNA Sequence Number=SeqID_2029
YTDRDDSNSYNXVYEXLHTRHTQTQTSTQTASTYHHHXPVDDDRPHXMRHXCEXGAMYVYXVYXHXILIVIVLRSTXXYLSYXRDDCXSDGRTLSFVLRLVRRXSPYS

SEQ ID NO: 9583 - protein, 88 aa, Glycine max
  Coding DNA Sequence Number=SeqID_2031
  Gene Ontology: Mol. function=hydrogen ion transmembrane transporter activity; Biological process=proton transport
  Homolog annotation: Hit_ID=O82629; Match level="QueryCoverage=90%, HitCoverage=75%, E-value=2e-31, Identity=90%"; Hit description =Vacuolar proton pump subunit G 2
  Pfam annotation: Domain name=V-ATPase_G; Domain location=5-88; Score =90.5; E_value=5.2e-24; Accession=PF03179.5; Description=Vacuolar (H+)-ATPase G subunit
MESSSNHGGIKLLLAAEHEAQQIVNAARTAKMARLKQAKEEAETEVAEHKASTEHGFQRKLEETSGDSGANVTRLEQETDAKIEQLKN

SEQ ID NO: 9584 - protein, 163 aa, Glycine max
  misc_feature (8)..(8): Xaa can be any naturally occurring amino acid
  misc_feature (45)..(45): Xaa can be any naturally occurring amino acid
  misc_feature (58)..(58): Xaa can be any naturally occurring amino acid
  misc_feature (71)..(71): Xaa can be any naturally occurring amino acid
  misc_feature (97)..(97): Xaa can be any naturally occurring amino acid
  misc_feature (102)..(102): Xaa can be any naturally occurring amino acid
  misc_feature (119)..(119): Xaa can be any naturally occurring amino acid
  misc_feature (121)..(121): Xaa can be any naturally occurring amino acid
  Coding DNA Sequence Number=SeqID_2032
TIYPIRCXILHVAPTLRSSRRNNHRRGVHIKSVDIISCSAHHDAXVYKLIISCDQQMXEYSLLFTSYCATXLHALAATIRVVTLLSYRAITVYLIIXLHIGXSNTICLSIQTLVDVRDXSXILPHEADLATVHNYLALYTYEAAICVRNIIVTHIVSIIHRVA

SEQ ID NO: 9585 - protein, 133 aa, Glycine max
  misc_feature (48)..(48): Xaa can be any naturally occurring amino acid
  misc_feature (50)..(50): Xaa can be any naturally occurring amino acid
  misc_feature (128)..(129): Xaa can be any naturally occurring amino acid
  Coding DNA Sequence Number=SeqID_2034
  Gene Ontology: Mol. function=protein serine/threonine phosphatase activity; Cellular component=protein serine/threonine phosphatase complex; Biological process=protein amino acid dephosphorylation
  Homolog annotation: Hit_ID=Q5SN75; Match level="QueryCoverage=100%, HitCoverage=35%, E-value=2e-16, Identity=44%"; Hit description =Protein phosphatase 2C-like
MSSETSKRDHARELLAADRKLMTVARSARRRRLELRRLGRTASAAAEXEXAKRVRPAPDSSSDSSDSAKVVPVASRCSACVSHGAVSVIGRRREMEDAVAVAAPFLAETAGVEGSGDVEYGAGDEGFXXVYDG

SEQ ID NO: 9586 - protein, 97 aa, Glycine max
  Coding DNA Sequence Number=SeqID_2035
  Subcellular localization annotation: CTP_CleavageSite=62; ConfidenceScore=5.64e-01
DDMPSLSVFPSLPSLQNPNLSQPNFFNFRLPSLCHRPLVKSTATFHRRILCKAFRDSGEDIKAVLKSDDGGGSGDGGGDGGGGGDRDAKATDRAVEP

SEQ ID NO: 9587 - protein, 107 aa, Glycine max; identical to SEQ ID NO: 6711
  misc_feature (10)..(10): Xaa can be any naturally occurring amino acid
  misc_feature (27)..(27): Xaa can be any naturally occurring amino acid
  misc_feature (31)..(31): Xaa can be any naturally occurring amino acid
  misc_feature (35)..(35): Xaa can be any naturally occurring amino acid
  misc_feature (103)..(103): Xaa can be any naturally occurring amino acid
  Coding DNA Sequence Number=SeqID_2037

SEQ ID NO: 9588 - protein, 238 aa, Glycine max
  misc_feature (21)..(21): Xaa can be any naturally occurring amino acid
  misc_feature (23)..(23): Xaa can be any naturally occurring amino acid
  misc_feature (49)..(49): Xaa can be any naturally occurring amino acid
  misc_feature (141)..(141): Xaa can be any naturally occurring amino acid
  misc_feature (147)..(147): Xaa can be any naturally occurring amino acid
  misc_feature (151)..(151): Xaa can be any naturally occurring amino acid
  misc_feature (163)..(163): Xaa can be any naturally occurring amino acid
  misc_feature (168)..(168): Xaa can be any naturally occurring amino acid
  misc_feature (186)..(186): Xaa can be any naturally occurring amino acid
  misc_feature (191)..(191): Xaa can be any naturally occurring amino acid
  misc_feature (195)..(195): Xaa can be any naturally occurring amino acid
  misc_feature (201)..(201): Xaa can be any naturally occurring amino acid
  misc_feature (203)..(205): Xaa can be any naturally occurring amino acid
  misc_feature (208)..(208): Xaa can be any naturally occurring amino acid
  misc_feature (210)..(210): Xaa can be any naturally occurring amino acid
  misc_feature (212)..(216): Xaa can be any naturally occurring amino acid
  misc_feature (219)..(238): Xaa can be any naturally occurring amino acid
  Coding DNA Sequence Number=SeqID_2039
  Subcellular localization annotation: CTP_CleavageSite=12; ConfidenceScore=5.15e-01
ATHMRHLVFLIVAHRNSYNYXSXRPPRPHISLPLLSHSLTRTYLRLTLXSHFRPPPSRPSLALRSVLPTPSRGPSSLSLHLPRRTQLCTDGVRAARASSCRISTSTQIGAARRLAATTLEFYLSRCAAFSSATTLYAHSLXSWRKNXVLFXFRDKSTHSLTPXRASQXLSPKLSQKNSPAARPRAXPAFLXSPVXRFVVVXRXXXLFXYXTXXXXXGNXXXXXXXXXXXXXXXXXXXX

SEQ ID NO: 9589 - protein, 116 aa, Glycine max; identical to SEQ ID NO: 6721
  misc_feature (7)..(8): Xaa can be any naturally occurring amino acid
  misc_feature (12)..(12): Xaa can be any naturally occurring amino acid
  misc_feature (39)..(39): Xaa can be any naturally occurring amino acid
  misc_feature (71)..(71): Xaa can be any naturally occurring amino acid
  misc_feature (73)..(73): Xaa can be any naturally occurring amino acid
  misc_feature (84)..(85): Xaa can be any naturally occurring amino acid
  misc_feature (91)..(91): Xaa can be any naturally occurring amino acid
  misc_feature (114)..(114): Xaa can be any naturally occurring amino acid
  Coding DNA Sequence Number=SeqID_2041

SEQ ID NO: 9590 - protein, 69 aa, Glycine max
  Coding DNA Sequence Number=SeqID_2043
LCQSFKNYSEKVGASNDSLNTDSILEMVNFLRKFCQCRHSVIRQRSCEPIENKVMYKRIKYMFGLQFVN

SEQ ID NO: 9591 - protein, 86 aa, Glycine max
  Coding DNA Sequence Number=SeqID_2045
  Gene Ontology: Mol. function=3-deoxy-8-phosphooctulonate synthase activity; Cellular component=cytoplasm; Biological process =biosynthetic process
  Homolog annotation: Hit_ID=Q9ARD1; Match level="QueryCoverage=100%, HitCoverage=29%, E-value=3e-24, Identity=65%"; Hit description=3 -desoxy-D-manno octulosonic acid-8-phosphate synthase
DIPIVTDVHETIQCEAVGRVADMIHIPAFLGRQTDLLVAAAPSGKIINIKTGQLCSPYLTTNYYQYLWMTGNSYVMGCHRGTPYQY

SEQ ID NO: 9592 - protein, 145 aa, Glycine max
  misc_feature (13)..(13): Xaa can be any naturally occurring amino acid
  misc_feature (15)..(15): Xaa can be any naturally occurring amino acid
  misc_feature (24)..(24): Xaa can be any naturally occurring amino acid
  misc_feature (29)..(29): Xaa can be any naturally occurring amino acid
  misc_feature (42)..(42): Xaa can be any naturally occurring amino acid
  misc_feature (143)..(143): Xaa can be any naturally occurring amino acid
  Coding DNA Sequence Number=SeqID_2046
PRDRIVYDSVSGXVXVALTRSRVXRARDXEFSLETIHGSLTXYAMIRHNATQARPLTRHTLCHSRETISNRSRRHSHQDCQSRYKTTRPRTEKTHHANKTPPRRGRRDTARDRPLARLRALRVAREPPPRCVFARRGSVCQIXFY

SEQ ID NO: 9593 - protein, 201 aa, Glycine max
  Coding DNA Sequence Number=SeqID_2048
  Homolog annotation: Hit_ID=Q1YRZ0; Match level="QueryCoverage=36%, HitCoverage=17%, E-value=4e-08, Identity=43%"; Hit description=N -acetylmuramoyl-L-alanine amidase
PLGVNKFRGIQSSRKGIWVLQEVNCPSVLIEAGFMSNPSDMSNLKSTAYQQKMAGAILTGIQQYLSAHENQTTFIPVDTTIEVKVKDTAAHPLFVVDGEKMGRKGLKELKLDPNDIDNISVLKDEAAFKKYGEEGKNGVVEITTKKQVADSTTTKQHSKADLMMKKLNELKKDNEKSYFEIDGKSVITTKSGQTVWIEVVT

SEQ ID NO: 9594 - protein, 116 aa, Glycine max
  misc_feature (86)..(86): Xaa can be any naturally occurring amino acid
  Coding DNA Sequence Number=SeqID_2049
  Gene Ontology: Mol. function=UDP-glucuronate decarboxylase activity; Cellular component=Golgi apparatus; Biological process=cellular metabolic process
  Homolog annotation: Hit_ID=Q9FIE8; Match level="QueryCoverage=99%, HitCoverage=33%, E-value=4e-34, Identity=62%"; Hit description=DTDP -glucose 4-6-dehydratase
PETDDAIAPDNILSLASKDNLNICIGHPRFDLIPHDVTDPLLIDGDLIYHLACPASPIFYKYNPVHTIHTDVIATLHMLALANPAXAMIFLTSTSQPYGDPHVHPLPESYCSHVHP

SEQ ID NO: 9595 - protein, 97 aa, Glycine max
  misc_feature (1)..(1): Xaa can be any naturally occurring amino acid
  misc_feature (23)..(23): Xaa can be any naturally occurring amino acid
  misc_feature (35)..(35): Xaa can be any naturally occurring amino acid
  misc_feature (41)..(41): Xaa can be any naturally occurring amino acid
  misc_feature (44)..(44): Xaa can be any naturally occurring amino acid
  misc_feature (48)..(48): Xaa can be any naturally occurring amino acid
  misc_feature (63)..(63): Xaa can be any naturally occurring amino acid
  misc_feature (70)..(70): Xaa can be any naturally occurring amino acid
  misc_feature (87)..(87): Xaa can be any naturally occurring amino acid
  Coding DNA Sequence Number=SeqID_2050
XQHDVAQREDTTSYIATDISRMXIPRTTHDTHINXLSCFTXIIXISDXIYDRHSDAPACNLEXCTRARDXVLSISHSDNIYPVSPLXHAHVYTRRDA

SEQ ID NO: 9596 - protein, 423 aa, Glycine max
  misc_feature (187)..(187): Xaa can be any naturally occurring amino acid
  misc_feature (190)..(190): Xaa can be any naturally occurring amino acid
  misc_feature (201)..(201): Xaa can be any naturally occurring amino acid
  misc_feature (204)..(204): Xaa can be any naturally occurring amino acid
  misc_feature (209)..(210): Xaa can be any naturally occurring amino acid
  misc_feature (212)..(212): Xaa can be any naturally occurring amino acid
  misc_feature (226)..(227): Xaa can be any naturally occurring amino acid
  misc_feature (242)..(242): Xaa can be any naturally occurring amino acid
  Coding DNA Sequence Number=SeqID_2052
NKQQTMVQLNQQTTVTTRTTEIPKATIPGANVIKKDAIVTNVMEKPVIENVIEKKNVEVHHKDVVQEIHEQKIIEIEKKPMLQTVQQGTVIQQEKAATQFQEIGSGALSEQERLRLERLRSTQAPKITQQQGAVRQVQEGEQVAQVVRQEFIEHHVQPVITEVREQNVVQEVVHPVVRKVHEGTIIXEVXSTTAPLQQNWXANXTTMIXXEXPLQQTGLKQNIIQXXASLQQTGFQQSGLQXGLQQPILQQNMPLQTGLQQTSLQQGMPLQQTGLQQGAPLQQTLHQKGAQLKQNLQQGLQGGIQQGNFQQGYFQKESLKQTGIQGAPLQTGFQQGAPLQQGMPLQQTGFQQGGLQQTLQNGLQQIGLQQGAPLQQTGFQSGLQQGAPLQGGIQQNLQRGLQSGVIPPPTQSGLQQGNLARKL

SEQ ID NO: 9597 - protein, 160 aa, Glycine max; identical to SEQ ID NO: 7996
  misc_feature (5)..(5): Xaa can be any naturally occurring amino acid
  misc_feature (13)..(13): Xaa can be any naturally occurring amino acid
  misc_feature (35)..(35): Xaa can be any naturally occurring amino acid
  misc_feature (55)..(56): Xaa can be any naturally occurring amino acid
  misc_feature (66)..(66): Xaa can be any naturally occurring amino acid
  misc_feature (75)..(75): Xaa can be any naturally occurring amino acid
  misc_feature (123)..(123): Xaa can be any naturally occurring amino acid
  Coding DNA Sequence Number=SeqID_2053

SEQ ID NO: 9598 - protein, 92 aa, Glycine max
  Coding DNA Sequence Number=SeqID_2055
  Gene Ontology: Mol. function=malate synthase activity; Cellular component=glyoxysome; Biological process=tricarboxylic acid cycle
  Homolog annotation: Hit_ID=P45458; Match level="QueryCoverage=100%, HitCoverage=16%, E-value=4e-32, Identity=72%"; Hit description =Malate synthase, glyoxysomal
YVAAWLTGCCSVPLYNLMDDAATAEITTVHNLQWLKSGLEINGDGLGVKVSKELFGRVAEEEMATIGPELATQNFVTGMYQEACNIFTHACT

SEQ ID NO: 9599 - protein, 136 aa, Glycine max
  misc_feature (9)..(9): Xaa can be any naturally occurring amino acid
  misc_feature (15)..(16): Xaa can be any naturally occurring amino acid
  misc_feature (74)..(74): Xaa can be any naturally occurring amino acid
  misc_feature (85)..(85): Xaa can be any naturally occurring amino acid
  misc_feature (93)..(93): Xaa can be any naturally occurring amino acid
  Coding DNA Sequence Number=SeqID_2056
  Subcellular localization annotation: CTP_CleavageSite=56; ConfidenceScore=5.33e-01
APRTPISRXLYVSGXXYCRLPSPHQHPSLVSMCLLVLALSSIPTHYTVSLSSPTISLSTRRARSRLCDASHTSXLLLCSLLLSSXNLVALVDXCIPLLAPASRSLITDEIASHCELCLVYSGDGEYMCHLITLASH

SEQ ID NO: 9600 - protein, 134 aa, Glycine max
  misc_feature (32)..(32): Xaa can be any naturally occurring amino acid
  Coding DNA Sequence Number=SeqID_2058
  Gene Ontology: Mol. function=hydrolase activity; Cellular component =cytoplasm; Biological process=nucleotide metabolic process
  Homolog annotation: Hit_ID=A7NXS6; Match level="QueryCoverage=91%, HitCoverage=64%, E-value=9e-46, Identity=66%"; Hit description =Chromosome chr5 scaffold_2, whole genome shotgun sequence
  Pfam annotation: Domain name=Ham1p_like; Domain location=4-122; Score= 32.2; E_value=1.5e-12; Accession=PF01725.7; Description=Ham1 family
SFFFVHGKVNGPVLVEDTCLCFNALKGLPGPXCLNNLLMAYDDKSAYALCVFSFAAGPDSEPITFSGKTPGKIVPPRGPNDFGWDPIFEPDGSGQTYAQMPKEEKNQISHRSKSLALVKSHFAEARFTFDVKNF

SEQ ID NO: 9601 - protein, 149 aa, Glycine max
  misc_feature (51)..(51): Xaa can be any naturally occurring amino acid
  misc_feature (55)..(55): Xaa can be any naturally occurring amino acid
  misc_feature (58)..(59): Xaa can be any naturally occurring amino acid
  misc_feature (85)..(85): Xaa can be any naturally occurring amino acid
  misc_feature (90)..(90): Xaa can be any naturally occurring amino acid
  misc_feature (138)..(138): Xaa can be any naturally occurring amino acid
  Coding DNA Sequence Number=SeqID_2059
GGRNQFSCNESRVHLSPLITQQCVQSTTPRRCLLLTSMHSHRASHKTYKKXRANXHSXXLHHSTIISIMVMSFYNQHTHTRNVSXRRSAXACPLTYHSDGEGVRSRGESQRHSIRHNTSSHRTMSAGDCNCGEQWGLXSTSKQSINSTL

SEQ ID NO: 9602 - protein, 161 aa, Glycine max
  Coding DNA Sequence Number=SeqID_2061
NKRTHPAHTRARDIMNTRTNSTRRPAISEIHIKTITGDNMIAHTGSTTRRQAERRAAILDEQDANATTSKTERRCSNGQDRTTSVVRIEGSMARRSQQWQGEPNCARMKLNQGRPSSKGGPSQQTLAQESRSRRDESTRSRGEGAAVRRGGRERPAERSMY

SEQ ID NO: 9603 - protein, 173 aa, Glycine max
  misc_feature (84)..(84): Xaa can be any naturally occurring amino acid
  misc_feature (88)..(88): Xaa can be any naturally occurring amino acid
  misc_feature (97)..(97): Xaa can be any naturally occurring amino acid
  misc_feature (101)..(101): Xaa can be any naturally occurring amino acid
  misc_feature (103)..(103): Xaa can be any naturally occurring amino acid
  misc_feature (111)..(112): Xaa can be any naturally occurring amino acid
  misc_feature (127)..(127): Xaa can be any naturally occurring amino acid
  misc_feature (129)..(129): Xaa can be any naturally occurring amino acid
  misc_feature (133)..(134): Xaa can be any naturally occurring amino acid
  misc_feature (137)..(137): Xaa can be any naturally occurring amino acid
  misc_feature (140)..(141): Xaa can be any naturally occurring amino acid
  misc_feature (146)..(146): Xaa can be any naturally occurring amino acid
  misc_feature (148)..(149): Xaa can be any naturally occurring amino acid
  misc_feature (152)..(153): Xaa can be any naturally occurring amino acid
  misc_feature (155)..(157): Xaa can be any naturally occurring amino acid
  misc_feature (159)..(159): Xaa can be any naturally occurring amino acid
  Coding DNA Sequence Number=SeqID_2063
  Gene Ontology: Mol. function=calcium ion binding; Cellular component =flagellin-based flagellum; Biological process=ciliary or flagellar motility
  Homolog annotation: Hit_ID=UPI00006CB64D; Match level="QueryCoverage =73%, HitCoverage=74%, E-value=1e-34, Identity=61%"; Hit description =EF hand family protein
  Pfam annotation: Domain name=efhand; Domain location=39-67; Score =41.8; E_value=2.4e-09; Accession=PF00036.22; Description=EF hand
MQRGATGKVQQSQTKPAQTKTGKSRPIERPGLTEDEIEEIREAFNLFDTDNSGMIDPKELKAAMQSLGFESKNPTIYQMIADLXHEGXPIDFDTFLXAITXKXGDKESRNXXSKIFQLFDSAIVDPXTXDLEXXRHXTLXXTMTPXEXXECXXEXXXGXEILKIFLFPPPPSV

SEQ ID NO: 9604 - protein, 152 aa, Glycine max; identical to SEQ ID NO: 6531
  misc_feature (11)..(11): Xaa can be any naturally occurring amino acid
  misc_feature (80)..(80): Xaa can be any naturally occurring amino acid
  misc_feature (112)..(112): Xaa can be any naturally occurring amino acid
  Coding DNA Sequence Number=SeqID_1253

SEQ ID NO: 9605 - protein, 154 aa, Glycine max
  Coding DNA Sequence Number=SeqID_1255
  Gene Ontology: Mol. function=methionine adenosyltransferase activity; Cellular component=phagocytic vesicle; Biological process=one-carbon compound metabolic process
  Homolog annotation: Hit_ID=A0BJ39; Match level="QueryCoverage=93%, HitCoverage=34%, E-value=2e-54, Identity=70%"; Hit description=S -adenosylmethionine synthetase
  Pfam annotation: Domain name=S-AdoMet_synt_N; Domain location=11-110; Score=183.4; E_value=5.6e-52; Accession=PF00438.10; Description=S -adenosylmethionine synthetase, N-te
MQNAVAALPKGHFLFTSEAVTNGHPDKLCDFISDSVLDACLTVDPDAKVACESAVKSNVVMVFGEITCKAELNYEQIVREAIKNVGYDSVDKGMDYKNCTVIVAIEQQSPEIAESVHLHKKEEDYGAGDQGLMIGYACNETPEYMPLTHQLSLA

SEQ ID NO: 9606 - protein, 124 aa, Glycine max
  Coding DNA Sequence Number=SeqID_1256
YDRLSYTGSVGVIQRRRVVRGIGELEEKGHLTRGGHHSRRRVKDTGECKQPEADKSAGAHRPATSTRLTVGCERGSMRGGYGAPPQPKCGEATRKQSDGGPPRPQRGASPLARRTTHPKPYFGV

SEQ ID NO: 9607 - protein, 120 aa, Glycine max; identical to SEQ ID NO: 8369
  misc_feature (34)..(34): Xaa can be any naturally occurring amino acid
  misc_feature (41)..(41): Xaa can be any naturally occurring amino acid
  misc_feature (87)..(87): Xaa can be any naturally occurring amino acid
  misc_feature (95)..(95): Xaa can be any naturally occurring amino acid
  misc_feature (101)..(101): Xaa can be any naturally occurring amino acid
  Coding DNA Sequence Number=SeqID_1258

SEQ ID NO: 9608 - protein, 117 aa, Glycine max
  misc_feature (46)..(46): Xaa can be any naturally occurring amino acid
  Coding DNA Sequence Number=SeqID_1260
EIHLVPEAIEMCSAPPPVPALRPSVARENIRTANSATEAHMRHTYXAVSRCVELIMSYRPRTRTICDHMEVAATLRENVDGACPSCLARSTHLQLLAARSQYYWTYTHVCREAHQPE

SEQ ID NO: 9609 - protein, 276 aa, Glycine max
  Coding DNA Sequence Number=SeqID_1261
  Gene Ontology: Mol. function=catalytic activity; Cellular component =nucleus; Biological process=metabolic process
  Homolog annotation: Hit_ID=Q139I2; Match level="QueryCoverage=92%, HitCoverage=97%, E-value=1e-101, Identity=70%"; Hit description=5 -carboxymethyl-2-hydroxymuconate delta-isomerase
  Pfam annotation: Domain name=FAA_hydrolase; Domain location=90-255; Score=165.8; E_value=1.2e-46; Accession=PF01557.9; Description =Fumarylacetoacetate (FAA) hydrolase family
RRLRARGSSRAGGGVMAGETKKWLRFRHAGTTGFGTLSASGISVHEGEMFGRNAATGRMLALPEVELLAPCAPSKIVALWNNFHALAAKLNQPEPPEPLYLLKATTTITTPGAVIRRPSYYDGKTTYEGELGIIIGKTCARVSPDEADSFIFGYTCVNDITANDILTSDPTFPQWARAKGIDDYGPFGPVITTGLDPARLTVRTILNGAERQNYPISDMIFSAQALVSKISHDMTLLPGDLIAVGTSVGVGVMKEPVNTVTVAIDGIGELTNEFRL

SEQ ID NO: 9610 - protein, 304 aa, Glycine max
  misc_feature (57)..(57): Xaa can be any naturally occurring amino acid
  misc_feature (114)..(114): Xaa can be any naturally occurring amino acid
  misc_feature (130)..(130): Xaa can be any naturally occurring amino acid
  misc_feature (189)..(189): Xaa can be any naturally occurring amino acid
  misc_feature (198)..(198): Xaa can be any naturally occurring amino acid
  misc_feature (222)..(222): Xaa can be any naturally occurring amino acid
  misc_feature (236)..(236): Xaa can be any naturally occurring amino acid
  misc_feature (260)..(260): Xaa can be any naturally occurring amino acid
  Coding DNA Sequence Number=SeqID_1262
  Subcellular localization annotation: CTP_CleavageSite=15; ConfidenceScore=5.09e-01
ISARGGKSSSISGTRCTLVCGWCAVVSSGNCLLCLSISPSRSRSYHTPHVPYLLGCXMNFLAVSRQSISHALHYVLPSRRMHIRCLCSRTIAVLRSLYLYVSMNGRHIVCILVXHLTRCISLLTPAHAVXERMMISIRRTDTVTIDTCTRTAHSSICTLVSGCSDCCVFCTVSCSISRCRYYAAVCFVXRTLIYTCVXALSSLLSLESRSAGALSVCAQSLXAVRHLRARARWRHXGAYSASSSLSRVYTLLCSRVPCLXRGATAARARSPRLPSSTLSPSPSCVAIAMTTRGARVHDTTRRSR

SEQ ID NO: 9611 - protein, 72 aa, Glycine max
  Coding DNA Sequence Number=SeqID_1264
ITYIIFLCTLLLVSFVFVFLFRLFLLLHCFYPFLSVCNVSVGYSPLFLPMDFFATHRLHCFFLFFPVLLVPA

SEQ ID NO: 9612 - protein, 130 aa, Glycine max
  misc_feature (29)..(29): Xaa can be any naturally occurring amino acid
  misc_feature (34)..(34): Xaa can be any naturally occurring amino acid
  misc_feature (74)..(74): Xaa can be any naturally occurring amino acid
  misc_feature (84)..(84): Xaa can be any naturally occurring amino acid
  misc_feature (103)..(103): Xaa can be any naturally occurring amino acid
  misc_feature (116)..(116): Xaa can be any naturally occurring amino acid
  misc_feature (118)..(118): Xaa can be any naturally occurring amino acid
  Coding DNA Sequence Number=SeqID_2064
SSAYFYSQSVLSSVFIYYRNRANAQSTHXLANHXLYTLTVSCLSYNLCSSYAPLSYHSLPHLTPASTFTIRPSXASYIYVITVXPTHRLASATHILAHVITEXDHDIYIVIYMILXYXVMTIARRYTDTT

SEQ ID NO: 9613 - protein, 148 aa, Glycine max
  Coding DNA Sequence Number=SeqID_2065
  Homolog annotation: Hit_ID=A9P852; Match level="QueryCoverage=80%, HitCoverage=30%, E-value=3e-24, Identity=47%"; Hit description =Putative uncharacterized protein
  Subcellular localization annotation: CTP_CleavageSite=54; ConfidenceScore=5.41e-01
HPQPAATHTPPAQTPTTPPLATDQHSPPTSRHKDRQRERDSSFHYPNRSKPTERLSTRDYDNGSKHYRRSRSRSRSRSLQAGTAQYESRSSPQREESKRTSASSNLAQLKDMYGDLGDNKGDANMERIPRKDSGGEEVIRLGGSTWKY

SEQ ID NO: 9614 - protein, 123 aa, Glycine max; identical to SEQ ID NO: 8009
  misc_feature (49)..(49): Xaa can be any naturally occurring amino acid
  misc_feature (77)..(77): Xaa can be any naturally occurring amino acid
  misc_feature (96)..(96): Xaa can be any naturally occurring amino acid
  Coding DNA Sequence Number=SeqID_2066

SEQ ID NO: 9615 - protein, 150 aa, Glycine max
  misc_feature (79)..(79): Xaa can be any naturally occurring amino acid
  misc_feature (90)..(90): Xaa can be any naturally occurring amino acid
  Coding DNA Sequence Number=SeqID_2068
  Subcellular localization annotation: CTP_CleavageSite=74; ConfidenceScore=5.04e-01
PAERPAAKLAPTDTAYSYRRDGRRRLRVHAPVAAGHRRRAALALRPPPRLAGAAARPPGRRRRALGRRHRRRVRRHRGXGLRLLPLLRLXLVVKVDPSASRPIHVFSPVLLNAPRFAPASSGCLWCALCDPEQYERNIMANQCSWNASCL

SEQ ID NO: 9616 - protein, 169 aa, Glycine max; identical to SEQ ID NO: 8012
  misc_feature (4)..(4): Xaa can be any naturally occurring amino acid
  misc_feature (14)..(15): Xaa can be any naturally occurring amino acid
  misc_feature (26)..(26): Xaa can be any naturally occurring amino acid
  misc_feature (38)..(38): Xaa can be any naturally occurring amino acid
  misc_feature (41)..(42): Xaa can be any naturally occurring amino acid
  misc_feature (53)..(53): Xaa can be any naturally occurring amino acid
  misc_feature (61)..(61): Xaa can be any naturally occurring amino acid
  misc_feature (69)..(69): Xaa can be any naturally occurring amino acid
  misc_feature (72)..(72): Xaa can be any naturally occurring amino acid
  misc_feature (81)..(81): Xaa can be any naturally occurring amino acid
  misc_feature (113)..(113): Xaa can be any naturally occurring amino acid
  Coding DNA Sequence Number=SeqID_2070

SEQ ID NO: 9617 - protein, 140 aa, Glycine max
  Coding DNA Sequence Number=SeqID_2072
LSKHTRAPNPYIAHMYKFIAALLLLAVFSTPLQAQEMVLEQVGEYIEIVNFEDFINPGTDNPEVIVVIPEPEQEEGDEIDVPAGEVLVIGEYEFVNGETGEGALAEEGFVSEEGTLFEGELTIVEVEFDQALIQQGFLSL

SEQ ID NO: 9618 - protein, 192 aa, Glycine max
  Coding DNA Sequence Number=SeqID_2074
  Gene Ontology: Cellular component=integral to membrane; Biological process=photosynthesis, light harvesting
  Homolog annotation: Hit_ID=P14895; Match level="QueryCoverage=60%, HitCoverage=50%, E-value=2e-53, Identity=91%"; Hit description=High molecular mass early light-inducible protein HV58, chloroplast precursor
  Pfam annotation: Domain name=Chloroa_b-bind; Domain location=60-183; Score=-33.1; E_value=0.006; Accession=PF00504.12; Description =Chlorophyll A-B binding protein
  Subcellular localization annotation: CTP_CleavageSite=33; ConfidenceScore=5.73e-01
MATMVALSSFAVVGWSATRSPVAAPRRRALVVRAQTEPGMESTKETTSASTSSSSPSTSAAPTPIPAAPKPMTKKANPSVWDALAFSGPAPERINGRLAMVGFVAALTVEAARGGGLLDQAGSGAGLGWFLVTAGVFSVASLVPLLQGQSVESKSSGFWSADAELWNGRFAMLGLVALAATEFITGAPFVNI

SEQ ID NO: 9619 - protein, 123 aa, Glycine max
  misc_feature (27)..(27): Xaa can be any naturally occurring amino acid
  misc_feature (75)..(75): Xaa can be any naturally occurring amino acid
  misc_feature (92)..(92): Xaa can be any naturally occurring amino acid
  misc_feature (120)..(122): Xaa can be any naturally occurring amino acid
  Coding DNA Sequence Number=SeqID_2075
CYRLHSLSIYITTTYTVLTNSIVLITXCSLSYSSHHAQEYNSVHVYVWAARARERAYCVSSNATQYPSRTHTDGXTPQALELRAHQTTHNSXPRPSPPPPLRRARHEPLTGPRRRRAAHXXXQ

SEQ ID NO: 9620 - protein, 68 aa, Glycine max
  Coding DNA Sequence Number=SeqID_2077
FQIHYKGMYTKKLNLKIIVYLKSETEPSQLKLERKYPMMQKFPFLSSYLIKQTTKFIFQRHHFCKTLF

SEQ ID NO: 9621 - protein, 137 aa, Glycine max
  misc_feature (13)..(13): Xaa can be any naturally occurring amino acid
  misc_feature (92)..(92): Xaa can be any naturally occurring amino acid
  misc_feature (121)..(121): Xaa can be any naturally occurring amino acid
  Coding DNA Sequence Number=SeqID_2079
PPPFLYYLLELLXLYLELSVGFQYYEYSKLKQQKFNFIYYCEKYELLRYSCIVIGVILNLFGTFFNNSFTEDYKHEWEYIRRIFIIVGITLXFTPFANNCSSICKRFMGLRPFQVFGKLCXWCLFTSLAHHPRSPIL

SEQ ID NO: 9622 - protein, 144 aa, Glycine max
  misc_feature (59)..(59): Xaa can be any naturally occurring amino acid
  misc_feature (90)..(90): Xaa can be any naturally occurring amino acid
  misc_feature (109)..(109): Xaa can be any naturally occurring amino acid
  Coding DNA Sequence Number=SeqID_2081
  Gene Ontology: Mol. function=oxidoreductase activity; Cellular component=membrane; Biological process=metabolic process
  Homolog annotation: Hit_ID=Q9FZ42; Match level="QueryCoverage=89%, HitCoverage=45%, E-value=3e-29, Identity=53%"; Hit description =Glucose and ribitol dehydrogenase homolog 1
RLDGLVKNAAEQHLANSVEEITQQQLERVFITNIFAQLCLVKYALKHMNKGSCIIYCTXVNAYCGNPKTVVCTATKGTSGASPYGSLYIXEWGIRVNGVEPGGVWTPMXPASKPAEMIQNLGSEVPVTRGLKLEREQESIVLET

SEQ ID NO: 9623 - protein, 189 aa, Glycine max
  misc_feature (14)..(14): Xaa can be any naturally occurring amino acid
  misc_feature (20)..(20): Xaa can be any naturally occurring amino acid
  misc_feature (25)..(25): Xaa can be any naturally occurring amino acid
  misc_feature (27)..(27): Xaa can be any naturally occurring amino acid
  misc_feature (54)..(54): Xaa can be any naturally occurring amino acid
  misc_feature (56)..(56): Xaa can be any naturally occurring amino acid
  misc_feature (59)..(59): Xaa can be any naturally occurring amino acid
  misc_feature (63)..(63): Xaa can be any naturally occurring amino acid
  misc_feature (99)..(99): Xaa can be any naturally occurring amino acid
  Coding DNA Sequence Number=SeqID_2082
  Subcellular localization annotation: CTP_CleavageSite=40; ConfidenceScore=5.41e-01
RMSARAGGVRVSFXRVQPSXPLSLXSXHDPASLSTALSVRCVVAVVSLLLLSVXLXSDXRIYXSAIILSVQLQTSCARPIHSIMHLRACVACVSACCVXRSSSPRCFRRAARGVLRRVPSMHLRSRHLFSSVRPAGRKMGSSHTAHCVFRFSRPLRRRRSSAASVSCGALTREAADGRAGRACGRSATR

SEQ ID NO: 9624 - protein, 61 aa, Glycine max
  Coding DNA Sequence Number=SeqID_2084
VRVVETRVLISSKCHKIKCKMGKIMKFILNILKRYLIRFNLRIKSFITNLVMMRGGGAYVA

SEQ ID NO: 9625 - protein, 156 aa, Glycine max
  misc_feature (152)..(152): Xaa can be any naturally occurring amino acid
  Coding DNA Sequence Number=SeqID_2086
  Gene Ontology: Mol. function=NADH dehydrogenase (ubiquinone) activity; Cellular component=membrane; Biological process=electron transport
  Homolog annotation: Hit_ID=Q9M9M9; Match level="QueryCoverage=99%, HitCoverage=97%, E-value=7e-86, Identity=93%"; Hit description =Probable NADH dehydrogenase [ubiquinone] 1 alpha subcomplex subunit 12
  Pfam annotation: Domain name=NDUFA12; Domain location=49-155; Score =198.5; E_value=1.6e-56; Accession=PF05071.7; Description=NADH ubiquinone oxidoreductase subunit NDUFA
MALTVAKSALEAIREKGLGGFLRMIREEGFLRCLPDGNLLQTKIHNIGATLIGVDKFGNKYYQKLGDTQCGRHRWVEYASKDRYNASQVPAEWHGWLHFITDHTGDELLSQKPKRYGIEHRENFSGHGDAYIYHSKGHTLNPGQKNWTRYNXWVPP

SEQ ID NO: 9626 - protein, 137 aa, Glycine max
  misc_feature (130)..(130): Xaa can be any naturally occurring amino acid
  misc_feature (136)..(136): Xaa can be any naturally occurring amino acid
  Coding DNA Sequence Number=SeqID_2087
  Homolog annotation: Hit_ID=Q1KUR8; Match level="QueryCoverage=72%, HitCoverage=56%, E-value=7e-30, Identity=66%"; Hit description =Putative uncharacterized protein
MNQYNAFVSREEMMGLDRSNDLVVCPKPRRVGVLANNLTRPLRLHMSQAAADLCDSEAGAELLDIIRRKEDNGTIGPYFLGSPPSRAANPLAQDARFRDEKINPLSPNSPLLQPNSSTAFPSPSPSSSRXCVRMKXG

SEQ ID NO: 9627 - protein, 104 aa, Glycine max; identical to SEQ ID NO: 8020
  misc_feature (3)..(3): Xaa can be any naturally occurring amino acid
  misc_feature (10)..(10): Xaa can be any naturally occurring amino acid
  misc_feature (18)..(18): Xaa can be any naturally occurring amino acid
  misc_feature (20)..(22): Xaa can be any naturally occurring amino acid
  misc_feature (24)..(24): Xaa can be any naturally occurring amino acid
  misc_feature (26)..(26): Xaa can be any naturally occurring amino acid
  misc_feature (28)..(29): Xaa can be any naturally occurring amino acid
  misc_feature (31)..(31): Xaa can be any naturally occurring amino acid
  misc_feature (40)..(41): Xaa can be any naturally occurring amino acid
  misc_feature (49)..(49): Xaa can be any naturally occurring amino acid
  misc_feature (51)..(54): Xaa can be any naturally occurring amino acid
  misc_feature (57)..(58): Xaa can be any naturally occurring amino acid
  misc_feature (61)..(61): Xaa can be any naturally occurring amino acid
  misc_feature (70)..(70): Xaa can be any naturally occurring amino acid
  misc_feature (75)..(75): Xaa can be any naturally occurring amino acid
  misc_feature (79)..(80): Xaa can be any naturally occurring amino acid
  misc_feature (84)..(84): Xaa can be any naturally occurring amino acid
  misc_feature (93)..(94): Xaa can be any naturally occurring amino acid
  misc_feature (101)..(101): Xaa can be any naturally occurring amino acid
  Coding DNA Sequence Number=SeqID_2088

SEQ ID NO: 9628 - protein, 174 aa, Glycine max
  misc_feature (105)..(105): Xaa can be any naturally occurring amino acid
  Coding DNA Sequence Number=SeqID_2089
  Gene Ontology: Mol. function=inorganic diphosphatase activity; Cellular component=cytoplasm; Biological process=phosphate metabolic process
  Homolog annotation: Hit_ID=P21216; Match level="QueryCoverage=99%, HitCoverage=79%, E-value=1e-59, Identity=66%"; Hit description =Soluble inorganic pyrophosphatase 2
  Pfam annotation: Domain name=Pyrophosphatase; Domain location=22-172; Score=48.9; E_value=7.5e-12; Accession=PF00719.9; Description =Inorganic pyrophosphatase
GHPWHDLYIGPRAPPIIHCEGEIGKGSKVKYELDKTRGLIEEDRILYSSADYPHKYGIIPITIWEDSDPMEELVLMQEPELTGSFQRARAIGLMPKIDRGERDDXIISDSADDPDFRYYTDITELPPHRLAEIRRYCEDYKNNDNATDDVGDYLTSETAIDAIKDSMDLYAAYI

SEQ ID NO: 9629 - protein, 92 aa, Glycine max
  Coding DNA Sequence Number=SeqID_2090
  Gene Ontology: Mol. function=protein serine/threonine kinase activity; Cellular component=spindle microtubule; Biological process= protein amino acid phosphorylation
  Homolog annotation: Hit_ID=Q8LG64; Match level="QueryCoverage=96%, HitCoverage=28%, E-value=3e-27, Identity=67%"; Hit description =Cyclin-dependent kinase B2-2
ANQALFAGDSRLHKPLRIFGLFGTPNAEVWPGVSNLKDWHIYPQWNPNSLSTAVPGLHELGLDLLSQKLANGPSQRLCAKEAMGHACFHDLD

SEQ ID NO: 9630 - protein, 124 aa, Glycine max
  Coding DNA Sequence Number=SeqID_2091
  Subcellular localization annotation: CTP_CleavageSite=81; ConfidenceScore=5.33e-01
APSPSFLELVKGNFLFSSFGHMFWPQLQSLFGQPSSGGLGLNFVSLARGIIYLFIFSFSPKSFLFSPRGFGTASPFFGFIQGSSKGGILENMWFGNPLKKKKKKKKKKKKKKKKKKKKEKKKKK

SEQ ID NO: 9631 - protein, 275 aa, Glycine max
  Coding DNA Sequence Number=SeqID_2093
  Gene Ontology: Mol. function=two-component response regulator activity; Cellular component=mitochondrion; Biological process=two -component signal transduction system (phosphorelay)
  Homolog annotation: Hit_ID=A7NZB2; Match level="QueryCoverage=73%, HitCoverage=28%, E-value=3e-33, Identity=40%"; Hit description =Chromosome chr6 scaffold_3, whole genome shotgun sequence
MVNYINGVPVKTAGSQHSNAPDVGPSKFSEQINRGQLDLNCENQSSKLRCKGLSLSDAITSTCDSQMHSGEFEALNKKPKSSDIENKGTNNDEELPSLELSLKRLRGVEDADITIQDDRNVLRRSDQSAFSRYNAASNTKKSPTGCVGSNSPYNNSLEVTKKDSSRDIQSHSCGNPPNQNSNGASNNIDMGSTTNNAYAKSAVMSEPAGASTTKCLYQTSAFQPVKNSLVCTSQQVVLNNTEDMSATILAPPKLDRHKDSAALDFHLHCENHTDC

SEQ ID NO: 9632 - protein, 109 aa, Glycine max; identical to SEQ ID NO: 7010
  misc_feature (50)..(50): Xaa can be any naturally occurring amino acid
  misc_feature (75)..(75): Xaa can be any naturally occurring amino acid
  misc_feature (92)..(92): Xaa can be any naturally occurring amino acid
  Coding DNA Sequence Number=SeqID_2094

SEQ ID NO: 9633 - protein, 154 aa, Glycine max; identical to SEQ ID NO: 8026
  misc_feature (10)..(10): Xaa can be any naturally occurring amino acid
  misc_feature (13)..(14): Xaa can be any naturally occurring amino acid
  misc_feature (62)..(62): Xaa can be any naturally occurring amino acid
  misc_feature (71)..(71): Xaa can be any naturally occurring amino acid
  misc_feature (103)..(103): Xaa can be any naturally occurring amino acid
  Coding DNA Sequence Number=SeqID_2096

SEQ ID NO: 9634 - protein, 123 aa, Glycine max
  misc_feature (105)..(105): Xaa can be any naturally occurring amino acid
  Coding DNA Sequence Number=SeqID_2098
  Homolog annotation: Hit_ID=Q22ZH1; Match level="QueryCoverage=63%, HitCoverage=34%, E-value=3e-10, Identity=42%"; Hit description =Putative uncharacterized protein
MLLRNLTSSFLKFQPKTQLYAPLYYFGGVEKHEKMVLTLKTPNKVILQDFTDFYRIITRTKSGSLVIQNKTPSCYHELPAGTVKIKMTDIYDGNPVEYIHNGGAXTVSRITGRTWKRRSQRVI

SEQ ID NO: 9635 - protein, 127 aa, Glycine max
  misc_feature (5)..(5): Xaa can be any naturally occurring amino acid
  misc_feature (30)..(30): Xaa can be any naturally occurring amino acid
  misc_feature (89)..(89): Xaa can be any naturally occurring amino acid
  Coding DNA Sequence Number=SeqID_2099
STLSXLSHPYDRIHRHTDPHDEVDVDDGAXLHIRSLCFTLLVSLHPVFLSSSLHWLPLSPLLTLFLVLIRLGQAQVALIQPDSDDQYYXLYILIYRQRTTSPRRLPCDLDDYHSSASIARHSDCLSR

SEQ ID NO: 9636 - protein, 59 aa, Glycine max
  misc_feature (13)..(13): Xaa can be any naturally occurring amino acid
  Coding DNA Sequence Number=SeqID_2101
  Subcellular localization annotation: CTP_CleavageSite=56; ConfidenceScore=5.24e-01
APMLTATSKPSTXQSRLVEVASPMIQVGPWISQISPLALSSPVASSSNRKKSMGLRVMM

SEQ ID NO: 9637 - protein, 310 aa, Glycine max
  misc_feature (9)..(9): Xaa can be any naturally occurring amino acid
  misc_feature (37)..(37): Xaa can be any naturally occurring amino acid
  misc_feature (43)..(43): Xaa can be any naturally occurring amino acid
  misc_feature (59)..(59): Xaa can be any naturally occurring amino acid
  misc_feature (87)..(87): Xaa can be any naturally occurring amino acid
  misc_feature (89)..(89): Xaa can be any naturally occurring amino acid
  misc_feature (161)..(161): Xaa can be any naturally occurring amino acid
  Coding DNA Sequence Number=SeqID_2103
  Homolog annotation: Hit_ID=UPI0001662310; Match level="QueryCoverage =22%, HitCoverage=25%, E-value=6e-09, Identity=37%"; Hit description =UPI0001662310 related cluster
THVCLCRYXSRCLCPAIYIYVCIYQCRCLYIYRCLDXDMYTSXCLCLSQYIYIYMSTCXSLSEYVYIARYTDAVCLSLYIYIYIYIXSXIYIYIYVYISLSVYIYLYLYLYISLSLSIYLYIYIYISLYICIYLYIYISIYVSVCIYISISICMYLSLSIXYIYISVYIPVYLYLSLSICLYVSLHIYIYISLHNSHSIYISYISISASDTLSLSISTYIYHHLYPLYLDHCLHLYISVSISHTLSLNITTTNTITHSLSLYIQHTQLHLYTHIHVATTTTASIHEPHSRHSTPQPVLHSQPDTYDQSLL

SEQ ID NO: 9638 - protein, 67 aa, Glycine max
  Coding DNA Sequence Number=SeqID_2104
PRAELDRETNRRKMKLVWSPETASKAYIETVQSVSIIFNRQMLLSLILLEILFNLEPLLSSFMSRQS

SEQ ID NO: 9639 - protein, 174 aa, Glycine max; identical to SEQ ID NO: 7103
  Coding DNA Sequence Number=SeqID_2106
  Homolog annotation: Hit_ID=A8FCT2; Match level="QueryCoverage=82%, HitCoverage=68%, E-value=2e-56, Identity=83%"; Hit description =Putative uncharacterized protein ylaE

SEQ ID NO: 9640 - protein, 103 aa, Glycine max; identical to SEQ ID NO: 8034
  misc_feature (36)..(36): Xaa can be any naturally occurring amino acid
  misc_feature (47)..(47): Xaa can be any naturally occurring amino acid
  misc_feature (76)..(76): Xaa can be any naturally occurring amino acid
  misc_feature (99)..(99): Xaa can be any naturally occurring amino acid
  Coding DNA Sequence Number=SeqID_2107

SEQ ID NO: 9641 - protein, 131 aa, Glycine max; identical to SEQ ID NO: 8045
  misc_feature (2)..(2): Xaa can be any naturally occurring amino acid
  misc_feature (16)..(16): Xaa can be any naturally occurring amino acid
  misc_feature (18)..(18): Xaa can be any naturally occurring amino acid
  misc_feature (23)..(23): Xaa can be any naturally occurring amino acid
  misc_feature (36)..(36): Xaa can be any naturally occurring amino acid
  misc_feature (83)..(83): Xaa can be any naturally occurring amino acid
  Coding DNA Sequence Number=SeqID_2109

SEQ ID NO: 9642 - protein, 117 aa, Glycine max
  misc_feature (18)..(18): Xaa can be any naturally occurring amino acid
  misc_feature (40)..(40): Xaa can be any naturally occurring amino acid
  misc_feature (48)..(48): Xaa can be any naturally occurring amino acid
  misc_feature (51)..(51): Xaa can be any naturally occurring amino acid
  misc_feature (74)..(74): Xaa can be any naturally occurring amino acid
  misc_feature (77)..(77): Xaa can be any naturally occurring amino acid
  misc_feature (88)..(89): Xaa can be any naturally occurring amino acid
  misc_feature (94)..(95): Xaa can be any naturally occurring amino acid
  misc_feature (97)..(99): Xaa can be any naturally occurring amino acid
  misc_feature (106)..(106): Xaa can be any naturally occurring amino acid
  misc_feature (114)..(114): Xaa can be any naturally occurring amino acid
  Coding DNA Sequence Number=SeqID_2111
VSLYRESDLDAHAASSIXMYFHGVTIQLLRHGSGVLFRCXADTSRAQXERXEGVRGERERIFCQPMCRPRALLXLGXPLLLVPLSYNXXAQVCXXLXXXSTRATGXFVRDAPAXFSA

SEQ ID NO: 9643 - protein, 148 aa, Glycine max; identical to SEQ ID NO: 8047
  Coding DNA Sequence Number=SeqID_2113

SEQ ID NO: 9644 - protein, 137 aa, Glycine max
  misc_feature (3)..(3): Xaa can be any naturally occurring amino acid
  misc_feature (86)..(86): Xaa can be any naturally occurring amino acid
  Coding DNA Sequence Number=SeqID_2115
VIXTSSQYRADVHDSNAHICDTPDDGAYASKSTASEYYVCSVYCSHALTHNTSARRCYYTRTPTLIADGAKRPRRNSFVVSVETSXLTSRDRFLMYILIRNIECILDVAGALEIHRRASSWVYGSVATRRGEKRSYS

SEQ ID NO: 9645 - protein, 117 aa, Glycine max
  misc_feature (54)..(54): Xaa can be any naturally occurring amino acid
  misc_feature (57)..(57): Xaa can be any naturally occurring amino acid
  Coding DNA Sequence Number=SeqID_2117
  Gene Ontology: Mol. function=hydrolase activity; Cellular component =cytoplasm
  Homolog annotation: Hit_ID=Q45NN8; Match level="QueryCoverage=77%, HitCoverage=50%, E-value=2e-15, Identity=58%"; Hit description =Hydroxyacylglutathione hydrolase
YNSVLLCYAESLTRAAKEGAVVDPVEPQKVLEAANSHGVNNLKLVLTTHHHGGXHLXGNEKIKQLLLGMKVYGGSMDNIPRVCTDKVENGDKMVPLGADINNIWGLHHTFAPPKGPP

SEQ ID NO: 9646 - protein, 195 aa, Glycine max; identical to SEQ ID NO: 8050
  misc_feature (10)..(10): Xaa can be any naturally occurring amino acid
  misc_feature (41)..(41): Xaa can be any naturally occurring amino acid
  misc_feature (194)..(194): Xaa can be any naturally occurring amino acid
  Coding DNA Sequence Number=SeqID_2118
  Subcellular localization annotation: CTP_CleavageSite=15; ConfidenceScore=5.14e-01

SEQ ID NO: 9647 - protein, 156 aa, Glycine max
  misc_feature (4)..(4): Xaa can be any naturally occurring amino acid
  Coding DNA Sequence Number=SeqID_2120
AYEXPHGALEYRRTEGHKADGAVKGLQPQGDIEPLGAALTLSLRFRLSLARATIIHRQQNSKAPAISSLVCTASITNRNRDPNLSINTTSLLYSHVPRDILLLPWWKRAAAGETWTQPPARVDLRLIGVGEEEATATATAAARVWQRPASQRQARR

SEQ ID NO: 9648 - protein, 106 aa, Glycine max
  Coding DNA Sequence Number=SeqID_2121
DYQVRDDVHIEEDNCSNLSFGRLFLGEILFHLAVRRRYLCQWYMRKQYAIMRHSLSVVSYRGGSRRDSVKKIKAKCMQGSYCHGRVKVSIHSRFCGLGDKTADRCD

SEQ ID NO: 9649 - protein, 68 aa, Glycine max
  Coding DNA Sequence Number=SeqID_2123
MREKSEAVKGPHSRKKKGGKPQTECSELKIIRSLAHGSKQTKMSQPIISGPFSYFYRNTTEFTTPSIT

SEQ ID NO: 9650 - protein, 83 aa, Glycine max
  misc_feature (1)..(1): Xaa can be any naturally occurring amino acid
  misc_feature (5)..(5): Xaa can be any naturally occurring amino acid
  misc_feature (18)..(18): Xaa can be any naturally occurring amino acid
  misc_feature (70)..(70): Xaa can be any naturally occurring amino acid
  Coding DNA Sequence Number=SeqID_2125
XLRRXRYVLLSISSVAQXRLRITSNLNSHGYIEPTYTVRQISILEIRDQIITDRANRAAQRYVLSYESLXPTLCARHSLRGCR

SEQ ID NO: 9651 - protein, 165 aa, Glycine max
  misc_feature (2)..(2): Xaa can be any naturally occurring amino acid
  misc_feature (5)..(5): Xaa can be any naturally occurring amino acid
  misc_feature (7)..(7): Xaa can be any naturally occurring amino acid
  misc_feature (11)..(11): Xaa can be any naturally occurring amino acid
  misc_feature (13)..(15): Xaa can be any naturally occurring amino acid
  misc_feature (17)..(17): Xaa can be any naturally occurring amino acid
  misc_feature (19)..(20): Xaa can be any naturally occurring amino acid
  misc_feature (22)..(23): Xaa can be any naturally occurring amino acid
  misc_feature (25)..(27): Xaa can be any naturally occurring amino acid
  misc_feature (32)..(32): Xaa can be any naturally occurring amino acid
  misc_feature (34)..(36): Xaa can be any naturally occurring amino acid
  misc_feature (38)..(38): Xaa can be any naturally occurring amino acid
  misc_feature (40)..(40): Xaa can be any naturally occurring amino acid
  misc_feature (48)..(50): Xaa can be any naturally occurring amino acid
  misc_feature (55)..(55): Xaa can be any naturally occurring amino acid
  misc_feature (59)..(59): Xaa can be any naturally occurring amino acid
  misc_feature (87)..(87): Xaa can be any naturally occurring amino acid
  misc_feature (92)..(92): Xaa can be any naturally occurring amino acid
  misc_feature (102)..(103): Xaa can be any naturally occurring amino acid
  misc_feature (107)..(107): Xaa can be any naturally occurring amino acid
  misc_feature (109)..(110): Xaa can be any naturally occurring amino acid
  misc_feature (113)..(113): Xaa can be any naturally occurring amino acid
  misc_feature (125)..(125): Xaa can be any naturally occurring amino acid
  misc_feature (128)..(128): Xaa can be any naturally occurring amino acid
  misc_feature (130)..(130): Xaa can be any naturally occurring amino acid
  misc_feature (133)..(134): Xaa can be any naturally occurring amino acid
  misc_feature (138)..(139): Xaa can be any naturally occurring amino acid
  misc_feature (141)..(141): Xaa can be any naturally occurring amino acid
  misc_feature (143)..(143): Xaa can be any naturally occurring amino acid
  misc_feature (145)..(150): Xaa can be any naturally occurring amino acid
  misc_feature (161)..(162): Xaa can be any naturally occurring amino acid
  misc_feature (165)..(165): Xaa can be any naturally occurring amino acid
  Coding DNA Sequence Number=SeqID_2127
  Subcellular localization annotation: CTP_CleavageSite=97; ConfidenceScore=5.04e-01
RXNNXIXARSXIXXXSXSXXLXXIXXXSARIXQXXXSXQXTMPSSPRXXXGGRSXADTXKSNGRSRSPARSRGPISWTRELPHQKFXCSFWXLRISRSATVXXRNHXRXXHPXGSRSRLPSRPWXSAXYXAPXXRWNXXEXKXIXXXXXXRIGWEKEQNFXXFLX

SEQ ID NO: 9652 - protein, 121 aa, Glycine max
  misc_feature (23)..(23): Xaa can be any naturally occurring amino acid
  misc_feature (38)..(38): Xaa can be any naturally occurring amino acid
  misc_feature (41)..(41): Xaa can be any naturally occurring amino acid
  misc_feature (54)..(54): Xaa can be any naturally occurring amino acid
  misc_feature (56)..(56): Xaa can be any naturally occurring amino acid
  misc_feature (61)..(61): Xaa can be any naturally occurring amino acid
  misc_feature (71)..(72): Xaa can be any naturally occurring amino acid
  misc_feature (74)..(74): Xaa can be any naturally occurring amino acid
  misc_feature (80)..(80): Xaa can be any naturally occurring amino acid
  misc_feature (92)..(92): Xaa can be any naturally occurring amino acid
  misc_feature (100)..(102): Xaa can be any naturally occurring amino acid
  misc_feature (105)..(105): Xaa can be any naturally occurring amino acid
  Coding DNA Sequence Number=SeqID_2129
  Subcellular localization annotation: CTP_CleavageSite=45; ConfidenceScore=5.01e-01
CTNYIRIASYHNIDISTMTRRQXQSHTRHLRNRMHASXSAXLLTVVEYSSSDSXRXLISHXACHASLQRLXXDXLWFSIXSLSQNTSLIRAXHHTIHDYXXXLHXPSLITCFIVAIATATI

SEQ ID NO: 9653 - protein, 103 aa, Glycine max; identical to SEQ ID NO: 9067
  misc_feature (58)..(58): Xaa can be any naturally occurring amino acid
  misc_feature (78)..(78): Xaa can be any naturally occurring amino acid
  Coding DNA Sequence Number=SeqID_2131

SEQ ID NO: 9654 - protein, 210 aa, Glycine max
  misc_feature (60)..(210): Xaa can be any naturally occurring amino acid
  Coding DNA Sequence Number=SeqID_2133
  Subcellular localization annotation: CTP_CleavageSite=43; ConfidenceScore=5.79e-01
KQAQALAAYLIIFYQKPTTTSESTSATTPTTQTLPTSSSTSPRFSSRRLPGIDLGCRLQXXXXXXXXXXXXXXXXXXXXXXXXXXXXXXXXXXXXXXXXXXXXXXXXXXXXXXXXXXXXXXXXXXXXXXXXXXXXXXXXXXXXXXXXXXXXXXXXXXXXXXXXXXXXXXXXXXXXXXXXXXXXXXXXXXXXXXXXXXXXXXXXXXXXXXX

SEQ ID NO: 9655 - protein, 162 aa, Glycine max
  Coding DNA Sequence Number=SeqID_2135
  Gene Ontology: Cellular component=chloroplast thylakoid membrane
  Homolog annotation: Hit_ID=O64835; Match level="QueryCoverage=92%, HitCoverage=89%, E-value=2e-47, Identity=69%"; Hit description =Expressed protein
  Subcellular localization annotation: CTP_CleavageSite=52; ConfidenceScore=5.41e-01
MASLSLLSGGALQARCARHAHVSPRAAHATKAAPPSYSLTGASRRNLLFSLTAATVVTGLQPASMAETIPLFGIRKKLKKAEEEAVEIVKEGFETAEKGLETAEKGIEAAEKGVETAEKEIETAVSYNGLTQAGAVVAAEFVGVLVATSVVNGILGPEAQKS

SEQ ID NO: 9656 - protein, 109 aa, Glycine max
  misc_feature (93)..(93): Xaa can be any naturally occurring amino acid
  Coding DNA Sequence Number=SeqID_2136
LLSLDYSSWTATYTVLARVYAHTLAYTLSPRQRETNRLLSQLRHNLLSMYIRLRDSESYSLLSACYIGWCTDSRTVLVMRSDGYTAAGSCGVXLSHSAPPQRLRRQGTW

SEQ ID NO: 9657 - protein, 165 aa, Glycine max
  misc_feature (43)..(43): Xaa can be any naturally occurring amino acid
  misc_feature (50)..(50): Xaa can be any naturally occurring amino acid
  misc_feature (66)..(66): Xaa can be any naturally occurring amino acid
  misc_feature (94)..(94): Xaa can be any naturally occurring amino acid
  Coding DNA Sequence Number=SeqID_2137
  Gene Ontology: Mol. function=electron carrier activity; Biological process=electron transport
  Homolog annotation: Hit_ID=A2Q2Y8; Match level="QueryCoverage=81%, HitCoverage=87%, E-value=4e-22, Identity=47%"; Hit description=Blue (Type 1) copper domain
  Pfam annotation: Domain name=Cu_bind_like; Domain location=34-102; Score=-14.5; E_value=0.0023; Accession=PF02298.8; Description =Plastocyanin-like domain
MAGYSRASDLWILFLVCGFSEDKEILVEGKTDEWKDSVSESDXLDQWAEXSRVPDADYLDWIYDAXKRLSAAIYDDTTVVELDNPGTFYFISRXKGHCENAQKLGSGSRLPGKAPGSLTLADLHQLLPAPADLEGLAAATHQYLARVFIWGEIFGGTPGDSLLFG

SEQ ID NO: 9658 - protein, 64 aa, Glycine max
  Coding DNA Sequence Number=SeqID_2138
FPVLLHHGHEAPTVSIHLLPQSLIFTGYAFIFLKSSLISSSTISIYCMFRSCKAVEKSQYKKPG

SEQ ID NO: 9659 - protein, 98 aa, Glycine max
  misc_feature (20)..(20): Xaa can be any naturally occurring amino acid
  Coding DNA Sequence Number=SeqID_2140
DEHAKRDLQIINMFFSVKNXIFFTLIISKHPPKPKHLLLRHPPRPPVATTSRHSLPPNHLKDSERNPQNPPQGFSGEKPINPFFCSFSEVILTSKFFS

SEQ ID NO: 9660 - protein, 121 aa, Glycine max
  misc_feature (13)..(13): Xaa can be any naturally occurring amino acid
  Coding DNA Sequence Number=SeqID_2142
  Gene Ontology: Mol. function=structural constituent of ribosome; Cellular component=ribonucleoprotein complex; Biological process =translation
  Homolog annotation: Hit_ID=Q962R1; Match level="QueryCoverage=82%, HitCoverage=65%, E-value=5e-46, Identity=92%"; Hit description=40S ribosomal protein S18
  Pfam annotation: Domain name=Ribosomal_S13; Domain location=15-121; Score=180.9; E_value=3.2e-51; Accession=PF00416.12; Description =Ribosomal protein S13S18
MALVIPEKFQHIXLRIMNTNIDGKRKVMFAMTAIKGVGRRYANIVLKKADIDLDKRAGECSEEEVEKILTIMSHPRQYKIPDWFLNRQKDIQDGKYSQLTSSSLDSKLRDDLERLKKIRAH

SEQ ID NO: 9661 - protein, 80 aa, Glycine max
  misc_feature (48)..(48): Xaa can be any naturally occurring amino acid
  misc_feature (61)..(61): Xaa can be any naturally occurring amino acid
  misc_feature (78)..(78): Xaa can be any naturally occurring amino acid
  Coding DNA Sequence Number=SeqID_2143
SHEESSVEGLFCIDKVLCYILTIWICLYTHLTLSARHTSRVCIYATKXLNHRELRDSMLDXQRVYVCSRFSLSSRGSXGS

SEQ ID NO: 9662 - protein, 92 aa, Glycine max
  Coding DNA Sequence Number=SeqID_2145
QPTRYKRDSSVCRTTTGKKHFLDKSGSHRDRYKEIESDTHTHSRDRDTYRDRENYIGRMSDYKKRWKSPPHQRAEQGGSVSVHKCAHSFTSE

SEQ ID NO: 9663 - protein, 108 aa, Glycine max
  misc_feature (49)..(49): Xaa can be any naturally occurring amino acid
  Coding DNA Sequence Number=SeqID_2147
IRLMPKLVSACMLLHVRVIFVTHMSNIQYKNVRSDITQILTHVYSRFRXNHTPLNTRSDREHMTDEVQLQHNALRSAIHQHTSVWTHDTKCRYTSTHTKHHTTTVYTH

SEQ ID NO: 9664 - protein, 180 aa, Glycine max
  misc_feature (1)..(72): Xaa can be any naturally occurring amino acid
  Coding DNA Sequence Number=SeqID_205
XXXXXXXXXXXXXXXXXXXXXXXXXXXXXXXXXXXXXXXXXXXXXXXXXXXXXXXXXXXXXXXXXXXXXXXXQGGPFPPKIILKGAPKPFQFGDQTPLLVLKPRGGVSAPLNSKFSRNSKTRKFLFFPFPNGASCLTSNPLQKGNIPFCGITDASQNHKHKCFQEILLQAHSIKTVITSS

SEQ ID NO: 9665 - protein, 63 aa, Glycine max
  Coding DNA Sequence Number=SeqID_206
AAKASSKAKFEDRGSKTRTQPVVRVHSHGKDGEGNHWKNKEIPVKIKRTTLRETPQQVQHKVP

SEQ ID NO: 9666 - protein, 68 aa, Glycine max
  Coding DNA Sequence Number=SeqID_208
WHCRIQRQLKHKQPSLVSYLEYISSCKSLIKYYAKIALTLTLALQCSKFKLAQKHVLERQAEICCMKF

SEQ ID NO: 9667 - protein, 72 aa, Glycine max
  Coding DNA Sequence Number=SeqID_210
RRTSPAASRPTPFTVFVMLAQNYSLALEYTDTRPAEEPSATTACAQHASKADTLTSAAYTHTHMEERSSRTH

SEQ ID NO: 9668 - protein, 154 aa, Glycine max; identical to SEQ ID NO: 7568
  misc_feature (51)..(51): Xaa can be any naturally occurring amino acid
  misc_feature (91)..(91): Xaa can be any naturally occurring amino acid
  misc_feature (144)..(144): Xaa can be any naturally occurring amino acid
  Coding DNA Sequence Number=SeqID_212
  Subcellular localization annotation: CTP_CleavageSite=44; ConfidenceScore=5.33e-01

SEQ ID NO: 9669 - protein, 80 aa, Glycine max; identical to SEQ ID NO: 9503
  misc_feature (24)..(24): Xaa can be any naturally occurring amino acid
  misc_feature (64)..(64): Xaa can be any naturally occurring amino acid
  Coding DNA Sequence Number=SeqID_214

SEQ ID NO: 9670 - protein, 138 aa, Glycine max; identical to SEQ ID NO: 7570
  misc_feature (17)..(17): Xaa can be any naturally occurring amino acid
  misc_feature (20)..(20): Xaa can be any naturally occurring amino acid
  misc_feature (39)..(39): Xaa can be any naturally occurring amino acid
  misc_feature (49)..(49): Xaa can be any naturally occurring amino acid
  Coding DNA Sequence Number=SeqID_216

SEQ ID NO: 9671 - protein, 293 aa, Glycine max; identical to SEQ ID NO: 7558
  misc_feature (45)..(45): Xaa can be any naturally occurring amino acid
  misc_feature (283)..(283): Xaa can be any naturally occurring amino acid
  Coding DNA Sequence Number=SeqID_2149

SEQ ID NO: 9672 - protein, 89 aa, Glycine max
  misc_feature (12)..(12): Xaa can be any naturally occurring amino acid
  misc_feature (19)..(19): Xaa can be any naturally occurring amino acid
  misc_feature (57)..(57): Xaa can be any naturally occurring amino acid
  Coding DNA Sequence Number=SeqID_2151
  Gene Ontology: Mol. function=nucleoside-triphosphatase activity; Cellular component=protein complex; Biological process=protein catabolic process
  Homolog annotation: Hit_ID=Q9SSB5; Match level="QueryCoverage=98%, HitCoverage=20%, E-value=1e-28, Identity=71%"; Hit description=26S protease regulatory subunit 7
DDIPLLKTYCFXPYSTSIXKADIEIKDMAKKVNDLCGIKESDTGLSAPIQWDLVSVXQMMHEEQPLYVARCTIIINPNSKDSKNVINVN

SEQ ID NO: 9673 - protein, 140 aa, Glycine max
  misc_feature (35)..(35): Xaa can be any naturally occurring amino acid
  Coding DNA Sequence Number=SeqID_2152
  Subcellular localization annotation: CTP_CleavageSite=25; ConfidenceScore=5.37e-01
DLLPHAMNRPDSPRSCRHRPPSPTPAAVVRRPLCXRRCFLSLPDPSMEFTVSHPAFPLCYSLRLAPGAVSRRLGDHHLAPASVLRSGPSFSATGPVPEKGTAVLPGPVRRRPVQTTARSGPEPPSTLTHVKVKMVERMNF

SEQ ID NO: 9674 - protein, 158 aa, Glycine max
  misc_feature (8)..(8): Xaa can be any naturally occurring amino acid
  misc_feature (21)..(22): Xaa can be any naturally occurring amino acid
  misc_feature (29)..(29): Xaa can be any naturally occurring amino acid
  misc_feature (100)..(100): Xaa can be any naturally occurring amino acid
  misc_feature (102)..(103): Xaa can be any naturally occurring amino acid
  misc_feature (126)..(127): Xaa can be any naturally occurring amino acid
  misc_feature (149)..(149): Xaa can be any naturally occurring amino acid
  Coding DNA Sequence Number=SeqID_2154
YQRRLAAXNTIRGRIGRTHNXXATTADAXQPLHTRLLLSCVSVSTHTHRACRCGSNIINHTLRHYTASARSTYIHHTSAPRVALLTHIHHTSLDVHVRYXTXXAYHDMRHDMSGVCVMIDELVDYXXDGVWYIHNMRDEHTSYDVIRRXSIWIYTYTL

SEQ ID NO: 9675 - protein, 309 aa, Glycine max
  Coding DNA Sequence Number=SeqID_2156
  Gene Ontology: Mol. function=hydrolase activity; Biological process =DNA repair
  Homolog annotation: Hit_ID=A5AYT2; Match level="QueryCoverage=96%, HitCoverage=78%, E-value=1e-136, Identity=77%"; Hit description =Putative uncharacterized protein
  Pfam annotation: Domain name=Abhydrolase_1; Domain location=61-294; Score=49.4; E_value=1.3e-11; Accession=PF00561.10; Description =alphabeta hydrolase fold
IKQCRGPGSNLALYCSVWDWRGYSIRYQHSGNIGPALVLVHGFGANSDHWRNNISVLAQSHRVYSIDLIGYGYSDKPNPRQIGDHSFYTFETWATQLNEFCLDVIKDEAFFICNSIGGVVGLQAAVLAPHICQGIILLNISLRMLHIKKQPWYGKPFIRSLQRLLRDTDVGKFFFKTIATKESVRNILCQCYHDTSKVTDELVQIILGPGLEPGAAEVFLEFICYSGGPLPEELLPQVKCPILIAWGDKDPWEPIDIGRNYENFDSVEDFIVLPNVGHCPQDEAPHLVNPLVESFVARHAKSSTSTSHC

SEQ ID NO: 9676 - protein, 179 aa, Glycine max
  Coding DNA Sequence Number=SeqID_2157
  Gene Ontology: Mol. function=transporter activity; Cellular component= synaptic vesicle; Biological process=transport
  Homolog annotation: Hit_ID=UPI0000D556EA; Match level="QueryCoverage =92%, HitCoverage=13%, E-value=7e-61, Identity=55%"; Hit description =PREDICTED: similar to CG33555-PC, isoform C
  Pfam annotation: Domain name=C2; Domain location=32-121; Score=108.1; E_value=2.7e-29; Accession=PF00168.20; Description=C2 domain
QLRRPPPLKFVPPDVSGNTLGKKGKRSSKGELHVLVKEAKNLTANKANGSTDAFCKSYLLPDKGKSSKQKTAVIRRSCNPAWNHTFIYPDISLQELSERSLELTVWDHDRIASNEFLGGMRFNLGTGKHYGKSVDWMDSSGKELTLWQRMLERPNLWVESSITLRPSLDRTAFSTNSTT

SEQ ID NO: 9677 - protein, 150 aa, Glycine max
  Coding DNA Sequence Number=SeqID_2158
  Gene Ontology: Mol. function=DNA binding; Cellular component =cytoplasm; Biological process=protein transport
  Homolog annotation: Hit_ID=Q9LHG9; Match level="QueryCoverage=46%, HitCoverage=34%, E-value=8e-31, Identity=97%"; Hit description =Nascent polypeptide-associated complex subunit alpha-like protein 1
  Pfam annotation: Domain name=NAC; Domain location=57-116; Score=92.8; E_value=1.1e-24; Accession=PF01849.8; Description=NAC domain
MTTEEKEILAAKLEEQKIDLDKPEVEDADDNDEDDSDDDDDAEGQEGETGGKSKQSRSEKKSRKAMLKLGMKPITGVSRVTVKKSKNVMFVISKPDVFKSPASDTYVIFGEAKIEDLSSQIQSQAAEQFKAPDLSSMISKGESSSSAAVV

SEQ ID NO: 9678 - protein, 124 aa, Glycine max
  misc_feature (25)..(25): Xaa can be any naturally occurring amino acid
  misc_feature (62)..(62): Xaa can be any naturally occurring amino acid
  misc_feature (67)..(68): Xaa can be any naturally occurring amino acid
  misc_feature (96)..(96): Xaa can be any naturally occurring amino acid
  Coding DNA Sequence Number=SeqID_2159
RIIYKCNIYVWRYTFLLHFISCILXYVHLRIHSSLYFFCSLTSLLSPTVQSLCTFLFAPARXPALPXXSRAPSCISAHRAYLLSARVLRRLRRLCXRSFAGLSYVAFLSPVRIMLLQAVITATE

SEQ ID NO: 9679 - protein, 114 aa, Glycine max; identical to SEQ ID NO: 8090
  misc_feature (72)..(72): Xaa can be any naturally occurring amino acid
  Coding DNA Sequence Number=SeqID_2161

SEQ ID NO: 9680 - protein, 141 aa, Glycine max
  misc_feature (80)..(80): Xaa can be any naturally occurring amino acid
  Coding DNA Sequence Number=SeqID_2163
RLASHYPLSASHVISLAILADQSLVSSFAHPPPVLIHVQFGGALVCELVDVYSYRTVHHTSYRGVDLPLARVCSQTEQNXYCLHIVVMHFSLYLPTLLATSSDYSSIYLHAFTSHHIATFLVCALVLYSMQLRALPSILYS

SEQ ID NO: 9681 - protein, 116 aa, Glycine max
  misc_feature (10)..(10): Xaa can be any naturally occurring amino acid
  misc_feature (16)..(16): Xaa can be any naturally occurring amino acid
  misc_feature (38)..(38): Xaa can be any naturally occurring amino acid
  misc_feature (49)..(51): Xaa can be any naturally occurring amino acid
  misc_feature (73)..(73): Xaa can be any naturally occurring amino acid
  misc_feature (82)..(82): Xaa can be any naturally occurring amino acid
  misc_feature (87)..(87): Xaa can be any naturally occurring amino acid
  misc_feature (105)..(105): Xaa can be any naturally occurring amino acid
  misc_feature (110)..(110): Xaa can be any naturally occurring amino acid
  Coding DNA Sequence Number=SeqID_2165
CLVVTLACCXLYTRSXPHISISHSHRMYTTAISIILVXLIYTATRVIIXXXSLFSSIWCYELALSCDDSHGCXQLHRLCRGXYSYHXCSDRRSVNLERDSIVMIXHIVLXLIASTQ

SEQ ID NO: 9682 - protein, 90 aa, Glycine max
  misc_feature (15)..(16): Xaa can be any naturally occurring amino acid
  misc_feature (79)..(79): Xaa can be any naturally occurring amino acid
  Coding DNA Sequence Number=SeqID_2167
APPPNLLFLMRLKTXXGLKMMASSRSTARTHDQEHVLKLYNDHFQKQANNEIRREMKKSNEMEACTFVPKVNRVDPNNXDSDQCFNCSCL

SEQ ID NO: 9683 - protein, 124 aa, Glycine max
  misc_feature (121)..(121): Xaa can be any naturally occurring amino acid
  Coding DNA Sequence Number=SeqID_2169
LRQGARAAAYEEHQYKRHALLSRRLSTAQPRSHNLLRRDVDMHRPYRLTCVYAAYRAPQSRRRPHSRSLALVRILLCLCVVSVDAVSSSGPALNPRSRSFCLSLDRPTHLYVANVQNVQHXANI

SEQ ID NO: 9684 - protein, 97 aa, Glycine max
  misc_feature (15)..(16): Xaa can be any naturally occurring amino acid
  misc_feature (33)..(33): Xaa can be any naturally occurring amino acid
  misc_feature (62)..(62): Xaa can be any naturally occurring amino acid
  misc_feature (80)..(80): Xaa can be any naturally occurring amino acid
  Coding DNA Sequence Number=SeqID_2171
  Gene Ontology: Mol. function=glyceraldehyde-3-phosphate dehydrogenase (phosphorylating) activity; Cellular component=cytoplasm; Biological process=glucose metabolic process
  Homolog annotation: Hit_ID=Q07CZ3; Match level="QueryCoverage=83%, HitCoverage=23%, E-value=2e-18, Identity=64%"; Hit description =Glyceraldehyde-3-dehydrogenase C subunit
  Pfam annotation: Domain name=Gp_dh_N; Domain location=4-97; Score= -64.9; E_value=0.00048; Accession=PF00044.14; Description =Glyceraldehyde 3-phosphate dehydrogenase, NA
MGKVKIGINGFGKIXXLVARVALQRDDVELGGXNDPFITTDYMTYMVKIRQWVTDNWKNHRXVPLKDEKNFPLRDKAVTXVLGTGTPEEVPWGATGS

SEQ ID NO: 9685 - protein, 151 aa, Glycine max; identical to SEQ ID NO: 7742
  misc_feature (47)..(47): Xaa can be any naturally occurring amino acid
  misc_feature (50)..(50): Xaa can be any naturally occurring amino acid
  misc_feature (54)..(54): Xaa can be any naturally occurring amino acid
  misc_feature (62)..(62): Xaa can be any naturally occurring amino acid
  misc_feature (66)..(66): Xaa can be any naturally occurring amino acid
  misc_feature (70)..(70): Xaa can be any naturally occurring amino acid
  misc_feature (72)..(72): Xaa can be any naturally occurring amino acid
  misc_feature (75)..(75): Xaa can be any naturally occurring amino acid
  misc_feature (79)..(80): Xaa can be any naturally occurring amino acid
  misc_feature (89)..(89): Xaa can be any naturally occurring amino acid
  misc_feature (104)..(104): Xaa can be any naturally occurring amino acid
  misc_feature (106)..(106): Xaa can be any naturally occurring amino acid
  misc_feature (113)..(113): Xaa can be any naturally occurring amino acid
  misc_feature (123)..(123): Xaa can be any naturally occurring amino acid
  misc_feature (126)..(126): Xaa can be any naturally occurring amino acid
  misc_feature (135)..(135): Xaa can be any naturally occurring amino acid
  misc_feature (143)..(143): Xaa can be any naturally occurring amino acid
  misc_feature (150)..(150): Xaa can be any naturally occurring amino acid
  Coding DNA Sequence Number=SeqID_2172
  Subcellular localization annotation: CTP_CleavageSite=43; ConfidenceScore=5.43e-01

SEQ ID NO: 9686 - protein, 152 aa, Glycine max
  misc_feature (112)..(112): Xaa can be any naturally occurring amino acid
  misc_feature (130)..(130): Xaa can be any naturally occurring amino acid
  Coding DNA Sequence Number=SeqID_2173
  Homolog annotation: Hit_ID=Q7XBE0; Match level="QueryCoverage=95%, HitCoverage=15%, E-value=2e-59, Identity=75%"; Hit description =Putative gypsy-type retrotransposon
  Pfam annotation: Domain name=Transposase_28; Domain location=21-153; Score=20.8; E_value=2.1e-08; Accession=PF04195.3; Description =Putative gypsy type transposon
MALKRKRQSSTVAIILPIDLNSQLPFTGNHMSVISESDLLHLGVLPPKELYSWRICRGATVLTEDTHESVVYVPFLIRGLALHISPFFRGLLDFYDLNLTQLNPNSILQVSXFIHLCEAYLGILPHFGLXKYLHHCRPGMARGQHCNTPGVT

SEQ ID NO: 9687 - protein, 110 aa, Glycine max
  misc_feature (9)..(9): Xaa can be any naturally occurring amino acid
  misc_feature (24)..(25): Xaa can be any naturally occurring amino acid
  misc_feature (37)..(37): Xaa can be any naturally occurring amino acid
  misc_feature (50)..(50): Xaa can be any naturally occurring amino acid
  misc_feature (53)..(53): Xaa can be any naturally occurring amino acid
  misc_feature (65)..(65): Xaa can be any naturally occurring amino acid
  misc_feature (105)..(105): Xaa can be any naturally occurring amino acid
  misc_feature (108)..(108): Xaa can be any naturally occurring amino acid
  Coding DNA Sequence Number=SeqID_2174
TSMCLLFSXTLELPPVSIVDTLHXXAPLHVGHTINFXVVSIFVTAHRILXHYXIDASYSDVMSNXVVGVPNVNHTYSTLVPPPRNLVLATLLASPLYMMCVLAAXLCXEV

SEQ ID NO: 9688 - protein, 82 aa, Glycine max; identical to SEQ ID NO: 8573
  Coding DNA Sequence Number=SeqID_2176

SEQ ID NO: 9689 - protein, 151 aa, Glycine max
  misc_feature (4)..(6): Xaa can be any naturally occurring amino acid
  misc_feature (10)..(10): Xaa can be any naturally occurring amino acid
  misc_feature (20)..(20): Xaa can be any naturally occurring amino acid
  misc_feature (23)..(23): Xaa can be any naturally occurring amino acid
  misc_feature (48)..(48): Xaa can be any naturally occurring amino acid
  misc_feature (56)..(57): Xaa can be any naturally occurring amino acid
  misc_feature (118)..(118): Xaa can be any naturally occurring amino acid
  misc_feature (141)..(141): Xaa can be any naturally occurring amino acid
  misc_feature (145)..(145): Xaa can be any naturally occurring amino acid
  Coding DNA Sequence Number=SeqID_2178
LIYXXXGGVXTTHTNTNLQXLHXTSHLRYSSSHPPHSSLHRSINYFLXYLYSHLYXXSHTHHLEHAAHTTHTPPRIVMRVPFHLTHPPQKSFSSNTPPHSKVGISAALRAYSRVTLAXMMERGEVRSRLMLPSPNVLATRXDICXYYVVGV

SEQ ID NO: 9690 - protein, 82 aa, Glycine max
  misc_feature (40)..(40): Xaa can be any naturally occurring amino acid
  misc_feature (78)..(78): Xaa can be any naturally occurring amino acid
  Coding DNA Sequence Number=SeqID_2180
  Gene Ontology: Mol. function=peptidyl-prolyl cis-trans isomerase activity; Cellular component=Golgi apparatus; Biological process =protein folding
  Homolog annotation: Hit_ID=A2YL81; Match level="QueryCoverage=96%, HitCoverage=31%, E-value=3e-23, Identity=65%"; Hit description =Peptidyl-prolyl cis-trans isomerase
PSLKHEAFMLGTCKGKHNNKGCDLFITTGPIPDVNEEIFXFGQVIKGKDVVQEIEEVDTDEHYKPKVSFGILDVTLNXRSDV

SEQ ID NO: 9691 - protein, 245 aa, Glycine max
  misc_feature (173)..(173): Xaa can be any naturally occurring amino acid
  misc_feature (179)..(179): Xaa can be any naturally occurring amino acid
  misc_feature (199)..(199): Xaa can be any naturally occurring amino acid
  misc_feature (202)..(202): Xaa can be any naturally occurring amino acid
  misc_feature (209)..(209): Xaa can be any naturally occurring amino acid
  misc_feature (242)..(242): Xaa can be any naturally occurring amino acid
  Coding DNA Sequence Number=SeqID_2181
  Gene Ontology: Mol. function=signal transducer activity; Cellular component=membrane; Biological process=regulation of transcription, DNA-dependent
  Homolog annotation: Hit_ID=Q2IY43; Match level="QueryCoverage=95%, HitCoverage=28%, E-value=5e-84, Identity=67%"; Hit description =Diguanylate cyclase/phosphodiesterase
  Pfam annotation: Domain name=EAL; Domain location=2-239; Score=317.0; E_value=3.5e-92; Accession=PF00563.11; Description=EAL domain
IGYRAPPRASQALSNGEFELYYQPVVNLRSGDVSGFEALLRWHNPERGMVSPAEFIPLAEETGLIIPLGEWVLRKACAEAITWPLPIKVAVNLSPVQFKSRNLVQAVLTALAYSRLPPERLELEITETVLLGDTDANLATLHQLRKLGVHISMDDFGTGYSSASYLRSFPFDXIKIDQXVVRELTERPDCMGIVRAVAXGLXTSLAITXTGEGVETQEQFDRLCAKGCTENAGNIGQPARAXKRI

SEQ ID NO: 9692 - protein, 131 aa, Glycine max
  misc_feature (101)..(101): Xaa can be any naturally occurring amino acid
  Coding DNA Sequence Number=SeqID_1266
WSLSKLDHTSFCVHMYSSLIVFFLLIHVYLYLHLSYLSYFYLCLVVDLLCVLLYTHILLVQFVLRSSPPATICIIYHTLISLYYVSTRNQLVFAHTSISCXSRLTQFSMICILAIYRITAHLHYVVVQPFL

SEQ ID NO: 9693 - protein, 198 aa, Glycine max
  misc_feature (1)..(2): Xaa can be any naturally occurring amino acid
  misc_feature (8)..(8): Xaa can be any naturally occurring amino acid
  misc_feature (10)..(19): Xaa can be any naturally occurring amino acid
  misc_feature (22)..(29): Xaa can be any naturally occurring amino acid
  misc_feature (31)..(36): Xaa can be any naturally occurring amino acid
  misc_feature (38)..(38): Xaa can be any naturally occurring amino acid
  misc_feature (40)..(41): Xaa can be any naturally occurring amino acid
  misc_feature (44)..(45): Xaa can be any naturally occurring amino acid
  misc_feature (48)..(49): Xaa can be any naturally occurring amino acid
  misc_feature (53)..(53): Xaa can be any naturally occurring amino acid
  misc_feature (57)..(58): Xaa can be any naturally occurring amino acid
  misc_feature (60)..(61): Xaa can be any naturally occurring amino acid
  misc_feature (63)..(66): Xaa can be any naturally occurring amino acid
  misc_feature (68)..(70): Xaa can be any naturally occurring amino acid
  misc_feature (73)..(73): Xaa can be any naturally occurring amino acid
  misc_feature (75)..(75): Xaa can be any naturally occurring amino acid
  misc_feature (84)..(84): Xaa can be any naturally occurring amino acid
  misc_feature (86)..(89): Xaa can be any naturally occurring amino acid
  misc_feature (95)..(97): Xaa can be any naturally occurring amino acid
  misc_feature (101)..(102): Xaa can be any naturally occurring amino acid
  misc_feature (106)..(106): Xaa can be any naturally occurring amino acid
  misc_feature (110)..(111): Xaa can be any naturally occurring amino acid
  misc_feature (115)..(116): Xaa can be any naturally occurring amino acid
  misc_feature (120)..(120): Xaa can be any naturally occurring amino acid
  misc_feature (122)..(122): Xaa can be any naturally occurring amino acid
  misc_feature (125)..(132): Xaa can be any naturally occurring amino acid
  misc_feature (134)..(135): Xaa can be any naturally occurring amino acid
  misc_feature (138)..(142): Xaa can be any naturally occurring amino acid
  misc_feature (147)..(150): Xaa can be any naturally occurring amino acid
  misc_feature (157)..(157): Xaa can be any naturally occurring amino acid
  misc_feature (160)..(161): Xaa can be any naturally occurring amino acid
  misc_feature (163)..(164): Xaa can be any naturally occurring amino acid
  misc_feature (166)..(166): Xaa can be any naturally occurring amino acid
  misc_feature (168)..(169): Xaa can be any naturally occurring amino acid
  misc_feature (179)..(179): Xaa can be any naturally occurring amino acid
  misc_feature (186)..(187): Xaa can be any naturally occurring amino acid
  misc_feature (192)..(192): Xaa can be any naturally occurring amino acid
  misc_feature (195)..(195): Xaa can be any naturally occurring amino acid
  misc_feature (197)..(198): Xaa can be any naturally occurring amino acid
  Coding DNA Sequence Number=SeqID_1268
XXRSVYIXAXXXXXXXXXXSSXXXXXXXXNXXXXXXTXNXXRPXXPGXXPNSXELVXXEXXYXXXXQXXXYEXTXTVDSVTAAXQXXXXKLIINXXXGRPXXCCTXHTSXXYHLXXFLNXIXINXXXXXXXXEXXDKXXXXXRVDWXXXXVSLSMPXQSXXLXXWXTXXNSRVLSTETXTELSTCXXCVMEXLAXTXX

SEQ ID NO: 9694 - protein, 150 aa, Glycine max
  Coding DNA Sequence Number=SeqID_1270
HSSVHRSYGICTWIRTRLNVWLLLLRRLTLLLRAKDVECDGGRNKDARQLLLQLLATLEASLLLQQKIELRIHFTQVCSKLFHILVHAAPLCGFNSQSTTGEGAGAGAAEDVRHLRGRSAEDGDGGTQKVRSHRRGLAASATGMAARAGR

SEQ ID NO: 9695 - protein, 114 aa, Glycine max
  misc_feature (19)..(19): Xaa can be any naturally occurring amino acid
  misc_feature (54)..(54): Xaa can be any naturally occurring amino acid
  misc_feature (88)..(88): Xaa can be any naturally occurring amino acid
  misc_feature (95)..(95): Xaa can be any naturally occurring amino acid
  misc_feature (110)..(110): Xaa can be any naturally occurring amino acid
  misc_feature (114)..(114): Xaa can be any naturally occurring amino acid
  Coding DNA Sequence Number=SeqID_1272
HNLVSHSNEYLLQYIYTYXMIHNHPCHARLSVDYAAETQHTPRYYLSTVLLCQXSPCSLTSHLTYAALSRPHVHHSQLAQHDESSRTXPVLALSXHETPYRTRSMRYLTXSLDX

SEQ ID NO: 9696 - protein, 135 aa, Glycine max
  misc_feature (90)..(90): Xaa can be any naturally occurring amino acid
  misc_feature (133)..(133): Xaa can be any naturally occurring amino acid
  Coding DNA Sequence Number=SeqID_1273
  Gene Ontology: Mol. function=DNA polymerase processivity factor activity; Cellular component=PCNA complex; Biological process =regulation of DNA replication
  Homolog annotation: Hit_ID=Q9ZW35; Match level="QueryCoverage=100%, HitCoverage=51%, E-value=6e-69, Identity=96%"; Hit description =Proliferating cell nuclear antigen 2
  Pfam annotation: Domain name=PCNA_N; Domain location=1-125; Score =315.8; E_value=7.7e-92; Accession=PF00705.9; Description =Proliferating cell nuclear antigen, N-termin
MLELRLVQGSLLKKVLESVKDLVNDANFDCSSTGFSLQAMDSSHVALVSLLLRSEGFEHYRCDRNLSMGMNLGNMSKMLKCAGNDDIITXKADDGGDTVTFMFESPTQDKIADFEMKLMDIDSEHLGIPDAEXHS

SEQ ID NO: 9697 - protein, 114 aa, Glycine max
  misc_feature (7)..(7): Xaa can be any naturally occurring amino acid
  misc_feature (28)..(29): Xaa can be any naturally occurring amino acid
  misc_feature (81)..(81): Xaa can be any naturally occurring amino acid
  misc_feature (109)..(109): Xaa can be any naturally occurring amino acid
  Coding DNA Sequence Number=SeqID_1274
YRMIARXCVIRATHELRATRLRLRAPTXXGAYCDLRREVLSRVGETHMSADADEIHCYDLCAVIPRIARARSIVLCTQVCXCFADGRKTDEARVRAREPMRSRARHSLXRRLLR

SEQ ID NO: 9698 - protein, 121 aa, Glycine max
  Coding DNA Sequence Number=SeqID_1276
ITEGVGFLLLVISVSSARGAPVAIQGLCRRRCCNPVCPHPQAGDHGKLPACPSMVGTLLFLPHDGDPLPARSPVAAPPAAASSLTAARFPFSWLTFLAYFGVSLTSVPSHVSSCILTTLRC

SEQ ID NO: 9699 - protein, 151 aa, Glycine max
  misc_feature (5)..(6): Xaa can be any naturally occurring amino acid
  misc_feature (8)..(16): Xaa can be any naturally occurring amino acid
  misc_feature (20)..(20): Xaa can be any naturally occurring amino acid
  misc_feature (25)..(26): Xaa can be any naturally occurring amino acid
  misc_feature (32)..(41): Xaa can be any naturally occurring amino acid
  misc_feature (43)..(48): Xaa can be any naturally occurring amino acid
  misc_feature (50)..(51): Xaa can be any naturally occurring amino acid
  misc_feature (59)..(60): Xaa can be any naturally occurring amino acid
  misc_feature (69)..(71): Xaa can be any naturally occurring amino acid
  misc_feature (73)..(76): Xaa can be any naturally occurring amino acid
  misc_feature (88)..(89): Xaa can be any naturally occurring amino acid
  misc_feature (96)..(106): Xaa can be any naturally occurring amino acid
  misc_feature (109)..(109): Xaa can be any naturally occurring amino acid
  misc_feature (118)..(118): Xaa can be any naturally occurring amino acid
  misc_feature (125)..(125): Xaa can be any naturally occurring amino acid
  misc_feature (131)..(132): Xaa can be any naturally occurring amino acid
  misc_feature (148)..(148): Xaa can be any naturally occurring amino acid
  Coding DNA Sequence Number=SeqID_1278
FFSPXXPXXXXXXXXXTLLXTLPSXXITTHIXXXXXXXXXXPXXXXXXVXXGMTDGVEXXRASDEIYEXXXEXXXXPSWRVALVAVSXXVPARLLXXXXXXXXXXXREXDGRLLGGRXHHNTMTXTDYDFXXAMAPSPPSLSLEQTLXSPF

SEQ ID NO: 9700 - protein, 166 aa, Glycine max
  misc_feature (155)..(155): Xaa can be any naturally occurring amino acid
  Coding DNA Sequence Number=SeqID_2182
  Gene Ontology: Mol. function=nucleoside-triphosphatase activity; Cellular component=chloroplast; Biological process=nucleotide -excision repair
  Homolog annotation: Hit_ID=A5BB92; Match level="QueryCoverage=100%, HitCoverage=18%, E-value=8e-65, Identity=72%"; Hit description =Putative uncharacterized protein
  Pfam annotation: Domain name=AAA_2; Domain location=1-132; Score =129.2; E_value=1.2e-35; Accession=PF07724.4; Description=ATPase family associated with various
RHTVSKLIGSPPEYVGYTESGQLTEAVQHHPYTVILFDEIEKSHPNMFNMMLQILKDKRLTDNKGITVNFKNTLLIMTSNVKSNIINKRSHKIKFNLNYNKKDSSYNRIKNLVTRKLKQYFKPEFLNKLDKIIIFEQLTKLEIKKITNIMLREYXNRLKMKDIELQ

SEQ ID NO: 9701 - protein, 184 aa, Glycine max; identical to SEQ ID NO: 7745
  misc_feature (18)..(18): Xaa can be any naturally occurring amino acid
  misc_feature (47)..(47): Xaa can be any naturally occurring amino acid
  misc_feature (52)..(52): Xaa can be any naturally occurring amino acid
  misc_feature (58)..(58): Xaa can be any naturally occurring amino acid
  misc_feature (70)..(70): Xaa can be any naturally occurring amino acid
  misc_feature (78)..(78): Xaa can be any naturally occurring amino acid
  misc_feature (105)..(106): Xaa can be any naturally occurring amino acid
  misc_feature (114)..(114): Xaa can be any naturally occurring amino acid
  misc_feature (116)..(116): Xaa can be any naturally occurring amino acid
  misc_feature (132)..(133): Xaa can be any naturally occurring amino acid
  misc_feature (137)..(138): Xaa can be any naturally occurring amino acid
  misc_feature (145)..(145): Xaa can be any naturally occurring amino acid
  misc_feature (151)..(151): Xaa can be any naturally occurring amino acid
  misc_feature (159)..(159): Xaa can be any naturally occurring amino acid
  misc_feature (163)..(163): Xaa can be any naturally occurring amino acid
  misc_feature (183)..(183): Xaa can be any naturally occurring amino acid
  Coding DNA Sequence Number=SeqID_2183

SEQ ID NO: 9702 - protein, 137 aa, Glycine max
  misc_feature (100)..(100): Xaa can be any naturally occurring amino acid
  misc_feature (112)..(112): Xaa can be any naturally occurring amino acid
  misc_feature (114)..(114): Xaa can be any naturally occurring amino acid
  misc_feature (117)..(117): Xaa can be any naturally occurring amino acid
  misc_feature (123)..(123): Xaa can be any naturally occurring amino acid
  misc_feature (127)..(127): Xaa can be any naturally occurring amino acid
  misc_feature (132)..(132): Xaa can be any naturally occurring amino acid
  misc_feature (136)..(136): Xaa can be any naturally occurring amino acid
  Coding DNA Sequence Number=SeqID_2185
  Gene Ontology: Mol. function=histone-lysine N-methyltransferase activity; Cellular component=cellular_component; Biological process =chromatin modification
  Homolog annotation: Hit_ID=UPI00005A260D; Match level="QueryCoverage =69%, HitCoverage=7%, E-value=9e-09, Identity=32%"; Hit description =PREDICTED: similar to HLA-B associated transcript 8 isoform a
MPYQRINYLHDSFAYDKNLPEVKTAKSKPCKHCVHEKIINYDNEGRLSVQIFAEHLKFVNNETVQPVKMYECFSDCRCRKINCKNMVTQVAVPIRTQVFXTALTGWGIRSMXNXKAXTFVGIXTGEXISDDXVEIXA

SEQ ID NO: 9703 - protein, 167 aa, Glycine max
  misc_feature (75)..(75): Xaa can be any naturally occurring amino acid
  misc_feature (115)..(115): Xaa can be any naturally occurring amino acid
  misc_feature (149)..(149): Xaa can be any naturally occurring amino acid
  misc_feature (152)..(152): Xaa can be any naturally occurring amino acid
  Coding DNA Sequence Number=SeqID_2186
  Subcellular localization annotation: CTP_CleavageSite=82; ConfidenceScore=5.07e-01
FISYPSAVTLRDLLHLWVFLVFLIPNVLPSIVFHAPSTSPTIRPSYTRTLLSSPHACLTVISRSSPAFSLCPNVXLLSTYTSATSRFSICYSLPPPHNRLRTPLAILNVLLRNSXVYSLLHICCVCICSYTLNVCTAYLHSATPSPYIXILXIDSRALTPLAPSQIS

SEQ ID NO: 9704 - protein, 87 aa, Glycine max
  Coding DNA Sequence Number=SeqID_2188
RFLKALSHKHSIQHEEASHTGAMVRYSLSSASSICFIVSIFLRVIYNTLTSSPPRPHKRTADIYYTIYAFCYNDRMRVNQYHLLVVS

SEQ ID NO: 9705 - protein, 188 aa, Glycine max
  Coding DNA Sequence Number=SeqID_2190
NNSPRLAPRERWGGGETWWLDKRVVESKCPAAREDESGGGPPDKRGRRAEMGCARGCLGTFLLCWFSPPAPHRQTRAPRMSFPMWRGSNSRPPARCSAKLFVCATPLTSRPLQNPLAYLLICLAGPTSGVKTKPARGGGAGGSKQETRCARAPPPPNRQRTVNFCSPRGKSVWVVVARHNIAAHNICL

SEQ ID NO: 9706 - protein, 103 aa, Glycine max
  misc_feature (10)..(10): Xaa can be any naturally occurring amino acid
  misc_feature (39)..(39): Xaa can be any naturally occurring amino acid
  misc_feature (43)..(44): Xaa can be any naturally occurring amino acid
  misc_feature (50)..(50): Xaa can be any naturally occurring amino acid
  misc_feature (55)..(55): Xaa can be any naturally occurring amino acid
  misc_feature (57)..(57): Xaa can be any naturally occurring amino acid
  misc_feature (67)..(68): Xaa can be any naturally occurring amino acid
  misc_feature (71)..(71): Xaa can be any naturally occurring amino acid
  misc_feature (75)..(75): Xaa can be any naturally occurring amino acid
  misc_feature (79)..(79): Xaa can be any naturally occurring amino acid
  misc_feature (83)..(84): Xaa can be any naturally occurring amino acid
  misc_feature (99)..(99): Xaa can be any naturally occurring amino acid
  misc_feature (102)..(102): Xaa can be any naturally occurring amino acid
  Coding DNA Sequence Number=SeqID_2192
IVLVYSVGEXSSLRVCAVGWCRVWYDSCELDASVGVLTXYPPXXSPHTLXYRYAXSXLSRFPSYTVXXSSXLLRXPPPXAHVXXDSRHIYTTCYVSVSXVVXA

SEQ ID NO: 9707 - protein, 187 aa, Glycine max
  misc_feature (153)..(153): Xaa can be any naturally occurring amino acid
  Coding DNA Sequence Number=SeqID_2194
  Gene Ontology: Mol. function=ferrochelatase activity; Biological process=heme biosynthetic process
  Homolog annotation: Hit_ID=A9P948; Match level="QueryCoverage=89%, HitCoverage=70%, E-value=5e-37, Identity=47%"; Hit description =Putative uncharacterized protein
  Pfam annotation: Domain name=DUF581; Domain location=89-146; Score =112.5; E_value=1.3e-30; Accession=PF04570.5; Description=Protein of unknown function (DUF581)
MGDLLGSSRVLPKHTVCTSNLNRSGPIPVHYTKNPDEFDVEEYTYVTCRVPNKTFTKVYYDGGEGDIIRRQNNNNNNKNNLVVLRRPEPQPVIEPESSYPTSSFLSSCHLCGKKLHGKDIYMYRGEKAFCSPECRSSQITMDEGTERCSSDAXRSVGKSGGPYTREQQLSTRFLRVSVTGVGGELHY

SEQ ID NO: 9708 - protein, 281 aa, Glycine max
  misc_feature (56)..(56): Xaa can be any naturally occurring amino acid
  misc_feature (84)..(84): Xaa can be any naturally occurring amino acid
  misc_feature (102)..(102): Xaa can be any naturally occurring amino acid
  Coding DNA Sequence Number=SeqID_2195
  Gene Ontology: Mol. function=hydrolase activity, hydrolyzing O -glycosyl compounds; Cellular component=cell wall; Biological process= carbohydrate metabolic process
  Homolog annotation: Hit_ID=Q8S902; Match level="QueryCoverage=100%, HitCoverage=98%, E-value=1e-124, Identity=79%"; Hit description =Syringolide-induced protein 19-1-5
  Pfam annotation: Domain name=Glyco_hydro_16; Domain location=20-201; Score=293.6; E_value=3.8e-85; Accession=PF00722.11; Description =Glycosyl hydrolases family 16
  Pfam annotation: Domain name=XET_C; Domain location=216-278; Score =19.5; E_value=0.00014; Accession=PF06955.3; Description=Xyloglucan endo-transglycosylase (XET
  Pfam module annotation: Pfam domain module=Glyco_hydro_16::XET_C; Domain location=20-201::216-278
RVVLLICTVGYFVIASAGNVYQDFDITWGDGRAKILNNGELITLSLDKAWGSGYHXKNEYLFGKIDMQLKLVPGNFAGTGADFXLSSKGATWDEIDFEFLGXLSGDPYILHTNVFSQGRARGEQQFYLWFDPTADFHTYSILWNPQRIVFSVDGSPIREFKNMESKGVPFPKNQAMGIYSSLWNAYDWAPRGGLVKTDWTQAPFPAFFRNFNANACPMSSGNLFWGSNNPSFFNKNVWVSEGLGSPDQERVKWVQKNYMISNFWFGPQRFPQGLPLEGNPA

SEQ ID NO: 9709 - protein, 68 aa, Glycine max
  Coding DNA Sequence Number=SeqID_2196
LYCADHSSSSFQQPLEIDEKLTAVYFVRTMIKENKLWSSLASANSARLRRICLKDNINLTLAYLNEVR

SEQ ID NO: 9710 - protein, 126 aa, Glycine max
  misc_feature (38)..(38): Xaa can be any naturally occurring amino acid
  misc_feature (125)..(125): Xaa can be any naturally occurring amino acid
  Coding DNA Sequence Number=SeqID_2197
  Homolog annotation: Hit_ID=A2Z278; Match level="QueryCoverage=71%, HitCoverage=47%, E-value=7e-28, Identity=70%"; Hit description =Putative uncharacterized protein
MATLALPPTAATLPAEEDPRTGEKPSADDSAADPSDIXSGWVFLGKSDVVPADQAAAAIDAAGHRRLGFSPLPMLPIWVQMVLGGVVYTAVPFYKRARQLEDKAIENVETALDVLERASEVTEKXA

SEQ ID NO: 9711 - protein, 111 aa, Glycine max
  misc_feature (38)..(38): Xaa can be any naturally occurring amino acid
  misc_feature (45)..(45): Xaa can be any naturally occurring amino acid
  misc_feature (79)..(80): Xaa can be any naturally occurring amino acid
  misc_feature (88)..(88): Xaa can be any naturally occurring amino acid
  misc_feature (92)..(92): Xaa can be any naturally occurring amino acid
  misc_feature (96)..(98): Xaa can be any naturally occurring amino acid
  misc_feature (101)..(101): Xaa can be any naturally occurring amino acid
  Coding DNA Sequence Number=SeqID_2198
ICAMLGHLRLASSAARHSREKTRERSRVTAALEQLKTXIITYSLXVRLHLHIQICSSTRTRVLHYTMLILHSQGPSHAXXGEPRHQRXSEHXRARXXXRVXTRVSEVVNIR

SEQ ID NO: 9712 - protein, 137 aa, Glycine max
  misc_feature (57)..(57): Xaa can be any naturally occurring amino acid
  misc_feature (82)..(82): Xaa can be any naturally occurring amino acid
  misc_feature (92)..(92): Xaa can be any naturally occurring amino acid
  misc_feature (107)..(107): Xaa can be any naturally occurring amino acid
  misc_feature (109)..(109): Xaa can be any naturally occurring amino acid
  misc_feature (111)..(111): Xaa can be any naturally occurring amino acid
  misc_feature (118)..(118): Xaa can be any naturally occurring amino acid
  misc_feature (126)..(126): Xaa can be any naturally occurring amino acid
  misc_feature (131)..(131): Xaa can be any naturally occurring amino acid
  Coding DNA Sequence Number=SeqID_2200
VFYCMLYNNVQTTEWTISDTLDRLISVVSTPHFSLVDTSRICLLFSYIRHLVYSIEXHMSRCCLCVISSLLTRSRLSHRYYXCDECATTTHXNISRCATSTQPRTKXPXYXTSGPLSXTQRMMTTXTHLKXYTTSIG

SEQ ID NO: 9713 - protein, 66 aa, Glycine max
  Coding DNA Sequence Number=SeqID_2202
RRLGAHNFMDATLVSSREEASCTGDLDGALRPRPPPDYDAREEEDIAVAAASAVAAAAASQPTDGP

SEQ ID NO: 9714 - protein, 156 aa, Glycine max
  Coding DNA Sequence Number=SeqID_2204
  Homolog annotation: Hit_ID=Q9LSD1; Match level="QueryCoverage=99%, HitCoverage=87%, E-value=1e-68, Identity=73%"; Hit description =Genomic DNA, chromosome 3, P1 clone: MOJ10
MASLQSSGMLTKEQMVYLFDRFDYLTSQSDVKKRISDAVEDKQEAVAVTTAIQEEIFLEMGIDPGFGIGCLGKLNSAFENDKELMIGFYKFLAKEEMACEEAELGPDGFEQKMEAQRQLHEQQLEMLKYMRKFPLDDQSAILKKLQKQLENADFEP

SEQ ID NO: 9715 - protein, 92 aa, Glycine max
  misc_feature (18)..(18): Xaa can be any naturally occurring amino acid
  misc_feature (29)..(29): Xaa can be any naturally occurring amino acid
  misc_feature (33)..(33): Xaa can be any naturally occurring amino acid
  Coding DNA Sequence Number=SeqID_2205
  Gene Ontology: Mol. function=translation initiation factor activity; Cellular component=cytoplasm; Biological process=regulation of translation
  Homolog annotation: Hit_ID=P41568; Match level="QueryCoverage=100%, HitCoverage=81%, E-value=5e-30, Identity=69%"; Hit description =Protein translation factor SUI1 homolog 1
  Pfam annotation: Domain name=SUI1; Domain location=4-85; Score=86.1; E_value=1.1e-22; Accession=PF01253.13; Description=Translation initiation factor SUI1
DSGARTQEYVHVRVEQRXGKVKHTTGLRXKERXSYSKKLRTLKKEFCCNGTVVKDPEVGQVIQLQGDQRKNVSTFLMQAGIVKKEFIKLHGF

SEQ ID NO: 9716 - protein, 163 aa, Glycine max
  misc_feature (41)..(41): Xaa can be any naturally occurring amino acid
  misc_feature (46)..(46): Xaa can be any naturally occurring amino acid
  misc_feature (93)..(93): Xaa can be any naturally occurring amino acid
  misc_feature (102)..(102): Xaa can be any naturally occurring amino acid
  misc_feature (117)..(118): Xaa can be any naturally occurring amino acid
  misc_feature (141)..(141): Xaa can be any naturally occurring amino acid
  misc_feature (146)..(146): Xaa can be any naturally occurring amino acid
  Coding DNA Sequence Number=SeqID_2206
HSTEQSHMNTIVYIVHKRHICVVVRVDAHERRRLLSNSTAXSHTHXTRLSHHMYRSWTGGEEYETAHTCRRIYTLPRSGHYNISTYVVLTIVXELLAASISXEYERSARDVACGASXXTSPRSSHVQARSDHDDVAVYNIXIIHTXATHHEDTYSRRQSVRGD

SEQ ID NO: 9717 - protein, 116 aa, Glycine max
  misc_feature (80)..(80): Xaa can be any naturally occurring amino acid
  Coding DNA Sequence Number=SeqID_2208
HRRADRSYRDSDHSLMDNLHHQHGVGRVTRIHNSKNTATSSYDIYIHITIIYILIIHYIHYSHMNTILYIIYKLLSLSNXTYTHIYISQNTRDKHTDSNHHRDSRTTDKYTIHSYT

SEQ ID NO: 9718 - protein, 111 aa, Glycine max
  misc_feature (1)..(49): Xaa can be any naturally occurring amino acid
  misc_feature (51)..(52): Xaa can be any naturally occurring amino acid
  misc_feature (54)..(54): Xaa can be any naturally occurring amino acid
  misc_feature (56)..(57): Xaa can be any naturally occurring amino acid
  misc_feature (59)..(59): Xaa can be any naturally occurring amino acid
  misc_feature (62)..(63): Xaa can be any naturally occurring amino acid
  misc_feature (65)..(66): Xaa can be any naturally occurring amino acid
  misc_feature (69)..(69): Xaa can be any naturally occurring amino acid
  misc_feature (73)..(73): Xaa can be any naturally occurring amino acid
  misc_feature (79)..(82): Xaa can be any naturally occurring amino acid
  misc_feature (84)..(85): Xaa can be any naturally occurring amino acid
  misc_feature (87)..(87): Xaa can be any naturally occurring amino acid
  misc_feature (89)..(89): Xaa can be any naturally occurring amino acid
  misc_feature (92)..(92): Xaa can be any naturally occurring amino acid
  misc_feature (102)..(103): Xaa can be any naturally occurring amino acid
  misc_feature (106)..(107): Xaa can be any naturally occurring amino acid
  misc_feature (109)..(109): Xaa can be any naturally occurring amino acid
  misc_feature (111)..(111): Xaa can be any naturally occurring amino acid
  Coding DNA Sequence Number=SeqID_2209
XXXXXXXXXXXXXXXXXXXXXXXXXXXXXXXXXXXXXXXXXXXXXXXXXGXXIXPXXRXAFXXPXXSRXQIEXASPAVXXXXRXXWXPXARXNSFFFFFYRXXHKXXAXYX

SEQ ID NO: 9719 - protein, 117 aa, Glycine max; identical to SEQ ID NO: 8043
  misc_feature (2)..(2): Xaa can be any naturally occurring amino acid
  misc_feature (4)..(4): Xaa can be any naturally occurring amino acid
  misc_feature (14)..(14): Xaa can be any naturally occurring amino acid
  misc_feature (29)..(29): Xaa can be any naturally occurring amino acid
  misc_feature (32)..(33): Xaa can be any naturally occurring amino acid
  misc_feature (52)..(52): Xaa can be any naturally occurring amino acid
  misc_feature (66)..(66): Xaa can be any naturally occurring amino acid
  misc_feature (69)..(69): Xaa can be any naturally occurring amino acid
  misc_feature (85)..(85): Xaa can be any naturally occurring amino acid
  misc_feature (87)..(89): Xaa can be any naturally occurring amino acid
  misc_feature (91)..(93): Xaa can be any naturally occurring amino acid
  misc_feature (116)..(116): Xaa can be any naturally occurring amino acid
  Coding DNA Sequence Number=SeqID_2211

SEQ ID NO: 9720 - protein, 96 aa, Glycine max
  misc_feature (2)..(2): Xaa can be any naturally occurring amino acid
  misc_feature (14)..(14): Xaa can be any naturally occurring amino acid
  misc_feature (24)..(24): Xaa can be any naturally occurring amino acid
  misc_feature (41)..(41): Xaa can be any naturally occurring amino acid
  misc_feature (61)..(61): Xaa can be any naturally occurring amino acid
  Coding DNA Sequence Number=SeqID_2213
YXRLDALLSPISCXAYTDEPREAXLGRVYCECIGICDRCMXDALPHCYRLYRSSRHARMLXSPRCCALRAARLPLARHVPRASADSRLYAALFRCA

SEQ ID NO: 9721 - protein, 118 aa, Glycine max
  misc_feature (87)..(87): Xaa can be any naturally occurring amino acid
  Coding DNA Sequence Number=SeqID_2215
  Subcellular localization annotation: CTP_CleavageSite=42; ConfidenceScore=5.02e-01
EQKWAWLALSPSATRWTDAQRMGKEASNLARWSLTPSPERWRCAMPTRSGQSDRSEEGLAPSPLYNRKGKLEGGRKREEKECVAPGXFAVGGWPVASELRPERARAAQERCVRRRNER

SEQ ID NO: 9722 - protein, 62 aa, Glycine max
  misc_feature (5)..(6): Xaa can be any naturally occurring amino acid
  Coding DNA Sequence Number=SeqID_2217
  Gene Ontology: Mol. function=DNA binding; Cellular component=nucleus; Biological process=regulation of transcription
  Homolog annotation: Hit_ID=Q2HTW0; Match level="QueryCoverage=79%, HitCoverage=10%, E-value=5e-15, Identity=81%"; Hit description =Homeodomain-related
GTFLXXDDPKINALMQQAELLSSLALKVDAENMDQSLENAWKVRLDSLNGFYDNFADQLVSI

SEQ ID NO: 9723 - protein, 171 aa, Glycine max
  Coding DNA Sequence Number=SeqID_2218
  Homolog annotation: Hit_ID=Q3EBA8; Match level="QueryCoverage=92%, HitCoverage=58%, E-value=2e-52, Identity=65%"; Hit description =Uncharacterized protein At3g07460.2
  Pfam annotation: Domain name=DUF538; Domain location=8-148; Score =226.6; E_value=5.6e-65; Accession=PF04398.3; Description=Protein of unknown function, DUF538
MIRILQISILCFFLVAGISISSSEEEEETIYKILQDNGLPSGIFPKGVTEFTFDGETGRFSVYLNQSCDAKYETELRYDTNITGTLSSANVTDLSGISAQDLFLWFPVKGIRVDVPSSGLIYFDVGVVRKQYSLSVFETPRDCVAVRRENEVESSVLSLHRVDETLGRNVI

SEQ ID NO: 9724 - protein, 99 aa, Glycine max
  misc_feature (23)..(23): Xaa can be any naturally occurring amino acid
  misc_feature (65)..(65): Xaa can be any naturally occurring amino acid
  misc_feature (69)..(69): Xaa can be any naturally occurring amino acid
  Coding DNA Sequence Number=SeqID_2219
AYRGVRGEYCPFVTSVWTRVERXSSSGIYVLSKLYLLSMNTVTRGASRLVKRRLIFHQSFRKAWXSATXPRVWLFVRAIDPRRVRLMDTSETYVRSASE

SEQ ID NO: 9725 - protein, 160 aa, Glycine max
  Coding DNA Sequence Number=SeqID_2221
NCSRKFILSQKMPKIMWKSLHLCFPSNLTKCYSSPCLPPLAAAAAEDDDPSRPSIVLINNFNLLYHNDHNNYHHRVVDLPSSSTATTFSSSATSSYESESQDISPELSAAFASRRFFFSSPGRSNAITDSPETRSRELSDNSDSATTKTPKKTKYDTSMN

SEQ ID NO: 9726 - protein, 187 aa, Glycine max; identical to SEQ ID NO: 8133
  misc_feature (1)..(1): Xaa can be any naturally occurring amino acid
  misc_feature (69)..(69): Xaa can be any naturally occurring amino acid
  Coding DNA Sequence Number=SeqID_2222

SEQ ID NO: 9727 - protein, 353 aa, Glycine max
  misc_feature (274)..(274): Xaa can be any naturally occurring amino acid
  Coding DNA Sequence Number=SeqID_2224
  Gene Ontology: Mol. function=binding
  Homolog annotation: Hit_ID=A7PAV4; Match level="QueryCoverage=99%, HitCoverage=28%, E-value=1e-111, Identity=64%"; Hit description =Chromosome chr14 scaffold_9, whole genome shotgun sequence
  Pfam annotation: Domain name=HEAT; Domain location=112-148; Score =19.2; E_value=0.015; Accession=PF02985.12; Description=HEAT repeat
  Pfam annotation: Domain name=HEAT; Domain location=73-109; Score=9.1; E_value=1.2; Accession=PF02985.12; Description=HEAT repeat
  Pfam module annotation: Pfam domain module=HEAT::HEAT; Domain location=112-148::73-109
IIKVEPRSAVADRLSTMCVLPLLLAGVLSAPGKHEQLAEYLRKLLLEENSMQNQSTKHTPEIINAIRFICIYEENHGMIFNILWEMVVSSNASMKINAAKLLKVIVPHIDAKVASTHALPALITLGSDQNLNVKCASIDAFGVVAQRFKNEMIVDKIRVQMGAFLEDGSHEATIAVIRALVVAVPHTTERLRDYLLSKISQLTAVPTAASSDLMLRQERANAFCEAIRALDATDLPANSVRDYLLPAIQNLLKDLDALDPAHKEALEIIMKERXSGASVGGGASKSMASHLGIASSVSNFFGDGGLLGKKDSTEAQQQPSVIVYPNKAAATSQQQPPNTIKKRIMLVHFSDIL

SEQ ID NO: 9728 - protein, 65 aa, Glycine max
  misc_feature (34)..(34): Xaa can be any naturally occurring amino acid
  misc_feature (45)..(45): Xaa can be any naturally occurring amino acid
  Coding DNA Sequence Number=SeqID_2225
  Homolog annotation: Hit_ID=A7QS17; Match level="QueryCoverage=100%, HitCoverage=5%, E-value=2e-08, Identity=53%"; Hit description =Chromosome undetermined scaffold_155, whole genome shotgun sequence
EIFWGEELYAYMVYGAIIGGIVTYYLRLIDLEIXDIEWRRMMERXWLCELSERIFFYEIDNGIGS

SEQ ID NO: 9729 - protein, 140 aa, Glycine max; identical to SEQ ID NO: 8216
  misc_feature (7)..(7): Xaa can be any naturally occurring amino acid
  misc_feature (22)..(23): Xaa can be any naturally occurring amino acid
  misc_feature (26)..(26): Xaa can be any naturally occurring amino acid
  misc_feature (57)..(57): Xaa can be any naturally occurring amino acid
  misc_feature (59)..(59): Xaa can be any naturally occurring amino acid
  misc_feature (66)..(66): Xaa can be any naturally occurring amino acid
  misc_feature (70)..(70): Xaa can be any naturally occurring amino acid
  misc_feature (78)..(78): Xaa can be any naturally occurring amino acid
  misc_feature (86)..(87): Xaa can be any naturally occurring amino acid
  misc_feature (91)..(91): Xaa can be any naturally occurring amino acid
  misc_feature (116)..(117): Xaa can be any naturally occurring amino acid
  misc_feature (126)..(126): Xaa can be any naturally occurring amino acid
  Coding DNA Sequence Number=SeqID_2226
  Subcellular localization annotation: CTP_CleavageSite=49; ConfidenceScore=5.50e-01

SEQ ID NO: 9730 - protein, 167 aa, Glycine max
  misc_feature (80)..(80): Xaa can be any naturally occurring amino acid
  misc_feature (92)..(92): Xaa can be any naturally occurring amino acid
  misc_feature (94)..(94): Xaa can be any naturally occurring amino acid
  misc_feature (106)..(106): Xaa can be any naturally occurring amino acid
  misc_feature (110)..(110): Xaa can be any naturally occurring amino acid
  misc_feature (113)..(113): Xaa can be any naturally occurring amino acid
  misc_feature (137)..(137): Xaa can be any naturally occurring amino acid
  misc_feature (139)..(139): Xaa can be any naturally occurring amino acid
  misc_feature (153)..(153): Xaa can be any naturally occurring amino acid
  Coding DNA Sequence Number=SeqID_2228
HTVTANTNTSSAQPSTPLSAHSSLLLVDPSLVHSHLLSRPHLPHHHHLHTRYINLTPRHFLPYLHISPHSHSRRIITTSXRRYVYSLYTMNXTXTTHYSRTPTCPXYARXISXSYFSVITLSLYFTLRTDFIATRRXHXTLDTRQRTKNTLFXAPLYHRLIRLYQYI

SEQ ID NO: 9731 - protein, 140 aa, Glycine max
  Coding DNA Sequence Number=SeqID_2230
EAEHRSVVLAPRRSLSVLRRGHLHRRQGHLHERCRGRELDRRRGRASALLRRRRCRTRAGGRGGEVRPWGVGRARGARGAGRRRRRDEDGEVAGPPYHRHRRRSRRRRRRRRRGSHLNGGGERARARRPGARGLPWERPR

SEQ ID NO: 9732 - protein, 117 aa, Glycine max
  misc_feature (74)..(74): Xaa can be any naturally occurring amino acid
  Coding DNA Sequence Number=SeqID_2232
  Homolog annotation: Hit_ID=Q59IV6; Match level="QueryCoverage=94%, HitCoverage=31%, E-value=1e-12, Identity=40%"; Hit description =Plastidic phosphate translocator-like protein1
SLQVYGVLAFQAARLVVIQILVFLEGCYWLPLLAWWFIVPCPCVLFMEVPLRLRRLTLCSPFWMAAIFVHETSXLCAFCVGASLVSLCGWHMASALSLIVAGVVRDWLLIAVSSSVC

SEQ ID NO: 9733 - protein, 54 aa, Glycine max
  Coding DNA Sequence Number=SeqID_2233
FSIIINVYLHITNTLLFFLISFYLTFYYHINTLYYLLYLHFSFFLFSFISLSVN

SEQ ID NO: 9734 - protein, 128 aa, Glycine max; identical to SEQ ID NO: 7789
  misc_feature (38)..(38): Xaa can be any naturally occurring amino acid
  misc_feature (64)..(64): Xaa can be any naturally occurring amino acid
  misc_feature (91)..(91): Xaa can be any naturally occurring amino acid
  misc_feature (93)..(93): Xaa can be any naturally occurring amino acid
  misc_feature (115)..(115): Xaa can be any naturally occurring amino acid
  Coding DNA Sequence Number=SeqID_2235
  Subcellular localization annotation: CTP_CleavageSite=30; ConfidenceScore=5.10e-01

SEQ ID NO: 9735 - protein, 93 aa, Glycine max
  misc_feature (65)..(65): Xaa can be any naturally occurring amino acid
  misc_feature (67)..(67): Xaa can be any naturally occurring amino acid
  Coding DNA Sequence Number=SeqID_2237
REIDVSSHVVCRFARCECVIYCLLFYSRARCCVIVCTDLAVLYLLCEDLSDFALSQTSARAQQSXAXEIGGWMLSRYTLFTSSIYDVEVMYMI

SEQ ID NO: 9736 - protein, 119 aa, Glycine max
  Coding DNA Sequence Number=SeqID_2239
  Subcellular localization annotation: CTP_CleavageSite=31; ConfidenceScore=5.50e-01
SRGKGSQAKQPQRTGAAPHSAVKQYKRPPPKAQSHKGGTMGPRNQCTKRNANHKAKSKSLQPAAGTGSCRQPDDNPQGPRSSDSRNMKRAATDEGRSREPSNAEGSGQRTPGAWSDPRA

SEQ ID NO: 9737 - protein, 141 aa, Glycine max
  misc_feature (77)..(77): Xaa can be any naturally occurring amino acid
  misc_feature (136)..(136): Xaa can be any naturally occurring amino acid
  Coding DNA Sequence Number=SeqID_2241
ACDYELFFVHYYSLFNRHNSSRFLTSCHLHQLSAYLSIYTHHTRTRPFRPLMSIPPRSSPHSHILSYAMLILSYPSXLTRHTPDTSNDYITPKLNNHAHSTRYRPQNRRDGTRARAEESSKVCQVYYRVLKELCHXWYYVV

SEQ ID NO: 9738 - protein, 103 aa, Glycine max
  misc_feature (55)..(55): Xaa can be any naturally occurring amino acid
  Coding DNA Sequence Number=SeqID_2243
FGHTHLPLLFNSLPPHTTIYTSHIYFISPAVLLFNFSYCYSSTPPPRKDQNKRTXIIYARQQIILCLRNAQTTINKVYHRLIITILAQKYIARANRPSAGLRL

SEQ ID NO: 9739 - protein, 121 aa, Glycine max
  Coding DNA Sequence Number=SeqID_2245
  Homolog annotation: Hit_ID=A3ATI5; Match level="QueryCoverage=33%, HitCoverage=29%, E-value=6e-11, Identity=78%"; Hit description =Putative uncharacterized protein
MASNYVDTTGEEGRLHTHGHHSNSTTPTGEAASPKNTRRRWPGSASAPSGAGHGPASKCVCAPATHAGSFKCRFHRTNSQGHGHGQGQGSRPSSPPSPAAANAVPRHPASPSSSSGTVATQ

SEQ ID NO: 9740 - protein, 112 aa, Glycine max; identical to SEQ ID NO: 8321
  misc_feature (5)..(16): Xaa can be any naturally occurring amino acid
  misc_feature (22)..(23): Xaa can be any naturally occurring amino acid
  misc_feature (25)..(26): Xaa can be any naturally occurring amino acid
  misc_feature (61)..(61): Xaa can be any naturally occurring amino acid
  misc_feature (81)..(81): Xaa can be any naturally occurring amino acid
  misc_feature (97)..(97): Xaa can be any naturally occurring amino acid
  Coding DNA Sequence Number=SeqID_2246

SEQ ID NO: 9741 - protein, 551 aa, Glycine max
  misc_feature (174)..(174): Xaa can be any naturally occurring amino acid
  misc_feature (177)..(177): Xaa can be any naturally occurring amino acid
  misc_feature (214)..(214): Xaa can be any naturally occurring amino acid
  misc_feature (226)..(226): Xaa can be any naturally occurring amino acid
  misc_feature (241)..(241): Xaa can be any naturally occurring amino acid
  misc_feature (384)..(384): Xaa can be any naturally occurring amino acid
  misc_feature (396)..(396): Xaa can be any naturally occurring amino acid
  misc_feature (414)..(414): Xaa can be any naturally occurring amino acid
  Coding DNA Sequence Number=SeqID_2248
  Gene Ontology: Mol. function=protein binding
  Homolog annotation: Hit_ID=A7PZQ8; Match level="QueryCoverage=90%, HitCoverage=99%, E-value=0.0, Identity=70%"; Hit description =Chromosome chr15 scaffold_40, whole genome shotgun sequence
  Pfam annotation: Domain name=BACK; Domain location=254-355; Score =1.3; E_value=0.00041; Accession=PF07707.5; Description=BTB And C -terminal Kelch
MKDSNSDLFDPVMAMESEWSRGGTTSDADFAFAFNDSNFSDRVLRIEIMHDPVDARPDSDACATIADWARHRKRRREDIKKDNGADLASVPDEQVLNGHQSEADECENQDEEADAMVEEPHSGDEATNSNDSDWSMDCSAGAVVRVKTLHIFPPNLPLEMPLIYKTLGNQIGEXEHXTVFPQDNVSNEDPLIKQHLVRFQHYDEDAFAMVKVTXLMVVNKFEVASXLEYGSRYCCECLCTXTSALLFLDLPSPVLMADAVQPLTDAAKQYLAGRYKDITKFQEEVIGLPLAGVEAILSSDDLQVASEDAVYDFVLKWSRQQYTKLEDRREVLGTRLAQLIRFPYMTCRKLKKVLTCSDFDHEVASKLVLEGLFFKAEAPHRQRXLAAEDTASSNRXRFVERAYKYRPVKVVEFXLPRQQCVIYLVLKREECNNLFPSGRVYSQAFHLGGQGFFLSAHCNMDQQSSFHCFGLFLGMQEKGSVSFAVDYEFAARSRPTEEFVSKYKGNYVFTGGKAVGYRNLFAIPWTSFMAEDSLYFINGVLLLRAELTIKH

SEQ ID NO: 9742 - protein, 175 aa, Glycine max
  misc_feature (113)..(113): Xaa can be any naturally occurring amino acid
  misc_feature (157)..(157): Xaa can be any naturally occurring amino acid
  misc_feature (160)..(160): Xaa can be any naturally occurring amino acid
  Coding DNA Sequence Number=SeqID_2249
TRYSICYSSAPDQREWRQQYASPFTPLETTDSLVFSPYQSRCAYHRLTESALSWLTKYGSVALSVGSVALAQTVTSRVVTELLLVNRHTRDEERACPPRAGHDVEHRGTCIVXASTTCSSSSHLCLIIQSSAAVRFCISARTSRYSVSISRYIYIRXVLXSSVTARDCGDTSRAT

SEQ ID NO: 9743 - protein, 211 aa, Glycine max
  misc_feature (25)..(25): Xaa can be any naturally occurring amino acid
  misc_feature (144)..(144): Xaa can be any naturally occurring amino acid
  misc_feature (178)..(178): Xaa can be any naturally occurring amino acid
  misc_feature (190)..(190): Xaa can be any naturally occurring amino acid
  Coding DNA Sequence Number=SeqID_2251
  Subcellular localization annotation: CTP_CleavageSite=41; ConfidenceScore=5.47e-01
LLSSIACRPSPIPPSRCVFATRTRXPLFLPCARTRHPYSLRATTRPARLFCCYTAAAATYDQRVLSFYTLTQAPACTSTCSWRLTACSVDIIATIAPSRPACAAESLDRTTTYCPYYMYIPRRPPTRTRSQHRTLLSQYIYLIXTSSAGVVSNHELEISYRSCVHTRYQTCPRLSTLXHHLSIIIAVRGXRRTIMCRLYFCSLVRDDSSLL

SEQ ID NO: 9744 - protein, 132 aa, Glycine max
  misc_feature (120)..(120): Xaa can be any naturally occurring amino acid
  misc_feature (129)..(129): Xaa can be any naturally occurring amino acid
  Coding DNA Sequence Number=SeqID_2253
  Gene Ontology: Cellular component=anchored to membrane
  Homolog annotation: Hit_ID=Q8LEJ6; Match level="QueryCoverage=100%, HitCoverage=53%, E-value=1e-59, Identity=88%"; Hit description =Fasciclin-like arabinogalactan protein 11 precursor
  Pfam annotation: Domain name=Fasciclin; Domain location=46-132; Score= 24.5; E_value=3e-05; Accession=PF02469.12; Description=Fasciclin domain
  Subcellular localization annotation: CTP_CleavageSite=38; ConfidenceScore=5.34e-01
MATSRTFMSSNLFIFFLVMATTNGQAPAPTPSGPTNITAVLEKAGQYTMFIRLLKSTQAADQINTQLNSSSSQGLTVFAPTDNAFSSLKSGTLNSLSDQQKVQLVQFHVLPTLLTMPQFXTVSNTLRTXAGD

SEQ ID NO: 9745 - protein, 175 aa, Glycine max
  misc_feature (164)..(164): Xaa can be any naturally occurring amino acid
  Coding DNA Sequence Number=SeqID_2254
  Gene Ontology: Cellular component=integral to membrane
  Homolog annotation: Hit_ID=Q94GB1; Match level="QueryCoverage=88%, HitCoverage=42%, E-value=2e-51, Identity=66%"; Hit description =Purine permease 2
  Pfam annotation: Domain name=DUF6; Domain location=1-133; Score=14.6; E_value=0.01; Accession=PF00892.11; Description=Integral membrane protein DUF6
LMTRLYFRNGGKRIWFSSFLQTSGCPIILLPLLFSFLTRHRQQQEQEEPKTTLFLIKPSLFLASVVVGLLIGFDNYLYAYGLAYLPVSTSSLIISSQLAFTAFFAFFMVKQRFTPFTINAVVLLTLGAGSLALHADGDKLPKETRKEYIVGFVMTVAAAVLYAXVLPLVELAYKK

SEQ ID NO: 9746 - protein, 257 aa, Glycine max
  misc_feature (1)..(2): Xaa can be any naturally occurring amino acid
  misc_feature (7)..(8): Xaa can be any naturally occurring amino acid
  misc_feature (13)..(13): Xaa can be any naturally occurring amino acid
  misc_feature (23)..(23): Xaa can be any naturally occurring amino acid
  misc_feature (35)..(36): Xaa can be any naturally occurring amino acid
  misc_feature (40)..(40): Xaa can be any naturally occurring amino acid
  misc_feature (48)..(49): Xaa can be any naturally occurring amino acid
  misc_feature (53)..(53): Xaa can be any naturally occurring amino acid
  misc_feature (57)..(58): Xaa can be any naturally occurring amino acid
  misc_feature (60)..(60): Xaa can be any naturally occurring amino acid
  misc_feature (72)..(72): Xaa can be any naturally occurring amino acid
  misc_feature (80)..(80): Xaa can be any naturally occurring amino acid
  misc_feature (85)..(86): Xaa can be any naturally occurring amino acid
  misc_feature (89)..(89): Xaa can be any naturally occurring amino acid
  misc_feature (95)..(95): Xaa can be any naturally occurring amino acid
  misc_feature (97)..(97): Xaa can be any naturally occurring amino acid
  misc_feature (99)..(99): Xaa can be any naturally occurring amino acid
  misc_feature (102)..(102): Xaa can be any naturally occurring amino acid
  misc_feature (104)..(104): Xaa can be any naturally occurring amino acid
  misc_feature (119)..(120): Xaa can be any naturally occurring amino acid
  misc_feature (122)..(122): Xaa can be any naturally occurring amino acid
  misc_feature (128)..(128): Xaa can be any naturally occurring amino acid
  misc_feature (135)..(135): Xaa can be any naturally occurring amino acid
  misc_feature (143)..(144): Xaa can be any naturally occurring amino acid
  misc_feature (149)..(151): Xaa can be any naturally occurring amino acid
  misc_feature (154)..(155): Xaa can be any naturally occurring amino acid
  misc_feature (160)..(160): Xaa can be any naturally occurring amino acid
  misc_feature (165)..(165): Xaa can be any naturally occurring amino acid
  misc_feature (170)..(170): Xaa can be any naturally occurring amino acid
  misc_feature (175)..(175): Xaa can be any naturally occurring amino acid
  misc_feature (183)..(183): Xaa can be any naturally occurring amino acid
  misc_feature (187)..(187): Xaa can be any naturally occurring amino acid
  misc_feature (207)..(207): Xaa can be any naturally occurring amino acid
  misc_feature (212)..(212): Xaa can be any naturally occurring amino acid
  misc_feature (217)..(217): Xaa can be any naturally occurring amino acid
  misc_feature (221)..(221): Xaa can be any naturally occurring amino acid
  misc_feature (224)..(224): Xaa can be any naturally occurring amino acid
  misc_feature (234)..(234): Xaa can be any naturally occurring amino acid
  Coding DNA Sequence Number=SeqID_2255
XXHHHQXXSITIXAGRARCHELXMTYCKLSVDIGXXWTSXYARYVHAXXHTTXAHEXXTXLKRSSIHCARHXSCPRTETXVAIYXXTMXTLISRXSXHXSYXYXVHESAYRIIVTTRLXXIXTTRYSXTHATRRXSLYHPAPXXAAVLXXXYTXXRIRRXTRSDXLRIAXVLCGXSIITTTCXQSWXTVGTIAYYIRMTPSSAARQXLYVAXVDDCXLTSXRHXDDMIHSHSYXRPRYAVSCYTCVLISAHQQLSDV

SEQ ID NO: 9747 - protein, 94 aa, Glycine max
  misc_feature (5)..(6): Xaa can be any naturally occurring amino acid
  misc_feature (8)..(8): Xaa can be any naturally occurring amino acid
  misc_feature (11)..(11): Xaa can be any naturally occurring amino acid
  misc_feature (64)..(64): Xaa can be any naturally occurring amino acid
  misc_feature (70)..(70): Xaa can be any naturally occurring amino acid
  Coding DNA Sequence Number=SeqID_2257
FFSRXXLXLLXHTPRAAARLLPPTRLDTPLRVPPPHDRGRALSLPIHSAEPPTGRAGYGNIGVXIVVKYXSVRDPHPHHLQQSRTTEGYAITTI

SEQ ID NO: 9748 - protein, 100 aa, Glycine max
  Coding DNA Sequence Number=SeqID_2259
SEEVLSGAWVLRAPRRASLVFKHKVFYYPCPRSFPSPIITIIRNCVTLAFSNRAKATFLSYSKTKRRGHEYILSGGAWGEGTYSSKTHGPSPPAAGPAGF

SEQ ID NO: 9749 - protein, 139 aa, Glycine max
  misc_feature (70)..(70): Xaa can be any naturally occurring amino acid
  Coding DNA Sequence Number=SeqID_2261
  Gene Ontology: Mol. function=glyceraldehyde-3-phosphate dehydrogenase (phosphorylating) activity; Cellular component=cytoplasm; Biological process=glucose metabolic process
  Homolog annotation: Hit_ID=Q07CZ3; Match level="QueryCoverage=57%, HitCoverage=23%, E-value=2e-24, Identity=73%"; Hit description =Glyceraldehyde-3-dehydrogenase C subunit
  Pfam annotation: Domain name=DapB_N; Domain location=4-85; Score= -26.9; E_value=0.0073; Accession=PF01113.11; Description =Dihydrodipicolinate reductase, N-terminus
  Pfam annotation: Domain name=Gp_dh_N; Domain location=4-119; Score= -5.7; E_value=3.6e-09; Accession=PF00044.14; Description =Glyceraldehyde 3-phosphate dehydrogenase, NA
  Pfam module annotation: Pfam domain module=DapB_N::Gp_dh_N; Domain location=4-85::4-119
MGKVKIGINGFGRIGRLVARVPLQRDDVELVAVNDPFITTDNVTYMLKNDSAARHWKHHDVPATGGEGRXLFPDNPATAFGAPNPGRRPQGGQPGIGNDCPPSTGGSRRKNHRTARTSRTRRGPEPVRDGSTHTTGWPP

SEQ ID NO: 9750 - protein, 113 aa, Glycine max
  misc_feature (57)..(57): Xaa can be any naturally occurring amino acid
  Coding DNA Sequence Number=SeqID_2262
QITLCFSPTAAVSTLYMTFMPCVLRDTTMMCASHESPHIVTRSITHSASTTALTHPXRYAPITKTPPPPRTNKDMGVVASVSLLSSVCVARPRRAAPRAPPARSAAWSGRVRL

SEQ ID NO: 9751 - protein, 67 aa, Glycine max
  misc_feature (1)..(28): Xaa can be any naturally occurring amino acid
  misc_feature (53)..(53): Xaa can be any naturally occurring amino acid
  misc_feature (57)..(57): Xaa can be any naturally occurring amino acid
  Coding DNA Sequence Number=SeqID_2264
XXXXXXXXXXXXXXXXXXXXXXXXXXXXFPLGYQQKLIMNLPRSAIKRWSQFXNRHXTHTLSSKLVK

SEQ ID NO: 9752 - protein, 91 aa, Glycine max
  Coding DNA Sequence Number=SeqID_2266
  Gene Ontology: Mol. function=microtubule motor activity; Cellular component=microtubule associated complex; Biological process =microtubule-based movement
  Homolog annotation: Hit_ID=A7PYA5; Match level="QueryCoverage=67%, HitCoverage=6%, E-value=8e-18, Identity=72%"; Hit description =Chromosome chr15 scaffold_37, whole genome shotgun sequence
ENLIVSPCLSACGPNKILMKLRSQGGIKALLGVVRCDQPDVLSQVARGIANFAKCESRASSQGLLSCQYLLPMVQILLKMDIVVACQLQGH

SEQ ID NO: 9753 - protein, 90 aa, Glycine max
  Coding DNA Sequence Number=SeqID_2267
  Gene Ontology: Mol. function=oxidoreductase activity, acting on the CH-OH group of donors, NAD or NADP as acceptor; Cellular component =chloroplast; Biological process=amino acid biosynthetic process
  Homolog annotation: Hit_ID=A7PVL4; Match level="QueryCoverage=100%, HitCoverage=15%, E-value=2e-26, Identity=68%"; Hit description =Chromosome chr9 scaffold_33, whole genome shotgun sequence
  Pfam annotation: Domain name=ACT; Domain location=26-89; Score=23.1; E_value=0.0011; Accession=PF01842.15; Description=ACT domain
GKVKFGDPPLPCVGSFDVDVSLKGNLILSRQVDQPGIIARVGNILGDQTVNVSFMSVGRPSGRTKAIMAIGVDKKPTKEAFSNIGPGPPL

SEQ ID NO: 9754 - protein, 101 aa, Glycine max
  misc_feature (19)..(19): Xaa can be any naturally occurring amino acid
  misc_feature (25)..(25): Xaa can be any naturally occurring amino acid
  misc_feature (32)..(32): Xaa can be any naturally occurring amino acid
  misc_feature (63)..(63): Xaa can be any naturally occurring amino acid
  Coding DNA Sequence Number=SeqID_2268
VNSFYDITVYALSLTGPIXVLSYIXVCYIYMXYILHLLDDYQATSEIASTDVPFSLKGETTPXPSFIYLCDWISAPSQVAGWFWLLCLSSLFFSVILVSLL

SEQ ID NO: 9755 - protein, 68 aa, Glycine max
  misc_feature (17)..(17): Xaa can be any naturally occurring amino acid
  misc_feature (34)..(34): Xaa can be any naturally occurring amino acid
  Coding DNA Sequence Number=SeqID_217
  Gene Ontology: Mol. function=hydrolase activity, acting on acid anhydrides, catalyzing transmembrane movement of substances; Cellular component=integral to membrane; Biological process =metabolic process
  Homolog annotation: Hit_ID=Q6TXM4; Match level="QueryCoverage=100%, HitCoverage=7%, E-value=1e-11, Identity=52%"; Hit description=Proton P-ATPase
RLLGFMCNPLSWAIDNXAIVAIATANWWKKAYTXPDYIFITALKTINSTLWFIAENRDGHAGSALIAD

SEQ ID NO: 9756 - protein, 91 aa, Glycine max; identical to SEQ ID NO: 7573
  misc_feature (13)..(13): Xaa can be any naturally occurring amino acid
  misc_feature (57)..(58): Xaa can be any naturally occurring amino acid
  misc_feature (71)..(71): Xaa can be any naturally occurring amino acid
  misc_feature (84)..(85): Xaa can be any naturally occurring amino acid
  Coding DNA Sequence Number=SeqID_218

SEQ ID NO: 9757 - protein, 49 aa, Glycine max
  misc_feature (17)..(17): Xaa can be any naturally occurring amino acid
  Coding DNA Sequence Number=SeqID_220
  Gene Ontology: Mol. function=inorganic phosphate transmembrane transporter activity; Cellular component=integral to membrane; Biological process=phosphate transport
  Homolog annotation: Hit_ID=Q9AVQ9; Match level="QueryCoverage=100%, HitCoverage=9%, E-value=3e-14, Identity=77%"; Hit description =Phosphate transporter
LGVINFFGMVFTLLVPXSKGKSLEELSGENEDDGAEAIEMAGSAKTAPV

SEQ ID NO: 9758 - protein, 155 aa, Glycine max
  misc_feature (48)..(48): Xaa can be any naturally occurring amino acid
  misc_feature (91)..(91): Xaa can be any naturally occurring amino acid
  misc_feature (131)..(131): Xaa can be any naturally occurring amino acid
  misc_feature (155)..(155): Xaa can be any naturally occurring amino acid
  Coding DNA Sequence Number=SeqID_221
KFFTHDFVCRRLSAQWQGVAVTTAGVCFANVCIDGEGFALDQGGIHAXRTVSKMYRRMSLSRNRSSSHAQATSTMTEFLNINITASLGGGXGLNNLSCISGQPSAQRRPNWSWVSTPFRGRRDAKTRSRAXKPREQLPCNPAVPGISHKNNGSIX

SEQ ID NO: 9759 - protein, 288 aa, Glycine max
  misc_feature (4)..(4): Xaa can be any naturally occurring amino acid
  misc_feature (8)..(8): Xaa can be any naturally occurring amino acid
  misc_feature (13)..(14): Xaa can be any naturally occurring amino acid
  misc_feature (29)..(29): Xaa can be any naturally occurring amino acid
  misc_feature (37)..(37): Xaa can be any naturally occurring amino acid
  misc_feature (40)..(40): Xaa can be any naturally occurring amino acid
  misc_feature (51)..(51): Xaa can be any naturally occurring amino acid
  misc_feature (53)..(53): Xaa can be any naturally occurring amino acid
  misc_feature (87)..(87): Xaa can be any naturally occurring amino acid
  misc_feature (98)..(99): Xaa can be any naturally occurring amino acid
  misc_feature (113)..(113): Xaa can be any naturally occurring amino acid
  misc_feature (167)..(167): Xaa can be any naturally occurring amino acid
  misc_feature (177)..(177): Xaa can be any naturally occurring amino acid
  misc_feature (179)..(179): Xaa can be any naturally occurring amino acid
  misc_feature (203)..(203): Xaa can be any naturally occurring amino acid
  misc_feature (212)..(212): Xaa can be any naturally occurring amino acid
  misc_feature (222)..(225): Xaa can be any naturally occurring amino acid
  misc_feature (239)..(239): Xaa can be any naturally occurring amino acid
  misc_feature (247)..(247): Xaa can be any naturally occurring amino acid
  misc_feature (251)..(251): Xaa can be any naturally occurring amino acid
  misc_feature (267)..(267): Xaa can be any naturally occurring amino acid
  misc_feature (274)..(275): Xaa can be any naturally occurring amino acid
  misc_feature (278)..(279): Xaa can be any naturally occurring amino acid
  misc_feature (281)..(281): Xaa can be any naturally occurring amino acid
  misc_feature (283)..(283): Xaa can be any naturally occurring amino acid
  misc_feature (286)..(286): Xaa can be any naturally occurring amino acid
  Coding DNA Sequence Number=SeqID_223
YYIXCYTXQPNNXXSIISKQTATLALTYXRVVVAHTXSAXIVAAFDISQTXLXPTLYIFFARHIHSYPQYDIVYAHIDRQHRCAYLXSSRRNVVYIAXXTLPRYMLSHSHYSXMRTKSASRHDRFLAAENPQLLCSSTVCQHRIITTVRVSQSHILYIIRMCIQTSXHHLTRASRCXCXTLLVHIFEYIIHHTTTSLSTLTIXHLFTSCTHXAACMTYTTLXXXXVVLVCGVCLPLTHXSSHLIHTXRSTXMLCSRFVVCWCFINIXYCMSLLXXSFXXYXNXMYXLS

SEQ ID NO: 9760 - protein, 112 aa, Glycine max
  Coding DNA Sequence Number=SeqID_225
NRNEKKNYEGYRSLLLLLCLLLSLFNFAQTWAGRTPTLANETPSNATGAAASRGSSSDRKGSATLSLRISINSPSLSSSRLTSDGRRRQSSRRRQSSGVGAELVVLETHVRR

SEQ ID NO: 9761 - protein, 106 aa, Glycine max
  misc_feature (20)..(20): Xaa can be any naturally occurring amino acid
  misc_feature (31)..(32): Xaa can be any naturally occurring amino acid
  misc_feature (60)..(60): Xaa can be any naturally occurring amino acid
  misc_feature (71)..(71): Xaa can be any naturally occurring amino acid
  misc_feature (83)..(83): Xaa can be any naturally occurring amino acid
  Coding DNA Sequence Number=SeqID_226
CGACKQTQVEAVRVSCALLXARESMCLSAPXXDSVALEVVAESIHIVHYVLVTIIPTPMXRSETSVQPGIXQRPPHTPTTRPXIARARTERTVECRESIRVLLVTI

SEQ ID NO: 9762 - protein, 89 aa, Glycine max
  Coding DNA Sequence Number=SeqID_228
RRRRDHHSCRSLLARHARYHQLSTYRSGVSQDAYTAGCKLNILDLAHSRHTRRSDLMTHSQCASPRSHVCLLLSTACSTTPLSSTLASS

SEQ ID NO: 9763 - protein, 154 aa, Glycine max
  Coding DNA Sequence Number=SeqID_2269
  Gene Ontology: Mol. function=acetyl-CoA C-acyltransferase activity; Cellular component=glyoxysome; Biological process=metabolic process
  Homolog annotation: Hit_ID=Q6TXD0; Match level="QueryCoverage=88%, HitCoverage=30%, E-value=5e-31, Identity=54%"; Hit description=3 -ketoacyl-CoA thiolase
MEKAIQRQRALLEHLQPISSSSNFSSQTHQSTDLSASLCFAGNSSLGQTGGSDDDVVIVAAYRTAICEAKRGGFKDTLPDDLPATALTAALQKTNADPCALGDIVAATLLAPRPDSRLASTLAVSHPGSPETGPPRHATLQSSSGLPAASPLAP

SEQ ID NO: 9764 - protein, 211 aa, Glycine max
  misc_feature (8)..(8): Xaa can be any naturally occurring amino acid
  misc_feature (15)..(15): Xaa can be any naturally occurring amino acid
  misc_feature (27)..(27): Xaa can be any naturally occurring amino acid
  misc_feature (163)..(163): Xaa can be any naturally occurring amino acid
  misc_feature (175)..(175): Xaa can be any naturally occurring amino acid
  Coding DNA Sequence Number=SeqID_2270
  Gene Ontology: Mol. function=translation release factor activity, codon specific; Cellular component=cytoplasm; Biological process =translational termination
  Homolog annotation: Hit_ID=Q9BMX0; Match level="QueryCoverage=99%, HitCoverage=47%, E-value=8e-69, Identity=62%"; Hit description =Eukaryotic peptide chain release factor subunit 1
  Pfam annotation: Domain name=eRF1_3; Domain location=51-188; Score =211.0; E_value=2.9e-60; Accession=PF03465.5; Description=eRF1 domain 3
ADFKSRVXSSDLFDXRLRAVVLKIVMXSYGGDNGFNQAIELSTEVLQNVKFIQEKKLISAFFDEIAQDSSKYCFGVDDTLKCLDLGAVQTLIVWENLEITRYQFKVPAGAPEKVLYLTKEQEKDTENFKDDATGQDLEIVEAMSLVEWFANNYKRFGANLEFXTNRSQEGSQFCXGFGGIGGILRYKVDLMALNEYDEQDVDYGNSSDEDI

SEQ ID NO: 9765 - protein, 146 aa, Glycine max
  misc_feature (13)..(13): Xaa can be any naturally occurring amino acid
  misc_feature (18)..(19): Xaa can be any naturally occurring amino acid
  misc_feature (57)..(57): Xaa can be any naturally occurring amino acid
  misc_feature (86)..(86): Xaa can be any naturally occurring amino acid
  misc_feature (92)..(92): Xaa can be any naturally occurring amino acid
  misc_feature (94)..(94): Xaa can be any naturally occurring amino acid
  misc_feature (97)..(97): Xaa can be any naturally occurring amino acid
  misc_feature (114)..(114): Xaa can be any naturally occurring amino acid
  misc_feature (117)..(117): Xaa can be any naturally occurring amino acid
  misc_feature (140)..(140): Xaa can be any naturally occurring amino acid
  Coding DNA Sequence Number=SeqID_2271
LHSARRDHCTGSXTMCRXXVCDRLLCSIYNTHMSITITRYTLCAHNGHTHAIYQHYXQSQQCRRSTDRVRENAYNTQIYHSGIIVXLLHHVXIXHSXYAARWQTTRGYIASIRXSHXSIRYHIYIAAAILSSIRILRSSXYLSHET

SEQ ID NO: 9766 - protein, 144 aa, Glycine max
  misc_feature (14)..(14): Xaa can be any naturally occurring amino acid
  misc_feature (85)..(85): Xaa can be any naturally occurring amino acid
  Coding DNA Sequence Number=SeqID_2273
VQSNTHYHPAPALXPISDRPNTSQPTHARTHRSSAGMRCEKHQPISLYYLPQPHVTHVSYYMAVHVMLRSLSPRSRGMYESRQGXSCVDWHAHAPRNSTLTSSPLNCKVVLRCSCDVHQELGSLGAQQCDTATLSATTARKAIF

SEQ ID NO: 9767 - protein, 56 aa, Glycine max
  Coding DNA Sequence Number=SeqID_2275
SSRYVRPPPAFFAFLNLLNLIFFMIVTKYFVYRAEISDSIDVLAQELKEKTANASN

SEQ ID NO: 9768 - protein, 146 aa, Glycine max
  Coding DNA Sequence Number=SeqID_2277
  Homolog annotation: Hit_ID=A3BWT1; Match level="QueryCoverage=27%, HitCoverage=20%, E-value=2e-08, Identity=75%"; Hit description =Putative uncharacterized protein
  Pfam annotation: Domain name=LEA_1; Domain location=10-82; Score =16.6; E_value=0.0019; Accession=PF03760.6; Description=Late embryogenesis abundant (LEA) group 1
MQGGKSSSAVGAAKEAVANVGTSAWASKEKTMAVVQETVNKAKAHDPAAKAEAEARKQERIHEAEAAKRDAMRHNAAAKEHATAASYHPTTGAGVDARDVEVEGAAAPRAGSSDDGYLPVSGAGHWVGEGGGHQLPARGTPGGHSA

SEQ ID NO: 9769 - protein, 69 aa, Glycine max
  misc_feature (23)..(23): Xaa can be any naturally occurring amino acid
  Coding DNA Sequence Number=SeqID_2278
  Homolog annotation: Hit_ID=Q0UM46; Match level="QueryCoverage=100%, HitCoverage=100%, E-value=3e-21, Identity=61%"; Hit description =Putative uncharacterized protein
  Pfam annotation: Domain name=TMA7; Domain location=2-69; Score=44.8; E_value=3.1e-10; Accession=PF09072.1; Description=Translation machinery associated TMA7
MPSGQGAGTNPIHNKQKKKKAVXLDEDDIAYKAKLAAEKKQREDLAKTVGKGKGPLNTGSQGIKKSGKK

SEQ ID NO: 9770 - protein, 140 aa, Glycine max; identical to SEQ ID NO: 8499
  misc_feature (4)..(4): Xaa can be any naturally occurring amino acid
  misc_feature (74)..(74): Xaa can be any naturally occurring amino acid
  misc_feature (76)..(76): Xaa can be any naturally occurring amino acid
  misc_feature (96)..(96): Xaa can be any naturally occurring amino acid
  misc_feature (101)..(101): Xaa can be any naturally occurring amino acid
  Coding DNA Sequence Number=SeqID_2279
  Subcellular localization annotation: CTP_CleavageSite=67; ConfidenceScore=5.11e-01

SEQ ID NO: 9771 - protein, 150 aa, Glycine max
  Coding DNA Sequence Number=SeqID_2281
  Homolog annotation: Hit_ID=Q8GX02; Match level="QueryCoverage=78%, HitCoverage=82%, E-value=7e-20, Identity=44%"; Hit description =Putative uncharacterized protein
  Pfam annotation: Domain name=Self-incomp_S1; Domain location=35-146; Score=73.2; E_value=8.8e-19; Accession=PF05938.2; Description=Plant self-incompatibility protein S1
MNFFIIFMLIIAMILGVSEAIWHKVVAPLSKCEKNRVIIRNELGPGRSLEYHCHSNGKDQGVQFLKFNEERNFEFVDHFFGKKNKVNCVLRQGLWMQSSSRDFEAYHTSKSNGNNCGQTREWIARTDGTYFQRNRIKPAAFVFAWINKKP

SEQ ID NO: 9772 - protein, 145 aa, Glycine max
  Coding DNA Sequence Number=SeqID_2282
  Gene Ontology: Mol. function=lipid binding; Cellular component =cytoplasm
  Homolog annotation: Hit_ID=Q9ST43; Match level="QueryCoverage=100%, HitCoverage=100%, E-value=4e-75, Identity=91%"; Hit description =Pleckstrin homology domain-containing protein 1
  Pfam annotation: Domain name=PH; Domain location=27-127; Score=93.7; E_value=5.9e-25; Accession=PF00169.19; Description=PH domain
MENLWRIATGQDPNRQDYEGIEFWSNPERSGWLTKQGDYIKTWRRRWFVLKRGKLLWFKDQSSALTRGSIPRGVISVGDCLTVKGAEDVVNKPFAFEISSGNITMFFIADNEKEKEEWINSIGRSIVQHSRSVTDSEVLDYDQRR

SEQ ID NO: 9773 - protein, 104 aa, Glycine max; identical to SEQ ID NO: 8596
  misc_feature (81)..(81): Xaa can be any naturally occurring amino acid
  Coding DNA Sequence Number=SeqID_2283
  Subcellular localization annotation: CTP_CleavageSite=69; ConfidenceScore=5.19e-01

SEQ ID NO: 9774 - protein, 70 aa, Glycine max
  misc_feature (1)..(14): Xaa can be any naturally occurring amino acid
  misc_feature (35)..(35): Xaa can be any naturally occurring amino acid
  Coding DNA Sequence Number=SeqID_2285
XXXXXXXXXXXXXXVSSHFSKLVSKESINSKLLSXDIYHVYIFSYTLIHVNANCLLTNSVNNKRVIFHRI

SEQ ID NO: 9775 - protein, 172 aa, Glycine max; identical to SEQ ID NO: 8598
  misc_feature (2)..(4): Xaa can be any naturally occurring amino acid
  misc_feature (6)..(6): Xaa can be any naturally occurring amino acid
  misc_feature (8)..(9): Xaa can be any naturally occurring amino acid
  misc_feature (11)..(13): Xaa can be any naturally occurring amino acid
  misc_feature (26)..(26): Xaa can be any naturally occurring amino acid
  misc_feature (33)..(33): Xaa can be any naturally occurring amino acid
  misc_feature (37)..(37): Xaa can be any naturally occurring amino acid
  misc_feature (42)..(42): Xaa can be any naturally occurring amino acid
  misc_feature (50)..(50): Xaa can be any naturally occurring amino acid
  misc_feature (52)..(55): Xaa can be any naturally occurring amino acid
  misc_feature (57)..(57): Xaa can be any naturally occurring amino acid
  misc_feature (67)..(68): Xaa can be any naturally occurring amino acid
  misc_feature (77)..(78): Xaa can be any naturally occurring amino acid
  misc_feature (81)..(81): Xaa can be any naturally occurring amino acid
  misc_feature (84)..(86): Xaa can be any naturally occurring amino acid
  misc_feature (90)..(90): Xaa can be any naturally occurring amino acid
  misc_feature (92)..(92): Xaa can be any naturally occurring amino acid
  misc_feature (97)..(97): Xaa can be any naturally occurring amino acid
  misc_feature (102)..(102): Xaa can be any naturally occurring amino acid
  misc_feature (106)..(107): Xaa can be any naturally occurring amino acid
  misc_feature (110)..(110): Xaa can be any naturally occurring amino acid
  misc_feature (112)..(112): Xaa can be any naturally occurring amino acid
  misc_feature (117)..(117): Xaa can be any naturally occurring amino acid
  misc_feature (123)..(123): Xaa can be any naturally occurring amino acid
  misc_feature (133)..(133): Xaa can be any naturally occurring amino acid
  misc_feature (141)..(141): Xaa can be any naturally occurring amino acid
  misc_feature (143)..(144): Xaa can be any naturally occurring amino acid
  misc_feature (149)..(149): Xaa can be any naturally occurring amino acid
  Coding DNA Sequence Number=SeqID_2287
  Subcellular localization annotation: CTP_CleavageSite=32; ConfidenceScore=5.04e-01

SEQ ID NO: 9776 - protein, 88 aa, Glycine max
  Coding DNA Sequence Number=SeqID_2289
  Homolog annotation: Hit_ID=A2YHJ0; Match level="QueryCoverage=50%, HitCoverage=66%, E-value=3e-11, Identity=70%"; Hit description =Putative uncharacterized protein
  Pfam annotation: Domain name=DUF1909; Domain location=4-63; Score =14.0; E_value=0.00043; Accession=PF08927.1; Description=Domain of unknown function (DUF1909)
MGGGNAQKSKMARERNLEKLKGGKGSQLEANKKAMNIQFVCSMSSVHLLCPLHQAVSTAPSPPRLKMFLQDWLRHLAVTICLELTQKT

SEQ ID NO: 9777 - protein, 101 aa, Glycine max; identical to SEQ ID NO: 7813
  Coding DNA Sequence Number=SeqID_2290

SEQ ID NO: 9778 - protein, 126 aa, Glycine max
  Coding DNA Sequence Number=SeqID_2292
  Gene Ontology: Mol. function=nutrient reservoir activity; Cellular component=extracellular region; Biological process=cell wall organization and biogenesis
  Homolog annotation: Hit_ID=P94014; Match level="QueryCoverage=100%, HitCoverage=58%, E-value=6e-51, Identity=80%"; Hit description =Germin-like protein subfamily 2 member 1 precursor
MASQTPFLSISISLALAAFLFFITVSADPDMLQDLCVADLSSGIKVNGFPCKDAANVTSLDFFSQGIANPGLTNNTSGALVTGANVMTIPGLNTLGVSLARIDYAPGGLNPPHTHPRATEVVYVLE

SEQ ID NO: 9779 - protein, 102 aa, Glycine max; identical to SEQ ID NO: 7814
  misc_feature (2)..(2): Xaa can be any naturally occurring amino acid
  misc_feature (12)..(13): Xaa can be any naturally occurring amino acid
  misc_feature (48)..(48): Xaa can be any naturally occurring amino acid
  Coding DNA Sequence Number=SeqID_2293

SEQ ID NO: 9780 - DNA, 517 bp, Glycine max
  misc_feature (96)..(96): n is a, c, g, or t
  misc_feature (102)..(102): n is a, c, g, or t
  misc_feature (186)..(187): n is a, c, g, or t
  misc_feature (239)..(239): n is a, c, g, or t
  misc_feature (359)..(359): n is a, c, g, or t
  misc_feature (363)..(363): n is a, c, g, or t
  misc_feature (477)..(477): n is a, c, g, or t
  misc_feature (479)..(479): n is a, c, g, or t
  Coding DNA Sequence Number=SeqID_1
gcgtgagagagatcgcgcacacacagacagatcatttatgtctatgaattgataaagtgatagatatgagttgtatgtgttagtgctgtatgactnatcaanttatcgtatatatttctgagtgttgttgtgatcgttatattatcgatttatgtgttcgtctgtctctctctcctctctatcgcnngcccaccctacctccgcccctgtggagatcttctgtgtgttcctgaccatcntcctcgacatatcacacactccagagcatatacacctcttcgctcaggagtggagagaagagaagagaacacacacgaacccccgccgcctgcaccccgcgcaccccactaatacaacgnaccntcgcccgtgcgcggcttggctccatcctctctttctttttctgtgcgtgggctgtgttatatggcgctctcttctcccctgctctcccactttatgctttccatttttattcgngncgtcagtctcgtcgcttgcccggcttcgctggttgtgt

SEQ ID NO: 9781 - DNA, 129 bp, Glycine max
  misc_feature (48)..(48): n is a, c, g, or t
  misc_feature (54)..(54): n is a, c, g, or t
  misc_feature (77)..(78): n is a, c, g, or t
  Coding DNA Sequence Number=SeqID_2
aaggtggtgcgactccgcccgcaacattgtgctgggtccacgccctgntaccgncactggatggagaagatcactcnnatcagagagtacttcattaccgacctcaccgtcactcgaatgcacgatgcc

SEQ ID NO: 9782 - DNA, 383 bp, Glycine max
  misc_feature (39)..(39): n is a, c, g, or t
  misc_feature (112)..(112): n is a, c, g, or t
  misc_feature (180)..(180): n is a, c, g, or t
  Coding DNA Sequence Number=SeqID_3
gactccatctaacaaatttaatcatatcatattaacagncgtcgtcacaggccatatcgcaacgcagagagaagcgactcgcccgcaccgcgcgcacacagccgcctcacanacgcccgactcccacaccacagacaaaggagagtgtgtctattgctcgcgttctgtgttctcgtgtgntatcatcactgaatgctctccctccgacacccataggactagcctctctcaaacgacatacccgcagacgagacactatctcaacacactagcatcttactcaccaaatccacacgaacaccctaacacactatcctccagcacctgttccacgcttgctactaccgtacactgtacccactaaacgtcgtgtcggcgctgac

SEQ ID NO: 9783 - DNA, 591 bp, Glycine max
  misc_feature (161)..(161): n is a, c, g, or t
  misc_feature (378)..(378): n is a, c, g, or t
  Coding DNA Sequence Number=SeqID_4
aaatccaatcacagacttcgcggtgacgacggagcatacagctcagacacaaccaactcagacgggccgcggactaagtgagagaccagcctcctaggcccctagggcagcggtacgttgtgggtagagctgcaggtacggggtgttaggcgggatgactnggtgtgacagaattatcactccatgcgatgagatgcgaccctctggcggcgtaatgctcgtactcgaagatcctgtcgcggtctctgacggcaggtaacacagccacaaggcgagctgaactctcacaccatatacacaagatatcagagaattatataactcgactatacatcatcaccacccagaaacgcgcgctgataccgcaagcgctaagtnctgcacatatcccggtccggcatgaggagcgggcggtgggagacagatgagaggaaagaagcgcaaggccagtagcggggggagcgcaggcatagcaggataagaggggtgaggggaggaggggagcacctctccctgccctgcactccagaggagggcgcggcctcgctcacccacagacacacagaaaacgcataattcacgtgtatctat

SEQ ID NO: 9784 - DNA, 258 bp, Glycine max
  Coding DNA Sequence Number=SeqID_5
gatatgcaaagtccagcgaccagcaccagcaccagcgcctgcacctgcagcagcagcagcacctgctcctgctccagcaccagcaccaagcaccagctgttaagcgatttccagctggaattcctggaagtcgtcaaaagcaattaccagtcgcgctggtgggcaaaactgcggcaactttctcactgatcgagccatcttccaagtgttcatgctgccccgggtgggggatcgttccttgtcattaacctctttggg

SEQ ID NO: 9785 - DNA, 501 bp, Glycine max
  misc_feature (171)..(171): n is a, c, g, or t
  Coding DNA Sequence Number=SeqID_6
cctagactggagatgtaaatgccaatgttgctgaaggagatgctgaagatgtaaatcgcgctgtccatgctgctcgcaaggcttttgatgagggaccctggcccaagatgacagcttatgaaagaacacgtataattttgcgctttgctgatttattggagaaacccaatngatgaagttgccagcccattagaaaaccaggggattattgggccaagcccttctaacagacccttgccaaaggtttggaaattcacccacggggtaagtacgcaatggttcccgatattatgccggttgggccggataaaattcaccggctaacagttcccgctgatggaccataccctgtccaaactttgcatgaaccaattggtgtagcagggcagattgttccttggaatttccccttcttattttttcaggaaggtgcacctcataacctgggtaatccgttgtaagaaaatgcagaccaaaccctttcgcccttatgtgtcaaag

SEQ ID NO: 9786 - DNA, 490 bp, Glycine max
  Coding DNA Sequence Number=SeqID_7
ggcagcagctacttccaaggatatctcatccccatcgggggctggcaaggccgagaaactgggaccatcatccccagaagtgggaagggagagcatgaggaacaccgtcaccaagcaggtctcctcaagaatcccatggtacggcccaaaccgagacaagtacttgggcccattctctggcgagcccgcgccctacctaagcggcgaattcccaagcgactacggctgggacactgttgggctgtccgcagacccagaaaccttcgccaagaaccgtgaactcaaagtgatccactccaagtgagccatgcacggaaccttgggctgcgtcttcccagaggtgctggaccgcaacggggcgaaggtccgagaaaccgggaaggccaagggcagaacccacaccttcagcgagggggggctcgactacgtgggcgaacccagactgatccacaaccagagcaacctcgccatctgggccaaacaaaaaagc

SEQ ID NO: 9787 - DNA, 454 bp, Glycine max
  misc_feature (29)..(29): n is a, c, g, or t
  misc_feature (117)..(117): n is a, c, g, or t
  misc_feature (183)..(183): n is a, c, g, or t
  misc_feature (206)..(207): n is a, c, g, or t
  misc_feature (250)..(250): n is a, c, g, or t
  misc_feature (259)..(259): n is a, c, g, or t
  misc_feature (288)..(288): n is a, c, g, or t
  misc_feature (295)..(295): n is a, c, g, or t
  misc_feature (318)..(318): n is a, c, g, or t
  misc_feature (419)..(419): n is a, c, g, or t
  misc_feature (426)..(426): n is a, c, g, or t
  Coding DNA Sequence Number=SeqID_8
acatactctctatgcagcgtacgtctcangatccacgactgtgcgatctgctcaactgagtctcatatctagcctctaactcagatcgtacgaccagagcggatcgtgatgtcatcntcactcgatgtactgatgcacgagcgcgcactctatgagtaatcacgtgacacgagtcacacgacnagcgcacgcacacggcatcaaanncatcgacgcagcttagctactcgtacccatcagtactacgtgntacacgtanctctaacgcatatcatcgatcattctcgnagcgtcnctaataacacattcgcataccgnggaatgacactacgtatcccaagtctatctctgtttgtgatatctgttgttgctacagcagcaatgcacgtacacagacgtaataatgatgatgtcatcangcacgcnagcgagcacgtacctacgcacgagatga

SEQ ID NO: 9788 - DNA, 484 bp, Glycine max
  Coding DNA Sequence Number=SeqID_9
gtctgggtatcacacacacgcttctgcctcttcaaacggctcaacacagcagaggtacaggttacgactatgaccgacgacacaacaaaggcttctgctgcttacttagtctgcacatatcaatggctctgattctgcagccgctcatgacagtgaccacaacacccctgccaccgccaccacgaacaccacgaaactaatacaaatcctcaacaaccgaccactcccgcacaccacaacgatcgcatctgccacatacaacaataacggcaaaaataactacgataaaccccaaaacgaaaccgaagaacacacgttgataaagatgacacacaactcataaagaaaacgacgataataaacctcaaaaataacaatagacgatactggagtctctactgctgctaagctagatataaccgagcacctgctgtactgtcaaggacaggagtggtgcaaatatgaccaaagacgcaaaccagag

SEQ ID NO: 9789 - DNA, 157 bp, Glycine max
  Coding DNA Sequence Number=SeqID_10
ttaatccatgcataaactgtcctaaagatcacactgtgatacacactcttgagttccatcgtccgaaatctggagggtcatggcagtatttttctcaccaaaccctttcgtttcagagtccagaatcctgatggctattcttgtaaacacaaagcgt

SEQ ID NO: 9790 - DNA, 528 bp, Glycine max
  misc_feature (28)..(28): n is a, c, g, or t
  misc_feature (30)..(30): n is a, c, g, or t
  misc_feature (45)..(45): n is a, c, g, or t
  misc_feature (52)..(52): n is a, c, g, or t
  misc_feature (58)..(58): n is a, c, g, or t
  misc_feature (83)..(83): n is a, c, g, or t
  misc_feature (98)..(98): n is a, c, g, or t
  misc_feature (110)..(110): n is a, c, g, or t
  misc_feature (117)..(117): n is a, c, g, or t
  misc_feature (120)..(120): n is a, c, g, or t
  misc_feature (233)..(233): n is a, c, g, or t
  misc_feature (239)..(239): n is a, c, g, or t
  misc_feature (257)..(257): n is a, c, g, or t
  misc_feature (324)..(324): n is a, c, g, or t
  misc_feature (361)..(361): n is a, c, g, or t
  misc_feature (365)..(365): n is a, c, g, or t
  misc_feature (444)..(444): n is a, c, g, or t
  misc_feature (446)..(446): n is a, c, g, or t
  misc_feature (458)..(460): n is a, c, g, or t
  misc_feature (469)..(469): n is a, c, g, or t
  misc_feature (487)..(487): n is a, c, g, or t
  misc_feature (497)..(497): n is a, c, g, or t
  Coding DNA Sequence Number=SeqID_11
aaccacgtcgcgagaccatcgactagcncncacaacgcccgccanactaccncacccnccccgcctgctcgctctcactaccntcacgcgtcgcagcnccatgctgacgngatcgcngcnactatctcacacgagcctgcagatctctgcttccttcccttctgtcccagcacgcactctccagctctcgcgctcccgactccgaccacacgtcgcaccgcgtatatcaccgngtagcnccatcgacgacagcgccnactacgtaagacgaaactaattgattataatacaacgagacgcgactgcactcgccgccgcgctccngcgcaacacgacacatctcgcacaagaagacagaagnagcnagactactactgatcatccaacgtatagctatcacacagacacgaccgactgatcgagagcacgacaccaactccactnancactaccacacnnncagcactancgtcatcatacgacatangtgagatcgnaggatctagtcctgacaatcacacgcacgac

SEQ ID NO: 9791 - DNA, 546 bp, Glycine max
  misc_feature (45)..(45): n is a, c, g, or t
  misc_feature (250)..(250): n is a, c, g, or t
  misc_feature (269)..(269): n is a, c, g, or t
  misc_feature (288)..(288): n is a, c, g, or t
  misc_feature (335)..(335): n is a, c, g, or t
  misc_feature (369)..(369): n is a, c, g, or t
  misc_feature (460)..(460): n is a, c, g, or t
  misc_feature (478)..(478): n is a, c, g, or t
  misc_feature (511)..(511): n is a, c, g, or t
  misc_feature (514)..(514): n is a, c, g, or t
  misc_feature (521)..(521): n is a, c, g, or t
  Coding DNA Sequence Number=SeqID_12
gcatcctatgctactctgggtggagtactgactacacgaccgtgnagactatgtagtaccacgaaatcactgattccgcctctagaactcttgagcgtcggctcacacagcaagacggaggactagcgccgtgcacgctcactgccatcatatgatatgattttgcggctgcgcgcgccaccatactcatgtaccttgactgaacgagacatacgatatacaacgatacactatacaagagcgactctcnacattatagagattacaangtaacatgctgcgaatggnccgatcgtagtcataacggcacagacgctgactagcgccaccacagntcatgtgctattacacacgacgctatcgctagcnccacgacgcgctagagctcgctgagatcgcttgtggtcgcgagtgacgccacccgtgcgactagctaggtgtggtgtgcacggagaggtgngagtcgcggtgtagtttncgtgcgagtgctgtgtgtcgcgcgccatcatgntgncgatgcntgtgagctgcttataccatggtatt

SEQ ID NO: 9792 - DNA, 339 bp, Glycine max
  misc_feature (237)..(237): n is a, c, g, or t
  Coding DNA Sequence Number=SeqID_13
gtagcagaactgttttggaacacaaataccccctgtaattcatgtagtttctcttctagtcttatgtgatatttgttgcttatccattaattttgttatttctgtaattgtctgtttgattctagatcattcattgaaggtcttcacattcattttgctgccttgtatcgagcgatcaagaagtcgatcactgtcggtttgatcgctttgtcctctgttggtgagacctgcctactngcttacttacatcggttacatcgttctcaagggcggctgcgtcgttggtcacgcctattcctgcgcgatgctcttctgtactccatgccttgcagcttgcga

SEQ ID NO: 9793 - DNA, 528 bp, Glycine max
  misc_feature (60)..(60): n is a, c, g, or t
  misc_feature (70)..(70): n is a, c, g, or t
  misc_feature (97)..(97): n is a, c, g, or t
  misc_feature (275)..(275): n is a, c, g, or t
  misc_feature (312)..(312): n is a, c, g, or t
  misc_feature (323)..(323): n is a, c, g, or t
  misc_feature (395)..(395): n is a, c, g, or t
  misc_feature (421)..(421): n is a, c, g, or t
  Coding DNA Sequence Number=SeqID_14
acgacgccgtccgagagagtcgcgagagtggaggagtacggcgagcgcagactgacgcanacgcacgcgncacgacaacgagactacctatcaacanccgatcgatctcacgcatcacacgcataaatgagcaagtacacgatacgactacccaattatcaggaggcgcgcacgcgcgcacgacgaggtcgcacgcagccggtagtgctcctgcacgcgagcgcacgctgggtgtagtcgcgtcacgtcgcatgactcagatacctgcttgccgncgacacgtagcgtcagagcgtccatgcgaccgtgacnacatgtgcganacaagcttgtagtgagtcgagatccactctgtatcagctatcattatcactatctattatattatatcatanaaaacattatacatgtgctcttgtgnacaatatagatgacggtcacagcgcggcgcatacaatgtgtacagctcaatcaacaatagagagtagatagtagcagagatgtagacatcacacagagtatccctcg

SEQ ID NO: 9794 - DNA, 594 bp, Glycine max
  misc_feature (172)..(172): n is a, c, g, or t
  misc_feature (303)..(303): n is a, c, g, or t
  misc_feature (305)..(305): n is a, c, g, or t
  misc_feature (375)..(375): n is a, c, g, or t
  misc_feature (491)..(491): n is a, c, g, or t
  Coding DNA Sequence Number=SeqID_15
acttgcggatgactctacattcttgtcagacgaggatgcgcagcagctcgcgactggcgcctcgcactcgctctcgccagcgcgtcggcgtctgacgactgattacgttactaatcgtctatgtagcaatgttagtcgctcacaggctcgatcatgtagaagcagcacgcantcgagatgacaccccgcacgactcggataccgctagattgtatagacaacctaccggtagtcacagccgagggattgtacttagtgacgtgctactacggatcgcttatcctagtcaacaatgtgacacgncncgatagggagataatacactctcatactcacatctggttagactttatcgtgacatacgtcttgtgtcgnatgtgttagtcgatgatgtcgcttcatgacatacagctgcatgagcacttcgcgagcgcagattcgacgagagagtagaactgcgcgcttgagccgatatgatgtgtgtactgaangccactcgatatacatctagtggtaccgccctaccaccacatcgtgactgaggaagcgcgtactatgatatcctggttgtagctactcaatgtgcgcatcaga

SEQ ID NO: 9795 - DNA, 361 bp, Glycine max
  misc_feature (282)..(282): n is a, c, g, or t
  Coding DNA Sequence Number=SeqID_16
ggcgcgcggcttagctgtattgcactgtccaccaccgccagcatcaaatatctccggcgagagtttccgcgatatttgtttctttccagagagttttccgggaagggggaggaggaggagcggcggcatggtgttcttctgcttcctggtggaccagcggcggaaggtgcggagcagcaagccggcggcggggatctgctcgcggtgcggcggctgcgccagcgtggcggacatggagacggccacgcggctctgctacctcctcaccgtgcaccgcgtcancctggcgcgccatcatctgcaccttctgcggcgctatgctcaagtcctaccgccactacaggctctactaggccggcgg

SEQ ID NO: 9796 - DNA, 580 bp, Glycine max
  misc_feature (267)..(267): n is a, c, g, or t
  misc_feature (423)..(423): n is a, c, g, or t
  misc_feature (440)..(440): n is a, c, g, or t
  misc_feature (471)..(471): n is a, c, g, or t
  Coding DNA Sequence Number=SeqID_17
atagcacactgcgtgtcgcgtggagatatattactgtatgtgatacacgttggtgttactggctgtcggagcgtgcgtgtactattatatattactgcatgcaatgtaatgtaatctctgattgcatgatatactatatataacgatgcgactatagtatagtgatgtatagagtaagaagtctagtgtgttataggcgtgtagttatatgatacgctgcatttgaattatcatatatgtgaatatctggtgttgatagtgatatgngtagaggtcgggtgtgatagtattacgcgatctagtcgaactgaaatatatctcgtgtcgctcgcgaatcacatactgtatagttaatatattctatagttgtatgtgtgagtcgagtagtgtgtgtgatgaatgtagtcgtgtgtattgacggangttcgtattgtagagancgagttacggagatatagagatgctgacaanttgatgtgtcgatcgcgtctcagtagtgcacgctatagtatgaacatgtaagagtcgtcgtagtggtgtacatcggtatatagcgaacgaatatagtcgtcgtcgcact

SEQ ID NO: 9797 - DNA, 512 bp, Glycine max
  misc_feature (318)..(318): n is a, c, g, or t
  Coding DNA Sequence Number=SeqID_18
ggtatctcgtcgcacttgatatgtagtaatagtgatgttacatcactagttacactgccactctctcctctgacttatcttcatatgagccgcggtcccagcgtggtttgttgtgtgcatagacggcggagagtgtgcacgagcaggagtgcgcacgtcaggtccacactttattataagcatgcgcgaccgctgtactccacaggcgctcgttatattattcatacctgccgagctactctcgcccggcctgccctagtctctcgcgagtacaccgccgcgccagctctactgcagcacatatcctatgatataaantctatccacatctaaaacgacagagcgtgttggtccgtcagcactgtggcggacgaggggtgtgttgttattgatactgctcgtgccgaatacgatagctggtgcactatatatatatactttctcgaacgatagtacagtacgcagcgccgtacaatgaactggacgctgctgcgctcgtctcttcaatgaga

SEQ ID NO: 9798 - DNA, 587 bp, Glycine max
  misc_feature (27)..(27): n is a, c, g, or t
  misc_feature (89)..(89): n is a, c, g, or t
  misc_feature (99)..(99): n is a, c, g, or t
  misc_feature (112)..(112): n is a, c, g, or t
  misc_feature (114)..(114): n is a, c, g, or t
  misc_feature (116)..(116): n is a, c, g, or t
  misc_feature (118)..(118): n is a, c, g, or t
  misc_feature (130)..(130): n is a, c, g, or t
  misc_feature (182)..(182): n is a, c, g, or t
  misc_feature (220)..(220): n is a, c, g, or t
  misc_feature (247)..(247): n is a, c, g, or t
  misc_feature (268)..(268): n is a, c, g, or t
  misc_feature (280)..(280): n is a, c, g, or t
  misc_feature (306)..(306): n is a, c, g, or t
  misc_feature (349)..(349): n is a, c, g, or t
  misc_feature (369)..(370): n is a, c, g, or t
  misc_feature (413)..(413): n is a, c, g, or t
  misc_feature (457)..(457): n is a, c, g, or t
  misc_feature (482)..(482): n is a, c, g, or t
  misc_feature (540)..(540): n is a, c, g, or t
  Coding DNA Sequence Number=SeqID_19
tcgacatacgaatcgcagcatcacggngcacatcgagcgcgcgccatactcgagcgtgcacactggctagagagcgcgacgcgagacantcacatcatnctggatgtgatcntntntntcgtaccgtctngtcactgcactcgatctctccagcaacgagtagagatacagaacgacagaanacacacacaacccctctcgatgcgatctactagaccgntcgcttgtcattccttgcgagaatgcncactatgcatgcgacagcggnttacttgtcacnatcagcgtaaattatcgatcactcantgactcggtgtgtactatatagacatcgatgtatcatgtagtngaatccagtataacatatcnnttctgctgactctaatcatatatacatctcatataccacactntgcagctactcacacaatactgcctaactactagacgttgctcnttacatacgatgagacagcatcacntacactatacatatagcgacatgactcatgcaacatacgggagcgagatgtgtatccngcgctctatcgagtgcgactactatgcgcacagaactgagtccccgt

SEQ ID NO: 9799 - DNA, 592 bp, Glycine max
  Coding DNA Sequence Number=SeqID_20
acattagtgaaccttcctgtcggaccgccggaccatttaggaaatcaccaaaccaaagctatgactttagcacaaaatactgtacgatgctcgttccatgcaacattccctatcataactttgcattgttcattcaagagaaggacccgaaactcgatgaacgaagcaattcgccttcttccattagtgaggtctgagacgggcagcacatagaaagaggagatgtagtcaccaggtattcttggatgtgattgcagtacccatctcaaccttggctccgctccttatgaggttccccgcacaacccaaaaactagctatatgaccaagagcagtttaaacaaagaacaaaagcaatcgcacatctacatttcgtgatacaagcttttcaactaaaaataggatcagacataaagcaaaataacagctttcaggagtacaaggctctcttcagccaatcaaccagttgcacatcgtgctagttagtgttattctggcctgtcatgcggggaaggggcgtgcacatcgcggagcctcctatgtacctctgttgtggcgcagttgcttgtgatgaacgcttgcgcggcgcagac

SEQ ID NO: 9800 - DNA, 505 bp, Glycine max
  misc_feature (26)..(26): n is a, c, g, or t
  misc_feature (32)..(32): n is a, c, g, or t
  misc_feature (50)..(50): n is a, c, g, or t
  misc_feature (76)..(76): n is a, c, g, or t
  misc_feature (78)..(78): n is a, c, g, or t
  misc_feature (225)..(225): n is a, c, g, or t
  misc_feature (426)..(426): n is a, c, g, or t
  misc_feature (447)..(448): n is a, c, g, or t
  Coding DNA Sequence Number=SeqID_21
aatgtagtagataggctgcagagacnattcanacgaggccggtacaaaanagatcagagacaatatcttcaccacncncactctcaaccacgcgcggtacaacgataagatgagagcgggggggcgggaggcgcggtcgcgcgtgtcactatacacatgtggagaaggccggctatatattactatatatatcgcgggggtgacggtgtggttgtgcaacagcancgtcacgtggtgaagaaggaatggggtgagatagacgcatgtcgtggctggccgcgtctatgtgtgttgtgtagttcgaatcatcagaatatatcacacatgacatccaccaacggagcgcgataagacacctcactactcttgcggactctacggtgccaacataagacatatacagatatactagacgactaggttgcncaccgtatgctctctgtactnntacataaaatatatacaccacaccaaatatatgatgcaagagatagagcgacgatgt

SEQ ID NO: 9801 - DNA, 293 bp, Glycine max
  misc_feature (46)..(46): n is a, c, g, or t
  misc_feature (199)..(199): n is a, c, g, or t
  Coding DNA Sequence Number=SeqID_22
gggaattactttttagcctgtgcctgattttttttggggggatcgntcatttttttttctcacccaaccacgatatttgcctccctctaagaggcgggatgctgatgtcactgatagtggcattggtgaacgatgtgtgattaagaactgcaaaattcaccattctgagagagggctgagaacttgcatatctccctgngcaagggtggtggacacgccatcaatgggggcagattataacaacaccacaagctgataggaggatgctggctactaaatgcagtgttccaatg

SEQ ID NO: 9802 - DNA, 534 bp, Glycine max
  misc_feature (97)..(97): n is a, c, g, or t
  misc_feature (109)..(109): n is a, c, g, or t
  misc_feature (127)..(127): n is a, c, g, or t
  misc_feature (143)..(143): n is a, c, g, or t
  misc_feature (291)..(291): n is a, c, g, or t
  misc_feature (325)..(325): n is a, c, g, or t
  misc_feature (343)..(343): n is a, c, g, or t
  misc_feature (418)..(418): n is a, c, g, or t
  misc_feature (424)..(424): n is a, c, g, or t
  misc_feature (437)..(437): n is a, c, g, or t
  Coding DNA Sequence Number=SeqID_23
gtggtgtgtgtatccagaatatgcataatattgatgatctgcaccgagacgatattataatatatatgattgaatctagacacatatgccatgatanttattatataantatagatagtgataattncacacgatacatatanaaagaatgtgagtcaagagcgagtagaactggagagttatgtgaggagagagagcgcatggacgcccccagagatgtcttgactccgcgtgtgtgtcgccgcgcggtgtgcgccagcgcgcgacggaggaaggaagagaagaagacancgaaagagaggggagacatggtgcgccgcgcgtntggctgttgtgcaaggtnggtagagaaatgttaagatattaataaatcacaattatacacactctttatatacaggcacgagaagtatgttcnttatgnttcttcaccgagncaatatatgtataagataagctcgattgtacaacgtcaatctctcgacgcgagaacagcatgagtgagaacgtaggacagcacatcgtgtaggcgag

SEQ ID NO: 9803 - DNA, 203 bp, Glycine max
  Coding DNA Sequence Number=SeqID_24
aatcacgcttttccggattctgatattaagagtcgggaatcttcatttggaaaccgagggacgccccctcaacgagggttctcaaaactggtatttcgcccttcttgaagggaacccgggcaaagccaactctttgagggttcccgccttcaaagttggtagccaggtttattgcccacaagttggctacctatcaagaggaa

SEQ ID NO: 9804 - DNA, 452 bp, Glycine max
  misc_feature (69)..(69): n is a, c, g, or t
  misc_feature (109)..(109): n is a, c, g, or t
  misc_feature (153)..(153): n is a, c, g, or t
  misc_feature (156)..(156): n is a, c, g, or t
  misc_feature (192)..(192): n is a, c, g, or t
  Coding DNA Sequence Number=SeqID_25
gtgccggcgacgaccatcggtcctgccctgcagcagacgctcaacttcagcagtgaccacgtcgcccgntacctcacaggcgccaagccggcctaccagaacgtcgtcnccgcctacatcgatgtccgagacgtcgcccgcgcgcacgccctngtntacgagcaccctgacgcgcgcggcgatcgctacctntgcgtcagcgccgtgatgcaccgcgctcacttcgtccggctcctcaaggacctctacccgcagtaccccgtcaccgccaagcgcgaagacgacggcaagccgatggcgagggagtacaggttctcgaatcagaagctcggggatttgggcttggagttcactgacatgaggacaagtttgtacgacacggtgatttgcctgcagcacaggggccatgtccctgtcatcgtgccacgtcatcgtgcatgtttgtgaaaatt

SEQ ID NO: 9805 - DNA, 506 bp, Glycine max
  misc_feature (131)..(131): n is a, c, g, or t
  misc_feature (166)..(166): n is a, c, g, or t
  misc_feature (216)..(216): n is a, c, g, or t
  misc_feature (238)..(238): n is a, c, g, or t
  misc_feature (242)..(242): n is a, c, g, or t
  misc_feature (294)..(294): n is a, c, g, or t
  misc_feature (299)..(299): n is a, c, g, or t
  misc_feature (308)..(308): n is a, c, g, or t
  misc_feature (332)..(335): n is a, c, g, or t
  misc_feature (359)..(359): n is a, c, g, or t
  misc_feature (442)..(442): n is a, c, g, or t
  misc_feature (446)..(446): n is a, c, g, or t
  Coding DNA Sequence Number=SeqID_26
tgctgcaagattcgcactttctttcgtcgcctattcatgcctgtacttcattatccatcactgaatgtcacttcatgattaaggagagtttagtatatatactattataatgtcgtgcaatttttgtaatntattgtcggtaaattcattgaccaacaagcgcacnacgcaccagcgccaatgctcacacagcctccccttcaactccacgcacgncagttccacaccacaatgcacnaccnacaatcacaaccggggcggtagccaccacaccaccacaatactcacacacancctancgcgacagnaataagtcacatcttactttatannnntccataatgaagaaataagcacangcacacacgcatatgcttctttctggctcgctcacacagcgcgcgtgcgcgtctcactagcatctcatatagcgtagcatgtntatntacacaccatgaactcctgtccagttcgcctcgctgcctcgtagttgttattttcttatt

SEQ ID NO: 9806 - DNA, 444 bp, Glycine max
  Coding DNA Sequence Number=SeqID_27
gcggtacgagctgggcagccactacaggccggacatcggcgggctggaccacagcatcccggtcgccgccagggcgcagttcatccccggcgccgacgacacctgggtgcccaaccccggcttcgaggtgcccaaccccttccgccccgcagccaccacggagtccccctgatgcatggatcgagtcggccggccaacgcgtccacgttacgcctatcgatcaatgggtagctagcctgctacaattcaatttccgctagcttttggttgctacaataaaatagctgctatgcataggcaaggcatgcgtatgcatgtatcagcgactgcgtgcgagcgcgctgtcgacgttttttgtgtgtgattggagagtgtacctgtatggggtatgcatggatgcgtaggaaggaagcatccatcgcatatctcgctttgctttgttgt

SEQ ID NO: 9807 - DNA, 252 bp, Glycine max
  Coding DNA Sequence Number=SeqID_28
caggtcttattgactaacgcgcgtgacatgagagctcctatatggctactgtcaaacatgagataacaagagatggaaggacacagttgtacgcttatgagcactacttgacaggagatggcaaacaactcacactaactctacgaatactacggtcaactaaaggatacccattcgaaatctacagatcatgcgaagattgtaaatgctaaaccttatatgactgagatacaggccagaggagctactttg

SEQ ID NO: 9808 - DNA, 383 bp, Glycine max
  Coding DNA Sequence Number=SeqID_29
aatccggcgtcgaggaatctcttcgaaaggaccattctttatatcgttttttaagggcatcgcgtggtcgtctcggcgcgtgtgtggattccatatagcatggctactgataatggctggaggaactcttagtgcttgtgggagcttcacaggttcagtcactgtgccccaagggcttaattctgacgtatatgatgatctggctccttctggctttctatcctctccaaccgatgcttttaatacagagattcatgtcaacaaattctacatggatcattatgagagtggagaggtttcacagatccacactgatctttcccttcgtaacatggatggcaaagaagtaatgatgaacacaatcagcgaatgatcctatatga

SEQ ID NO: 9809 - DNA, 448 bp, Glycine max
  Coding DNA Sequence Number=SeqID_30
ataagttggtacaagttcgggtgaggaagcaggctgttataataccggactatacgcatcggcggggggcttgcggtgcagctggttctctatagtaataatccgttaggccggtgggaagaaagtagataaagaggagcggggggggacgagggaatgtagcgatatataataacataacgggccatatagtgaggaatgttggagatgggagtgggtgtggtaatgaattatataaaacataaaataccctgctagcacgtgcagcagccggcgccaggcgctaaatatttacatcgtagtgaggtgactcgtgtgtgtgttaagcgcggcgaggccactcgccggtatataggcggacgggcacgtgccagtgagcgatgacgcagacacacggactagtgtatgtcaagatgtctgtacaccgcgctcccaatatcagtagaga

SEQ ID NO: 9810 - DNA, 548 bp, Glycine max
  misc_feature (72)..(72): n is a, c, g, or t
  misc_feature (171)..(171): n is a, c, g, or t
  misc_feature (227)..(227): n is a, c, g, or t
  misc_feature (260)..(260): n is a, c, g, or t
  misc_feature (358)..(358): n is a, c, g, or t
  misc_feature (362)..(362): n is a, c, g, or t
  Coding DNA Sequence Number=SeqID_31
gcatctcgtttgtgggtggtttactgtgtttatgactgtacttaccacttatctaatataatcttatgtagncctcatacagtgtttgctctcatacaacacttgttgtcgtagaactccacataactgtctcgtggttctgataattcatgtatgttgtactgtgggggnacagccaccgcgggcgaggttcgtggtaatatacacgatggtgtgtggcgcacgtngtacacaggaaatggtgtctctgcgtgctgtgngctcagatgcgtagtgcgacttgagcgcccgcagcgatacgcgcgagctggctcgcgtcacgacagactagacgcggtcggcgcgcgcgtccacagcnaacntcactttgtctgtgctcctgtagatgagagatgtgaatggtcgatacatgtgtcgcgtggacagccacacaactattcgctacctatgacagcactcgtacaattatatcgtcgactgtgctcatacactgtgcgtaatacgagtatagtaggtatcagctacagcgccgagtacacacgatatat

SEQ ID NO: 9811 - DNA, 542 bp, Glycine max
  Coding DNA Sequence Number=SeqID_32
gatcatgtccgcatcaacttccgtaatgcgcttccagaaagcaccacggttcattggcacggactgatcgtcccgaatgagatggacgggccggccaacgtcacccaagacccggtgccgccgggcggctcctacacctacgaattcgacgtgggccagagcggcacgtacttctaccacagccacgatcatccggaccgccagcaggcgctcgggctctacggggcgctgctgatcgcgccgaaggacccctcggccgaggtgaaggccgacctcgattacgcgatccagctacaggagtggctgaagcgcgaatggctgacctatccggcgatgctgatggaaggggcgcttccgaactacttcacgatcaacggcaaggcatacccctcgaccgacacggtcgccatgaaggtcggacagaccatcaaacttcgcttcatcgggacgaacaacaacttcgtgcatcccatgcatgtgcacggcggaccgttcgaagtcgtagccgtggacggggtgaacctcaaggaaagcgcgcgata

SEQ ID NO: 9812 - DNA, 553 bp, Glycine max
  Coding DNA Sequence Number=SeqID_33
gcaatcatgtcatcttcctcaatatcatcatcatcttcaccttcatcatcttggaaacgctgtaggtcattatcactgtcatcttcctcttcagcttcttcatcaacaaaagccctaacagggtcaccatctggtgataaagtcaagtcaactgatacatgtacgtgtggctctatgttctccttgtcattgtcctcctcctcctcattggaagagacatcatcatcaggaggagcagaatcaagtttcaagttcattgcaagcattgacggggcaaacacttcttctgaagggttgttagacttgtcatttacagcctcatctttagtatcgcttctttcagaatcagtgtagagttcctagaaaatacagccagacaagcaataaatatagaatatctacagttaaggcaagcatcttggtaaatggctggcagaaaacctgagtatcaccaataggagctcgaaatgcatgctcagattctgaatcccttggcatgggagaaggaatgctctcagaagtagaattagctgcagcatcattagaattcttc

SEQ ID NO: 9813 - DNA, 468 bp, Glycine max
  misc_feature (267)..(267): n is a, c, g, or t
  misc_feature (336)..(336): n is a, c, g, or t
  misc_feature (409)..(410): n is a, c, g, or t
  misc_feature (413)..(413): n is a, c, g, or t
  misc_feature (418)..(418): n is a, c, g, or t
  misc_feature (420)..(420): n is a, c, g, or t
  Coding DNA Sequence Number=SeqID_34
aggttgtgtaaatgagtagctctgatgatattatggatgatgtatggtgggtagtggctaggtatcatattaggacatcatttactagcgaagacagtgtgcggtgaagcctatacatagacaactatacatggatacaggtgatgtagagatgagtgtgtggtgttcttgtgcgtgcgtgcttgataggcgtcatctgcgtactgccaagtgcgtgttgtgtgtgagattgaggatgtagcgagggacggcagacacaggtgatgnattcgtaggatgactatagtagagagacgtagagaatatatagagtcaatgcatagactgtgtatctantggtagcgtttgtccgactatatagttgcgcatcgagtgcttacgtatagcgatgcgtgtgatgtgtctaaannaancaagnanagagttgattaattcaacttgatatacgactgcacgaacgtagaggat

SEQ ID NO: 9814 - DNA, 246 bp, Glycine max
  misc_feature (205)..(205): n is a, c, g, or t
  Coding DNA Sequence Number=SeqID_35
acaacgaaggcaaaagattcctcattattgactgccgcttcgaatatgaatataaaggtggacatataagagatgcaataaatattaccagaccagatgatttagacgaagtccttattaaaaatagacatctcttgtttaaagaagagtcacttcaattcgtcaaacaggattggagacaagctattcaccaatcaagagttanacctggttggatgttggaagatcaatctaactttgaacccc

SEQ ID NO: 9815 - DNA, 581 bp, Glycine max
  misc_feature (87)..(87): n is a, c, g, or t
  misc_feature (339)..(339): n is a, c, g, or t
  misc_feature (359)..(359): n is a, c, g, or t
  misc_feature (367)..(367): n is a, c, g, or t
  Coding DNA Sequence Number=SeqID_36
tctggcgccatgtccaggtgagtgagagtgcataaatgatgagatgagagccacacactgcaatactaccgtcacagaacgcgtatncgtcatatgtctagtgattgaataagccttaatattgtgcacatatctcgtcacgagattagattatataaatctacatcttcactgatcctataggtggtttgacaggtcatcatcacgccgccgctcgcgaccacgccacctcactgatcatcttactacactgcctcgtctcagtgctcattcactctgtcttatgcctaaactccgtactccactcctgtcacaccgtcataagtgctcatatagtanagaaacgatgctagtgaatncacacagnagactccgtcacctatccacacacgctatagtatagactgtagtagagcgacgcgtgatgtaacaacgaaatacgattcgtatatacatagatatagatcgtactacacacaactgtatattacggcgcatgatattgactaagacatctacccacgatgcgcctagtatatacgtacacacgacgtacgacgtattcttcatctgcgacatat

SEQ ID NO: 9816 - DNA, 570 bp, Glycine max
  Coding DNA Sequence Number=SeqID_37
aagtgcggtgtcatggtccatactctcatgcaccacggatgataatcatgtatggaggaagtatggacaaaagggagttctgaattctgaatttcctaggagttacttcaggtgtggtcataagtatgatcaaggttgccttgcaaaaaaacaggtgcagcgggatcaagagaattcaaatatgtaccgaactacctacattggaattcacacatgcaatgccaccaccaaggctacacattctgccacagatcttctgaattctgatcatgactccgaggtacctaatgttcaggatcaccacattagccctccaagcttaaatataaaacaaacatttcccaaagaaaacacaccaagtgatgttacagatcacatgttgaatcctagcatgtggtcagctttgaaggattttgaaccatccaataagcctaccattgtgcccttaatgatggaaactgatactaataatgtagataatgtgtattcatctcaacgtctggacatggattttcgggtgccatctgttcattttggcactgattttccctttgacgaaggtcactttct

SEQ ID NO: 9817 - DNA, 548 bp, Glycine max
  misc_feature (287)..(287): n is a, c, g, or t
  misc_feature (322)..(322): n is a, c, g, or t
  misc_feature (414)..(415): n is a, c, g, or t
  misc_feature (445)..(445): n is a, c, g, or t
  Coding DNA Sequence Number=SeqID_38
gcaaagaaccctagaactacaagaaaccgggacgatgcggaccggcgaatcatgtgtgccggtggtagtgtgtgtggggggaacacgtcggcgacaggggcgggcatgtacaacagactctatccctgcccaccgaccttaacttatttcgctttatataatcttatctgtgaatattttaattaattacgtatactataaactacatcgattacaacatgcacgacatcaccagtctcgcctctcgcccgctcccgtgcgagtggaggcggcacacggatagcgtngagatgtcatagaggggaggtgacagggaggaganaaggcagatggaggaggtggtatagcggcgtacagaaaggcagcctgaaaaattagcattgacaactgaactaccgtcgtctcttccaattnnacacggggggggccgtgggggtaggggaangaaccactagcaatacaggatttggtatgggcgatggagaacaagcgaagactctagcaccaagcggagtggtgaatcccatgcgaataggagtgtgtgtatc

SEQ ID NO: 9818 - DNA, 581 bp, Glycine max
  Coding DNA Sequence Number=SeqID_39
ttcggcttgcaagggactggatctggtgtgattgattcttcctctcgcaaggttatgatggccgacaaacagctccaagttcacgggtcgccaggctcgccgagtgacgctggctccaacggtggtctgtgagcacttgcccaggtcaattgatatttgtggtggcccttctctgtttttacttggaaaaatttagtccgtatgtgcctcagtgaattttaaaatcaaaggaaatgctctgtgcagaaaaatacatatctaatytagggggtatatgtaatagcggtagataaataataatgtttagattcaggcagtatactacaatctgccttbtggagaggggcctatgcttgctaagttctttgtacggtgccttcagggaggctgtgtggtgccgaccggatgtacggcgaggtcttcataatggcatcaagtcacccttgccatatggatcatatgtaagctyttcctgctaacctacaggagtacattttgatgcttcaagtctgaacctatgtaacttgtgaactaatgcctccctgagtgtgtgtgtgtgcacgtgcgctatgttaaatcaa

SEQ ID NO: 9819 - DNA, 344 bp, Glycine max
  Coding DNA Sequence Number=SeqID_40
ctcccttcctttaccatcaagaagaaggcaatccaaaccttaccggtgctcgttaccgtctccaggcggcgaaagggtcatcagatcagagaccgtggtttctccggtgatggtgagccagagcttcgaaggaagaagggtgttacttggatgtctcctctccgccgcgggtgggattctgttacctgattcatccgaggccgtaagcaccagcagaagagctctacgtgcatctaagataccggacagcgaattcaccactctccccaatggtctcaagtactatgatataaaagttgggaatggagcagaggctgtgaaaggatctcgggtcgcagttcact

SEQ ID NO: 9820 - DNA, 432 bp, Glycine max
  Coding DNA Sequence Number=SeqID_41
agagaccgtctcttgtgattcttcttcctccctcttcaccttctccagaacttcatcccacttctcctctagattcaaaccttctcgaaaccgcagcagaggccgagcaaaaggtctgttcctactgatttcattgtgatcgtgttaaaataatccgccgtcgccgtccttggtctccaaagctagaaccgctttcaattccgccgctgctaaagcggagcgcgtcctcactggtttagaaaggctgggaagcctcttggttacaaagaatgtcagtttcacagagtcatcaaggacttcatgattcaaagtggtgattttcttaagcatttgaacaactcatggctccctctcacaacattccacttcgtagtctcacctccactgatgaatccaaacttgacttaaatgctctgtctttgagcgtttcct

SEQ ID NO: 9821 - DNA, 594 bp, Glycine max
  Coding DNA Sequence Number=SeqID_42
cgcctgcggtgtttgttatcgcggtgcgcgctacgcttatttcgcattaaatccgcgcaattaatacagacggggggcgagagcgattcaaacagtattcgttcttcgggctcattcgcgattttcttcgccgcgcgtctatatactacataatacactcgcagcccgccgattcataaacggttgtaagtttctccccaccgcggactcgtaaaccacatttctccggttttttttgtggggcgggggtggcgaacaccctccgcggtattttaatcgtccccggataaacaattaatacatattggcggatgggaatatatatacgcggggggtgagacacattattgtcaaataccgggggatataccagcgacggcgcggccttaattaagatatagcccgacctataccattacgcggaggaatatggttaaaccatcggggctgtcaatgaggaatgaggggtggggggacacagggtgacaaataattaaacaacatgccccgcgcggggaaggttataaacacggtttacaccgccaaagtgaaaataaaaaaagacaaacagaggcgggatacggtccacatatc

SEQ ID NO: 9822 - DNA, 408 bp, Glycine max
  Coding DNA Sequence Number=SeqID_43
aaaatgtctgtcttcttacgcggaggaatcgccggaggatttcatctccgtagtcgtgactcctcagccgtcatcacaaaacgacgaatctcatccgttggagccgtaacaggacgaagcgtcaatccagcagcagccattgaacaacgtgccacatggctacctggtctcgaacctcctccttacctcgacggaaagttagctggagattacgggtttgacccgctcggtttaggagaggatccgaaaagtttgaaatggtatgttcaagcagagcttgtccacgctcgtttcgccatgctcggtgttgccggaatactcttaaccgacctacttcgtaccacagggattagcaacttacctgtttggtacgaagctggagcaacgaaatttgattttgccagcaca

SEQ ID NO: 9823 - DNA, 160 bp, Glycine max
  Coding DNA Sequence Number=SeqID_44
gcagcagccgaatgctcagtaatgcatgtgtgcaaaatgtgaggatttttatgttaactgttaagtagtaaatgttaacatacatgatagtcctctgcactctccataagctctcgactacttttcatcttcagcacatttcttctaaaaccttgcttca

SEQ ID NO: 9824 - DNA, 562 bp, Glycine max
  misc_feature (150)..(150): n is a, c, g, or t
  misc_feature (153)..(153): n is a, c, g, or t
  misc_feature (259)..(259): n is a, c, g, or t
  misc_feature (290)..(290): n is a, c, g, or t
  misc_feature (370)..(370): n is a, c, g, or t
  misc_feature (462)..(462): n is a, c, g, or t
  misc_feature (473)..(473): n is a, c, g, or t
  misc_feature (499)..(499): n is a, c, g, or t
  misc_feature (504)..(506): n is a, c, g, or t
  misc_feature (509)..(509): n is a, c, g, or t
  misc_feature (513)..(514): n is a, c, g, or t
  misc_feature (523)..(523): n is a, c, g, or t
  misc_feature (526)..(526): n is a, c, g, or t
  Coding DNA Sequence Number=SeqID_45
gttatgagtgtgttgacatcttgttgatggtgttcttgttacaatcttttcctctctttgtttctcattgtctatcttggtgcggtctggcgcgtcgcggcgtggcgtcactacgtcattaacttatactaccgacacataaatcactcntanccttcgtgtggcgtgatgatcgatagacgtaatgtggatgatataggaataattatgaggtgatatggagcgggagcacgagggaggtggaaggaatgagatgagncgtagtagtggagagtagagtgtctgtgatntatatagagagagagaacggcgaagacagggagaagaatgagacgtagcgagtgacagacgctcggctgtgttgtctgtnttctatctatggttctattatggtttggttgtggatgatatgtctctgtccgacgggagaatgtggtgtgcgtgatatgtttgtcgtgcgtnaatgtggtagngtctctcgtactgttttctatacacntctcnnnttntgtnntttgtgttntanagagagagagaatacggtgacgataagtcggcgagt

SEQ ID NO: 9825 - DNA, 505 bp, Glycine max
  misc_feature (39)..(39): n is a, c, g, or t
  misc_feature (127)..(127): n is a, c, g, or t
  misc_feature (188)..(188): n is a, c, g, or t
  misc_feature (197)..(197): n is a, c, g, or t
  misc_feature (221)..(221): n is a, c, g, or t
  misc_feature (223)..(223): n is a, c, g, or t
  misc_feature (225)..(225): n is a, c, g, or t
  misc_feature (236)..(236): n is a, c, g, or t
  misc_feature (240)..(241): n is a, c, g, or t
  misc_feature (253)..(253): n is a, c, g, or t
  misc_feature (255)..(255): n is a, c, g, or t
  misc_feature (257)..(257): n is a, c, g, or t
  misc_feature (276)..(276): n is a, c, g, or t
  misc_feature (306)..(306): n is a, c, g, or t
  misc_feature (308)..(308): n is a, c, g, or t
  misc_feature (317)..(318): n is a, c, g, or t
  misc_feature (323)..(323): n is a, c, g, or t
  misc_feature (332)..(332): n is a, c, g, or t
  misc_feature (343)..(343): n is a, c, g, or t
  misc_feature (363)..(363): n is a, c, g, or t
  misc_feature (382)..(383): n is a, c, g, or t
  misc_feature (412)..(412): n is a, c, g, or t
  misc_feature (418)..(418): n is a, c, g, or t
  misc_feature (427)..(427): n is a, c, g, or t
  misc_feature (432)..(432): n is a, c, g, or t
  misc_feature (434)..(434): n is a, c, g, or t
  misc_feature (475)..(476): n is a, c, g, or t
  misc_feature (478)..(480): n is a, c, g, or t
  Coding DNA Sequence Number=SeqID_46
gtgttacacagttgttttactctaatgttatatcgtcgntgtcatcctgcaccgtgtctggagtgttgtgtgtctcggctgctcaataatagattgtgattgggatgtataaggtaataatataaanatatttatcgacacgcatgcacgcactcggcgtattcactctgccgctggcccgcgcgttntagtccccnctagcgcatgatctgtatctttananancacacaacaanaccnnatagaacgtgtngnanacaaagtacagagaaggcnagcagtataatagatgtagccaagacagtngngagtgggtnncgcgnagggctgcntgcatgagtanggtgaggatattggtatgtnagagcctgtctggtgtgcnnctctttggtgttgttatgtggtggtatgntgtgangctatagantatgngngggagaagtgattgtaagatgtgtatcatgttgccatccanncnnntgttgagcgtgacactctctctaca

SEQ ID NO: 9826 - DNA, 268 bp, Glycine max
  Coding DNA Sequence Number=SeqID_47
agtgcgtggatgcttaacaaacctgatgaagctcttttttgctgtttcaagagtaggaagtggatcttcaagcaatgtagttctgtttttgtctgatataatgggaatgtattttgtatcttctattcttttgatcacgagaagctgagcgactgaatacatgattattataacagaggtatggagtggctgtatccagtgtgactcttataaggggagtgtgatgcaatttttggggcgtagagcattactttcactgctgttactt

SEQ ID NO: 9827 - DNA, 581 bp, Glycine max
  misc_feature (58)..(61): n is a, c, g, or t
  misc_feature (186)..(186): n is a, c, g, or t
  misc_feature (253)..(253): n is a, c, g, or t
  misc_feature (417)..(417): n is a, c, g, or t
  misc_feature (511)..(511): n is a, c, g, or t
  misc_feature (537)..(537): n is a, c, g, or t
  Coding DNA Sequence Number=SeqID_48
tcgtcttcgtatatcgctctgttggttgctcgtattgctgcatatttcaattgcgggnnnnaccgacgacgtccgcgaaataccgcgcggcgcgtgtggtgtggtggagtattattaatgtcactatatatttatctccctctccaccactcgtttatatattgttgtattcctgctccccacccnccctgttcgtctcgtctctcctcacgccctccactacaaacaccgcgtcgcgaagacgcatttgtgntcttctctgccgcgcacatatattatcttgcgcaatactccactcagcctctatgttaattgagagagctgattgtatgtgcgcgtcaatattactatcgcgcgacgctccaaacactcgggcgcggaacacacaaccaccgacgcgtggtgtggcctcactangttacgtgtcgcggcgtcgtacattgagttgttctggcgctgtgtgtctgttccgtctctatatatctctatctattatattaactctgcgcgncgcgagctcgcgtgcgtcgatcaccnggcgataaaacacagcgcctcgacacctatatacactcatcact

SEQ ID NO: 9828 - DNA, 202 bp, Glycine max
  misc_feature (136)..(136): n is a, c, g, or t
  misc_feature (169)..(169): n is a, c, g, or t
  misc_feature (177)..(177): n is a, c, g, or t
  Coding DNA Sequence Number=SeqID_49
ttagtgcccacatcctgaccttactctgaaagcttccttttactcagatactagtggtatgaccatgcgtgtccctgatgataatgtgataggacgtgaagtcgccataggtgatactggtcactgttaagccatnctccaatgctccatcatcaacatgggtgaccanatcctgtnctgaacaatgcgacgtacacgattt

SEQ ID NO: 9829 - DNA, 591 bp, Glycine max
  misc_feature (96)..(96): n is a, c, g, or t
  misc_feature (380)..(380): n is a, c, g, or t
  misc_feature (383)..(383): n is a, c, g, or t
  misc_feature (415)..(415): n is a, c, g, or t
  misc_feature (443)..(443): n is a, c, g, or t
  misc_feature (520)..(520): n is a, c, g, or t
  misc_feature (543)..(543): n is a, c, g, or t
  misc_feature (547)..(547): n is a, c, g, or t
  Coding DNA Sequence Number=SeqID_50
gggtggcgcgtcaacatcatatagtatggtcgcatcgcgcgccccgtgccgcacatcgacgctggcgtgtgagacccgagtgctacttctaccctnctactacgcctcggcgcgctcccggcccggacacacgacaacacacgacgcggttgcctagcacgtcccggtcgcatacggctgaagacgtgcatatcatgtaggtgatcgaatcagtgtcgcgtacctctgtgtgatgttgacccgctcactatactttcctatcataatctactgctcaccctatacataaagacggcgtagataatatgtgccgatgacgtcttccgctattctgttcagctccataatatactgatgcatacatgctctactcgtcgcgnctntgcgtctttcgcgctctgtttgttctaatgancgatggtccgctgctaacgttcttgcgncatacatcgatcatcgaattatacacatcgcgatactaggacatgcaacggtgtacagtcgcacgtagactatatgntggtgcgccgcactcagatccangctntacgcgcgacacagcatggcgacggacttagtagagcgcttcta

SEQ ID NO: 9830 - DNA, 418 bp, Glycine max
  misc_feature (39)..(39): n is a, c, g, or t
  misc_feature (73)..(73): n is a, c, g, or t
  misc_feature (202)..(202): n is a, c, g, or t
  misc_feature (234)..(234): n is a, c, g, or t
  misc_feature (345)..(345): n is a, c, g, or t
  misc_feature (353)..(353): n is a, c, g, or t
  misc_feature (364)..(364): n is a, c, g, or t
  misc_feature (374)..(374): n is a, c, g, or t
  Coding DNA Sequence Number=SeqID_51
cgagtactgccccatcacgaagcgcccacaaacacgagnataaaccagtgtagcaggcgaggagtcggtgtgnggagcgagacggaacgccatgagaaaatttaatcatgccagacgtcatccctcccctccctcccacaaaataatgtaaatctgcgagcgggcggttgagagagaatggacataagattggtgctgtatnatgaaattgaagaaggcgacagagagcatatngatcttagagtcgaacggcgaggaggtatgtgttgttgtttagttattgatggagagtagaggttgggtgatagggattgtgtgaggagtggtcggagtgagaagtattgngatttggngggagtatgtntttcttagtntggttgtgggtattagtcgggtcgtgggtgggttggtatgtatt

SEQ ID NO: 9831 - DNA, 580 bp, Glycine max
  misc_feature (33)..(33): n is a, c, g, or t
  misc_feature (117)..(117): n is a, c, g, or t
  misc_feature (170)..(171): n is a, c, g, or t
  misc_feature (201)..(201): n is a, c, g, or t
  misc_feature (223)..(223): n is a, c, g, or t
  misc_feature (250)..(250): n is a, c, g, or t
  misc_feature (328)..(328): n is a, c, g, or t
  misc_feature (420)..(420): n is a, c, g, or t
  misc_feature (429)..(429): n is a, c, g, or t
  misc_feature (431)..(431): n is a, c, g, or t
  misc_feature (436)..(436): n is a, c, g, or t
  misc_feature (483)..(483): n is a, c, g, or t
  misc_feature (529)..(529): n is a, c, g, or t
  misc_feature (533)..(533): n is a, c, g, or t
  Coding DNA Sequence Number=SeqID_52
gatgttgtatgatagatgccgatgtatactgcnacgactggagtttagtcatctaacaatgaatatcacagtagtgcgtgaatatcgcacgatcgatatctgcgatgactgcgtcantcgtgtcctcacatgatacgatcgtcgaccgcgtgtaagtatgcggattttanntgtacacattctactagtgaacatgacatntgaacatattcacgcatctacnactatgccttcgacagtctcctactcngtatataagagcacgagttcatctggacgcgcatacgagcactgtgtatgtggatatatatcgtgtgatgagatatcncaaggagactgctcggcgttcagctcggacagcgatgaggtatgctattcgatattcgacttcgatcgtggatattcacatgttcagagcgngtcacgagncngttgnacactctcgcaagttctcgatatcttaatgtatgtgccttcgacggntgcgagtgggaggtagctctcgctgtcgcgctgcgctctggtcgancagntgcatctgtgttctatagataatagtatagtgtcagcgcagtatcat

SEQ ID NO: 9832 - DNA, 197 bp, Glycine max
  misc_feature (28)..(28): n is a, c, g, or t
  misc_feature (75)..(75): n is a, c, g, or t
  misc_feature (85)..(85): n is a, c, g, or t
  misc_feature (90)..(90): n is a, c, g, or t
  misc_feature (98)..(99): n is a, c, g, or t
  misc_feature (126)..(126): n is a, c, g, or t
  Coding DNA Sequence Number=SeqID_53
tatcagttcgacacacattgtagtcgtnttcgattattatgtggataggatgaggtgtgcggatttgcgatacgncacctacgancaacngagagagnngagtggaagcgcgagcaggcttcgcgnagtacatgctctcgcgtgctacccatcgtgcgctagcacgactagcgagagacagacaacacgcgctcacg

SEQ ID NO: 9833 - DNA, 306 bp, Glycine max
  Coding DNA Sequence Number=SeqID_54
ggtcataccttttcactcggataaccgattcaggcgcataatatatcgaggcgctagaaattacccccgagagctctcgacccattcaaatggtcataacttttcactcaagggtccgatacatggtgcataatatatcgagacgctcgaaattcaacaatggaagctcttgggcaattcgaatggtcataactttgcactcggagattcggttcgggtgcaaaatatatcgagacgatcgaaattgaacaatggatgctctcgagacattcaaatggtcatgacatttcactcgcatttccgatt

SEQ ID NO: 9834 - DNA, 599 bp, Glycine max
  misc_feature (97)..(97): n is a, c, g, or t
  misc_feature (403)..(403): n is a, c, g, or t
  misc_feature (450)..(450): n is a, c, g, or t
  Coding DNA Sequence Number=SeqID_55
gtcgcgttaatggtcgttatatgtgttgaggggtgtggttgtgttgttttggcgacgccactaccaccacaacccagagccagtgtgtgagtgcggntgggtgtgagagtgtgtatgtgacgcgatctatcactaccccaccttatgccgtgccacgacactagctatcatattgttttagtgttcaattgactatcaagtgcaagtgtagtttctctgacgaggacagccacaagacttgacgtggtgttgtgggtgcgagagagtgtcccttgttatgacgtataccctactagtagtatatacaagaccgcagtgatgcttatgctagtggtaagtatattgtatgtgatgataaaatttcataatcttagtatgagtcaacagtaatcatcttatacanacaacattcatcattaatattacactgcagcgcgcactcacatcgtncactccaacatacttgtgtcagcgctgataactcgagactatataggtagagagagcgtcgtacgtgtttttgtgtagtgttttgttgaggtgtatagagcagtatagtatggagactatacatgcttaagcttcactgttcgtgtgta

SEQ ID NO: 9835 - DNA, 574 bp, Glycine max
  misc_feature (112)..(112): n is a, c, g, or t
  misc_feature (122)..(122): n is a, c, g, or t
  misc_feature (294)..(294): n is a, c, g, or t
  misc_feature (322)..(322): n is a, c, g, or t
  misc_feature (360)..(360): n is a, c, g, or t
  misc_feature (379)..(379): n is a, c, g, or t
  misc_feature (391)..(391): n is a, c, g, or t
  misc_feature (393)..(393): n is a, c, g, or t
  misc_feature (450)..(450): n is a, c, g, or t
  misc_feature (462)..(462): n is a, c, g, or t
  misc_feature (469)..(469): n is a, c, g, or t
  misc_feature (477)..(477): n is a, c, g, or t
  misc_feature (530)..(530): n is a, c, g, or t
  Coding DNA Sequence Number=SeqID_56
tcaggcggagcgtctacgtgtatatgctacgcgctctcgcaaccacaactatccaactacgtcatacatttatgtaacatgtctggagacgtttgatactacgcgtctcacnacgactgatngatcaacggaatgcataacatcttgcgtatcattaacacaagcacgatacgtacgatagaaatatacaggagcagtgacggcggatcgccgctcacatatgtgcagtgacgcaggcgtggacgcgatagtgagcagcacgagcagatgtgtaaattctacgtatcaatactnactagatcatgcacgcgtgccgctgagnaggggcagtgcgactcttaactcgagacgtatatgtgntgatcgttgctgtatatanatatcatatctngncctcatatctgcgtacaacgaagctcatctcggtacatgtgcatcgcgatatcccangatgctgacatngacatcngctacgtnctacgatgcactacacgatacgtcatacgctcgatatgcgtgacgtgcgacgntcgcagcgcgagcgtcagcgtgtagtatcgcgtcgctgcgctgc

SEQ ID NO: 9836 - DNA, 475 bp, Glycine max
  Coding DNA Sequence Number=SeqID_57
acgtattctgctcgaggctaaaccttataccctaattttgcttttttagagcgaatagaagagtttaggtggtggggtctttataagaacaacaggatcaacattcattgctcctcaagcaaggaagacgctgacatgaatttcctacggtctataatttcaaaaagcgttcgaggatttttactatagttgtaatctagacgcaattcatgtgcgacattgaataatccgatgatataaccagcgccgactattacttcgattcctactctcatttcggaattcacgaagaaatgttgaaggacagtgtgagaaccaagacatatcaaaatgttatatatcagtacagatttttattcaagaataaagttactcttgatgttggtgctgggactgagattttattactattttgtgccaaagccagggcagaacacgtctatgcggttgagtgctcctatatggcttaaatggc

SEQ ID NO: 9837 - DNA, 517 bp, Glycine max
  misc_feature (248)..(248): n is a, c, g, or t
  Coding DNA Sequence Number=SeqID_58
gccatatcggatagggcctcacatatcgtctggcagtggcgctgtcgtgggttccctgcccccccacctctcggccttcacccctgcgctcgcagacacgctcagggaacactcacgtactaactaatatacaaaataataatatgttactacgagtagacttaccaaataaattcttattttaacatctcgccctctccgactccatgacacgcagcgcgttcgctctcgcccacacatttttcatnatcgcctaccctgttctatagcgacctcgtgctgtgatgcccgaccaccgcttccggtctgatgaactgcggatctgagctcacactctgtcgcctactggcgcatcgccaccgcacccactcacgccgacccgaggaacagggcccgccctcgggcgagccactcgcgttatgagcttgttcatgtctatatgactgctgccccgtccacgctcttcttggcctatcctgtctacggccttacgcgcgtaatgttcgccacgagatga

SEQ ID NO: 9838 - DNA, 597 bp, Glycine max
  misc_feature (317)..(317): n is a, c, g, or t
  misc_feature (403)..(403): n is a, c, g, or t
  Coding DNA Sequence Number=SeqID_59
tatagcgttctgtctcagtacgtgagcacctgccgagtagttgtagatttatgagagagaatatacagccgacacttaggcccacagagggcaggttgctatacagaccggcgccaattctatcttctacaaaatcaccgcaaccacgaatcgagtttcatgtaatcacattgctgccacatattacccccgtcgcatattttatatttatactttgcgagctatataccgcggcgaagtactggagataatacattgtcactgattggctcgacactaatatcgcaggagttttggtatgccgccgcgcaccacanacttccgtgtcatattataggacaacaagcgaccgacctatacgcgagctcgtcgaccctagcgcgacgcgtctagctacactatncaaacatcatgaatatatcagaaagtacgaatagagaggggggttagtaagacagccgataaccatacatgactacgtcgtgtgcacggtacacagcgggacatatgtatctcttgtacagcgaccaggatgtctgtatattaatatcagtcacaggatcgtagtacgagcgcacctcgctatgtagattaaca

SEQ ID NO: 9839 - DNA, 549 bp, Glycine max
  misc_feature (197)..(197): n is a, c, g, or t
  Coding DNA Sequence Number=SeqID_60
ttactggacgcaccggatgcactgacgcggttgggtgccttcaggtatagagacccccggcttgggttctgtccttccggcttgccgccccacgaccctcaccattggctccatgtggcccgggcactaccgacgggcagcgatgtactcgactgtgcctgaacgacggtccgatggtagccccggaaacataggtnccgagacagaccacgcgtcggcggttaggcaccgtctcccggctcgtctatgccaccaacacatagagcctggtgcaccgcccacgagggcgatacgcgacatctgcggcgctcgtccacccaccccgcaccctacccgtagtgtcgtaagggcgacgcgggtctatgcgaccacgcggtcttgcaagacacgattgcacacctcccagcaacccgcgctggaggattgcaggcctgctgctccactactacgtgcactagcgtcgcatcgcgcgtgcgctgcccgaagtcatcggctactgacgtcttgcacgcctggaaagcacctgtctaagccctaatcgctgcacat

SEQ ID NO: 9840 - DNA, 152 bp, Glycine max
  Coding DNA Sequence Number=SeqID_61
acgtgtaaacgtgagagtaccctctcggcgaccaatattgtcatggatctttttttaacacagtgcaaatgtaaattggggggcttccgatatctcgatgtcgtttatgacctgcctgaacctgttcatggcacgcttatagatccgggcgt

SEQ ID NO: 9841 - DNA, 563 bp, Glycine max
  misc_feature (356)..(358): n is a, c, g, or t
  misc_feature (424)..(426): n is a, c, g, or t
  misc_feature (530)..(530): n is a, c, g, or t
  Coding DNA Sequence Number=SeqID_62
acacatcatccataatactgcctctctacatatacaaacatttactagataacagataaaacgcctaagcaattctaagaagcaaagtgcggaaaaaaatcaaacagactaaaaatactctttctatttagcattcgaatcgggctgtttgacgagagccgcgtgtatgctgtcgtatcccgcggaccgcacaatataataagagtattgtagtccgactatagagggtggagggggtggggagaggtgaggaggaggtgtatgatggtggtagatgttttatatctgcccatttagtgttttattatgaataatagtgaatttatggaggagcgagatatatatgagcagcgcannnggctacacactcgtccaccccagtcccctctctgaccgacccgctccaccggctccagagatcgannnggtacgtggtgttgttcctcgccttggtattaacttcttgttacctacctctcacgcctccgctcacatgcctaagaacgaccgcgcatccacaacgggcgagnaccacccactttccttgttgaccgttgatgatg

SEQ ID NO: 9842 - DNA, 256 bp, Glycine max
  Coding DNA Sequence Number=SeqID_63
tgatcgacttagaagcatggttggtaggatccaaactgtacagggcgacttgaccactcaggatgaaaggctacagtctttgctgggttggcaggaacctagagatacatcactatgtctgatattctgtcaggcttctgctaccgtagctggtgtcactccattccaagttgtggccctctatactggaatttatggtcagacacattcaaggataccgtacatgctgactttcgtgccgatgaatagctcaagg

SEQ ID NO: 9843 - DNA, 394 bp, Glycine max
  Coding DNA Sequence Number=SeqID_64
gttcgaagctgcacctctccaagtacgccctcgacgctcttgacccggaagagaaggtgcttgacctgggctctcgcaacttcttcctttgcgccgccaggtcgacgctgggatcagatcatcatctgcgacttcgctcatcactgacatgtcttgatgtctgaaggaaaaaagtgtgtgccatgtaaaacgagttggcatgtcggcctatatatgtggagtatatataactcatgttcgatccttctttggttgatcggtctgccagatcctctgcatcagtgtgtacgtagtgttagcttaggtatacatacagttcggccaagcaacgatacatacagatacatgtccggcgtatttacgagctcaagatatgtacgtggcgacgctgtat

SEQ ID NO: 9844 - DNA, 136 bp, Glycine max
  Coding DNA Sequence Number=SeqID_65
gaccagcaagccttcccctatatggccttctctctgctcataccccttccaaaattgcacattacccaatacagccatcctggagtcactgaaccagggacatgttttgctggccgatctcgatgacatgatggct

SEQ ID NO: 9845 - DNA, 556 bp, Glycine max
  misc_feature (187)..(187): n is a, c, g, or t
  Coding DNA Sequence Number=SeqID_66
ataaaagatcgacggcggctctccccgcgctttcgcccctccggccggggctctctcttttgcagcgccgcgttcatatctgtggatctgcccgtgtgttctgttcccttgcttgtatttttcgggtgtgtcctgttcgtataagcctagggcgcgcgcgtttggggctctcgttttgtctctgttntacgtctatgccttcgccgcccctccttcaagtcagtctcgcggttgcgcgtccggggttccggtcgtgtttgggtcggggcgttactggggcgcactgggaggcatgtgttggtggggagcgcccccctcctctctttctctttttttcatgcgtccctcctcctggctgccctcctccctctttatcaccgtgtggccgcgttggcgcggtttatggggcgtcttccgacttggtggtatgtggcgtcctcgtctgcctaggcgcggcgtctgtttcccgcttgcatatatatttttcttttttcttctttttcctccgtccttcccgggcggtcgccgctttctccgggtcttttacggcggcgcg

SEQ ID NO: 9846 - DNA, 346 bp, Glycine max
  Coding DNA Sequence Number=SeqID_67
aaagctagatgtctcgagataggaattggacggtatcaatcattattcttgcccaagtctagggggagaagattgattctggctggtaccatcacatctgaggtgtcaagttctgtaggaggatcttctattgcatcaagagaagatgctatcttgtcacactggaaactacgcagcaagcatctgagggggagtgttggtgtgaagttgaccacgtcgcaaaccacttgacaccaacccagaacagcgctgcagacctatgtccgggtccagcggcggtggtgcagcacctcactccggcggactgcagaggggatgaagacagggacgcggacagaccacagca

SEQ ID NO: 9847 - DNA, 495 bp, Glycine max
  misc_feature (106)..(106): n is a, c, g, or t
  misc_feature (204)..(204): n is a, c, g, or t
  misc_feature (206)..(207): n is a, c, g, or t
  misc_feature (216)..(216): n is a, c, g, or t
  misc_feature (229)..(229): n is a, c, g, or t
  misc_feature (254)..(254): n is a, c, g, or t
  misc_feature (317)..(317): n is a, c, g, or t
  misc_feature (332)..(332): n is a, c, g, or t
  misc_feature (361)..(361): n is a, c, g, or t
  misc_feature (398)..(398): n is a, c, g, or t
  misc_feature (470)..(470): n is a, c, g, or t
  Coding DNA Sequence Number=SeqID_68
gagagaagcgtgatgcgaagaacacgagagataacgactaacgattgtgcgtacagttgatgttgtagatgacctactatacaatatatcgtcgtaaagtggaganttgttaatatgtagagcatttcgtatattagtgagggtgtactcctacatactatatattaatatatctcgttctatacatcaatggtgagatgtagngnngagtttatngaagtatgggctnatacgctgtgtctggtgagtggtanagtatctatgtgtctaaatagtatatatattcaaactatatcatttctctatttttcatcctncattagtcttctctnattcactcttctccatcacactccccacnctacaccactacatacacaatcgcatagttgtgtgtnttgttggttgtttgatataatattatttgtagtgatgtttgttgatgatagtgtgtggtgtgtctatcaatngtccccctctatgtgtgtggtatat

SEQ ID NO: 9848 - DNA, 394 bp, Glycine max
  misc_feature (93)..(93): n is a, c, g, or t
  misc_feature (131)..(131): n is a, c, g, or t
  misc_feature (163)..(163): n is a, c, g, or t
  Coding DNA Sequence Number=SeqID_69
taggttattagcttgattcgatgtagataatcacggcggtaggagcaggagtgggcaagaaccacacataagatggacgtcactccttcaacnactctcacggctctccttccgctgtgcgacctctcctnccccacatatatattctcttatatatccttcncctacgcgtccccttacctaccccaaccctgtcgaattttcagtagagaagaggaataagacacagagcacacacaacgcgccttactcacaccacacccaccctcgcgtgcagaaggacagctctgtcactctacgcatctgattcgtcgctggatgcgctccttcgcgcgcgtcagactgacgatggtacaccgtacatctagcgaaccgtcgcagataacaaaactag

SEQ ID NO: 9849 - DNA, 585 bp, Glycine max
  Coding DNA Sequence Number=SeqID_70
acacgatcacatttactcgtcctgtcttgagcggtcaataatataataaaccaatccccgaatcgggtcgtcctaccccatccagttatccttcctaagtcagcgatgaacacacgatccatttatccccacatcatttcaccactgcgtagtttcgcgccctcactttcattactatctctacattatcactcacatatctataataaataagtgctgcctgcgcacgtcatgattataaatactagcatatgcccgaagcacatctaactcgcgtgtcgagtgccgtcctatttaattaatataaagaaaaccgcggccgccggcgtcagcgggtggcgagtatcatttctatcatgtacggttcataggagttatgaccccgtggatcctcgcattacatcgcacaacacggcagcgctcgctctccacccccaccattttattttattgtgccttcgatcccaatcattgatacgatatatatacattatatatcgtggttatttatcggccgcaagagtactcgcgcgcccaaatggttttcttcatacatcataggacaacaatccgttctgtctcaca

SEQ ID NO: 9850 - DNA, 558 bp, Glycine max
  Coding DNA Sequence Number=SeqID_71
aaggagatccacatcggcgggtaccgcgggtggcgcctcagggtgctggaggcgttcgtcattatcctggccttcacgcagctgctttacgtgctggcgctgcactccggcctcttcgggaaccagttgggtggcaaccatgctggtgggtacccggcggagcatgcgtacggcgcaggcggcgacccgcacaacaagggcatgggcatgggcaccggcggcgtcgccagggtctgaatcgggtagagacctcgccgtgctccatcgcttggcggttgacagtgacgggcggataataaggtgtgtgtgtgtgtgtgtgtgtgtgtgtgtgttccgtcccgtatggtgtgagcgtacgttgtatgcagacatggtgtgcacggtaggcatgtagtgacggcgtgcgtgcgtacatgtgtagtactgcaggatgggcccttcttcttagtgtgttttgtgtttattatgtagtccgagatcaagatggagatcgatcagtccatgctatgcttcttcattctccgaccagacaattgcaatgcatgtctgggtgtggat

SEQ ID NO: 9851 - DNA, 414 bp, Glycine max
  misc_feature (259)..(259): n is a, c, g, or t
  Coding DNA Sequence Number=SeqID_72
aattgcaaatgtctcactcccaaaaatgcccagaaaaatatcactccatctcccaagactcttccttttcctcaagaaactcgtgaagcgccaggagttgaagctcctgaggcactatgactatggagagtaccagttctccgcttcgagcactcctctcattcatcgttaccatcgaaaagagttcaagaacagaggccaccgaggcttgtgttctttcttgtatctgtgttggtgcttggggaatttgaaagtgganggaagtggggaatgccagctggcggagggtctgccaaatgggaacttccaaattgaagatgggttcataggagcagaggatgaaggcgaagaagaatcggtggatgagaaggctgagcggttcattgagagtttctaccagcagatcagaatgca

SEQ ID NO: 9852 - DNA, 414 bp, Glycine max
  misc_feature (224)..(228): n is a, c, g, or t
  Coding DNA Sequence Number=SeqID_73
tgctgaactgaggactgtgatgatcgaaacctgaagcaggcttatgctggtgttttttttcatcgagggtcttaagcacttgacttgctcccggtataacactggacctgatgataaggaacctccatggaatcctattacgcctgctgaaaaggatgagaaggcctgccttgtgactctatcagggttgttgaactttactgatgggagttggtcagtgtgcnnnnnagagaggatcgtaattttcacaacaaatttagtggagaagcttgatcctgctctcatcaggagagggaggatggacaagcacatagagatgtcatactgcggctatgaggctttcaaggtgctaaccaagaactacttgagaagttgttactgctgatgttgctgagaatctaatgcctaagtcaa

SEQ ID NO: 9853 - DNA, 576 bp, Glycine max
  misc_feature (53)..(53): n is a, c, g, or t
  misc_feature (111)..(111): n is a, c, g, or t
  misc_feature (119)..(120): n is a, c, g, or t
  misc_feature (194)..(194): n is a, c, g, or t
  misc_feature (252)..(252): n is a, c, g, or t
  misc_feature (274)..(274): n is a, c, g, or t
  misc_feature (278)..(278): n is a, c, g, or t
  misc_feature (281)..(281): n is a, c, g, or t
  misc_feature (316)..(316): n is a, c, g, or t
  misc_feature (347)..(347): n is a, c, g, or t
  misc_feature (395)..(395): n is a, c, g, or t
  misc_feature (401)..(401): n is a, c, g, or t
  misc_feature (403)..(403): n is a, c, g, or t
  misc_feature (428)..(428): n is a, c, g, or t
  misc_feature (519)..(519): n is a, c, g, or t
  Coding DNA Sequence Number=SeqID_74
gtcgcgtgctagtcctacgcacatacgcacacacacacaagtcgtcatccccntcgagttttgagcgaggagcgcaacatctcttgtatctgactccagtgagattcaatngatccccnncaatatactgacgtcgcgtgcagacaacctcctctgattatctttagactactcatatatgcaactattcatcncatagcgtgtgcgccgcgctgcatgttctgcgtctccaccatataggtcacgtcatgngtctccgctgtgtctgatgtgntctntgntattatacccgaccactgcattatacacatctcancccctgtctcctcgcgtcgttttcgcgcacngtatgatttagttggatgtctcgcgctcactgacctcatatagagttnatatangngagctgctggacgccgttttttcangagatcatacgaatgcggctggcaatgttctgcctcgagagcagcgacgccgctgccactatctttactcgctctgtctgattcatctcgnttgctccacacagctactgctcttgtacgacagaagtgattacgtatcgcgggatac

SEQ ID NO: 9854 - DNA, 254 bp, Glycine max
  Coding DNA Sequence Number=SeqID_75
aaaggcttatcgacccgatcgtcctcaacggggggcccataaggcaatttgccctattctgagccggattatggccggcgcctgggcgggggttgggcaaactccctaattggaaacccccttggggggggccgaacttaattttttttgaaggcaaccccccccccctcccaaaaaaaaagggtgagtggaaagaaaagggagcccaaatggaaaaaaacccgggggggggagggtgctttttgagcccagga

SEQ ID NO: 9855 - DNA, 293 bp, Glycine max
  Coding DNA Sequence Number=SeqID_76
atatgggaagaatttcgtcggcggtatgtctattgttactagtagcactaagtacggtctatgaagtgcaagggacgtttttattaaggcacttcctgagaaaaattcccagaagatccagggggcttaggccgttcgcttgcaagggtatgctgaagtttgtgaacctgttggagtttaagagcccattgaagcctgagtacaagaacttatttggaaatttaaggtcttacgtaaacgcaataagttcggggtcgaatgttgacttgaaaggaaaagctgagggcgtccaa

SEQ ID NO: 9856 - DNA, 466 bp, Glycine max
  misc_feature (119)..(119): n is a, c, g, or t
  misc_feature (209)..(209): n is a, c, g, or t
  misc_feature (313)..(314): n is a, c, g, or t
  misc_feature (374)..(374): n is a, c, g, or t
  Coding DNA Sequence Number=SeqID_77
gattcatcactacattcagtctttatttcgtatagtcgaacaagatacgtgcttaatcagcagagaggacatgatgttgtgtctgcgaggcagctgtgcgcgctcatgtgagggtcgtncgctcagtgagcgtcctaccgctacgtgctagttgctcgcgcccgctccagcttgacgcgattgtcgtagctatatagaatatcgagatngatagatcgcgctgacatcacacgtattactgaagtgactctcagagtagtacgtaagtctgtatccgactggttatatctacctgtgatgagcactattctgnntgacacacaccgacaaacataagactgagattaatactatagtcgctctgtcttgcgtantaggttcgtcgctctcccgcatctggtcctagcggcgcgagtgggcttccccgtcttatcacgcactaagtcatctcatcctctacatacgg

SEQ ID NO: 9857 - DNA, 508 bp, Glycine max
  misc_feature (134)..(135): n is a, c, g, or t
  Coding DNA Sequence Number=SeqID_78
gtatttgtctgctgatagtttatcttgactctagtttgtgtgatatattaatagtagataaaacatattggaaagagttagaaagaggatgaatactattgatcgacgcgcatgatgagggctaaaagcactanntcaacaaacgagatgagtctgacgagcgcgcgctgcagcgcgccggcacgtcgcgtcaggcaggccgcgccgccaccgtccggcgtcccagcacataacaatcaaacactcacacaaacatacaaccatccacgtcctaccatataccaccacacagacccactcccctaccgcgcgcgagagccccgacgacccacccccccaccttaatatctccttctactcccctacccacaccaacctggccttctgctcccctccctcccgcagccccaccacaccgcacaccctcttcatattaatagtgtcgtatgtctctttcatcgaacacgcaccccactcaaccgtatttgcatcgcctggccagtcgcct

SEQ ID NO: 9858 - DNA, 383 bp, Glycine max
  misc_feature (226)..(226): n is a, c, g, or t
  misc_feature (254)..(254): n is a, c, g, or t
  Coding DNA Sequence Number=SeqID_79
gtgagtcggcgatagttactgttaattaggtaggggctgggtggctatctaaacgttggggacgtagcacgcattactcgcgtagcttgcggtaataggttgtattggaatgaaagaaggggagttgatcccgcggtttgaggcttaggtatggcataacagagagagaacgctggattttgatcaaaaagtgtagctgcggaatcgtgtggccgagaatgattanacgcatttccaaggtttgcgcgttgggnccaaagcaaggattaaccacaaacttgttggcaaaagggcggatacgggtaacggggccttcttcgggttttgattgccaaagtggagggaaacgggggaatgaatctgcaaagcggattaatgttggg

SEQ ID NO: 9859 - DNA, 507 bp, Glycine max
  misc_feature (329)..(329): n is a, c, g, or t
  misc_feature (340)..(341): n is a, c, g, or t
  misc_feature (344)..(344): n is a, c, g, or t
  misc_feature (348)..(348): n is a, c, g, or t
  misc_feature (359)..(359): n is a, c, g, or t
  misc_feature (368)..(368): n is a, c, g, or t
  misc_feature (378)..(378): n is a, c, g, or t
  misc_feature (389)..(389): n is a, c, g, or t
  misc_feature (398)..(398): n is a, c, g, or t
  misc_feature (405)..(405): n is a, c, g, or t
  misc_feature (417)..(417): n is a, c, g, or t
  misc_feature (428)..(428): n is a, c, g, or t
  misc_feature (435)..(436): n is a, c, g, or t
  misc_feature (439)..(439): n is a, c, g, or t
  misc_feature (444)..(444): n is a, c, g, or t
  misc_feature (462)..(462): n is a, c, g, or t
  misc_feature (469)..(469): n is a, c, g, or t
  misc_feature (474)..(474): n is a, c, g, or t
  misc_feature (481)..(481): n is a, c, g, or t
  Coding DNA Sequence Number=SeqID_80
taccaagggaaccatgagatttcagaagctaaacctcttgtggatgctgcaagaaaatggaaaatataaacagagccaaaaggaaaaataaaaagaatcacaaagacaaaaaattaataaaggaaagaagaaagaaacgaaaaaccttcaagatccagaagctaggaagtccagaaactcatggataaaagccctttgtcgcttagagtcaggatcagtcattactttgtcaacttgaccgtaacatatgcagagaagaatttcatataactctcaaagaaggtcctcgtgctggtgcgaagttggagtgctaccatttcttgcaaatnaataaacaacnngtncaanacccccttaanataaatatngcacaaaatnccataagaaanttgtgagtnccataangaaagtccagtnaagaagaacangaattcnnatnctatnagagtaaagaaaaatcangaaatgntaatntgcgaangagcgctgctcgtctttaaccaagtt

SEQ ID NO: 9860 - DNA, 380 bp, Glycine max
  misc_feature (59)..(59): n is a, c, g, or t
  misc_feature (155)..(155): n is a, c, g, or t
  misc_feature (256)..(256): n is a, c, g, or t
  misc_feature (276)..(276): n is a, c, g, or t
  misc_feature (305)..(305): n is a, c, g, or t
  Coding DNA Sequence Number=SeqID_81
agcgtgtaggagtgtacagttatcatataccaccacgtcgcgttcccagataagtatgnatgatagaggaagagtgttgtctgatattcgacgtaggttaaccatacactattacacgtgagccacaagtgatagtgtatagttggtatgtgctntctgcgaggtacaaggacagtgtatatattatatattattatgtattgatatgatctgtattagtcatctctatgctacgacgtcgtgttgttggagtacntttatgtgtcactatatatnatattgtgtaatagtatgacatatatagnagaagaacaaatcaatgtagctaatgtatactagcacaacccctgctcacgatcacaccaacactattcaacata

SEQ ID NO: 9861 - DNA, 463 bp, Glycine max
  misc_feature (85)..(85): n is a, c, g, or t
  misc_feature (188)..(188): n is a, c, g, or t
  misc_feature (315)..(315): n is a, c, g, or t
  misc_feature (321)..(321): n is a, c, g, or t
  Coding DNA Sequence Number=SeqID_82
gtgatcggaggtgagtttcattgttgatgtggcgtgcgtcgcttgcgggtcggtatcgatttggttgaatgtatattgtttagtnaactcagaccacgatgagatgggactatgaggtatgatgtggtgtggtagtgtaagtaggcgtgagcgaccgcggtgctgacgtgcagcagtactgttatatnttatgtatgtgtgtgatgtagtatagtcttacaatacgatggtcatactaaattatatgctcgctcgttacactaagacacgtactattcattagtatagtgtttcactagtacctgtatcactcangtcgtnacaatcgcgtcccgttccttgctgtttatacatatctatcgcgatatgtgcgcgggtgagtgtatagctatcttacgatattaatagcacgacgtgctctctatagacacggagtaaggacgcatagactaaccatcgcata

SEQ ID NO: 9862 - DNA, 592 bp, Glycine max
  misc_feature (107)..(107): n is a, c, g, or t
  misc_feature (384)..(384): n is a, c, g, or t
  Coding DNA Sequence Number=SeqID_83
gatgagcggttgcagcacagacatatgaggcgcgagactcaacctctcctgcactcgatgacgaacacacactatcgacgtcaccaacacccaatatatacacaganagtctaggtgcagtctacaacctacccttcgtacgacgttcgtcacgttctactgcatgcttctattctgcgtgctaattccattcagtcgtcccgcttatgtaggacacgtcccgctcgcatgcttccagtcgtacatcacatctcgacatgtgtacctgtcacgagtgtcttcgttctctgctctatctctcgctcctcctctctctccaccgccctctgttatccccttctgtggcgcctccggatcgtcatatgatcatgtgtgcgtgtcagnctcgatgtcacacatccgtcctcgtcgcctgcactcgagcgcactggtttctctgtacgttgtcttctccgctgctctatgtacttcttgattgcgtcagccttcgattacagtgactctgtgtctctgtgtgctcgtactctttcgccaatactacgtggctccactctcgtgacctggggctgtgtgtctgtgtctttgccgtcgt

SEQ ID NO: 9863 - DNA, 598 bp, Glycine max
  misc_feature (66)..(66): n is a, c, g, or t
  misc_feature (151)..(151): n is a, c, g, or t
  misc_feature (176)..(176): n is a, c, g, or t
  misc_feature (199)..(200): n is a, c, g, or t
  misc_feature (323)..(323): n is a, c, g, or t
  misc_feature (326)..(326): n is a, c, g, or t
  misc_feature (328)..(328): n is a, c, g, or t
  misc_feature (336)..(336): n is a, c, g, or t
  misc_feature (339)..(339): n is a, c, g, or t
  misc_feature (495)..(495): n is a, c, g, or t
  misc_feature (524)..(524): n is a, c, g, or t
  misc_feature (537)..(537): n is a, c, g, or t
  misc_feature (543)..(543): n is a, c, g, or t
  misc_feature (548)..(548): n is a, c, g, or t
  misc_feature (554)..(554): n is a, c, g, or t
  misc_feature (567)..(567): n is a, c, g, or t
  Coding DNA Sequence Number=SeqID_84
tcgccagtctttgtgatgtgcctattatgcgtgctactctcgtccgtacgatatgtatagacgccnctgactatgtccaagtcattattacagtgtattcgcgagatagggaatgcgtgatatggcactgagtatgaatgatatgacagcngcgaccctctctctatgtcgcttgncggctggaataggtactggatgnngttccgacgacggcgcgagtgtcatcgtcgtaccacacggtgtgtgcggagtcgtatactcgttagttacatgcgcccgccacggatctctagtcgctcgatatttggcgaatacggtgtcgnacntnatgttgtngcnatctgccacgcgggcatgtgcgtgcactgctgtgcgtaattgtattatggtagaatggcagcgcgcacgaacgacgaaacactgtagacagtattccgttgtgattggctaagtatactcgctcgagcgcagagtgcagtagcatgagatatactntgatcgatagactcacgtaattcgatcgncgtgcgcgtaggngtattntctcncagcgntactacattatanatgttgagtcagcggcgatactcggatacgc

SEQ ID NO: 9864 - DNA, 361 bp, Glycine max
  Coding DNA Sequence Number=SeqID_85
caagtggtgttttaattctagaaattgcgaaataagtaacaattacaaaaaccaaattggaaaataaaacaaacaattaaaattttaaaaaattacaactttgttcagagcccacaaacaagattcatgtgaaaatcgaagaacaacactttgtgggcaacgaggcgaggaaaacactgagcactgtagtggttcttcccatacggggttgcggacaaggttgaggcgtggagggaggaccaaatcctagatctaaggaaaaaaaaaaacgaaaaaggatgggagaaagaaaccgacgacggtcagttggtctccacggtggtcgtgttgcttcccatgccggacattaacgacggagaaa

SEQ ID NO: 9865 - DNA, 492 bp, Glycine max
  Coding DNA Sequence Number=SeqID_86
aagatcgtctatgtgggtcgtgcacagaagaagagtgaacgtcaggctgaattgaagaaaaaattcgaaaaaatcaaacaagaacgcctgaatcgttatcaaggcgtcaatttgtacgtaaagaatctggatgattcgattacggatgaagatttaaagaaagaattcattcagtacggtgaaatatcgtccgccaaggtgatgaccgattcgactggtcgtagtaaaggtttcggtttcgtgtgtttcacttgccaatcggatgcaacgaaagcagtcagtgaaatgaataatcgtataataggtgctaaacctttgtatgtggcactcgttcaacgtaaagatgaacgtaaaatgcatctcatctcacagcatatgtcaagaaacacatccgaaatgcgtattccaatgggtaccgaacatccacagcaacttcatggcatgcattcggcagccatgttcgccaacaatgcagttgctttcccaatgaat

SEQ ID NO: 9866 - DNA, 592 bp, Glycine max
  misc_feature (264)..(264): n is a, c, g, or t
  misc_feature (276)..(276): n is a, c, g, or t
  misc_feature (290)..(290): n is a, c, g, or t
  misc_feature (306)..(306): n is a, c, g, or t
  misc_feature (324)..(324): n is a, c, g, or t
  misc_feature (405)..(405): n is a, c, g, or t
  misc_feature (495)..(495): n is a, c, g, or t
  Coding DNA Sequence Number=SeqID_87
atcgtggtgcgagcgtgtctcgttattgtcaatcatcaactctcactatgcttatacttcatgtgtctttcgcgctctcgtcaagtatgcgatacattacgacgaatcacgcagactgctcacatgctatatatactgctctcagcgcacaccacatgtgcatacactactaactcatatctcacacgatgcatgcataaagaagacacactcaacaaatgcgatctatatacacgatcgctcacaacttataccagattagcngcgtcacatcgngtactgacacactnatactcgcgagctacngcgtactcagtatgagtnatcatagtatatgataaggatgtgatgacgtataacataacaacactaatgtatgcagtgatctaacatgatacgtcatanacatatagtaccgatgttgagaatagtaggtgtgcgagacggatagggtagatgtggtatgtgtgactggtagtagtgtctgtgatggtnatgttactgtgctgacgtgcgcgtctacgcgcgctcacgctcatgtcgagcgccacacactgcagctgcgtctggcgtgcgatcgacacagcacact

SEQ ID NO: 9867 - DNA, 542 bp, Glycine max
  misc_feature (43)..(43): n is a, c, g, or t
  misc_feature (49)..(49): n is a, c, g, or t
  misc_feature (365)..(365): n is a, c, g, or t
  misc_feature (454)..(454): n is a, c, g, or t
  Coding DNA Sequence Number=SeqID_88
acatgacgtacgaccagttggcttgatggatgtgtgcgagacncagcgnagtatcatctacacaccgcatgggtcagcggcatcgatagcgtacgtttatattatacgtaagttcgactggtctcgtgcatgacacaccgcctatattgtgacatagcatagcgtgcccgtgttacagtgtatgtgatgtccctcactccacgctcgtgcttcactgcctcttctctgctagatcggatatgtcgcactacgcctaatcttacaacctggctacgattctgtgtctctactatataatctacttatctatcgtgactttgtctctatcttgcgtcgccactctcgtgcagcgctcagacatacgngtattcgtgctgcgcgtcacgttatatttcctccgtggcccgcgcgagtcgctatatacgacatatatctactcttgcgcggcaccacnaagagatatattcactaccgatctctctctactgtatatacaccacgatcacacactcactaatatcgggaacatgctactgcgtcag

SEQ ID NO: 9868 - DNA, 578 bp, Glycine max
  Coding DNA Sequence Number=SeqID_89
gaaaatcggaggtatagtcctgagtagttcgatttctggattcggtggagtctgactttccatgcatacacgtaatcagagaattgtaaccattggatgaagatcaaacgactctgatatcgagtgtgtgttttagcttttatctacaaagataaaaacgatttgtatgatcttttatttaatgatttgatttgttgactgcatgcatgattgcgaggaaaaacagggaaaaacagggaattcgccaatttcaagttcagtgtgtgttggtttttgttaacttgagttytggagctaatgttttttgaggatgaatttgcagattccagattttatcaagagggaggttgagtttcggtttcttgctgtaagcttgtaratgtagattttkagccttgctccttttatattttgattggcttcagatatttttttatgtgttttaattatcctttttagttgtcaatgtaattgtgtatgcattctatcttgtatcgtatgatcgtatcaatcaagttaaasmmaagttgagtatttagttgattggaagtgtgattgagagtcatgtgtgcattgtt

SEQ ID NO: 9869 - DNA, 399 bp, Glycine max
  misc_feature (183)..(183): n is a, c, g, or t
  Coding DNA Sequence Number=SeqID_90
gtggcggcggtggacctctcgcgcgccatcccgctggaggacaggacctggagtcggaggaggcgcttgtggacctgtaccagcggtggaagaccgggcaccgtgtgccccccaccacgccgaaaagcaccgccgcttccggaccttaaagccaaagcccacttcgtccactcccacaacaanggcggggaacgcccctatcgcctccacctcaaccgcttcgcgaaatgaacccagccgagttccgcgccaccttcgttgggaaactccgccgggacccccgggccccgccggcgtccatccccggattcatgaacccgggagggaaagggcccaccttctccccctccgtgaactggagaaaaaaaggcccctgacggccgcaaagaacaaggaaag

SEQ ID NO: 9870 - DNA, 543 bp, Glycine max
  Coding DNA Sequence Number=SeqID_91
agactgttcgatgctcatactcaacatggctgattgtttgtcctttgtttccgctggaggcacggaggccaagccggctagttcgtgttgcaacggccttaagacggtgctcaagactgacgcagagtgtctatgtgaggcgtttaaaagcagtgcttctctaggagttactttgaacatgactaaagcagctacacttcccgctgcatgcaagcttcacgctccttctatggctgcttgtggattgtccgccgctcctactatggctccaggtcttgctccaggaggagctgctggacccgacttaagttttctatctccaaacccatctccagggaaccgcggatcttccttgcttcccttctccttcaccaccgtactcggtgctatgtccttcgtattgttattcttgtctcgtgtctgaagaagccagctagatttggttgtatgaaatggctttgggtttgggttttcgtgactttagttttgcgtgtcttttgagtctacttctgttttagaccatgtcggtttctgttcgtagtt

SEQ ID NO: 9871 - DNA, 558 bp, Glycine max
  Coding DNA Sequence Number=SeqID_92
gtggtactccgcgtgagttactagagtcccgcgccgcaatcaaataggcgtagcgacgcccttatatctacagctaatactctctagcgcggcgtgcgtgcgagccgcgtctgcgtagatcatacactataaggcgtaataaggcgaagtgggtcgcattcagcgcgtggtgagccgcattagacataatacaaaacataaaggcggcgagcgcgcgggcgagagggaatacagcgcacatcgatatcccgtggcggcaatcttataccaatcaacgctgtggcgtggcctgttatgcatctgaaggtaccacagagtagaacgatcactacatgtggcactacagcatttgcgacacgctagcccgcggggaggcgagtagtaataaaaatggagatagctatagagaaggtgataggttatggtgatgggcgttcacttatatcgagcgcccaatatccgcggcgtcaggggaggggcgtctgggtaatgagtgtatattttatattagagggggcgccgccgcgcctctcgccggctgcgatcgttatattcagt

SEQ ID NO: 9872 - DNA, 211 bp, Glycine max
  Coding DNA Sequence Number=SeqID_93
tcagaaaaagtctcgtccctaacagaaggcaagcagcaattaataggatatatttggtagaatgatgatttagaaaaataagtgggtggaaatcttggaaaaagttgaaaacaatgcttgccgtgaagggctctttccaaaaaaatttgaaacccgacatttacccccctggttccgggggcttaccaaggacctcgcctggaaacttatt

SEQ ID NO: 9873 - DNA, 472 bp, Glycine max
  Coding DNA Sequence Number=SeqID_94
gcatatataaggcaggccggtcttactgggagcctctatgacaaatttggggcaagcctcagtggaggcaaaatcgtttctgggaggacatgtcctccgggatatacgcatgacattctccaaaactgtggtgatgctgtcaatgaatgctgcaagttggggggtgcatcctctgggtgcggtgccttagccactctcaagagctccgatgcaagtgaaattgtgaaaggagcggtttcacaatgcaccaacgcatgttctaatttctgcaccaagggctcagctaaagcagttgaaactgcctaacaagcatatccgctatctatgtattaattgtatgtgttgttgttttacatgttttcaataattgtcgtgtatgtgacaaattgctagactcttttgctatttccaagttatctatgtgacgtagaaggtcatctatccctagattgtttatcccttgtacttgcat

SEQ ID NO: 9874 - DNA, 410 bp, Glycine max
  misc_feature (88)..(88): n is a, c, g, or t
  misc_feature (154)..(154): n is a, c, g, or t
  Coding DNA Sequence Number=SeqID_95
accctcatggaattgcaaacaccgatcagaaagaaaaaaatgagttcccttcgtctggctttatgctgtgtcggatcggagtgcttgnaacactaccacacttctcatatgcacagctagatccttcattttcccgtctcgtctttttaaatgngactccaatcttgtggggggggcgctcaaatgtctcccatcctgatcccctcttacttgcaaggaggaggagggtgccttgtcaccactgttaaggacatgggcgttacgcatcaaatcttctaaactacactaactctatcgtgagcgaccaaagtgcagagccaaacaacagctcactatcacgttgatatgtcgtgaaccatatcaagactccatcggaaaatgctctcaccggcataactacgagagctcat

SEQ ID NO: 9875 - DNA, 475 bp, Glycine max
  Coding DNA Sequence Number=SeqID_96
ggaaaaatccagtcactttgagatcatctcagtgtgaagagcctacatacattcgttaatatattcttcctgagcaagctagaatcttgagactttactgcttgaagacgtacacccaagatccattccaggaagccgagggctcgaagacctgggcgaggacgcggacgaggtcggaaggctttgggtcgtggacgtggtcgtggtcgttgatgcggccattgttcgttgtttttgagatgtgcttgtaagatattgtgggagtttttttgagaggttttgaagacgtttttggagagctttttttagttatgtttccattttcttgcaagtgctttatcattccttactgtacaaccattgtcattttgaaactcgtgtatcttgaattacctttctgttattgccttatgttagatgataatgggatctattcattgagcagtaagacaaacaacccaactctaaagtctct

SEQ ID NO: 9876 - DNA, 527 bp, Glycine max
  Coding DNA Sequence Number=SeqID_97
gtacttgtgtacgatttcatgcatcatcattcagttaacttttataaaatgattctgtaaatgtaagaaataaaaaaataaaacaaatctaaaactggattagcgtggaaatggctttgcataataatattgagctggagctcagaccaatcattgacataacatttctcattcagttgctctattcattcaagtcatttcccaacaccacaccgattctattccaaaaaacattcaagtgaaccacctcaacaaacgaaacaaataacaaagaatagacaaataatgtatctatacatattatactgtaatatcaaagcatagtattttcggttttgattgatgtgtgtttccattcgcatgatccgacacagaaaactatgaagaaaaaacaattattgtaccgctttttcatgcatcattttatttccgkaaatktatttgttcagaataaaaaaaaagaggacaatagctattattgtttttatttttttaaattaatcaattttttgtcatatgctttccaa

SEQ ID NO: 9877 - DNA, 534 bp, Glycine max
  misc_feature (42)..(42): n is a, c, g, or t
  misc_feature (66)..(66): n is a, c, g, or t
  misc_feature (77)..(77): n is a, c, g, or t
  misc_feature (142)..(142): n is a, c, g, or t
  misc_feature (202)..(202): n is a, c, g, or t
  misc_feature (207)..(207): n is a, c, g, or t
  misc_feature (495)..(495): n is a, c, g, or t
  misc_feature (508)..(508): n is a, c, g, or t
  Coding DNA Sequence Number=SeqID_98
tatgacgccctctagagtcgactatgaactctacgtgtatgnatgatacctgtatatgtgggtgtngtatacgctgngcatcgagagggatgagcacactccatcacctcacctacagacagtccacacatatgtacttttntgctcgactcgctgccatctatcatccgattgtcgctatactctggtgatgatctatatnactantctctacatgtgacatagactgagctgagagatggatagtgataattgatcgacgctcacaatatgcacaatagacatatatctattacagacgatatcacatacatctaacactctctgtatcactcgtagataactaaactacatacacataatattactgcatcatatgtcgcgcctcgcagcctcgttcacgatctcacatgctgctctgtatcactacgcgacgtactcgcactgcagttccttgacatcgcataaaactctctgcagttatacgaggtgtgnacgacgactgaancgactaaaccagctctcgattagtgt

SEQ ID NO: 9878 - DNA, 567 bp, Glycine max
  misc_feature (519)..(519): n is a, c, g, or t
  misc_feature (537)..(537): n is a, c, g, or t
  Coding DNA Sequence Number=SeqID_99
tcaacatcttcttccgcactcagactctctcactaactctcaattcgatttcttcaatttcgattcgaaagagacgatgagcaccggcgcagcaagcggcacgacgaaaggagggagaggaaagccaaaggccaccaagtccgtctctcgttcctccaaggccggtctccagttccccgtcgggagaatcgcgagattcctcaaggccggtaaatacgcagagcgtgtcggtgccggagctccggtttacctctccgccgttctagagtacctcgccgctgaggtgttggagctcgctggaaacgcggcgagggataacaagaagacgcgtattgtcccgaggcatattcagcttgcggtgaggaacgatgaggagctgagtaagcttctgggagctgtgacgattgctaacggaggagtgttgccgaatattcattcgaatcttttgccttccaaggttgggaagaacaaaggagatattggatctgcttctcaagagttttgagtttcattttatcncttggtttttttggatgnaactttagctaatatatgcttcttgattaa

SEQ ID NO: 9879 - DNA, 283 bp, Glycine max
  misc_feature (78)..(78): n is a, c, g, or t
  Coding DNA Sequence Number=SeqID_100
tcatcagctcataaaccattaattaaatactcatacagtaataaaaccatttaccatatcaaccaatatacatctcantatactccaccctatttataaacttctttatcctcactaccacgacaccataaatatcaataaacttactatacagtccctaattaatacacatagcatgatacataaatcattgttaccaagagaatactccattaaaatggttttatccatctacaagaattaaattttcactaaccaaacattaccagctaatctcatcaag

SEQ ID NO: 9880 - DNA, 550 bp, Glycine max
  misc_feature (80)..(80): n is a, c, g, or t
  misc_feature (210)..(210): n is a, c, g, or t
  misc_feature (232)..(232): n is a, c, g, or t
  misc_feature (246)..(246): n is a, c, g, or t
  misc_feature (267)..(267): n is a, c, g, or t
  misc_feature (269)..(269): n is a, c, g, or t
  misc_feature (292)..(292): n is a, c, g, or t
  misc_feature (312)..(312): n is a, c, g, or t
  misc_feature (314)..(314): n is a, c, g, or t
  misc_feature (352)..(352): n is a, c, g, or t
  misc_feature (359)..(359): n is a, c, g, or t
  misc_feature (393)..(393): n is a, c, g, or t
  misc_feature (399)..(399): n is a, c, g, or t
  misc_feature (401)..(401): n is a, c, g, or t
  misc_feature (463)..(463): n is a, c, g, or t
  misc_feature (487)..(487): n is a, c, g, or t
  Coding DNA Sequence Number=SeqID_101
tacacgcacacaatacataaccaaacacaatcaccgatagcgacgaaacactactccgatacacataataatatcaccgnataggagaatggcagaaggtcggactcctacaacatccaagcaccaatcacaacacctacatcactacactacttacacacaaacaagaaacccacacatcacacgtataccaccatcatacattacacnatccatcgcacacacaccagcncaaaactctctacnctaacaccttcacactatccnanacacaccacataacgccacatcnccaaggcaaaatccacaccncncataagcagtatcactcgacacgacgacgcacacaccnacacacnactaatagcataacacgacacggcctaccatacnaatctncnatactgcacacacaccaccgcacacatgcacacacactacaacgaaaaatacacacataagntacatcgtcgactctcactacacnccaacacgcatacgtcggcacacacgcacacctccaccacttacatccagcacacacaaaaag

SEQ ID NO: 9881 - DNA, 513 bp, Glycine max
  misc_feature (141)..(141): n is a, c, g, or t
  Coding DNA Sequence Number=SeqID_102
tcttctcaaagctggaactccaccgcggggggccgcggcggagggtacccgggccgcgggggcggcggttacgggccctgcggccggtggggctgcttgccggccgtgggtaccacggcgacttgatccgatgctgcaggnccgccaaacacgtccccggaggccatgaaccggactgaggtgcacaactaacttagctggcaacctgggcttatgggtttgggcttaacccaagacgggacccccattgggtatcaaatccgcggggggaaaaaaatctctacgcccttttcgaccacgtcttatttcccacccctagggaccgggctgtcttggtttgtttttttttcgccctctttgttcgggccgcgccccacgcttttttacaccaccaaaacgctcatataaaccctcccttcctcccccccgcgtttcctttttataacacattctccacccattgtgggggttgagacaactcccccattatttttggcactgtatcaggcgccc

SEQ ID NO: 9882 - DNA, 482 bp, Glycine max
  misc_feature (417)..(417): n is a, c, g, or t
  Coding DNA Sequence Number=SeqID_103
tagtacagatatgtcgtcgggcgacggagagaggtagagcgagggcgggaatcactcgagtagagagtgaggctacatatcagcacgtgctactacgcaaaagttcgcgcgagacagcgacctatctgtgtgcattcatacacgtcttcgagttatgtattgtgagtagagcagagaaggcagagtatgcacagcaagagtggcgtccatacgcgttctggtagctggtcggcatggagtggctcgcgtacgttggtatggtggagcgcgcgcatcacgagtctacaggagagaggaggagtgatggtgactatacgacaactgatgcaatctcatacatgtagagtagttcagttctgtgcgtatatcattaatattatactatatatatgcggcggagttggtgtcgcacacgcncagatcatgatctgaggtagtcacatctgtggcgatctgagagatagtacccatccagacgagat

SEQ ID NO: 9883 - DNA, 542 bp, Glycine max
  misc_feature (82)..(82): n is a, c, g, or t
  misc_feature (190)..(190): n is a, c, g, or t
  misc_feature (219)..(219): n is a, c, g, or t
  misc_feature (227)..(227): n is a, c, g, or t
  misc_feature (281)..(281): n is a, c, g, or t
  misc_feature (316)..(316): n is a, c, g, or t
  misc_feature (350)..(350): n is a, c, g, or t
  misc_feature (374)..(374): n is a, c, g, or t
  misc_feature (380)..(380): n is a, c, g, or t
  misc_feature (406)..(406): n is a, c, g, or t
  misc_feature (475)..(480): n is a, c, g, or t
  misc_feature (485)..(485): n is a, c, g, or t
  Coding DNA Sequence Number=SeqID_104
gtgtgtcactgacctatgagctctcctcgatttcgactatttctatcatactgtcggtgtcggatctgtcgtcgtagtcgcnctcgtttacatttctgagccgctgcgtgtgtagaccagtcatcagtcagcgacgtcgttccacgaaaaactcagtagtgtagtgactccgcacagcgacctgctcacnactgtgttattgtctggggcgcgtgaganaacattanacgtctttagatcgtggtctcggtgctgccatgtggtagcgattcgatgacgangatacgtgcgtgtgtatgttattaggctagcgctntgcgttgttcattcctgtgggcatataacactgncgctgcctatcagactcctttctnccttcntgcgctatgcttgtgtgttgcaagtngaaacgcctcgcatgcggcgaccgctccctgcccatcgtgagtaggttgtgtgcgaggtcataggccgnnnnnnccgcntcgtatgtctctcgtggtgtctctatacgcgcagatcgtgccgactagctgtattgt

SEQ ID NO: 9884 - DNA, 595 bp, Glycine max
  misc_feature (56)..(56): n is a, c, g, or t
  misc_feature (142)..(142): n is a, c, g, or t
  Coding DNA Sequence Number=SeqID_105
atcagcccgatgctctaaacatgagcggcgtaacgccaaagacaacacatcacaantacaagccagacacgagaaccatcttgatacataatacgtcataatcgtctgcccgctccacctatctcatcattacctcatatcncatagtgtatcggagtatgagtctatgagtagattgatcatccacttaatcctatcttatctgtcccatatctgcagttctgccgctcagctttcaaataaaataatgataagacactacttacttgtaagtaccctcataccttcgatctcaccaccctcggactatgtttaattattttactaaaagactatcaaaacaacaccttagacgccctatcggtacgttgagagcgccgattgtaactgcgacagcaccactcacaacgcaatatatcaagtataacttgtaaatacgtactactaactctgtcttactatgtatctaacctcattctccatctcttacatcaatacatcctacaaactacatcctacaacgacgtacatagagatatattattcatttagtcgcgtgcggagcctgcgtatcctaccctacggacagtcaata

SEQ ID NO: 9885 - DNA, 595 bp, Glycine max
  misc_feature (28)..(29): n is a, c, g, or t
  misc_feature (62)..(62): n is a, c, g, or t
  misc_feature (107)..(107): n is a, c, g, or t
  misc_feature (200)..(201): n is a, c, g, or t
  misc_feature (211)..(211): n is a, c, g, or t
  misc_feature (232)..(233): n is a, c, g, or t
  misc_feature (254)..(255): n is a, c, g, or t
  misc_feature (277)..(277): n is a, c, g, or t
  misc_feature (323)..(324): n is a, c, g, or t
  misc_feature (334)..(334): n is a, c, g, or t
  misc_feature (342)..(342): n is a, c, g, or t
  misc_feature (411)..(411): n is a, c, g, or t
  misc_feature (414)..(414): n is a, c, g, or t
  misc_feature (426)..(426): n is a, c, g, or t
  misc_feature (477)..(477): n is a, c, g, or t
  misc_feature (532)..(532): n is a, c, g, or t
  Coding DNA Sequence Number=SeqID_106
ttaactctacatcttctctgtttgtttnntgtgttctcggaatatatatagaaataggttantgatatatgtaaataatatataatgtaagtagatataatagttantattatatcgttcttacatttaaactatgctgaatattatataatacattactaaacgttacaacacatatacagtagaaatatataaaacannagaaaaaagnattacgttatcatactactgnnaactcactcgagacttcgcgnncgcttctatctctactcgcatntctctgcgacgcaagcacgatcatctactctctgctttctcttctnnccctccactnccggtttnctcctagtctgcgaaacggtacgctatcgcactatctccaatctcataacaatcgtgctaatatatatncgncgtaatcatcgnatatatacatacgaaaacacctataacagatacacacatcgcatcgactantaataacatcgtataaaagtaaatatcgatcacatatatgaaattagtattcttntcggttttctcatctctattcactctcttctctcttctgtcctccacgcatataattatactc

SEQ ID NO: 9886 - DNA, 515 bp, Glycine max
  misc_feature (170)..(170): n is a, c, g, or t
  misc_feature (288)..(288): n is a, c, g, or t
  misc_feature (338)..(338): n is a, c, g, or t
  misc_feature (347)..(347): n is a, c, g, or t
  misc_feature (404)..(404): n is a, c, g, or t
  Coding DNA Sequence Number=SeqID_107
tagaggagcactctcacatcgcttacttccttgtggtgtgggacgggatgtggtcatactagaggagcgcgcgccgcgacaacaagtatgagaaacacacacactgacacacgcgcgatgtgcttatggctgctggcataatacaacgaaagagtgagaggggatcggtnctccacatacacagcaaatcacaaccaccaccgcgcgcgccgcaccatagcgcgactcacatactatgttgcttgtgagaggtacagtatgtcagaagagagaacagaataacccacngggatgagcgtgggcgcggtggtggagcggggtgaaactatctatatatnatctccgcntcgctacgcggtgtgcgtcaaaccatcgaccgcgcgcgcgcgcagaaagaaaaatantacacaaatagtagatcacgcggcgcggagaccgctctactacatatcaagaccactggcggtggcgcgcggcgagcgtagagatataaatcaaatcttactcatgctggg

SEQ ID NO: 9887 - DNA, 264 bp, Glycine max
  misc_feature (47)..(47): n is a, c, g, or t
  misc_feature (50)..(50): n is a, c, g, or t
  misc_feature (88)..(88): n is a, c, g, or t
  misc_feature (215)..(215): n is a, c, g, or t
  Coding DNA Sequence Number=SeqID_108
agtagtcatcctgcgcggctctcgactgtgtcgacttcatcttcttnctncttatgatcttgatgtatgatgtggtggctagttgtgntagggttgtgagtgcgcagttagtatagctgtctccgtcaggccgcgccgctaataatcgtatactatcggagcacacgttgtgcgggtagcgtgtcgtgtctgatcgcagcgcgaacatgcgacgntatcatagcaggtactatcttgtacgtcgtctgctcgtatacatagact

SEQ ID NO: 9888 - DNA, 553 bp, Glycine max
  misc_feature (54)..(54): n is a, c, g, or t
  misc_feature (61)..(61): n is a, c, g, or t
  misc_feature (76)..(76): n is a, c, g, or t
  misc_feature (96)..(96): n is a, c, g, or t
  misc_feature (131)..(131): n is a, c, g, or t
  misc_feature (244)..(244): n is a, c, g, or t
  misc_feature (267)..(267): n is a, c, g, or t
  misc_feature (321)..(321): n is a, c, g, or t
  misc_feature (331)..(331): n is a, c, g, or t
  misc_feature (344)..(344): n is a, c, g, or t
  misc_feature (360)..(360): n is a, c, g, or t
  misc_feature (367)..(367): n is a, c, g, or t
  misc_feature (369)..(369): n is a, c, g, or t
  misc_feature (421)..(421): n is a, c, g, or t
  misc_feature (423)..(423): n is a, c, g, or t
  misc_feature (428)..(428): n is a, c, g, or t
  misc_feature (469)..(469): n is a, c, g, or t
  misc_feature (477)..(477): n is a, c, g, or t
  misc_feature (482)..(482): n is a, c, g, or t
  misc_feature (486)..(486): n is a, c, g, or t
  misc_feature (495)..(495): n is a, c, g, or t
  misc_feature (505)..(505): n is a, c, g, or t
  Coding DNA Sequence Number=SeqID_109
tcgttgttacatggtgctgctgtgtcatatactgatgggcagcatcacgcgttngtaagantcgctcagcatgccnctactgaacgcgccactctncacacatcctcgctatcttactcgctcgtatgatngtggcgtatctcatatcactgccacatcttactcgtatcgacgtacgcactgcgtaccaccactcgtatgctgacgatgctatctcatatatgacgttgagctatgctctcantgacgacagtgatgatcatgacntcacactgctctaagcacctcggactgacgtcacatcgtgtagtctatctcgcngcctacacancgcgaaatacgcnctaagtgttaatcgcnatgatanantcactcctactgcctgcgcccgcacatatcactatcatacatctcgtcgtcnantactntatactatctttacaagcttcagtacttagtgatgtactantaatactnatctncgantcatcgacnttgattacantccgcatatactagtgactatgtatagtatatctgttagcacgctata

SEQ ID NO: 9889 - DNA, 564 bp, Glycine max
  misc_feature (280)..(281): n is a, c, g, or t
  misc_feature (284)..(285): n is a, c, g, or t
  misc_feature (479)..(479): n is a, c, g, or t
  Coding DNA Sequence Number=SeqID_110
acgataagactgtcaacgcactgttgagtgtaacgtacgtgagcgggctggagagcagacgcggctgtaggatatcggcgagatcccgggttagtggaaagccagtagaacgctaccggggagagttggaggtcctatctaggagcgtggtagcacagacgagttgatatgcggtgtgagtatgtgtgactgagtcgcgtctgtggagagcaagctgattctagaggaacctagatatatcgagccgttctctgctacgaggacggtcggaacacataanncannttattataaatatatatatatcatatattttaattaattgatttacataatatatacaaaatatatgggaagagaggtaataattaagagtatcacgctttatctaaatatataaataaggtgagatttattagtatgtattcgtttcgagagaaatccgcctgaccgtaggtgcatctccgccgtcgataccncgcgcgcagtactcccggggcactccctatatgtcctaagactctgaccggcccacccccgggtggatctcaccagttttttgca

SEQ ID NO: 9890 - DNA, 536 bp, Glycine max
  misc_feature (461)..(461): n is a, c, g, or t
  Coding DNA Sequence Number=SeqID_111
atatacgcgagtgctcttcgtggcagtctcttagcagtagcgcagcgagaacaaccacgccgctagactcactcgtcacggacgcgcggagcaggccgacatattactctacactcgacatgctcttcgcgcgcacgctcaacggcagagccggttagagttcaatgaagtcgtgagcgacatcctcatatgattgtgaatcactcacagatatcacagtacagtcggtctgtaaggagctggtagtagagtatatcatattacttataattatcactcgtgccgtcgctccgcgggcggtgattgttctgtctcgcgaggtgcgtatgagagccgaatcgagtattgattgcgacgtatagaaacactttctatcgttattgtagttactcaacatcttagtccatcattttcatctactgtgtggcataatactttctcctccgctcatctcctcttcngagtacttggtggaggaaaacacagcgcacctgcggaggagagccgcgccagcagttagcgtgtcaccacgacag

SEQ ID NO: 9891 - DNA, 413 bp, Glycine max
  misc_feature (26)..(26): n is a, c, g, or t
  misc_feature (317)..(317): n is a, c, g, or t
  Coding DNA Sequence Number=SeqID_112
atcccctcgtggatatctcgaccagncgcgctcactcgacgaagtggttatctgtttcatattttttcttagtttattggcgcgcggcgtagaggagtgtgaagctgataatctgtaatcaacatcgctagcacaaccatctctccctacattcagtcgagaccgagcgcggactggatttggtgctgaaagagattattgtaagacgtacgcccccccatcatgacaggcgcagggcctctccgcggcgctcccgcccccgtcagagacagaggtatagggtatctcgtgcacttcatcctctactaccccagagngggcacgatcagggaggaggctcacattgtttatcacaacatctcttcctggttggaggtagagggtgttgtcactcgtcgtaaagagcggcggac

SEQ ID NO: 9892 - DNA, 219 bp, Glycine max
  Coding DNA Sequence Number=SeqID_113
gagagatgaaacatgatgccttgcaaactctgggcttcaaaaaggtcgattttgacatgggccattctcaaacaagtatctgccttcccccttttgatggcttttaagctttccagatgataaaataaaaaaaaaggggccggaaactatcatcctttcgggggttatttgcctttttaaggcaagaaaatttttgaccttaatccaaaactccttttg

SEQ ID NO: 9893 - DNA, 463 bp, Glycine max
  misc_feature (167)..(167): n is a, c, g, or t
  misc_feature (246)..(246): n is a, c, g, or t
  misc_feature (321)..(321): n is a, c, g, or t
  misc_feature (382)..(382): n is a, c, g, or t
  misc_feature (413)..(413): n is a, c, g, or t
  Coding DNA Sequence Number=SeqID_114
tgactgtataggtggctcgctctactcacacaacatccatactatatgattccattctgtcgagtaatgagacggtactcacaccgactcgatatgcgcacacactctcgccacgacgcacaccactaacctagtgtgagttggccagcgcacacgacgctcgtcanacaccgtcgcgtctagacgagaggtgacaacccacacacatagacacgactgctgaaggacgtacatcagcagtagcgngcagcgccaagcgtgtgcgttcgcgtatcgcatggatggcacccacgaggacgatgaggctcggaacgcacagancactcgagcgacgccacgtgcaacgatctcaacagaactgtagacgagcgggaattcgagntacgtatatcaagatccttgtcccacgtctncggctacgtgatgtagagcgagcacaagtgagtgctctgacgtatgatat

SEQ ID NO: 9894 - DNA, 599 bp, Glycine max
  Coding DNA Sequence Number=SeqID_115
tttgatggttgacttcccctacaggtgattctgggcgacggtcggagactctccggcgtgtcgctatacgccggagcagctttgaaggggaaaatgtatcaacttgtttacccagtgaaattagggattctcggagactcactctgcatggagaattctttacacccgaacatggtgaagggtaagatagttatatgcgacagaggaagtagcccgagggcagcaaaggggttagtggtgaagatagcagggggagtgggaatgattctggccaacggaatatccaacggcgaaggactcgtgggagacgctcatcttctcccagctggtgctgttggtgccaacgaaggagacgtaatcaagaaatacatttcctcttcaacaacccccacagcccttcttgtttacaaggtccttttttaggaatcaaaccggccccggtttacgttttttttaagggaggggccaacggtgtaaacccccaaacttttaaccgggttttttggttccggggtaaacattctccccgctgaaccaagttgtcggccaaccggtttgactccgataccagagaaccgagtcaacattttgtgtgcact

SEQ ID NO: 9895 - DNA, 525 bp, Glycine max
  Coding DNA Sequence Number=SeqID_116
gttcttgacacaggttcgggctgatctcaaagacccaaagattcacgggtattggcccatgtgagattcaccccctctacgattagtcgaagtgaccgatgctcatgctaacctgttttgagtgttgtggtatatggccagaagccactacacgcacagtcttctccggaacctgcaggaagcgatggctgagggtctgctgggccatatgtaattgcagttcttttgaagcaactttcgtttcactgggccataacagcatcatattgtcaggatgatatggatgtccactgagatctgatggctagttctcatctttatttgctaggtgtaaaacctctcgactatcttaggaaatgcttgtcgcctagatcttgccaaatccagcggtgttgggaacattcttcgccgtctcagcggaacttgcgctagccacattcttgccctggaagtacgacaaggaagctcgtatcagaaccgctgagagttcctgagctaccatatgcgttcacctggcatgcgtgg

SEQ ID NO: 9896 - DNA, 532 bp, Glycine max
  misc_feature (114)..(114): n is a, c, g, or t
  misc_feature (253)..(253): n is a, c, g, or t
  misc_feature (289)..(289): n is a, c, g, or t
  misc_feature (363)..(363): n is a, c, g, or t
  misc_feature (423)..(423): n is a, c, g, or t
  misc_feature (425)..(425): n is a, c, g, or t
  misc_feature (460)..(460): n is a, c, g, or t
  misc_feature (502)..(502): n is a, c, g, or t
  Coding DNA Sequence Number=SeqID_117
ctgttactcactgactgctgtgttatcgctcgcgatgcacaatcgaataatgcacgcagccgctactctacacgtagcaacctacgctgtcaccgctcatccataattacccanctgctggcgtccacactcgcgcagcatggatggaacacacaatatactatgtgtgggtggcgactccctcaccatccacattactactccaccatatcactccagccagtatcgtgctgcccaaaatccatcacccacnccgactcaccagcgcgcgcacccgtataggcggggngcgtgaccaacagctagacccacgcgcgcagtcactatcttccgcacacatgactctgtgcggatctcaataanagcgtctcacgctgccacatcaccgacatcatctctctgtctgtcctcgccactctcgangntactgtgtacgcgcgtctctctctcacactgtccnctcatctctcctcctacagctgccctagtgtccagtgcgatnacgctgtgctcggtgatcacatctgcatga

SEQ ID NO: 9897 - DNA, 281 bp, Glycine max
  Coding DNA Sequence Number=SeqID_118
tcagctcaaatcctctggttatggcgtctccgacttctctaaactcaacccctacagatctcgttcgaagaaagaagagacaatccgcttcctcctccgccgcatcgcctcggagaaacaacgcagcttccgcaaccgccggagacggcgagagccacgcgcgatggagatcggagaagcagcagcgtaactactccgcaaagctggtccaggcgctgcaacaggtccgcctcagctcctccgccgccgaaacaccatctccgacggcgaagaagcgaggg

SEQ ID NO: 9898 - DNA, 588 bp, Glycine max
  Coding DNA Sequence Number=SeqID_119
gaacaacctgttctccagagcgaattgatccatgacaagcctatgatccagaaggaaatctacgagaagcctgtcatcaccaaggaaatcatccatgaaaagccagttcttgagaagcacctcatcgaaaccaccactcaccaaactgagaacatcagagaaaaaactcttgttgaagagaaggttgttgttgaaaaggctctctttgagaccatcaccaccaacttcaagggcactgcttctgtccgcaacgtctcctggctcgacaacgagagattcaaaattgaaggagaaggaaksttcakaagattctccaacaagttccatggagtcttcgacaagttgaagaaggacaacgtctatgttttgagaagcggagttttcgagagatacaacgagcctcttgagaagctcagtctcctccctgttgagaccatctatattagagaataaatgctctcaaagtaaatgtgcactagtagcaatttgtaagtgaggggaaaagtttaaattcaaagaataattttattaccattaatgtttatgtttatcctaattcataatccctagttgaatgtctaattgcct

SEQ ID NO: 9899 - DNA, 532 bp, Glycine max
  misc_feature (164)..(164): n is a, c, g, or t
  misc_feature (311)..(311): n is a, c, g, or t
  misc_feature (352)..(352): n is a, c, g, or t
  misc_feature (388)..(388): n is a, c, g, or t
  misc_feature (391)..(391): n is a, c, g, or t
  misc_feature (484)..(486): n is a, c, g, or t
  Coding DNA Sequence Number=SeqID_120
atcggatgagactcgcagcgattctctcctctcatcatcagtagatacgtcgcagctcaattatacgcttggtgcgaaagatagatgcgtggggagtagtcctgccgcgtatcacgccagcgcctctaattagcgtgcttcgctctcctactcctctcatgtgncctcaacgccgtatttcgttcctctctgtcgcttcgagtagtatgtcttatgataatatagaagatagtaataaagcgtgttctatgggtgtgcgtataggatcactcatacatctgactatacctgttctctcgtctccttcctgnctgccgcaccttcactatctacatgctctcgcttctctcancgtcttctctagagtatagcgcaggtagagaggatncgnaggcacaatctcgtcatgcgctgtcgtctggtagtatctctagtctctgtgtatccttgtgttgtgttgattgtgtgtgtctttcttttttannntttattttaatatatatgatggagcacagcatacgtcagatcgccg

SEQ ID NO: 9900 - DNA, 457 bp, Glycine max
  misc_feature (58)..(58): n is a, c, g, or t
  misc_feature (113)..(113): n is a, c, g, or t
  misc_feature (156)..(156): n is a, c, g, or t
  misc_feature (168)..(168): n is a, c, g, or t
  misc_feature (237)..(237): n is a, c, g, or t
  misc_feature (243)..(243): n is a, c, g, or t
  misc_feature (245)..(245): n is a, c, g, or t
  misc_feature (249)..(249): n is a, c, g, or t
  misc_feature (260)..(260): n is a, c, g, or t
  misc_feature (274)..(274): n is a, c, g, or t
  misc_feature (276)..(276): n is a, c, g, or t
  misc_feature (308)..(308): n is a, c, g, or t
  misc_feature (319)..(319): n is a, c, g, or t
  misc_feature (358)..(360): n is a, c, g, or t
  misc_feature (369)..(369): n is a, c, g, or t
  misc_feature (391)..(391): n is a, c, g, or t
  misc_feature (397)..(397): n is a, c, g, or t
  misc_feature (409)..(409): n is a, c, g, or t
  misc_feature (427)..(427): n is a, c, g, or t
  Coding DNA Sequence Number=SeqID_121
aattcacacacagtgtcgtgtctgtgcacatacgacgcgcacgacatcataggtgtgntgagtcgactaccactatacatctactgcgttattctctgtgtgttgtttgtgtntcgcatgcctaccaatcgcgcgagccgcatctctctcgctctntgcttctctacnccgctcgcacacagagcgatcgacgcgcaatcgtagctgcgctacgcaactcgcacacagcacacatcncccccngngtgngctgcgctgcnccgtgcgcacagtntntctccatctcagccgcgtagagagcgagtgtnctcgcggctcnctataccaccacgaagttacacatgcttcatctattacnnncatactcanaactcgtccttcaggttgtggntgtgtntgtgtgtggggnggggtgccgcgcatctantaccagactataatgaagatataccacaca

SEQ ID NO: 9901 - DNA, 200 bp, Glycine max
  Coding DNA Sequence Number=SeqID_122
aatgcacacccggaagaacctgcttaatggaatcggactttacggatctggtcttaacgatctggccttaatggatctggacttccctatctaacccagtaatgggatgggtgggcctctctcctgtcgccgccaaaagagaaaggacttttcccccatgggatgaaaaaaatgttacctggtggtattcccccaccgat

SEQ ID NO: 9902 - DNA, 449 bp, Glycine max
  Coding DNA Sequence Number=SeqID_123
gggccttgggcaagtgttttatgcccttgggggggccgagcctttgtctgtttttgttgccccctatggccccgggaagatccctgataaggagattttcccccttgtgaaggagaactttgatttcaggcccggtatgatttccctcccccttgatttcaaaaggggtgggaataacaggtttttgaagactgctgcatatggccccttcggcagagagggccctgccttcccatgggaagtggtccagcccccccagtgggggaaggcctaaggcccttctttcccctgcaatgtggtgggggttttttagcgttgcccttataatggggggtttccataactttccccgtcccctggtctgggtttttctctcgtcgtcccccacaaaaattgtttttcccccccttcctttgtaattttttccatggtcaactaaaaaaggtcct

SEQ ID NO: 9903 - DNA, 493 bp, Glycine max
  misc_feature (28)..(28): n is a, c, g, or t
  misc_feature (45)..(45): n is a, c, g, or t
  misc_feature (64)..(64): n is a, c, g, or t
  misc_feature (105)..(105): n is a, c, g, or t
  misc_feature (368)..(368): n is a, c, g, or t
  misc_feature (412)..(412): n is a, c, g, or t
  misc_feature (414)..(414): n is a, c, g, or t
  Coding DNA Sequence Number=SeqID_124
ctaaggcagtgtgagagtggtctatganttcagttatgatcccgncaccaccaattattttttntatacatcccacaatatgagctacatataactattagatgnatattataatggttctaacacttttaaaatgagatatagtattttcttactttccttcaatagaacaagtgaagtagggggcacataggaagaaatggcatcatctaccattaatagagatacagtggttattcgcgcgtgggggagaaagtagtattatctacatcataataaattaattagtgatttttccttgtttctcgtaagttggtaataatctgatagttattatatattttatgtatgttatttttgtcgttggntttaattgttatttagttctttctgagaagtgtgtacatatatntntaatctatagttggtaggagggaggctaaaaataaagatagttaggtgtcgtatttttttatagcttggccacaataaa

SEQ ID NO: 9904 - DNA, 592 bp, Glycine max
  misc_feature (71)..(71): n is a, c, g, or t
  misc_feature (186)..(186): n is a, c, g, or t
  misc_feature (237)..(237): n is a, c, g, or t
  misc_feature (289)..(289): n is a, c, g, or t
  misc_feature (299)..(299): n is a, c, g, or t
  misc_feature (355)..(355): n is a, c, g, or t
  misc_feature (393)..(393): n is a, c, g, or t
  misc_feature (397)..(397): n is a, c, g, or t
  misc_feature (402)..(402): n is a, c, g, or t
  misc_feature (412)..(412): n is a, c, g, or t
  misc_feature (466)..(466): n is a, c, g, or t
  misc_feature (469)..(469): n is a, c, g, or t
  misc_feature (471)..(471): n is a, c, g, or t
  misc_feature (534)..(534): n is a, c, g, or t
  Coding DNA Sequence Number=SeqID_125
gtgtgagtgcgctattctataataactcgcaacgcctagcatctctctgcgcgtcgcacactctcgctcantgcgcacgcccacgatatatactgtgtatctagatactgcgctccaccgttcactgcccacgcgcgcgcgagtatgtagtaatgtgcgcacgcctatctatgcgtgctagtgacntagcacgtctcgctctctgacatcgtctactaagttatatgtatatatganatagtagtggcacaatagctcgcgtacagatcgtcatacgctgtgctgtctncagcagcgtncgacgcaccacacatctctctatgaacgttagagtcgtgcacatcagtgatactgnacttagcgcgctgacttctcgcgacacgcactatatcntttncctcnttactttatngcgcctctgtcggcgcgctgacgcgaagatgacgatcgtatatcataaacgtcnctntnctctcactcgccgcccgcgtcgctgcgttgcctgcgcgatactctcctccacagatagaaaangcatgcgctacatgtctgttctacgaacgtagcgatccgtcgatatcgcgatgcatat

SEQ ID NO: 9905 - DNA, 310 bp, Glycine max
  Coding DNA Sequence Number=SeqID_126
tgcaggaaccctacactactgggcagactcctacacactggtcgtgtttgagatggcacttgatgggattgcaaagcacagaaaaattccagacttgggccaacccaggtttatgggcaaaacattattccctagaactaaagaagggtcttggaggttctggggagcccagtttccccaggaggaacctttctttaaccccatttggtttttgaaagggataaaaacccccttaaagattttaaccctcacggaagggaaaaaatggaaggtgggctttttttggaaaactgtggttcattcttttcca

SEQ ID NO: 9906 - DNA, 477 bp, Glycine max
  misc_feature (71)..(71): n is a, c, g, or t
  misc_feature (392)..(392): n is a, c, g, or t
  misc_feature (394)..(395): n is a, c, g, or t
  misc_feature (418)..(418): n is a, c, g, or t
  misc_feature (429)..(431): n is a, c, g, or t
  Coding DNA Sequence Number=SeqID_127
tatagaggcgagagtgacgtagaaatatgtggtgtatttgtatctgtgtgtatctagtgcgccgatagganagagagtgcgagatggagaagaggaaataaataagtggtataataaagagtatgggtttgattgatgatgtggtagtagtgtatttctctatggcgcgtgcgagtcatgagctgtctgcgtccctcaagtgaggcgtgagtgtgagtggtggtcggagcgagagtgggtgtgtatatagtagaagagtgaaagcgtcatgactataaactatagtttggtagagaggatgatggatgagtagagagagagagtgagcacaaggagttgcggactagggtgcgagaaggatgagccactcactctcttgtccccttctgctntnnttttttttctcctatctagtttnttctatggttnnngtgtggtgtgttcctcttcttgtactcctctctagttcacttatat

SEQ ID NO: 9907 - DNA, 384 bp, Glycine max
  Coding DNA Sequence Number=SeqID_128
tagggagattctcctctctgcatcgtcctctccttccgccgagagtttttgagccaaaccctaattagcttgcgactagtatcacttgcagaaggaggagacaagatgagattggtcaagtgttggttttgctcttctacgatatatcctggacatggtattcagtttgtccgcaacgatgcaaagatttttcggttctgtaggtctaaatgccacaagaacttcaagatgaagaggaaccctcgtaaggtcaagtggactaaagcctacagagctgcacacggaaaggacatgactcaggataaaacttccgagtttgagaagaagagaaacagacccgagaggtatgataggaacgttacggaggatactctcaaggccatt

SEQ ID NO: 9908 - DNA, 530 bp, Glycine max
  misc_feature (54)..(54): n is a, c, g, or t
  Coding DNA Sequence Number=SeqID_129
cgtttaaaacgtacaatcgatcgatacgtgtacatttctcttatttttctgctnacttgaattataaaagggtattgattctcttgtgaaacctcaatttgagctatcgacttgaacaagttagaagacatcaagaaaaattcaaaatgaaaacttcaatttccgtatttttggtggcagcagtattggtgttggtgatcaaccaatgtatggccagtcatggcaaggggcatgatcataaaaattggaaagataacgttaaagtggaaatagaaaagttggatccgaaccacttgagaagtgaattgttggagcatttgaaagaattttccgatccggctaaattctatcccaaggcactagatgaaattgatacaatgctttctatatataaagaacgtgatcctcaagatttgagtacgaaagagttgattacgaaaacagaaaagcttgaaactgagttaaaaaaggcttgcggctcagaagtaaaaatttcaactctgacacgagcttgggctacggtttcaata

SEQ ID NO: 9909 - DNA, 532 bp, Glycine max
  misc_feature (177)..(177): n is a, c, g, or t
  misc_feature (243)..(243): n is a, c, g, or t
  misc_feature (277)..(277): n is a, c, g, or t
  misc_feature (319)..(319): n is a, c, g, or t
  misc_feature (409)..(409): n is a, c, g, or t
  misc_feature (489)..(489): n is a, c, g, or t
  Coding DNA Sequence Number=SeqID_130
gagatgcatggtacgcttctattcagcgttacgtgtgctgatcatatctataagcgtctgccatagactattctcacgactatatacatgtgtcgatacatcacaatactataataccattaaacatgcacaatatacgtctccacctgcctcgatctccgtactgtatattatatntattgagtaatactctatcacttagtaatagtacagcgacttatacctcgatcctcctatcgtganatatcgacactaggctatggcatatcaatccaancgcagcgcacgtgattaatagcgatctgactatgtaagactnatgtctatgatgcacgatgcagacattcccagttatacagatacgtcgtgcacgtgatgactctagcactgactgcatcatcatcagatntgatggctcgtgatagtcactatgcgcatcacttgagacagtgcgcatgtctctaataccacattcatacagcgtgactnacacgcacgactcactatgagtaccgtaaacagctatcacaat

SEQ ID NO: 9910 - DNA, 489 bp, Glycine max
  Coding DNA Sequence Number=SeqID_131
taacgatttggcttcttgctcttatttacttcatctcgggtgtcccaggaggctatgtgttatggtatcgtcctctctaccgtgccttcagaaatgatagcgcattgagctttggatggtttttcttgttctacatgctccacatagctttctgcgtctttgctgcagttgctcctcctgttgtcttcaaaggaaagtcacttgcgggcatattacctgcgctagatatgttgagcagtcaggcactggtcggaatcttctacttcatcgggtttgcgtttttctgccttgaatcagtggtcagcatctgggttattcagcaagtatacatgtacttccgagggagcgggaaagcagatgagatgaaaagggatgctgcaagaggagccatgagagctgcggtttgatacaaatgatttgaactcatgatcgctcctgaagctattggttgtgatgtgtaactttttacattcttcagctctttgacct

SEQ ID NO: 9911 - DNA, 425 bp, Glycine max
  Coding DNA Sequence Number=SeqID_132
gattaacattttgctcatctagcagcaacagcaacagcaacagcagcctcagctgtagcagcagcagcaataacaacaaagaaaatgcatcaagttaaagaacagaatgagtaatggaacatccacgctaacgactgccattgaaagcaaaccaactacgcaaactttaacgtcgattatggctcacactcgattaactggctccttttgaagcgattagtttgttatttttttttttcgtattctgttccccagttctcatcacatcatacatatcgttttcgaccagatcactttttaactctttgactgattcagtcgawgttgtactgttttttttaattttatttaacactctcattcagttaacgctttcattctcattctcgttccgtattctgacacgggaacacatcattgtttca

SEQ ID NO: 9912 - DNA, 403 bp, Glycine max
  misc_feature (225)..(225): n is a, c, g, or t
  misc_feature (237)..(237): n is a, c, g, or t
  misc_feature (293)..(294): n is a, c, g, or t
  misc_feature (316)..(316): n is a, c, g, or t
  misc_feature (319)..(319): n is a, c, g, or t
  misc_feature (354)..(354): n is a, c, g, or t
  Coding DNA Sequence Number=SeqID_133
aaatgtgggcaaagccctaagctttagtatgaaattacacatactgaattataaatgttttactatatagaagggtgtgattcctagtaattaaaataataaacagcaactaacaacaacaaactgagcaattaatcaagcgactttttgcaaatataactaacaattaagaagtaaatcaatatacagaataattctttaaaaagatagggagttagatatggntatttacacatntagcaagcatttcttactatattgaaaagagaaagaagccaattatggcctatttnntttaatacagctttcttagtanatntcaaagttatgattttcttcttgattctcatcaanagttctaagtctcaatcccaacttataatttatagtcttgagtctggca

SEQ ID NO: 9913 - DNA, 439 bp, Glycine max
  Coding DNA Sequence Number=SeqID_134
atcacagcaaaaatctcactgccttaaaacaataaacgtcgcaatggcaaaggctgacaagaaaccagcagagaagaagccggcggaaaccaccaccgcggcggcagcagagaagaagccaaaagccgggaagaagctaccgaaggaccccgccgtggccggagacaagaagaagaagcggaccaagaagagcgtggagacctacaagatctacatcttcaaggtgctgaagcaggttcacccggacatcgggatctcgagcaaagccatggggatcatgaacagcttcatcaacgacatcttcgagaagctcgccggcgagtcttccaagcttgcgaggtacaacaagaagcccacgatcacttcgagggagattcagacggcggtgaggctcgtgttgcctggagagttggcgaagcatgctgtctctgagggtacc

SEQ ID NO: 9914 - DNA, 460 bp, Glycine max
  misc_feature (117)..(117): n is a, c, g, or t
  misc_feature (264)..(264): n is a, c, g, or t
  misc_feature (293)..(293): n is a, c, g, or t
  misc_feature (433)..(433): n is a, c, g, or t
  Coding DNA Sequence Number=SeqID_135
tgtgaacatcgctcgtgttgtgggtgggagcgccacacggggatggtgtgggctctggtgtcccgtgtgagtagacacacccacagtgtggagagggtgatgagagctacgccgccngagagacgccacggagagaacacaccacgcacagaagaacgtagaagcgcacaagaagagcgccaatatcatcatattgtctctgtacgcttccatcgtatgagaattctccttgtgttgtgatgtctcgatgccatctattatganggtgggcactcacacgccggtattgttgncgcgcgttagggtctggagcggagtggcgagaggtcggaggcctcacggtggtgtgggtcgccggctgtggggtccacaggtatgccgctcttcgcgccccttttttatatatcctatgttagataacccgcacaacacnccaccacaatgcatcaagacacagtat

SEQ ID NO: 9915 - DNA, 512 bp, Glycine max
  misc_feature (69)..(69): n is a, c, g, or t
  misc_feature (73)..(73): n is a, c, g, or t
  misc_feature (125)..(125): n is a, c, g, or t
  misc_feature (156)..(156): n is a, c, g, or t
  misc_feature (182)..(182): n is a, c, g, or t
  misc_feature (246)..(246): n is a, c, g, or t
  misc_feature (284)..(284): n is a, c, g, or t
  misc_feature (287)..(287): n is a, c, g, or t
  misc_feature (308)..(308): n is a, c, g, or t
  misc_feature (386)..(386): n is a, c, g, or t
  misc_feature (391)..(391): n is a, c, g, or t
  misc_feature (406)..(406): n is a, c, g, or t
  misc_feature (451)..(451): n is a, c, g, or t
  misc_feature (460)..(460): n is a, c, g, or t
  misc_feature (464)..(464): n is a, c, g, or t
  Coding DNA Sequence Number=SeqID_136
gcattgcatggtgtgctgttgcagtgctcgatgtagtgtgagtgatgtgctgactgtgtgtatggtgcnctgnagcgcacagagaagtagcgacgatcatttgtgttcatgtctcgtgctgtggntctattgatatgctgcgacggctggagctgngatggctgctgctgcagtctcgctgntgactctgtgccgtgtgacgtgtagagatgtgcagtgctactcaagtgacgatgatgagagtcngcagtgtagcttgcacatcatccgtatgtatagtctgnacntgctgctgctgtgagctgtgnatgttgtctgtgagtgactgtgtgagcgccgtgccgcgatcgatgatgtgcacatctgtatgtgtatgcatgaccatntgtgntctgctgctgtgctntactactctaagtgtctggtccatcgcactcgtgctgctgccacntgtgtgccntcgntgttcatgcagagcactgctgtggtgcacggcctgtagttgagatgac

SEQ ID NO: 9916 - DNA, 486 bp, Glycine max
  misc_feature (113)..(131): n is a, c, g, or t
  Coding DNA Sequence Number=SeqID_137
gaaaatcatatcttattccacatattaagagagttttgctttgtgcaagatggcaaaataatatggttatggacaatggacctaagatttaagtttaactcttctatttatgnnnnnnnnnnnnnnnnnnngtgcatctaatctcagttatcaggacgcctccttacagcgtatggttacagtgctccagaatttgagtctggaagttatacgcagcaaagtgatgtcttcagttttggtgtcgtaatgctagaacttctcactggacgaaaatcttatgaaaagtcactgcctcgtggagagcaagttttggtcagatgggcagtccctcaactccatgacattgatgcaagctcacaaatggctacaccctgcttaaagggaaccaatcctattaagtccgggcatcgtttggcagacactgtttcgtcatgcaccggaggtgtccccatggctccattcgtggattctaacaacaaccatgaa

SEQ ID NO: 9917 - DNA, 549 bp, Glycine max
  Coding DNA Sequence Number=SeqID_138
gtgggtttcttacaagtttcctgcacagcctgctccctattggatggcttccttcaaaaaacagggggcctggctttctgatgaaggcttattgttattttccccctccgggcctgggatggccaatttgacccatttcgccatcaattggaacaaattaaccctgggggaaaatttggcctttcgccccccctgggatcccccccacattttctttctgggggggggaaagacttttttccctcttttacccccgggggaggggggttttcccaccccgttgtgtttttttctaaaaagaaaggattttttttggagaaaaaccccttctcaaaaattttgggggccctctcccctcttttttgggaaaagattttccttcaaaaaaaaccccttgtttttttttggggggggggcccccctccctcccctcttaaaaaaatagttttttaaaaaaataaaaacggaggggggtgttttttatatttatattgtgggggggggagacaatcttaaaggggggctcctccctctcccttcaaaaagaag

SEQ ID NO: 9918 - DNA, 519 bp, Glycine max
  misc_feature (56)..(56): n is a, c, g, or t
  Coding DNA Sequence Number=SeqID_139
ggcggcgcgctgttattcttacagagcagtcgagactccgcccagcggtccttcanatcaatcacactagcctccttaatggcgaccagtgatagatgactatgactgagtcgtatcagagagatgcttagaactgcacagagattctcttactcgcgatcatctagatggtagttctaagtatcagtcaatggtgcctcacgtgtcgtgcacactcgtaacatacgtgttacgccgtggcgctgcgtagtgctacgtggtaatatggcaggcattgggcaatgtgtgacatcaatgcctccaaacactggcagcactaactataggatacatctctgggatcatacagcggagcctcatatttgatagggaaggtgactacgtagacactggtaacgttgcgctgacataggcgtctctcccatctacttcctcatcctaggagtgccttagcgagccagggtccgccacacagcgctgtcagcgcgctcaccgtcggactcttcatgcgtgttatac

SEQ ID NO: 9919 - DNA, 588 bp, Glycine max
  misc_feature (44)..(44): n is a, c, g, or t
  Coding DNA Sequence Number=SeqID_140
cgccgcggttcatggtgttttagcagcacatcatggcgatctanagtacagcacacgcacaaggttgcgggctcacaccagaaataagagcatctgtaagataggaaaacagaaaaaacatagtacatatggcgtcggcctctggcctcctcttctcttcttcttctcctcattcagcgcgctcggtcggcatcgccaggagcccagctgctccttttgctctttcttcttgtccttgcttttgcccctctgccgccgccaccagtagcgcaactcttcctcctattgcttcttgttcttttttgcactgttcgaaacaggcgtcgtaggatttcgcgtggcggcagcgcaggtggcagtttggtggttctcccagacgcaggccccaaaggcacgcgacgtggcacggtttgtagtcctcccgtccgctacactgcgctttgcaggaggagcttgggctgttcctggtggcggccgccccgacgaggagcagtgctaggccgaggagtacacacgatacaacaaggctgctgctgctacgcttcatcttggaacccatacccatggctagccaagctatctcgtagg

SEQ ID NO: 9920 - DNA, 377 bp, Glycine max
  Coding DNA Sequence Number=SeqID_141
gacgaagctcggatttcggcgtcgagtcgactgaatcccctataaagaccccagtttctttctttctttttttcttttcaagggctaaccaagcactcacagtagttttgcttctctcggagatgggtctactagtgctgaaccctaacgccgaagtgctgaacaaatcggcggcacttcacatgaacatcattgccgcctagggtttgcaagatgtcctcaaaaccaacctttgttccaatggaaccatcaaaatgctcgttggtggggctggggatatcaagcttaccaaagatggctacactcttttgaaagagatgcaaatgcaaaaccctacggcgattatgatttgctagatctggtgtggcgcatgatgt

SEQ ID NO: 9921 - DNA, 548 bp, Glycine max
  Coding DNA Sequence Number=SeqID_142
tctgctagaggcttttactggttttgcatatagctaatgaacaataattgagtcagtagtgaccttgcttacttggttaaaccattctcattttgtctggttgtttattggtttgagggaaaatactagtttttccagggaaggaaaaaacacaaagtataataataacatggattccactctatttttatttcataattcacaactaatacttgatgctcaacaacttagtagtcatattgaattatttaattacatattccacaataaagtacagttatctttttctcaaataatttaacttgagtttataatcccacaaattgaactctgctgatatatgaacactcattctgtcacaattcaagaacaacctacttgggttaagaagggttggcatttgtgcttccttgtttcactgttgtattttgttgttagaagtcagaaggactgagaggtattttctcaaacctagctggagagacatttcttttaaagcgcttgcagttgcatagataggggtgtgaaaagccccacattgggaagtt

SEQ ID NO: 9922 - DNA, 264 bp, Glycine max
  Coding DNA Sequence Number=SeqID_143
aaacagggagcctgtgcctctactccttgaagctatggagtctcttatcgattaagtgaccccacaccttgaagatcggcattccgtcaaaatcattcggtcatgagcatacgcaggtgccgctgttccatggaaggtagtcgggacttggattgtgttgctcttgtatgaccactagatccccgtatgtacaccggtaggtgttttggggttgaagtttcctctagggatactcaacctgggactttttgtgccccaggaaca

SEQ ID NO: 9923 - DNA, 346 bp, Glycine max
  misc_feature (321)..(321): n is a, c, g, or t
  Coding DNA Sequence Number=SeqID_144
agcacaagtaagtccatcttagctatgagagaatgctgtatggtgatgtttcttccaagcgagtgtgtatgggtagagtggagacggtgcaagatgggtatggggtcattactcatgtgactaaggaaacagagggaaaagacgaggcttctacggagcagaggagggagtcagttggagatgatggcacatcggcggcctccggagaggaggtccgccgagccaaatgaaaatcctaggctggaactgccgtggcatgctctcctccacggcagttcgcgagctcttggatttacaagggcgcatcaaggcagatttganttttctttctgggtctcatttgaat

SEQ ID NO: 9924 - DNA, 531 bp, Glycine max
  misc_feature (87)..(87): n is a, c, g, or t
  misc_feature (127)..(127): n is a, c, g, or t
  misc_feature (154)..(154): n is a, c, g, or t
  misc_feature (166)..(166): n is a, c, g, or t
  misc_feature (201)..(201): n is a, c, g, or t
  misc_feature (246)..(246): n is a, c, g, or t
  misc_feature (460)..(460): n is a, c, g, or t
  misc_feature (476)..(477): n is a, c, g, or t
  Coding DNA Sequence Number=SeqID_145
tagcgctagactacatatccatatgacgagtgcgcacgctggatacatataatcggtacgagtatggaactagttcactagacacancgtgctcgtggcgtcgcatatcacaatcactatcgagagnatactagatatattgtataacagagangatgcatactcntatctcacttcgtcgccacgtctcatcgcctatcnagtacgacagataataacctcgagacacgcacgccaagatctatntactcagtactatatagacaactagatgtcatagtacacatagtcagacatgtatacgacaggctgaagtagatatggtctaagatagtatactcagaacgccagtctctagctcagtagtctgcacctcagtatctgttgcagcgtgtgcgcgaggcgtgctgccatgacatctctatatgtcaacatacggtagtaggagtaaggacaacgnaacactcacgattacnnagaagaagagaccgtaaagtcgctatctcgttatctctgctacgtgtcgcacta

SEQ ID NO: 9925 - DNA, 390 bp, Glycine max
  misc_feature (306)..(306): n is a, c, g, or t
  misc_feature (357)..(357): n is a, c, g, or t
  Coding DNA Sequence Number=SeqID_146
gattctccgatcttctctgacaaaacaaaatcgtctcttcgccaaagtcttcactgtttcgcttcgatcttgagagatctttgtctccccggtcatcaatcaagctcacgggtgactctgaaaaccctgttagagcaaattgatattccagatttttagggtttttttttggggaatctctttcagggctttgctctaacatgtcaggaagaaaggaaacggtgttggatttggctaagtttgtggataagggcgtgcaagttaagcttactggtggtcgacaagtcactggaactcttaaaggcnacgatcagttgctgaaccttgttctagatgcggcggtggagtctgttcganatcatgatgatcccgttgaagactactgaccag

SEQ ID NO: 9926 - DNA, 529 bp, Glycine max
  Coding DNA Sequence Number=SeqID_147
taatctacttatatgcgacccacgcaagtagagcaaggacaaccctgtacaacacaattatactaagtacattcacaaagcttttgattttgaatctgatgaagctcaaaaagacactagctcacttcatgctgatcttaaagactgagaacataagcgcgtttatgctaacaaaattgcacgttacacacttgccacgctctgccctagatgtctctgggagcaagatgctgaaggtgttccaaataagctatccttcgacgaaatccaaagcaagaactacttgtaagtgaatgagacatgacacagtataccagtgtccaacaatagatggaggattgaactcattagacttaaagccaaaaaaatacactgactagaaggttttccttgatccaacttcatttacatgcaaagccaagagaggggccaaaaatgctaccattgagttccaaaacacagagctcatgacacgtttgacctacactctggatgatattgacgtaccctatgaggagtcttctgatgg

SEQ ID NO: 9927 - DNA, 593 bp, Glycine max
  Coding DNA Sequence Number=SeqID_148
ccgtccgcggatactggttatatttttgagggggcgtaataatattatttgtattcgcgcgcgcgcggtttactaacgcaagataataacccacccgcgggaatacgtatacactgttttcttgtgtgtgggcttgtggggcgcgcggggcggacccacgccccgcgcgtttttataagcgcgccgcgtaagtcagtataaacatataatacggggcgtacgcaattttaaataattgagggggggtgtatatgtataattgttacatctccgagcgggattattatagcgcgatacgacgcgcgtagaatataataaaataatatcacggccgagataaaaattgtgctgtggcggcatattgtgtgtaataaaatagtgagggagtttataacagtcccatgttttacgttgatttgcagaacatcagcacccccttattattaaatacataattagtgtggtcgcatgactatattagctgtataatatattgggttatataatcggcgggtacgtcgagtaaaaaacaccaaacgcacaaacggcgcggcggggttgcggcggggcctgaatctggagcgcgcgaaaga

SEQ ID NO: 9928 - DNA, 298 bp, Glycine max
  Coding DNA Sequence Number=SeqID_149
ccggttcgtttgttcgtcttgtcatcgcacgttcgtcctctctgtttcgttcagtttcccctgttcaacttgttatccacatttaaaaatggtagccaaagacaccgtcgccaagaagggaaaggatgcatcctcaaagaaagccaagaaggtcgaggaagttgaagaggtcgaggaaaccgtgaccccctccaagaacgagaagaaacagaagaaagaggagaacggatctgccaagaaggagaagaaggacaagaagtccaagaaggcagagtctgactctgaggaggagaagcct

SEQ ID NO: 9929 - DNA, 518 bp, Glycine max
  misc_feature (338)..(338): n is a, c, g, or t
  misc_feature (478)..(478): n is a, c, g, or t
  misc_feature (480)..(480): n is a, c, g, or t
  misc_feature (484)..(484): n is a, c, g, or t
  misc_feature (487)..(489): n is a, c, g, or t
  Coding DNA Sequence Number=SeqID_150
aagacgcaaaacatcgcacgcggaacggggccggcgtcgcccccgcgcctgccggcgtgcgcgggccccacgctctcccccacatcgccgtaccaccacccgtcgccgctccaccaacaaccaaccagcaaagagtaaagggcagcatcagaagagaaatagacgcacttacagtagccgcctgggatgagagcgcgcgctggccatacatcggacaggtgggcagagagctgcggagagactgtgtggcccagacgacaactacaccgtcagcagacggagcacgcggcggctgcgcgcgtccggacgaaggtgaagagagatgtgagagaacgacntcgtgttgatggtgtggtcttagtgtttgtacgtcactcggatccactgctccgacgtgtgcgcagcgtggcgcgtgtatctggtgtggccgatctcgcgcgtgacgctattaggcgagatgaggtggggggtgggcagngnatanttnnnttacatattatacatctaacccattcccg

SEQ ID NO: 9930 - DNA, 567 bp, Glycine max
  Coding DNA Sequence Number=SeqID_151
aggacagcgtttgccagtgcttatagaccggtttcatcatacagattgcatcattccacaaggcatagcagccggcgatgattccatgtgaggcgataagaatgccggatataagtcaatagacaagccagtcaaggcatggatcatcttcatggtcacacgcatgcaggctgccgcaacggatgacagttattcatgcgcagcttgatttccaactgggtggacggcaaccttatggttttcgctgagatcgtcgagggcatggaagttgtcaagagcttagagaaggcgggctcccgcagcgagctttttctgcaagcaagtcgtcattgccgactgcggtcagctctagatccgttccagtgccggtccactgtcgtcgtcagtaccgtgttatcgtgtacgctacgatctaaataagagagtcgtgcgtcgtgtccagtattagccttgtccgttcgatgagatctccgtggttggtttaggagggttttaggtggtactcatgttgccctttgatctgaagtcagacgtacatgtttatgagaatctctccgagctaacctc

SEQ ID NO: 9931 - DNA, 522 bp, Glycine max
  Coding DNA Sequence Number=SeqID_152
agagccgcttcatgcgttgccacaatctcttgtctcaagacggcattgctgtgttacatgtaaacgcgacatggtgtaacgaataataatctatttacacagaagtccatctcaatgatacccgcaccccctctccttactccccgctctactatccaccacacctctcccacctatatcaagccactgaggcgggcttcttcgggtgtcgccgcgttagcacaaccactgtcccagctgccgcgtgtggcccacagtccggccctggggagctaagtaggcacgcaatcccaggcccagatcctctctacaagccccccttagcacacatcgcactcatgctgcttcccgtatgtatatacgtaaaacacggaggcaaatacgccggacctggcgccaaaagtgcagtacacgggtcatcgctgcgtgttcggtcgtcagccacctaggtagaatagttgctactcgtcgcttgctgccgaacaaactacctccgaactcggcggtgactctactttttat

SEQ ID NO: 9932 - DNA, 531 bp, Glycine max
  Coding DNA Sequence Number=SeqID_153
aggtcatgtcagtcagtacgtgtaatatgacgagcagtgaattgtaatctgtactcgctatagggcgaattgggtaccgggccccccttcgagtcatatacgtaggcgccctccccgcagtagttccacatgtcacagtcaagtcataactatctgtttgtcaggctggcattaatcatgattattgttcagatctcgtggctagtcaggataaatttactgtgaatcatctgcaaataaatcgcagtgcatccctgttaaaataccgtgatgagatcattttcatcagcaggaggatctctcctcttttcctttttggtcctcagttctctagtcaataacaaattctatctagtacaggattggtaatctgaaaagtagtatggcatcaaatcgtgaaatgttcagtaatgtggttcctctagatagtggagctggcgtgctcaggatgagatgtagtttgatgttcaatgttttttcaaggcagggtttagactttcacagggtaccagtctggtaagaacatcctac

SEQ ID NO: 9933 - DNA, 395 bp, Glycine max
  Coding DNA Sequence Number=SeqID_154
agccacctaggcaagacttatatacacgtgcgagctaggaaggggccaagccacccgatagcccacagtctcgctgagagagctaggagagaaaagatccgggagaaggatgaaaaattccttcaagatatagttccccggctgcaacaaaaggtaattggtaaaagccacttgggctgggatgagataaattaattatatcccgccccggcagcatccaggttgagttcctttccaaggaagcctgagggcagttaattccaagattgggctgggccccaactattgaaaggtttcccttcaaaaaaagggggcacctagccctttgaccttgccgaaataaatttttgatcaacacccggcccgggtaattgttccagggtcaaagcgggaga

SEQ ID NO: 9934 - DNA, 52 bp, Glycine max
  Coding DNA Sequence Number=SeqID_155
gattcttgtcgttcgtagtttcccagtgtccacagcgttgccgcgaagacaa

SEQ ID NO: 9935 - DNA, 550 bp, Glycine max
  misc_feature (57)..(57): n is a, c, g, or t
  misc_feature (204)..(204): n is a, c, g, or t
  misc_feature (525)..(525): n is a, c, g, or t
  Coding DNA Sequence Number=SeqID_156
taccttgctattatgtagtcgcgtgtgtgattctatcttccctcctgtctagtaatngatggaattagtgacgtggagctacctacagaggagggacgcgtcacggatccacctccgcccgcacttcttattactaatcgcgctttagtagagcctcgcgtcacaccagatctggtgtaattcggcgatgtgtgtggttgattngatgtgtatatatacaatggttgtgtagttggagagagtaacgtgaagaacaccacacaccacacagattatattatcaatagtcggacgcggccacagcgctagtactctgatatgactgtcgctgcgcggcgcgagtcgatggtttggctcgtttagtctcacacacacactcctcgcatagtatgtgaacactggtgcgtgggacactctctgctatataactctagcgagtgtatataatccatcatgcaaatacgatcactgctcgacggcgtccacacaaatactcacgcagtgacgacacaacacacacacacnactagcggcgctcattatcatgtat

SEQ ID NO: 9936 - DNA, 374 bp, Glycine max
  misc_feature (47)..(47): n is a, c, g, or t
  Coding DNA Sequence Number=SeqID_157
gcaagagagctttcgtttcaatcaaaaactatggcaacgagaaggantttaaaagaactgagggagttgcaaagagaccctcctatgtcatgcagtgcaggtccagtaggagaagacatgtttcactggcaagctacaataatgggtcctaacgaaagtccatacacgggaggtgttttccttgtcactatcaatttctcgcaagattatcctttcaaacctcccaaggttgtattcaaaaccaaagtgtttcaccctaacatcaacagcaacgggaacatctgtttggacattctcaaagaccagtggagcccttgctgtggtgtgggtgaattccgatactagttgaggaggagcttctaagattagcaaaa

SEQ ID NO: 9937 - DNA, 333 bp, Glycine max
  Coding DNA Sequence Number=SeqID_158
ggtgtttgatcaaccatctttttaatattcaatttcaacaacaataaacaatgtctagtgctagaatcgtaggtttgggctccttgttggccaaaagaaatgcctcttatgctttcgtgagtgctggtcgcttgcgctccggtggcaagcctgatacctccacctttgatgagaaggagaaggctcaagagaacatgtttgtgagaaagcatgaggaggaggaaatgaagaagagaaccgaggaggctgaaagaaaagccagagaggaggccaaaaagaaccaaaagaaataaataatgtacaaaataaatcgcttataaaatgtacaaacac

SEQ ID NO: 9938 - DNA, 534 bp, Glycine max
  misc_feature (26)..(26): n is a, c, g, or t
  misc_feature (50)..(50): n is a, c, g, or t
  misc_feature (113)..(113): n is a, c, g, or t
  misc_feature (229)..(229): n is a, c, g, or t
  misc_feature (304)..(304): n is a, c, g, or t
  misc_feature (315)..(315): n is a, c, g, or t
  misc_feature (325)..(325): n is a, c, g, or t
  misc_feature (391)..(391): n is a, c, g, or t
  misc_feature (451)..(451): n is a, c, g, or t
  misc_feature (484)..(484): n is a, c, g, or t
  Coding DNA Sequence Number=SeqID_159
atcaacgacgcttcgtatgcagcagntcagctgcagtctgtctcttgtgntgtatgtgatctgatctgtctgcgcgcgtgttaggcgacgtcggagctgtcgcatcgctgtgngtccaatcttgtgcgctgggacaagatgtctatatgtatctgtctgatctgacgatgacgactgcgcatcgccgacgaggtcgaacacgtcgtatcacgcacgtgatccgagcgtncagaagcgacgtccactatcgtgccatcacctgctccgtcgcatgtcaccacgcatactgatagcacgagtgccngggcaccgccncgctgtgagnctacgcacgtgcatgtaccgacagcgctgcgctcggctcgctactatatgcatcattgagtatgcngtgactgtacgtcattacacggacaacgtaggcggtactgaccgtgtcgctcgctgaganatcgacgatcgatgtatgtgacagcgtctgtanagatgcagctagacgtgtcagcggtaagcaatcgatcgtgctacagtcga

SEQ ID NO: 9939 - DNA, 566 bp, Glycine max
  misc_feature (37)..(37): n is a, c, g, or t
  misc_feature (64)..(64): n is a, c, g, or t
  misc_feature (98)..(98): n is a, c, g, or t
  misc_feature (166)..(166): n is a, c, g, or t
  misc_feature (173)..(173): n is a, c, g, or t
  misc_feature (176)..(176): n is a, c, g, or t
  misc_feature (187)..(187): n is a, c, g, or t
  misc_feature (191)..(191): n is a, c, g, or t
  misc_feature (241)..(241): n is a, c, g, or t
  misc_feature (282)..(282): n is a, c, g, or t
  misc_feature (287)..(287): n is a, c, g, or t
  misc_feature (307)..(307): n is a, c, g, or t
  misc_feature (381)..(381): n is a, c, g, or t
  misc_feature (433)..(433): n is a, c, g, or t
  misc_feature (438)..(438): n is a, c, g, or t
  misc_feature (446)..(446): n is a, c, g, or t
  misc_feature (488)..(488): n is a, c, g, or t
  misc_feature (494)..(494): n is a, c, g, or t
  misc_feature (541)..(541): n is a, c, g, or t
  Coding DNA Sequence Number=SeqID_160
actcgtgtcgacctattcttctagcgcacacatacgnactttcgagtttgaactcttgatctanagctcgcctctcatacatttactgtatgacaccnactagcgccgcacaatatagtggtatagtgatgttattacgatatctgcacgcctgtgtgaatgtganccgctancancaaatatgtgngttngacagcgtgtcactgtgaatattcgttcaactggagcatatcacctgggnctcttctatcatctaaatgatgcacatgtatcatacactcngtttntgaaatactctctcccactncatgcgcaactagaactgagtgtgccgatcataaatatatattatgccgcgttcatcaatcgctgcgcagtctnatttagtgatactcttgcgatacgaacaacatagacagacaaatatgtcttnattanctacatgntctcatatgtgtcgtcatcccactatgatgatcgcaactacnacgtgntactgctcgtctactagaagatcatatcgagctacttaaacatcgtngtaaacatcctgtatactatcgtgt

SEQ ID NO: 9940 - DNA, 419 bp, Glycine max
  Coding DNA Sequence Number=SeqID_161
ttcagggtttgtgacgtgagacgtttgagatcattgccccctctcttttctagaatgttctcttcggagcctgttcttacacaagagaccatcaaccagcatgtggtgaaggccgaatatgctgttcgtggagagctcgtattacttgctaacaagcaccagaaaaccatgcagcaaaatcctaatcactctctccctttcaaagagatcatttattgcaatattggaaatccacaaatcctaggacagaaacctctcacttttttccgccaggtcaccgcgtgctgtgaatatcctgctcttttggatcttcctaatgtgatgccagaagatgtgaaagagagagctaagaaattactcgcctctatgggaaatagcactggagcttatagcagcagccagggagttcctattgttct

SEQ ID NO: 9941 - DNA, 532 bp, Glycine max
  misc_feature (55)..(55): n is a, c, g, or t
  misc_feature (85)..(85): n is a, c, g, or t
  misc_feature (104)..(104): n is a, c, g, or t
  misc_feature (106)..(106): n is a, c, g, or t
  misc_feature (163)..(163): n is a, c, g, or t
  misc_feature (184)..(184): n is a, c, g, or t
  misc_feature (230)..(230): n is a, c, g, or t
  misc_feature (257)..(257): n is a, c, g, or t
  misc_feature (319)..(319): n is a, c, g, or t
  misc_feature (322)..(322): n is a, c, g, or t
  misc_feature (324)..(325): n is a, c, g, or t
  misc_feature (338)..(338): n is a, c, g, or t
  misc_feature (442)..(442): n is a, c, g, or t
  misc_feature (446)..(446): n is a, c, g, or t
  misc_feature (471)..(471): n is a, c, g, or t
  misc_feature (503)..(503): n is a, c, g, or t
  Coding DNA Sequence Number=SeqID_162
tattagcgactcgacgatcgtgcgcggcgttgacgtacagcggcgtatgtcgaantactagtgcatgcgcgactagccgctgcgncgtcgcgcgcgacgaacanancgaaatcaccaagctatcacgacagtgcgtatgtgaattacaacagacgaaagcgcntagcgtctgcctgtgctcacncggttagctcaggctcgctaatcacaaaaatataggcgtgagtcgngtctgcgtgcgcgacgactagctaatncgtatgattaactagcactacagacgtattactcgtatcgctggcgtgcgcgtgtatatagncgncnncgatatattaaangatgagcgatgcgtgcatatatatacgcatactgcgtcgcggcgccgtgtgtctaaactatatgatatcagttgcatatctgccgcgcgacgcgcgcccgacgncgcngctcgtagtatatcgcaatgttacntgtagctaccgactatactactctgatcgtcnctcagagcggatcattaaacacacaccta

SEQ ID NO: 9942 - DNA, 308 bp, Glycine max
  Coding DNA Sequence Number=SeqID_163
atgtgtcctccttacggttctagaatcagctctggaaccagatccgttgaggttcatagcatagtctgggtcaggtgttagcctttccagcactgtctttggtttggagctctcgacactctatcgtattgctccagtcatgttggccggaattctacggcttttggcttgcttcagtatcctgtcagtgtctcttagcactctccttgattgcacgagtgagagtaggtatgggcttgcttcagttgttaagtatcaggttaagtatgcagctggtgtgttctatgatgcgcttgccttcatgtgac

SEQ ID NO: 9943 - DNA, 308 bp, Glycine max
  misc_feature (142)..(142): n is a, c, g, or t
  misc_feature (187)..(187): n is a, c, g, or t
  Coding DNA Sequence Number=SeqID_164
tctgccaatgcgaaaggaacgctaattaaaaatatagaaataaacacacacaaaacaataacccataaacccagcgacgaggttttctatgttattttagaagaaaatagaaccaagagagatctcacaagaagaaacaggnaaaatcacacacacaaatatagcaagaacagtctttgagagattnggacaaaggtcaagtggccattttcattttttttctctcattgggcagttttctggtcaggatttgagttggccttggaaaaacaaatatgttgcataatttggactgtttgtccgccccg

SEQ ID NO: 9944 - DNA, 527 bp, Glycine max
  misc_feature (33)..(33): n is a, c, g, or t
  misc_feature (39)..(40): n is a, c, g, or t
  misc_feature (50)..(51): n is a, c, g, or t
  misc_feature (59)..(59): n is a, c, g, or t
  misc_feature (83)..(83): n is a, c, g, or t
  misc_feature (100)..(101): n is a, c, g, or t
  misc_feature (144)..(144): n is a, c, g, or t
  misc_feature (154)..(155): n is a, c, g, or t
  misc_feature (210)..(210): n is a, c, g, or t
  misc_feature (228)..(228): n is a, c, g, or t
  misc_feature (250)..(250): n is a, c, g, or t
  misc_feature (283)..(283): n is a, c, g, or t
  misc_feature (336)..(336): n is a, c, g, or t
  misc_feature (342)..(342): n is a, c, g, or t
  misc_feature (359)..(359): n is a, c, g, or t
  misc_feature (379)..(379): n is a, c, g, or t
  misc_feature (383)..(383): n is a, c, g, or t
  misc_feature (385)..(385): n is a, c, g, or t
  misc_feature (388)..(393): n is a, c, g, or t
  misc_feature (413)..(413): n is a, c, g, or t
  misc_feature (428)..(428): n is a, c, g, or t
  Coding DNA Sequence Number=SeqID_165
gctgtccgcgtctcgcgctcgccggcgcgccgncgccgnncgggcgccgnnctgcgcgntccgcgccgtcagccgcgccgcgncgccgcggcctcctcgnncgccactcgtcgtgtgctctcgccctctcgtccgcgctcgctnctcacagctnncgcagcgctagtcgccgcgcgctctacggccctcgctgcacgcgcgcgccactcnccgtcgcgctctcgtcgncggcagtcgcgaccgcactcgntgtcttcgtctccgcgctcggcgcgctcgtcancgcgcgcgcgccgctcgcgcgccgcccgactggcctccccctgcggccctttncgttcnctcgcgcccgccccgtncccacgcaccacaccccacncacncnccnnnnnncccccgccccgcccggcgcncatctcgactctccntcgcgcgcccgcacacgctcccccactcctctgcacctcccctccatcgcgccgcgcgctacgactacttggactcctgcgcgcgctaaagtcccgcgc

SEQ ID NO: 9945 - DNA, 483 bp, Glycine max
  misc_feature (141)..(141): n is a, c, g, or t
  Coding DNA Sequence Number=SeqID_166
agatttttgttaagactcgtgacgtgaaagtcatgtagtttagatgggatatgttgggagctttggcatgtgtttttcttgaaattttgtattgtaacggagttaagttcggcgagactgtgtggtttaaggtatggtatnagatatttagtgagggtgggcttgactacttgggtaatataagtatgatttatgtataaagtattcttgttatctgggttatctaagttatattgatgggtgtcgttgagggttattgtattgatggtgggtttattggtgaggtgaatgatttaatttatgtaggtggtagatttgatttattgggctttgctgatgatttagaggcttttgctgagttgaaggtgaaagagcttaagaatggtaggttggttatgttgtccatgtttggtttctttgtttaggtaattgtgataggaaagggacccttggaaaactttgctgatcactttgctgacccag

SEQ ID NO: 9946 - DNA, 417 bp, Glycine max
  Coding DNA Sequence Number=SeqID_167
ggagaagcctcgtaaacggcctgtccaacaaaactccgtgctcttatttatttgtagtgtgctgttatattagtatttaaatcacaatgcgtgagtgtatttctatccacgttggccaagctggagtccagatcggtaatgcctgctgggaactgtattgcctggaacatggcattcagcctgatggtcaaatgccgtccgacaagacaattggtggaggcgatgacagtttcaacaccttcttcagcgagaccggtgctggcaaacatgttcctagggcagtctttgttgatttggagcccactgtagttgacgaagtaagaactggcacatatagacagctgttccaccctgaacaactcatcactggcaaggaagatgctgctaacaactacgctcgaggtcattacacaattg

SEQ ID NO: 9947 - DNA, 582 bp, Glycine max
  misc_feature (307)..(307): n is a, c, g, or t
  misc_feature (369)..(369): n is a, c, g, or t
  misc_feature (514)..(514): n is a, c, g, or t
  misc_feature (516)..(516): n is a, c, g, or t
  Coding DNA Sequence Number=SeqID_168
ggattgatggcggactgatataagagaaacacgcgctcataaaccagaagagacgagattcgttaatataacaacccgccaaccggccagccggctggggaggggagaggggcgtagagcgcgccggggacataggtgaggggaagaacaagacagaagagtgagactgtagaggtgggacccggagggcgacccagagaaggggatacttggcatggaggttttcgagtgtattcaatctttcagtgtgggaattgacgtgaggattgaggtgaaagaaatagtaaagcgatcaacctctcactgnagtgggggcacggcggggccgatccactgacaaagagctgcgtactaagaagcgaatcttanccggcacagacacgctatcacctcttcgtttatccgcgcgcgtcgcgctaaccatcgtgaatactgtgagagattatgttctccactcgagccagggccgcagacaagtaagttatgtcccgggggcgggtgtggccctcttttntntatatttagccgacgcgcacacggcccgggtggtccgctgtgacacgcgctacgtaatcatacata

SEQ ID NO: 9948 - DNA, 520 bp, Glycine max
  misc_feature (476)..(476): n is a, c, g, or t
  Coding DNA Sequence Number=SeqID_169
gcgctctaaataggatcccggctgaggattcgcacgagaacttaactaaaatcctatcgaaagcgaaagaaagaaacctaacaggcctagcgttctctaagctatcgggaggccctcgacctccacaaccccagcaccaaggggctgtgcctgtcgcgcttcccgcccatgcggaacccgacacccaggccgccgccctccgttcctgctccaggcccgccgcttctgagcgggtcccgtcttcaagcagcgtcgtgtcgcggaccttcggacaggggctcgcgcagggaactgaaacgccgataaagcgtcacgatgagacggacagctcagctgatcagtagcttgatcattcctcccgagtcagtcgatcacgctctcgatattaccgttcggctctatagcgcacaaacgtcacgactcctgtacaaacagcgtctctctctctcgcgctcgatggaagactctgccccagnagccatcgctttacacgtgtacctaacgtgaacagtgagctggc

SEQ ID NO: 9949 - DNA, 581 bp, Glycine max
  misc_feature (497)..(497): n is a, c, g, or t
  Coding DNA Sequence Number=SeqID_170
taaatcgcaacacaggagcctatgaattcccattggtgcatcaaggtcttgtcttgcttgttcttgtcatgctcatgtatcttttcacaatgcaatttttgtacagaaaaggccataatgagacacatatttctttaaatattgaaagtttagtcaaggacttgaaacaagcagctccattgctcgctcttattggcttagcagttggagtgacttggcttttcaaaagacagacgatctattgtttgacaatgatcgttatgtgctcagctttgtggatctgcggtgctctaggagtctccctctttgtcaagaaaacaacaaagtccaacctgaaggatgaaaatgaccaacaacctgatcaagtttctaatattgaattgaatatccatgccttcgaagcagttaatgaagacttgacaatggcgtcacaagatgatggaaaagagctcttgaagggtcttgtggagtctcaagacgatgttccagtgctgaanaagcctctattctttggtttccaagctccattgtttacagtgttggctgttgctatcatggcttattgcgttaatcgcgtccac

SEQ ID NO: 9950 - DNA, 489 bp, Glycine max
  misc_feature (73)..(73): n is a, c, g, or t
  misc_feature (120)..(120): n is a, c, g, or t
  misc_feature (145)..(145): n is a, c, g, or t
  misc_feature (217)..(217): n is a, c, g, or t
  misc_feature (247)..(247): n is a, c, g, or t
  misc_feature (258)..(258): n is a, c, g, or t
  misc_feature (321)..(321): n is a, c, g, or t
  misc_feature (323)..(323): n is a, c, g, or t
  misc_feature (328)..(328): n is a, c, g, or t
  misc_feature (334)..(334): n is a, c, g, or t
  misc_feature (357)..(357): n is a, c, g, or t
  misc_feature (362)..(362): n is a, c, g, or t
  misc_feature (365)..(365): n is a, c, g, or t
  misc_feature (367)..(367): n is a, c, g, or t
  misc_feature (374)..(374): n is a, c, g, or t
  misc_feature (395)..(395): n is a, c, g, or t
  misc_feature (426)..(426): n is a, c, g, or t
  misc_feature (434)..(434): n is a, c, g, or t
  misc_feature (452)..(452): n is a, c, g, or t
  misc_feature (455)..(455): n is a, c, g, or t
  misc_feature (462)..(462): n is a, c, g, or t
  Coding DNA Sequence Number=SeqID_171
atgtctacctgagtgcagcacactgtcaccacagatcgcatccacgtagcagctacgtcactaccgatggcgnatgagtgcgcgcggggcatacactacacggcgtgctgtcggcgtgcngacgacgcgtcacgcgctgcggtcntggtagagtcgacgatgccggtgtagtgcagcgactcacaacgcatgtctcagctagcttactctgtcagtncagcttcgctatctactcttctctctatcnctctcttctcnctcctacgctcgtctatcatcgagtacttgcgctgctgcgtcgtccgtatactattctactcntnacatngtctcnataggagagtgtatgagtagagntagtngtngngtgtgtnggggaagtatctatgagtctngtgtggggagaaaaagagatagagatgtggnggtcgtgngttgcggagcgagtacgnatngactgangatagctgtgcagctaagatagcagta

SEQ ID NO: 9951 - DNA, 449 bp, Glycine max
  misc_feature (95)..(95): n is a, c, g, or t
  misc_feature (151)..(151): n is a, c, g, or t
  misc_feature (173)..(173): n is a, c, g, or t
  misc_feature (193)..(193): n is a, c, g, or t
  misc_feature (256)..(256): n is a, c, g, or t
  misc_feature (308)..(308): n is a, c, g, or t
  misc_feature (383)..(384): n is a, c, g, or t
  misc_feature (406)..(406): n is a, c, g, or t
  misc_feature (408)..(408): n is a, c, g, or t
  Coding DNA Sequence Number=SeqID_172
agcggcgtcgtgacagcgcaccatacgctgtatataatgactatatataattatatattagactagtagacgatatagatgaataagaatatagnaggaatatgtgtcgaatactcactacacgcaccgaacaattatgtacagacgatgnacataatataatgtcagcgcgntgaacagagcgcgtagatanggagcggcagagacacaaatacgagttagacacgcagcaaagcacgaacatctaaaacgacanagacgatagtatactagtgaggcggagatgacagagtagagaggtgtgggtnttaatgtcatgagactgaaggagagtgcatcatgacatagaaggaagtggggtgtgtttggtatataacgacagnnagacgtctagtgtgtacgtggngnggcgcgaattgcaagagatcgcgatagtacggagacataaa

SEQ ID NO: 9952 - DNA, 111 bp, Glycine max
  Coding DNA Sequence Number=SeqID_173
caattcacagaacgctgtcccaagaagcagctttctgagaatgatatatgaatacgataatttatgaattagcacacacctttactgtcagggtggatgtcgatcaggtat

SEQ ID NO: 9953 - DNA, 598 bp, Glycine max
  misc_feature (97)..(97): n is a, c, g, or t
  misc_feature (431)..(431): n is a, c, g, or t
  Coding DNA Sequence Number=SeqID_174
gacagcgttggcacacagcctaaaatgcacgaagtgcagatgacgcatcattctgcctaccgagcctcaactacacaactaccaggtaagtactagnagagttctagggatacacatcatgcatataacacatacgactgtagcaacatagagtggagtaaagatacctggtctactatcatctatgtgagatagtgtctgcttccagtctacaaactcctatactaggcataatatcgaattagacagcatagaaataccatccgaaaatatgagtggctgtgctgatgatgaagatacttatagagcgacatgacgtcattgagtacttgtatagagagcactaagcacggagcgacaagactgcagttgtaagctgtgtctaatcaccaacatatcgcgatgcaagcaagatcatgtattaatgattnagctacgtgcaatcagaagaaaaagagtacataacatagagatctcctcttgcaaggcacgcggggggggtgtgctcctcatttctatgaatggcgtgccttccctcacttcgggcgctggttcctagctttattggggaacgcagggcactgcgtgatgcaaagta

SEQ ID NO: 9954 - DNA, 475 bp, Glycine max
  Coding DNA Sequence Number=SeqID_175
aatacctttcaagcggagagcagaaaggattctgataagcatatccgtattgggaaatcagcccaacacacagcacacattaacgtgtagacgaagtatatactatatatagactggaacagtgcatgtctgtgtaaggacaacagagggcaagcagggtactttttacatgctataaaatgccattcaataacgaaaagccttgtggaactgaggagccaatgagtgattctgatacatcaagactttctgaaagtgcaacatcttccagcgataatgagtctcccagagaaagcttcactagtgactcttcaagtaaacacacttccccttcctcaagtccaccaaagccagtgactttagatgacatgatggcaactacaagaaaccttggcaacttaatgcttgcccatgaaattgtcacaaatggaaattttcaactaaatcacatagatccttcccaaaacagcttaga

SEQ ID NO: 9955 - DNA, 600 bp, Glycine max
  Coding DNA Sequence Number=SeqID_176
ttgcccagttttgcccaggtgttatcatcccgtcaaaatgggagcttaaccggaattagtcctgggatagtttccggcgagttatccaaagaaaattcaagtattggtgcagagaccggcgggaaaacaccgggaataacgcttgtaatagttgtttgtaagttcaatttttctccaaatattgtaaagggaggggagattatggtgagtaataagggggtgaaaaggggccagcaaggggtcagcaggtttgttaattgttattgaaaaaccattgaaaatgcaaagaaagtcagaatttattttgaaggggaattttaggggaaattgtttttgttatcgccttgtttgtcccatgattaaacagggaagaaaacggatagtagtacttttagttttatttttgttggagtgcccccggtgggaccctctggggagtctttgggagcatctggatagcttttttttcgggggttttttggaggatttattttaacctttttttaaaaaatgggtgggggaccctttttgtttccctttttttaatccatggccccttggggtggccatcagtaggaggccattagcagtcggcttcca

SEQ ID NO: 9956 - DNA, 326 bp, Glycine max
  Coding DNA Sequence Number=SeqID_177
gagagatgacatcttctaaagtatcttccatgcttctcgttctccttcttctggttcttgtgtttccccatatggataaagcccttggtgaaaaaaaagaggcagaacatccttatcaactgactactgtccaagggatcggaaggcgcgctcttttaggctttcggccgtcgtgcccagctttcttatgtaagccaaaacttcctccaaattttcctaaagggcctttcccacgtccacgtccaattcgtcctagacctccaccccctccacatcgaaggttttccaaaggcaaaaacatatgatcccacaaacatttggatgaa

SEQ ID NO: 9957 - DNA, 594 bp, Glycine max
  misc_feature (89)..(90): n is a, c, g, or t
  misc_feature (137)..(137): n is a, c, g, or t
  misc_feature (229)..(229): n is a, c, g, or t
  misc_feature (280)..(280): n is a, c, g, or t
  misc_feature (293)..(293): n is a, c, g, or t
  misc_feature (336)..(336): n is a, c, g, or t
  misc_feature (469)..(469): n is a, c, g, or t
  misc_feature (478)..(478): n is a, c, g, or t
  misc_feature (512)..(512): n is a, c, g, or t
  misc_feature (527)..(527): n is a, c, g, or t
  misc_feature (563)..(563): n is a, c, g, or t
  Coding DNA Sequence Number=SeqID_178
ggtggatagtcgtactacacataatgattaacacgccatcacccccacaacgcatagcgagaatgtcactcctcctaatcagatggcgnntatatacgcagttacacgttacatcacgtgacgttacacgatgctanattgattgtatatgtcgcgacaaaatggtgcaatatgtcactatcgacaccgcgcactgccggcggacaacgacgccatcattattaggatnccaactctacgtacacgctaccgtcgcacgccgcatgatgatgctttacancatgccggggcgntactcgtatttactggacgcgaacgtctcagcgatcgcttgtnatagctctaccgctacacgtaattggcgcaagtgcgcggagagatgagatactctctacgcgcatatccagatgcgcgatgtcggagatgcgacgctcacatcatctagtgactcgacctcagagtcttattntatactgcntcaatataatccatgtgctaagtgctcttgacancattctctagccacnatataacacctcgcacctctcgctctcgacaatganactgtatatactctaactgcgagcgacctaa

SEQ ID NO: 9958 - DNA, 368 bp, Glycine max
  misc_feature (26)..(27): n is a, c, g, or t
  misc_feature (45)..(45): n is a, c, g, or t
  misc_feature (54)..(54): n is a, c, g, or t
  misc_feature (60)..(61): n is a, c, g, or t
  misc_feature (203)..(203): n is a, c, g, or t
  Coding DNA Sequence Number=SeqID_179
tcgtgcgcccttttcatcgatctggnntcagtcgtctacaccttncattctctncacggnnaggactctttcagcacgctctacaaagaagaaaccgacgccgatcagtacaacctcgtctttgccactggcactcggcgcactcaaagtggaccatgggacgtaaatctggcatgataatctcgacggaaaagaggacgtcngcgattacctctcctgcggaagaacaatccttcgggagggttatttcctcttcccggctgaggattccccctcgagctctttggatcagcgcctctacaagaagggttgaccgcttcgcatcattactcaggggtagccggggtatcttggaggccgagattttg

SEQ ID NO: 9959 - DNA, 163 bp, Glycine max
  Coding DNA Sequence Number=SeqID_180
catggtttgccccacaagattaggtctgctcttccatctcagctgcaaacagtcgatgacatgaaagaggtacaccacgcacagatcaaagctgaaatggaaaagattactcagtggctagcaccaagttgcctcaaattcagtcaagacacatcaaggtttc

SEQ ID NO: 9960 - DNA, 483 bp, Glycine max
  misc_feature (70)..(70): n is a, c, g, or t
  misc_feature (72)..(72): n is a, c, g, or t
  misc_feature (188)..(188): n is a, c, g, or t
  misc_feature (214)..(214): n is a, c, g, or t
  misc_feature (221)..(221): n is a, c, g, or t
  misc_feature (244)..(244): n is a, c, g, or t
  misc_feature (455)..(455): n is a, c, g, or t
  Coding DNA Sequence Number=SeqID_181
atccagggagcgacaaaacaacactaaacaataccctgttgccgcgcatggctgcaccccacacacaccntntattatattgttcggactatctgattaatagtgggtccccacgcacacccaccacacacactctgctgtatgaacagaatcacacgccgtgtattcagatagagagatcgacaganaacagtagcctcagtcagctcacgcnacatcancccgcttattgtgatgatcacanacgacgcagcgagccaggcgtgcgtggtggtgctcctggacactccactcactctctacctcacactcagcgcattcgcaagcactcatacacacaatatcctaccatctctactcctatcatagaatcgaccacagttgatgtataagtattgtgtcgtttgattaacattccttctatacatatcatacgatatgctcagatgcctagnatatctatctagctactactcacaacac

SEQ ID NO: 9961 - DNA, 437 bp, Glycine max
  Coding DNA Sequence Number=SeqID_182
tgcgaagatggcgtctacgggtcttctatccagtttctcgccatcgtcctccttgcaactccgttcttctttcaacggcgattatgtatctccgtctagcagcttcatcggagcagctccgttcgcttcctcttctctatcccttctctccggtcagaagaactcgtatcctccgagaaaactccacgtgtccgccaagaaagtttctggattagaggaagccattagaatcagaaggatgagagagcttgaaaaaacttcaaaagtaaggagaaacccaccgttacgacgtggaagagtctcccctcgtctcctcgtccctgaccacataccaaggcctccttacgttgagtctggcgtgttacccgatatatctcccgagttccagattcctggtcctgaaggcattgtgaagatgagagctgcttgcgagctcg

SEQ ID NO: 9962 - DNA, 460 bp, Glycine max
  Coding DNA Sequence Number=SeqID_183
gacacctgcgtgcttgtttggatatggggaaaatagctttcttagctatccttgtttctggaggaatcgtcttgcaaattctggcttgtgctctgtataataactggtggccaatgctaagtgtgataatgtatgtgcttctcccaatgcctttgctcttcttcgctggatcggacagtacatctctcttcaatgaatcagacaatagctggatcaatgcagcaaagttcttgactggtgcatcagcagttggaagcatcgccataccttcgattctaaaacacgctggactcatcggttggggagcattagcctttgatctctcttcctacgttgtcttcattgttgctattctgagttacatttgcataggagatgacagtgacaactactacagctacatataaaagtgacatacaaagtcatcatcattattttctcaagctctctgctcttttac

SEQ ID NO: 9963 - DNA, 530 bp, Glycine max
  misc_feature (27)..(27): n is a, c, g, or t
  misc_feature (41)..(41): n is a, c, g, or t
  misc_feature (164)..(164): n is a, c, g, or t
  misc_feature (202)..(202): n is a, c, g, or t
  misc_feature (233)..(234): n is a, c, g, or t
  misc_feature (238)..(239): n is a, c, g, or t
  misc_feature (354)..(359): n is a, c, g, or t
  misc_feature (361)..(362): n is a, c, g, or t
  misc_feature (408)..(408): n is a, c, g, or t
  misc_feature (468)..(468): n is a, c, g, or t
  misc_feature (500)..(501): n is a, c, g, or t
  Coding DNA Sequence Number=SeqID_184
tacgttcgtatgatgttgcctagtcangcggcgtaacaacncgtaacacgcggcgtcgcacataaacgtacatacttccatactctcatcgcgacgtgacgtggagtataagcaccctcctccaatacacatgcatatactctgtatcacgtttcatgttgtgnaggtgatagttatcgtgtttaatgccgtacgaccctcntcacatatgtgtcgtctatatataggcaganntatnnagagacacgcactatgtagagtagaaggcgaggatgcggttcgatattctgggaactatatccgccgcacgtccaagctggcataaaagagcatacggagacaggaaagataagnnnnnncnntccatatctacatcgcgcgacgctttatatatatcacaacacccgnccgagccgctacacagatacgagatatctgcgatatgcccgagtacatcgctgatcgatncgaggaatgagtgagatgacatagcgttgctnncccagatgcgatgcccgtcgtcgttgctt

SEQ ID NO: 9964 - DNA, 418 bp, Glycine max
  Coding DNA Sequence Number=SeqID_185
aaatggcttgttttcgttcgataggatctttaacttctctcactcattctcctcgagatgtttcacgctcctcaggcattgtcttaacttcatgttctgttcatcccatcacgcgctccaccttcactggctctcccatctccctcccgcgactccagccaccatctcaaacacctacaagaccgcgtaacctcgtcccaatcacgatgatggtgaaaccaacgctccagttcatccaaggaacagacgagatgaccatccctgacgtcaagctgactcggtcaagagacggatccaacggaatggcactcttcagtttcgaccagccatcggttttcgactcgagcggcgaggtcggggagataaccggactgtacatgatcgacgaggaaggtgtgattcagtccaccgacgtgaa

SEQ ID NO: 9965 - DNA, 515 bp, Glycine max
  misc_feature (355)..(355): n is a, c, g, or t
  Coding DNA Sequence Number=SeqID_186
actcactatccgcaggtgggtgcgccggcacctcttcatgatgctttgccgtgggttggaagcagggtgctcaggtcgagggtggaagcctccatctttttcacttccaacctccatactccttacttctttatctaccatcactacactacaaaatgagaacagggagatgcggggagagaagaactctcattctcgttacctcctctagccctccccacacctacaccctctaacttttctcggggatgcaagtattatgggtgggcgggcaggctactcctgctatattcttttaatgtgtggatgcccaccccagcgctggtctcctataacacatatagtattgcgcggncttcgtgcggatgctcctgcgggcgcctgtgtcgaacacgagtgagcgtgtgtgttatcacactctccagagtagtctaatctagtaacattagatatcccccttctatctctccatttttattagtgtggggttctttgtcattaatacttctctccat

SEQ ID NO: 9966 - DNA, 548 bp, Glycine max
  misc_feature (96)..(96): n is a, c, g, or t
  misc_feature (136)..(136): n is a, c, g, or t
  misc_feature (152)..(152): n is a, c, g, or t
  misc_feature (154)..(154): n is a, c, g, or t
  misc_feature (190)..(190): n is a, c, g, or t
  misc_feature (212)..(212): n is a, c, g, or t
  misc_feature (280)..(280): n is a, c, g, or t
  misc_feature (340)..(340): n is a, c, g, or t
  misc_feature (415)..(415): n is a, c, g, or t
  misc_feature (426)..(426): n is a, c, g, or t
  misc_feature (464)..(464): n is a, c, g, or t
  misc_feature (489)..(489): n is a, c, g, or t
  misc_feature (510)..(510): n is a, c, g, or t
  misc_feature (512)..(512): n is a, c, g, or t
  Coding DNA Sequence Number=SeqID_187
atttatgctattacatctccgctctcctactctcatatgcttgagctcaactatcgtgtcacgcgctcttactaagcttgaagtataattgtttanacccacaccccccgactctcgctgcaccacgctcgcaggncgctcgacgcgcgtantncagtacatgcgtagtgctgatacactctctgctctntagagacgacgctatactcacntcgcgcgcgtacgacatcactttggccgcgtctgctgtcttcgtactatgtcaatccttccgacatanactctcatggtaatcgtctgagcacagcgatcatctgacgcaacgtcgagtcgtatcatnattacatgtgttgagcgcgcacgtcgagcgtgcacgactacgcgagcagacttatactacttgcgcgcgtgcttncgcatgcagcncgcgacgcactagacttcgcgctccctactacactgancgcgcacaagctgaacgacctacgnccgaggatgagatgcagttcnancagtctacttatatatacgactcctacgactattcc

SEQ ID NO: 9967 - DNA, 572 bp, Glycine max
  misc_feature (38)..(38): n is a, c, g, or t
  misc_feature (88)..(88): n is a, c, g, or t
  misc_feature (209)..(209): n is a, c, g, or t
  misc_feature (239)..(239): n is a, c, g, or t
  misc_feature (311)..(311): n is a, c, g, or t
  misc_feature (316)..(316): n is a, c, g, or t
  misc_feature (357)..(357): n is a, c, g, or t
  misc_feature (532)..(532): n is a, c, g, or t
  Coding DNA Sequence Number=SeqID_188
taggaagaagacacactcagccaaggggcgtctcatcntcttcgcctccccctgacatcagaatctggacatgagagagctcgctcgncagagcatagacgcgcctcacacatgctgcgatagctgtggctccacaacactagagactccggagagagacgatcgcagattaccttccttcttgtatccatgaatactatacaccacgngcaccgcgcaacacactgcctccatacagnagtgtgcatgcgggacgatgctatacgaagacagctgccgacccgcaggatgtctcgcactgtaagacgccntcacntctgccggtagcaatagaggagttgacaggtgcgagcgctntctaatacccgtaggaactcgatagtcccacctcgctacagcacaaccataagcgagctcatgagagtaggtatacactctatctagcgcttgtacattctacgatcttcacgcgcatccacatcaacaagcaccgctgaagtaaaatgatctcagctatcacacacaacgacgnagtgcgcgaacgcgcgtacatcagacgcactgccgcaaca

SEQ ID NO: 9968 - DNA, 446 bp, Glycine max
  Coding DNA Sequence Number=SeqID_189
ctcccaggagtagcttctgtgaagcctgtcagctacgtaggcccccccccccagaaagtgaaggccgattattcccaaaagccttctgtgatgacgagactgataatccttccctatgacatggttgtagctgtgtggtgctcttgtttgcttcatgtaagcctggatggataatcaaaggatattctcgctgatctttccaataaatggagctaatctcaccctccactttcaccttttcaagaagaatctttctgtgaacgttgctttaaaatggatgttgtgcaggcctgctgtataaattagctgcaggcacctgaatactcttgtgaggtgtgaaatattatttctgattcaaaatgagtcagctgctttgttcaattttgctttgatgtgaaatcatcctgaattgaattcttctataaatctgcaaagtctgtatcccc

SEQ ID NO: 9969 - DNA, 479 bp, Glycine max
  Coding DNA Sequence Number=SeqID_190
gaaattagctgatccgacctcatggaccaagtgttcaacatgcagctgcttacatacactgagaatacacatatactacgtactgcatagctcacaaccattgatgagtgttgtcaccacccagatcagtagcagcaataaacaatcctcattggccataaataaaataaaacaaaacaaaaacataaaataaaataaaaaatcctgcatagtccacccattgtcgcatgcaaacttgtcatatttttttctgaaccaaaccacctattaatgatgaaactcctcacatagatgtatccctacaaatactaaatcgaacttaagccatatatagaaagtcactaagaccaattgacatgcaaccagccaatatgagaaaagaaacacaggtcaagaaaccattagtcagtgggaatcaaaatgaaagcctatgcagtcattaattggctctcaggaggcccaaatgcaactcgcatgta

SEQ ID NO: 9970 - DNA, 566 bp, Glycine max
  misc_feature (63)..(63): n is a, c, g, or t
  misc_feature (193)..(193): n is a, c, g, or t
  misc_feature (196)..(196): n is a, c, g, or t
  misc_feature (223)..(223): n is a, c, g, or t
  misc_feature (225)..(225): n is a, c, g, or t
  misc_feature (248)..(248): n is a, c, g, or t
  misc_feature (348)..(348): n is a, c, g, or t
  misc_feature (365)..(365): n is a, c, g, or t
  misc_feature (419)..(419): n is a, c, g, or t
  misc_feature (421)..(423): n is a, c, g, or t
  misc_feature (436)..(437): n is a, c, g, or t
  misc_feature (479)..(479): n is a, c, g, or t
  misc_feature (538)..(539): n is a, c, g, or t
  Coding DNA Sequence Number=SeqID_191
acgtgtagcatttccaacacccacagcccatccatgcaactatactaagcatgatttaaaatntcatatatggacgaccctcattcactaatcaacacataacaccaacattcaattccacactgctcctatgacgacataggagagcattagagatgtgtgtacagggcgtgatagggtcatcgcgagatangtnatgacggctgacatgtgagagcgtagnangcgcgcgacggccggcagcgacngagcgacagcgagcccgcctctctctactcctgcggacgcacaacctatagtagtgatatgtctacgtggagaacagcacacacgacacactctacacangtcctgccagcactccnccacactcccacacacgacgtcgcagctaccgccgtgacaggcgagagtcgcanannntctatcattcttnnctgctggtcttctaattattgtatactacctccgcttactangatatctctcatatataatagttatatatacaccaatctcttacctagccttatctttnnatactcattgtctgtgtgttgtgtatt

SEQ ID NO: 9971 - DNA, 566 bp, Glycine max
  Coding DNA Sequence Number=SeqID_192
aattcgtttacagaacctcgtccataccgacctcccgtacgcaaacacaacctcttccaacaaaagagattggccgaactacgtgaaggatctcaagtctcggtggagatccaatcagataagagtctgaagggaactgaacaggatcagaccactcttgtctcaggaattgatattcaggaaaagtcgtcgtctgatgttgttgctagcacctcgaagcctcagacgccatcaccgagtttggtcgggatgaagaaaacactaggttctcaagtctcgttgctacgttgttctacctgtatgcaaataatccagtccgataagagtctaaagggatcttctgatcaggatcagaccactcttgtctcccaaattgatatacaggaaaagttgtcgtctgatatcgttagtagcacctccaagcctcatcaaggtaagcatctccgatcaagttcaaagatgcacaagcccaaagcttttctaaagaagaagaagaagaagaagaagaagaagagctcacgcaaagctgtatccaccacctaagttaccaccactatctatttcct

SEQ ID NO: 9972 - DNA, 525 bp, Glycine max
  Coding DNA Sequence Number=SeqID_193
gtatgagccgcttagtgcagaacaaataagcagaatacttctcccatatcgggaaggatggctgccagaacttccgtgaacccagaagcacgcagacaggggatcctggtgcgtgagtagtccctcctctatccccttccagttaatgtcagttagatcttaaaataagcactgcacagtatacctataagccttccaggtagttttcttaatgtggttttgacagcatccctcttttgcgcaggccacacttatggtaataagcatatagtataaagaggcctcagcgttgcagatatgcgaacgcacagttccaaggcactacagcaagggtccgttattagagaatgttggtcccctcctaagatcctgagggcaagatctccatgttacagttagctcatatgtaggatattggctattcccagataatgggtgtgtatagcactacgcgagtgtaactcatggtcaagtaagggtaccaatgcattaatgctgtggtaggaagtaccactgcgtagaata

SEQ ID NO: 9973 - DNA, 210 bp, Glycine max
  Coding DNA Sequence Number=SeqID_194
aacgcaaagcgtagacactggcgcagaaccaagcttggattctaagctgtcttacttttgcctatttgtgaaagctttgttctttccaagacattgttttcctttgtttggttctttagcgttttgttttttcagttttgacttgtggcagttacattgttcacagttgtgtaagacgatctttaatcaattatgtttccagattaacaa

SEQ ID NO: 9974 - DNA, 566 bp, Glycine max
  misc_feature (466)..(466): n is a, c, g, or t
  misc_feature (471)..(471): n is a, c, g, or t
  misc_feature (539)..(539): n is a, c, g, or t
  Coding DNA Sequence Number=SeqID_195
ggagtaacaccacttattcgagccgctttaatgggtcatgaaaaagtcgtacagcttctacttcgaaagggtgcagatgtattccatcaagacaacgacggcaacacagctcttcacaaagctgtacagaataatcatcaaaatgtcataaaattactattagattcgtctagcgattcaaatcgtttggaaggcatttgcaataacaagggccataaagcaaaagatttatcaaaatagtaactgaaaaaaaactcatctttaagaaaattataaatgttggcatttacttttctttatctttaattagccaatttacggcagcttcttaagttttatctgtttcagtattttaaaaagtgcgctttactaaatagaacaagagagatcatgagcttacgatttattgcttaatttcattatttttgaagcatttgccattgcaattcaaaatctttttagttanaattnggaagaattatctaaatataaattgtgctaaattattcatttcaagatcagtaagttgccattaatanaggtgctttaacccaaaatcggtactg

SEQ ID NO: 9975 - DNA, 268 bp, Glycine max
  Coding DNA Sequence Number=SeqID_196
acaacaattacctcttcctttggagaacaatttggaagagttgcaagggtttttaaggaggtccttttcctgatctggggaaccggtttttgatttgccaccctggtcccaagtttcaaaattttgtccccattggcttaatttaaaaaaacttttttaactcttaaaaaaaaaaaggtctttaaaaatcttgggggaatttttttcccctccccccaattccccccttttttgggagagctgtgtgtcgccccctctctatttttaa

SEQ ID NO: 9976 - DNA, 539 bp, Glycine max
  Coding DNA Sequence Number=SeqID_197
taccatccttttttcgttacatcgactcgtgtcgtacacttgccaccgcctgtttaggctggaaattgtaagacagagtgttgctgcaacctgtgccaatgcgtacgcgtgcgccgcatatgtggcccgctctctacccccaaaaagcgcagcctccgaggcctcgggcgcggcggatgtatcattataaataaacataccgcgcgccgcacataatacacgcgcgtcgcgtgggatacacacggaagttacatatacgtgcgtactccgcccgcacgcggagaatggtatacaactaactatcgtgtcagaaaatatggcgtgaccgggcgcgctcgtttgccgctctcacaaaaatctcgcgcactgtgtctcctgcggattatggaaagacggagctcacctgacgccgcgcgggtgcgtgttagattcggcgtgttatagaacctcacttcgcatctccataacggcgccgcgcgcgcgtagctatatatgcgcgtcatcacgtcgccgcgcgacctatgctgctctgtaagtat

SEQ ID NO: 9977 - DNA, 543 bp, Glycine max
  Coding DNA Sequence Number=SeqID_198
ggcgcccatgcagccagttattatgactatcccgcgccactacctcgctgatacctccatgactctaaacaccggccacatcaacagcgacacacgaagacgagctcacctcgacgtcgctcgagcgcgggcccagtagccgcaaagcggccagtacacttattaataaggctcgcagtcaccgctttaatctactacacacaacgtgaatatagagaggcgaggccgctcacgctcgcgacagggcgcacataccgagatatatagtatcagagactcctagcgccaacacctgctcgagcacgagcaaggacctcgcaacagggagatgatagaagatagccgacgacgctccgtgcgaatgagacgacgagcacgcaaacacttgacgatgcgctcgcccagtcggaggatcgacgcacacgtaatatatacctttgcgcgcttcacccgcacctcgtccgcgcactgctcacacgcgctgctgtccgcaacacacagtgagctcgcgtatgcgtaggaagattacgatgcccagcgacc

SEQ ID NO: 9978 - DNA, 517 bp, Glycine max
  Coding DNA Sequence Number=SeqID_199
cccatttggctcatgacttcacaagtaaactgccacctagtttacaaggcggtgtagttaggccacgtacgcctgactgtctaccgacttcccatatcggttccaatgtctttaataagaagatgccatacggagccgccaccgcagtggacttatcagcaaggagaggatcagtgggatcattcttatatgcccccaacaacactcgaacttctgcccgccgtagttcgatgtttcaaaatcagcgcgtaatgtagaaagattctctctctttctcattttttctattattctctcatccatccattccgctactattcttgggttctctatcggcttaaatatttttgttttatcttatatatatcttttttatcggaacacccctctggatagtagttttttttttctctcattcatgaatgattgaatatggactattgtaaagattcttctgagctttttgctctactttgtaaaaacttgtaatttttgtatcactacattcaaccccaaa

SEQ ID NO: 9979 - DNA, 527 bp, Glycine max
  Coding DNA Sequence Number=SeqID_200
tccggcggcgtgttatgaggatcaaaccgtcgcggcggcgcccgagcaagtcacaacgcgaaccacccacaccgccgtaccaatacgagctcagtagtcgccgcggtgcggctctataggaagcattactattaggggaggatattaaaaggtaaggcgacgatgggaaagcgtaacatatagcgcgtaggggatttggagaagctcaccgcgctaattcggtgcggggcggcgtccctacatttatagacggcgcgcgtcggccatgtgtacgctttacaccgcgctgttgatagcgcgccgcacaggtagacggcccttggttaaatcgtcacagccgtactactattcccgatgagttggctgagtaacctcatatattatatatgcgcagctagcgtgtgtgcgagaggcgggacgtttatagacaggtcacctaggagtcgctcgcgcggtgatccggattatttgtatacgtatatacatacgtatactatgggtaaaaatagtcactgttccttacgcgg

SEQ ID NO: 9980 - DNA, 568 bp, Glycine max
  misc_feature (277)..(277): n is a, c, g, or t
  Coding DNA Sequence Number=SeqID_201
cgggctactgtattcttactcttgataatccctaactcgcagaccattgcaaccccaagagctggtgtgtacgtctattctctatggatatacccccggaccacaacatcgcttaatatcccctcactctggattaaatgtataatacactagtttggctcaatagatatatactatcatttagtactcataactcacactcacctcaatgctctgcgcatacagtatagtatcacctcgccactaccgattcgctgcaaacatgtaggaacacatnatacgaggtcgctacaattaatagtaggccataagtccatcgctctgttacatacgatatgacacaacgtaatccatagccgagtatacaacccacatccaatcgtcacgcacattatctaatactctcacggcgtgcactattatataccatgccacgcaacacactcctgcaacaacctctgtgcatccgtattacatatctattctgtgctatatgcactacactatcacaaacgatactcgtcactacacagtcgtcgatacacatatcgtgtctcgcatgaactct

SEQ ID NO: 9981 - DNA, 597 bp, Glycine max
  Coding DNA Sequence Number=SeqID_202
tggcatgtccgtacgagtagccactgtagatgtttcagttgttgacctcactgttaggctagagaagccagcaacctatgagcaaatcaagaatgacaactttgtaaaacttgtttcctggtatgacaacgaatggggttacagttcccgtgtgattgatttgattgtccacattgcatccgtggcttaaagaattgagtctgagcttggatatcatcgctacaccgctccaaatttttatcttaatcgagtttattttagtgtgaattcggaataaacactttgtgttgctgtgagagatatcattgaaaaacagtgcaatatgttgagttggtagacggccttataggtttttcctctcgtaagggacgattgactattctgtttcgttatcataatcatctagtataagcaacattttttgttctccaaaaaaaaaaaaaaaaaaaagccctcctacaacaacttttgcttccttttaagaggagtaattgcccccttgttggaatgatcagtattgctgcttgctggaagaaaatattatcctgctatcactccccacaacataccacgcccgcatcataaaaaagtactcct

SEQ ID NO: 9982 - DNA, 534 bp, Glycine max
  misc_feature (69)..(69): n is a, c, g, or t
  misc_feature (80)..(80): n is a, c, g, or t
  misc_feature (92)..(92): n is a, c, g, or t
  misc_feature (103)..(103): n is a, c, g, or t
  misc_feature (130)..(130): n is a, c, g, or t
  misc_feature (170)..(170): n is a, c, g, or t
  misc_feature (207)..(207): n is a, c, g, or t
  misc_feature (255)..(255): n is a, c, g, or t
  misc_feature (276)..(276): n is a, c, g, or t
  misc_feature (301)..(301): n is a, c, g, or t
  misc_feature (314)..(314): n is a, c, g, or t
  misc_feature (508)..(508): n is a, c, g, or t
  Coding DNA Sequence Number=SeqID_203
gctgtcgagatattgtgaggcatctatgatggatctgatctatatgcagtgtcatatgtactaggatcngcgcacgtgtngatcgtagcgtnctgttctcgtnttaatagatcgcgcatcctgatcgtgngtagctagagagcgatacatgacgactacgatgaacgctnacgtcgtctcgcgttactcgcgttgctatctcgttgngggtcgatgagagtgtgatgactagagtacataatacgcaagactaantcatatcgtaccgatacacantactgatgatgtttgcggttgtgancggactcgcgtantgtagatagatcacacatctcgctgagttctaagcataactgacgtcgcgtatcccagcgttccatatgatatgtccaagcaaatattactactcaactgtagtgtacgctgaggagtgtcacgtaggtgtggttgcatagatttgctgtatacgatggctcgtgatatcatcgactgatcttgttgttgactntgttgaagtcgactctcttttagata

SEQ ID NO: 9983 - DNA, 528 bp, Glycine max
  misc_feature (94)..(94): n is a, c, g, or t
  misc_feature (98)..(98): n is a, c, g, or t
  misc_feature (208)..(208): n is a, c, g, or t
  misc_feature (295)..(296): n is a, c, g, or t
  misc_feature (360)..(360): n is a, c, g, or t
  misc_feature (362)..(362): n is a, c, g, or t
  misc_feature (366)..(366): n is a, c, g, or t
  misc_feature (444)..(444): n is a, c, g, or t
  Coding DNA Sequence Number=SeqID_204
gtatattcgagtatgcgctgagctgtgtctatatgtagatatagtgatatagtgtgcgacatatggtgcatacagacttgcacacaatagaggngtcnctctatcattgtcgcagcgtaggactatacatcgcgctacatatatgatagtactccactacctgattcttatgccacatacctctgtgtaatatgctactagacgcttngctcatctctaggtgtagagtgcactgtgctcatgtatatcacgttctcgtggtatctatccttgcacgcgaccgcttgccacattnncacgactcctatactactttacacactctctcctctcatgatacaatgtgactaccacccgaanantatntcttgtatatgacggaacgtgatacactactatgctcactgtgattctacggaagccacccaagtgcgatcggaagcntctctattcctgtagatatgcataacgtctatcgcgaccgtgacgcgcatcgcagcgactaagtgatgatgcttcctctgctct

SEQ ID NO: 9984 - DNA, 324 bp, Glycine max
  Coding DNA Sequence Number=SeqID_205
acaggatttttcacatcctatgatgaggttatgacagttttgatgctatgggcttgcaagagaatctcctgaaagcatttatgcttatggttttgagaagcatccgttattccgcaaaaaggaatatttcctttctgcaagggattggatgttaaacaagaggccccatttggaaatgggaaaaaaagaaactttcgggttttggaattccgcgaaaacttggaattaaggggggctgaaaccccaccccttggttttaacaccaaaagaggagtttggtccccaaattgaaaaggttttggcgcccccttgagaattattttg

SEQ ID NO: 9985 - DNA, 309 bp, Glycine max
  Coding DNA Sequence Number=SeqID_206
tgtagtgagctgtatcttccatctttcaatacattggattaggtttataatttaaaaattttactcaggaaaatgagtggctttagagcagcaggaatgactacattcaagtgtccaacatttgtgctaagctgctaaggcgagctctaaagccaaatttgaagacagagggtctaaaacgaggacgcaacctgttgtgagggttcactcccatgggaaagatggggaaggcaatcactggaaaaataaagagattcccgtaaagattaagaggacgacattaagggaaaccccgcagcaggtccaaca

SEQ ID NO: 9986 - DNA, 478 bp, Glycine max
  misc_feature (104)..(104): n is a, c, g, or t
  misc_feature (146)..(146): n is a, c, g, or t
  misc_feature (251)..(251): n is a, c, g, or t
  misc_feature (254)..(254): n is a, c, g, or t
  misc_feature (302)..(302): n is a, c, g, or t
  misc_feature (400)..(400): n is a, c, g, or t
  misc_feature (405)..(405): n is a, c, g, or t
  Coding DNA Sequence Number=SeqID_207
tccacgctcactctacatatgtaatgacgcgtagaagtagcaagagctgcactcacgacgccggctcactacatgacgcgctcaccgatcgtgttgctctcaanctgtccctacgctctccacgcttatcatctcgtatgtcaatngtagtactatctatgatcgctcgtgtggtcgctgcgctggctgcacgacgcgcctacgagtgcttatctcctctcgcccgttcgtctgtgtgccactatacaggnganacaatatggattgaggtgtctctcacgtaggtgacatttctctgctgngtagaatatcagactctcaccaacgcgcgggccggcggacacgatccacgaagcgttagatgttgatgatataaggacgagtgatctgcatacattcntcgtncagaatagagtatggcttcctccatgtttatagtaaaagatcaaaatattaagcgcttatgcatggccgatct

SEQ ID NO: 9987 - DNA, 255 bp, Glycine max
  Coding DNA Sequence Number=SeqID_208
gtttaacgtcgtgaaaggatctggtgtctctcttttcgctctcttcatcgataaaaaagagaaacaacgacttatatttgcctatcacatgcgtttgttttcaatattttctctcatgtattatttaatttatagtttttaatgatgaacgggttttatcaacaactccctacctcccccagtaatattactgaactccatttaaaatttcatacaacatatctcagcttgcctctccaagacatgcttctgtgc

SEQ ID NO: 9988 - DNA, 448 bp, Glycine max
  misc_feature (223)..(223): n is a, c, g, or t
  misc_feature (258)..(258): n is a, c, g, or t
  misc_feature (370)..(370): n is a, c, g, or t
  misc_feature (379)..(379): n is a, c, g, or t
  misc_feature (383)..(383): n is a, c, g, or t
  misc_feature (389)..(389): n is a, c, g, or t
  misc_feature (410)..(410): n is a, c, g, or t
  misc_feature (421)..(421): n is a, c, g, or t
  Coding DNA Sequence Number=SeqID_209
ttcaaacacgactactacaaacagtaagagcgtacacacttattacacaccgtcaacgacctactacactctctacacggtacgcacgcattgaccatctatctgatccactcctccatctctccacatgtcaacatagtatccatcacaactacaacactctaatatcactactaactatcctatttactctacacacatctagacataatattagtatttntattctaagtgacacaccgctgcctctcatctacnaccagtcgctctcactcagtctacacatatgtaaatagaatacatacatcatcatgtataatagtatagataatgtacatgtactcatacgatagcatatacatgtacacanaatcatgantatnatattncacgctctatgtcgcctcagnctataaagaanaagagacacttacatctactacacata

SEQ ID NO: 9989 - DNA, 319 bp, Glycine max
  Coding DNA Sequence Number=SeqID_210
agttctgggctaacatgacaaacaccgtgaagggcgttggcctggatgctgccggcgaggtgcgtcgctacccatgtcggagatgaggtgaggcggcgcaggtgtcggtagcggtttgaggatgattctgcgatcgtgatgtctcacgggcggaataggggaggctgcgggatcatgggccgagcgctggacgtttctacgccattggaataatcttgttcgttagtaattagagattaagggctatgattagagcactaaacgtgttggggtgctaatcatcgaaaccacgtgggctcttagattagggtggactgat

SEQ ID NO: 9990 - DNA, 531 bp, Glycine max
  Coding DNA Sequence Number=SeqID_211
gattcttgctcatgaaacatccttgcagtgcacatacaggtacctaatgtctccttgaacggctatcattggactggtcactataatgcggcttccaagaaatgacaacgaggactattccctaccatcatggtgattactccactctacccttccttaatcattccactctctctaaattcaatctatcaattatcgctctaaacccatggaacacgccttcctagccatcgccgccgccacacgccagcttcttcgtggttatgctcctcctttctgccgccatcctcctctgccagcaccaccgcaactccaccaaagccccaacccgcagcacctcccagattcgaacccggtgggtcccccaccgggacccctcctcccgctccgtcctggaaaactggtcctccgaccccacctgatcaagatctcctgggaggagctagccccggccaccaacaactatacccctcacctcatcagaagcgatggcagctccagcctcgtttacaaggcccgattctccacggg

SEQ ID NO: 9991 - DNA, 560 bp, Glycine max
  misc_feature (45)..(45): n is a, c, g, or t
  misc_feature (58)..(58): n is a, c, g, or t
  misc_feature (86)..(86): n is a, c, g, or t
  misc_feature (139)..(139): n is a, c, g, or t
  misc_feature (146)..(146): n is a, c, g, or t
  misc_feature (196)..(196): n is a, c, g, or t
  misc_feature (281)..(281): n is a, c, g, or t
  misc_feature (285)..(286): n is a, c, g, or t
  misc_feature (291)..(292): n is a, c, g, or t
  misc_feature (350)..(351): n is a, c, g, or t
  misc_feature (353)..(354): n is a, c, g, or t
  misc_feature (391)..(391): n is a, c, g, or t
  misc_feature (397)..(397): n is a, c, g, or t
  misc_feature (428)..(428): n is a, c, g, or t
  misc_feature (467)..(468): n is a, c, g, or t
  misc_feature (479)..(479): n is a, c, g, or t
  misc_feature (500)..(500): n is a, c, g, or t
  misc_feature (502)..(503): n is a, c, g, or t
  misc_feature (507)..(507): n is a, c, g, or t
  misc_feature (510)..(510): n is a, c, g, or t
  misc_feature (513)..(514): n is a, c, g, or t
  misc_feature (518)..(520): n is a, c, g, or t
  Coding DNA Sequence Number=SeqID_212
acagctgagggacagtcgagaggtttggccgtgtggcggccgcgngcgggcagagacncggagtcgacggacgcgtgacatcaatngcagcgcataccggctagtctgaggacgagaagaggatgataacggagtatgnggtgagngcgaagagagagagagaacgcgcgcgagagatagcggagaaaccggcagnatagcacaaagcgcgcgccggtcgcggcgcgcgggcggcgcgactatcactagataatcaatattacacgcgttaataacatcanttannataannactaaataatataacatgaaagtgtaatagtatgatatggtctgagggggacgataannanngcatcaatatattgtaatatacacatacattcataantatacnccatactactacatctcacgacgactgagangagacatgacgtacctagagacgcccggtagcccaccgnngcactctctcntcatgtgacaaccgagcacantnntacncgncgnnacannnaaagagacaaagagaaagtaggatacagctgaagtatgaa

SEQ ID NO: 9992 - DNA, 600 bp, Glycine max
  Coding DNA Sequence Number=SeqID_213
agtatgattctggtgcataatatatcgagacgctcgaaattgaacaacgaatgctctcgagaaattcaaatggtcacaagttatcacacggaagtctgattcaggcgcataatatatccagacttttgaaattgaacatcggaaggctctcgagacattcccatggtcaaaacttttcacacggaagtccgattctggagcatcacatatcgagatgctttaaattgaaaattggaagctctcgggaaattcagatggtcataacttgtcacacgaaagtccgattcaggcgcataatactaactgagacgctcgaaattgaacaacgaatgctctcgagaaatttaaatggtcataacttgtcacacggaagtccaattctagcgcatcacatatcgagacgctgtaaattgaaaaccggaagctctcgggaaattcaaatggtcataacttgtcacacgaaattccgattctggtgcataatatatcgagacgctcgaaattgaacaacgaatgctactcgagcaattcaaatggtcataacatgtaacacggatgtccaatacaggcgcataatagatcgggacgctcggaattgag

SEQ ID NO: 9993 - DNA, 566 bp, Glycine max
  misc_feature (84)..(84): n is a, c, g, or t
  misc_feature (267)..(267): n is a, c, g, or t
  misc_feature (269)..(269): n is a, c, g, or t
  Coding DNA Sequence Number=SeqID_214
tactccatttcgatacaacacccaaccgcgcttatatataaattgagcgatacattcataccacagccataactgtctagtganttcattcgacattcgcatccatatttctagcaatatatcctccgcacgttgtctatctgcatgagactatattaatacttctacaactcgtcgcacctgctagagtatggatgatatcacatctaactctcttctccagtcccactcctactcctgacacctgattatactgtctgataattntntatagatcctctatccacactgcttcacagacaatctagctacgcctatacggactatgctatcgcgagtcacccactactcaccgatcagtacatatatttcactctctcaagttacgtcgagggtactcgcctctcgtcatgtcacactcacatatctcttgtatgtaatatcgctattccttatttagacgaaatctcacgacacacacgtactaactgcaagagaagctagacattataatcaacagaccacataacgacttatctccttatcatctttatcagcgcactgac

SEQ ID NO: 9994 - DNA, 537 bp, Glycine max
  Coding DNA Sequence Number=SeqID_215
gatgctgctatcgtcaatctggttccaaccaaaccattgtgtgttgaatctttccaagaattcccaccgttgggtcgtttcgctgtgcgtgacatgagacagaccgttgctgtcggcgtcatcaaggctgtcaacttcaaggatgcatcaggcggcaaartcascaaagctgccgaaaaggccgccaagggcaagaaatagcaacctaacaacaacaacaacaacaacaacaacaaacaaaacttcacatcaattcttttaacatccacgtggtttttgaaaaaatgttattacttcttccatcgcaaagaattccgaagaatagcgtacgagctaaaattcattccgtattaaaataaagagaaaactgtttatttttatatacacatacattcaagcatccattaaagaatgattctttttttgaaacaatacgttttattttttagataaaataataaaaaaaaacattaaatytaattaaatagtaggaatgccccaaacggtaacattattttcaattatccccgcatttta

SEQ ID NO: 9995 - DNA, 565 bp, Glycine max
  misc_feature (106)..(106): n is a, c, g, or t
  misc_feature (264)..(264): n is a, c, g, or t
  misc_feature (295)..(295): n is a, c, g, or t
  misc_feature (299)..(300): n is a, c, g, or t
  misc_feature (324)..(324): n is a, c, g, or t
  misc_feature (345)..(345): n is a, c, g, or t
  misc_feature (372)..(372): n is a, c, g, or t
  misc_feature (380)..(380): n is a, c, g, or t
  misc_feature (401)..(401): n is a, c, g, or t
  misc_feature (500)..(500): n is a, c, g, or t
  misc_feature (518)..(519): n is a, c, g, or t
  misc_feature (521)..(521): n is a, c, g, or t
  misc_feature (529)..(529): n is a, c, g, or t
  misc_feature (535)..(535): n is a, c, g, or t
  Coding DNA Sequence Number=SeqID_216
actcgtgtagtactgctcatctctcatctgcatccctatctctctctctattatttgtgatgctcatcattattcaataaacaaaaggagataaaagaggtgaacnaagggcgcgtcgagcgacacgcacacagacaaagaacaaacgaggtgagacgggtgtggcgtcgcgggcgctggtcagaaagacacacaacaccagcaccaacactaagtgcgagggtggcgggtgcgtggcgtgtgcgtcgacacactcgctcgccncctctactgacgctgtggctctggagggtgnccannctgcattgacaaatagtcgctccnattaacttgatgtgggggtgngtagagagtgatagtggtatcatactnctgcacangcaccactcctatcactgatnagatgatagagagaaaaaagatatatatgtctctcatttcttgatattactctatgctatatcctcccctatttctgtctcccatctctctctatattnccctatactctatttttnncnttctgtcntctttnccctcagagaggaagtacaccgccagcgcc

SEQ ID NO: 9996 - DNA, 247 bp, Glycine max
  Coding DNA Sequence Number=SeqID_217
gggaccatttacctaatagacgcatgctgaacaacaagagagccaactatagaggttactgggcttcatgtgcaaccctttatcatgggccatcgacaactgatgctatagtggccattgctacggctaactggtggaagaaggcctacacattgaccagattatatttttatcactgctctgaagaccattaactccaccctctggttcatagcagaaaacagagatggccatgctggttctgccc

SEQ ID NO: 9997 - DNA, 395 bp, Glycine max
  misc_feature (230)..(230): n is a, c, g, or t
  misc_feature (360)..(360): n is a, c, g, or t
  misc_feature (362)..(363): n is a, c, g, or t
  misc_feature (365)..(365): n is a, c, g, or t
  Coding DNA Sequence Number=SeqID_218
gttggattaatgttgcacgcgattcagtacactttcattctactacaatcacccttccatccgttcattccattagtttcttacacatcatatagtcgtatattaataatatcattacaacctgatcagagaggcagggcgtcttcgtagcgatcgttatgaggagcgctgttatatctagtgatcgataatatcaattatggagtcatgttatatatatatatacaganttatgtattgtgatgcctacacctactcacttggcgtgtattgtatcgctgatcgtgagctgtgccgttgtgtgcagcccgattcctccgctcgcatgctcccatattagcctacctgtgacttcccgcncnncnccggagagacagaaacacaaccagatagac

SEQ ID NO: 9998 - DNA, 556 bp, Glycine max
  Coding DNA Sequence Number=SeqID_219
ctgaacgatcaatctcaaagcgagatatctttgaacgatttggacgattgaatgaattggctcaagcccaagctcaaaaggctttctctgatctccaacgagttttcgatgatttattcaagaagcacccaggaagtcacggaatcgaaattgaaattgaagacggtgaagttactactgaacgaatcattgaaaagcgagacatcttcgatttcttcggaagaatcaatgaaaaggcccaagacgaagccgctaaagttttcgctcaactccaaaagactttcgacgatatcttcaagcaccatgatgatgaagatgaagattcaactgaatccagcattgtaaagcgagacatctttgatttcttcggagaaatcaacgaaaagatccaagaccaagctggaaagttcttcaatcaattccacaagccaggtccaaagccaggtccaaagccaggtccaaagccaggtccaaagccagcccctaagccagcccctaagccagttgaagaagatgatgaaatcgaagttgtaacctctgcttaggcaccaactat

SEQ ID NO: 9999 - DNA, 434 bp, Glycine max
  Coding DNA Sequence Number=SeqID_220
ttcaccttgttagtgccagcaatcaaagggaaaatcactggaagagttgagtggggagaatgaagatgatggtgctgaggctatagagatggcagggtctgctaagacggctccagtttaaccaaagcctatgatcaacaaagtatttcataattctagtgatgctattattgtgcgacaatattacttcgggttttctacagctacatgcacaataatgaagtagatatattgttctcgatgctgaactctaaaaatccttatacagggtgtgtatttcattgtcgttactgattacagtgtatgccttgaaggaatcataagccagaaactaagctaatgaagggtgcctaataagaacgagttgggggtcccggtgctcatatctcccatgtgatagaattataatgcgcgcttacttgctgcggatagaa

SEQ ID NO: 10000 - DNA, 563 bp, Glycine max
  misc_feature (287)..(287): n is a, c, g, or t
  misc_feature (415)..(415): n is a, c, g, or t
  misc_feature (536)..(536): n is a, c, g, or t
  Coding DNA Sequence Number=SeqID_221
attgatacaagaccgctgacgccagctcgacgaaaacctcttgcgacgcgcggccggaggcgccacgaaggttgtgcgcgcctgaaccctgcaatctcaaacccgcaagcgagccaaaaactgactcgcgctcaatggcttagaaatttttcacgcacgactttgtatgtcgtcgtctatcagctcaatggcagggtgttgccgtgacaacggctggcgtctgcttcgctaatgtttgcatcgacggcgaagggttcgcccttgatcagggcggcattcatgcatgncgtacagtctcaaaaatgtatcggagaatgtcactatcgcggaatcgaagttcaagccacgctcaagcgacatcgaccatgacagagtttctcaacatcaacatcacagcttcgcttggcgggggtgnggggttgaacaatttatcctgcatttcggggcaaccttcggcacaaaggcggccgaactggtcctgggtttcgacccctttccgcggtcgtcgggatgccaaaactcgttccagggccggnaaaccgcgggaacaattgccatgcaat

SEQ ID NO: 10001 - DNA, 501 bp, Glycine max
  Coding DNA Sequence Number=SeqID_222
tatactctgctctgaaggatattctgtgtgcctatatatacacctctcttccgacatcatatccaaagtctttgacgactgggcgccctacatccgtgataccgacggtgtgcatcttggggcctctaagatttttatctatatgctatactccagagaagcacatatacatttggctctgtgcgagcgcacatggacgacatacatgttggttatgctatataagatacgtgacgcctcacatgctctatatcgattctagagtatgacgccatagatatacactctgagagatatgttgcctgtctctatttgacagcgtgtataatggtattcaagtcgcgtgttcgcgccggggagtgaacttacactgctatgctgtcatctcatgttgcatagttgcttgtgttctattcggcacgatccgtggcgctctatactatagtatggaggtgagggggggggagcgtgggcattgagcgttaggcctgatccttcgaa

SEQ ID NO: 10002 - DNA, 498 bp, Glycine max
  misc_feature (26)..(26): n is a, c, g, or t
  misc_feature (51)..(51): n is a, c, g, or t
  misc_feature (157)..(157): n is a, c, g, or t
  misc_feature (191)..(191): n is a, c, g, or t
  misc_feature (255)..(255): n is a, c, g, or t
  misc_feature (265)..(265): n is a, c, g, or t
  misc_feature (335)..(335): n is a, c, g, or t
  misc_feature (433)..(433): n is a, c, g, or t
  Coding DNA Sequence Number=SeqID_223
tgtcatatcactatccactccatacntgcgctaacaccaccattttctttnggctacccatcacatctcgactatcgtgtgaggtatcgccgtctacatactatatatatccccacacagcttctttgtaatgttaccagcagaaagaaatctcctnacacagactattcacacgacagatagacttggtngggaggcgagagtggaggtgtgtaggtgggttgtgctagtgatactcgtcagccatctctgttntcatttacancacgctagagtatcacgtatccacgcactagcgtcaattatacacctccctcactctcatgatatgatanttatagtatactcacagcaacgccatctccatatgtgccagaagtgtagtctacacacacatcacgctctatcggtatagtgccgcgcgcgtggtcgnccacggcatcactatatcaccactgctagtaatgggtgaggggcggtctttatctccgatattta

SEQ ID NO: 10003 - DNA, 585 bp, Glycine max
  Coding DNA Sequence Number=SeqID_224
aagctaagctctgctcagctttgttggaaactcgcctcgacacacccacaatggcggcttcagtagcttgctccttcttctttgacgcggagctgctcggtgagccaggcatgcccgcgctggacgcgtgcgcgctctgcgccaagccgctggcgcgcgacagcgacatctacatgtacaagggggacacgcccttctgcagcgaagagtgccgggacgagcagatgcagctcgacgccatctccgccaggcaggctgcccggaggcagcagcggttctcgtcgggaacggaggcccggcgcgggcaccatgagtccaggaaggtgtccgtcgcgagctagccggttaggctcctcgcctagtaaagtagagcccggcttgaatcaatgggatcttaagaatcaccgatctggtgagacgaaagaggcagatctctccggtttgtctcgcctgaaccggagaagcaatgaaggatctgagaaaagttcatgtgctgaggctccggccatctgggtcgcccgcggacgcatgtttgtttgaggcttttgagccgcgcttggtgcagcaccatatgtaaatctaaac

SEQ ID NO: 10004 - DNA, 405 bp, Glycine max
  Coding DNA Sequence Number=SeqID_225
gaaggttacagatctcttctcctcctcctctgtctcctcctctccttattcaattttgctcagacatgggctggtcgaaccccaacccttgcgaatgagacaccctccaatgcgacaggagcagctgcgtcacgaggatccagctcagacagaaagggatccgcaacactctccctcaggatctccataaactctccgagcttgtcatcctcgagactcacgtcagacggtcggagaagacagagcagcaggagaagacagagcagcggggtcggagccgagctcgtcgttctcgagactcacgtcagacgttagagaagacagagcagcggcatcggagaagacagagcagcgcggtcggagccgagctcgtcgtcctcgagacttatcagacgtcggagtaga

SEQ ID NO: 10005 - DNA, 599 bp, Glycine max
  misc_feature (40)..(40): n is a, c, g, or t
  misc_feature (73)..(73): n is a, c, g, or t
  misc_feature (91)..(91): n is a, c, g, or t
  misc_feature (338)..(338): n is a, c, g, or t
  misc_feature (371)..(371): n is a, c, g, or t
  misc_feature (373)..(373): n is a, c, g, or t
  misc_feature (458)..(458): n is a, c, g, or t
  misc_feature (491)..(491): n is a, c, g, or t
  misc_feature (527)..(527): n is a, c, g, or t
  Coding DNA Sequence Number=SeqID_226
gtgcgaggcacactatgtccttgtcagatctcacctatanacatgccgcaccctcacgacacgtgccacagcncgatagtgtgacgaaatntaagtctgcgctcggcgtctcgtcgtgctgtgacaacacggtgtgcgctgacagctcaccatcgacgcatcacgtcatagactatacatactctcactgccacgtagcattattcatcatacatcgtcagtcgtgagatgaacgtggacgcagtgtaatatatcactacgtcctacgcgctctgtagtgcggcgcgtgtaagcagacacaagtagaggcagttcgtgtgtcatgcgcactgcttgcngcacgggagagtatgtgtctgagcgcaccttgnanagacagcgtagcactcgaagtggtggcggagagtatacacatagtccactacgtcctcgtcactatcattcctactcccatgtgncggagtgagacatcggtgcagcccggcatacgncagcgcccaccacacactcctactacacgccctctnatagctagagcacgaaccgagagaacagtcgaatgcagagagagtataagagtgctgctagtcacaatatga

SEQ ID NO: 10006 - DNA, 559 bp, Glycine max
  Coding DNA Sequence Number=SeqID_227
gatcgcgcaacaccgtcgaaagagatcgtttccgcgctgcccgcgccgcgcgaaggcagcaacaccacgcactattccgtcgtcgacagcagcggcaatgccgtcagcaatacctatacgttgaacttcagctacggcgtcggcctcgtcgccgacggcaccggcgtgctgctcaacaacgagctcgatgatttcaccgccgccgtcggtgcctccaatgcctatggccttgtcggctacgaacccaacctgcccgggcctgggaagcggccgctgtcttcgatgtcaccgaccatcgtgctgaaggacggcaggccagtgctggtgactggctcgcccggcggcagccgcatcatctcgaccgtgctccaggtgatcgtgaacgtgctcgactacaagatggatgtggcggccgccgtcgccgcgccgcggctgcatcatcagtggcttccggatgaggtgcgcgtcgagcgcggttttcccgacgacgtgctgtttgagctcaaggcgatggaccatctcatcgtcgaaccgatgggacagacgtcggccaattcga

SEQ ID NO: 10007 - DNA, 532 bp, Glycine max
  misc_feature (290)..(290): n is a, c, g, or t
  misc_feature (333)..(333): n is a, c, g, or t
  Coding DNA Sequence Number=SeqID_228
tgtagtgctgtaccaacgcagactaggcgggtacttcgcatgcgagcgctccaccgatgctagcatacactagcactgactacgccgcgaccgcgagcttacactcgtttaatatactaacataacatatcgctcctgctgtccacgtgtcatatcacaggtacatctcgcatcgcgcgccgtctgagtagactctgccacatgcgcgctgcacaggtgtatcgtcgactctacataccaacacgcactatcgcccgagcagtcgcgcagctacacgccagcgctacgtncactacgccgcaatgtgtcttctatcatcatgcacgtcgtctnccgagccacctatgatcgttggtacggagccgcatatctactagtcacacgtgcctagctctatcgatctgcgtgtgtatcggacataggagtcactctgtgtcaggtgcagtcaatgtactcgacgcaaagtcgcagcgacagtatagtagtgatgagtccgctagtacgagcagacgcgctcgactatctgacgaca

SEQ ID NO: 10008 - DNA, 166 bp, Glycine max
  Coding DNA Sequence Number=SeqID_229
tcaaaaaaaattcgccttgcccagcttttcccattcggaagaggaaaaaaaaggggggccgcccccacaattgcccaaaaccaaaaacgcttttttccaaatgggttacaaaacaaaaggccccccaaatcatgcttttcaaccgaggtggaacccaccagcaggg

SEQ ID NO: 10009 - DNA, 427 bp, Glycine max
  Coding DNA Sequence Number=SeqID_230
agatgaacccttactgctctttcgttgtcggcagcaagagaatcaacagccaaatctgcaagaagggtggtaaacatccccactggaatgatgctgtcactgtccctcttgccaacgaatctaagattatggttgaagttatggacaaggataagcttagcaaggatgaccacattggctcattcgtcattgatcttcaacaaattgaaactcaaggccaatccagcagatggtatcccttatactacaagaacaagcctgcaggtgaaatcttgcttgaagcctccttccaaggccaatctggactctctggatctggcttgggacaaactggcttaactggaactcactccactggtttggccggtgcgggtatgccggactggtttgctggagtaatcaactggctcgctgacaagaaacactt

SEQ ID NO: 10010 - DNA, 553 bp, Glycine max
  misc_feature (126)..(126): n is a, c, g, or t
  misc_feature (368)..(368): n is a, c, g, or t
  misc_feature (503)..(503): n is a, c, g, or t
  misc_feature (509)..(509): n is a, c, g, or t
  misc_feature (520)..(520): n is a, c, g, or t
  Coding DNA Sequence Number=SeqID_231
atgccactcggttttatgaacggcgcccactgtatattaccaccatctctccaactatgtatatatatatagcgcatataaattatttatgcaccagactactaatttgttatatagcagagtgantgagcggcagtgtatttatatgaggcgcgagtacacccaaaataagaagtcacggaagtaataaaagagagacagaagaggagggaggtatactagccgcgagggggtgggtgggcgcgcgctggtgagggtgtgtgttgtctcctctatatccaatcgtaatcccccctcattatttaatgtggtcctgtatataaacctcagagacaatatgtatataagtatataccaggataagatgntaataagcagagtttaaataccccggtataggctattattacacacgttgtttttgtatgccctgtgatggtttagagaagtggggtccgtctgggaggtgtctagggtgattggatatggtcaacagagggacnaaaatnatatatatacntctctgagtatgcgccggaatagaggatggtct

SEQ ID NO: 10011 - DNA, 572 bp, Glycine max
  misc_feature (26)..(26): n is a, c, g, or t
  misc_feature (48)..(48): n is a, c, g, or t
  misc_feature (52)..(52): n is a, c, g, or t
  misc_feature (65)..(65): n is a, c, g, or t
  misc_feature (77)..(77): n is a, c, g, or t
  misc_feature (115)..(115): n is a, c, g, or t
  misc_feature (262)..(262): n is a, c, g, or t
  misc_feature (284)..(284): n is a, c, g, or t
  misc_feature (288)..(288): n is a, c, g, or t
  misc_feature (355)..(355): n is a, c, g, or t
  misc_feature (431)..(431): n is a, c, g, or t
  misc_feature (460)..(460): n is a, c, g, or t
  misc_feature (537)..(537): n is a, c, g, or t
  Coding DNA Sequence Number=SeqID_232
acatgagcgccgtgaatgagagatgngagaaggtcgatgatgcgcacngacnacgcgtctcgcanacagcgatacancgcgccgccgcaggctatccaacgaagagacgcacagngcggcgccagcaccgcacgcgcgcagcgcgcgcacgcgcgctctagccacggacgggactgccagcggcgcagcagcgcagacgagtacgcagtcacgaggcgcgtatatccactgcagctgcgaacgacagagaaatcggcagganacgcgcgagacagccggcgcgngcangcgacacgaagcgtgcgcgcgcacgagacactcacacacagcgcatagtggatccattcagagcacnacgcaccgcgtgcagacaaccagcacagccgagatgtagcgaggagacgcatatatcataccaacccgagcgcggnacgacgcgcgatcacgcggatcgcagccncgaggacgcgctgagcgcgcctctgcacactccgcgattgaatcacgaacgatctgacaacacgacgcctcagctangcgcagacgcgtcgcacttgtatacgcaacgcgca

SEQ ID NO: 10012 - DNA, 526 bp, Glycine max
  Coding DNA Sequence Number=SeqID_233
gcaagagccgaagcgtccgtgccttgcagttgcaggcggccgcaatggtggtgcaggtggggccggcggcagtgatgcgggtgacgacgacagccacggcgatgcgggtggggacggcggtgatgcgggtgggggcggcggcgttggccatgccgccgacgaccccccccccgcccccccccccccccccccccccgtcccccgcgcccccccctcccccctcctgccctcccggcgctccgggcccttgtcccctctctactatttcttatcctcttgcctccccgcatctctccgcgacccccctgcgaccctcccgatccgctcccccttctcatctagactctccctattcctccactcctctcctcccttcttcccctcccatctctctttcctccccgttgcattccccccccggtactcctctcagacgcctcctaccccctttcatccgccggtggcgatctcccccgaccgggcgctggtctcattcacgcttatggttcctgtctttcactctcat

SEQ ID NO: 10013 - DNA, 576 bp, Glycine max
  misc_feature (87)..(87): n is a, c, g, or t
  misc_feature (238)..(238): n is a, c, g, or t
  misc_feature (274)..(274): n is a, c, g, or t
  misc_feature (286)..(286): n is a, c, g, or t
  misc_feature (298)..(298): n is a, c, g, or t
  misc_feature (320)..(320): n is a, c, g, or t
  misc_feature (355)..(355): n is a, c, g, or t
  misc_feature (414)..(414): n is a, c, g, or t
  misc_feature (424)..(424): n is a, c, g, or t
  misc_feature (470)..(470): n is a, c, g, or t
  misc_feature (488)..(488): n is a, c, g, or t
  misc_feature (498)..(498): n is a, c, g, or t
  misc_feature (501)..(501): n is a, c, g, or t
  misc_feature (537)..(537): n is a, c, g, or t
  misc_feature (549)..(549): n is a, c, g, or t
  Coding DNA Sequence Number=SeqID_234
aagtgttgtgtgatctatctccccggcgccaacactactccgcctatacacgtcttagtatactggtatctgcgtgtgtgcagctgnagcgcactctcgcgagtatgcgacggctgctgctcacactgctagcgcgtatcacatcgccgcacgtgcgcatcacgcttgcggctcatacaacattctctcatatcatgcctatcgtatctctactctgcgctttgactctcgtgcactntacatgcagacgctctgtgactctatcactcgactngctccgtggtcntctcgttcctgntacgatctgctactcatgattncatgactaccagtacagccatgctggccacatgcnacgacgtattcatcgtgcgcgtgtaccgcgctgaccatgtcgacgacacactcactgcncgacacgacngacacacaccagcgcgtgcgcggtactacaacttgtacgctgacantgagcgcgcgatgttgangaatgcgaanctnatagcatactacactcatgtactgtgtgcatgtgtnaatcacatcaantaaagatgacggcgacaacacactgac

SEQ ID NO: 10014 - DNA, 317 bp, Glycine max
  Coding DNA Sequence Number=SeqID_235
aatagaacgatgacaagtgccaagaattagaaagcaacagggatgacactgatttaccacaacacagaaacacccaattgagcaatcagacaaacaatcatcaatccttacagtaacacatcaaaactttccaaataagtacccttttggaattgtgtgcacagtccaaatctcaattagacaattacaaaccaaaacaaaagaaacagccccatgaaactatctttttctgaaattcacccagtagggaaaaaaacaacaactagttcccagaagaattaaaaaaaaaaaaaaattctttcacaagtttgccaaag

SEQ ID NO: 10015 - DNA, 282 bp, Glycine max
  Coding DNA Sequence Number=SeqID_236
gggcagccagaggaagagctttttttatgaagactgcaatccacggattattcacagggatatcaagtcagcaaatattcttttacactacaactgtgaagctcgaatctcggattttgggctagccaaattagcaggtgaggctaatacacatgtaaccacacgagtggggggaacttacggatatgttgcgccggaatatgtatcaagggggaaattcactgagaagtcagatgcgaactcgttgggagacatgcttttggagcccattacaggaaggaa

SEQ ID NO: 10016 - DNA, 579 bp, Glycine max
  misc_feature (49)..(49): n is a, c, g, or t
  misc_feature (54)..(54): n is a, c, g, or t
  misc_feature (78)..(78): n is a, c, g, or t
  misc_feature (84)..(84): n is a, c, g, or t
  misc_feature (152)..(152): n is a, c, g, or t
  misc_feature (161)..(161): n is a, c, g, or t
  misc_feature (180)..(180): n is a, c, g, or t
  misc_feature (182)..(182): n is a, c, g, or t
  misc_feature (240)..(240): n is a, c, g, or t
  misc_feature (249)..(249): n is a, c, g, or t
  misc_feature (252)..(253): n is a, c, g, or t
  misc_feature (264)..(264): n is a, c, g, or t
  misc_feature (268)..(268): n is a, c, g, or t
  misc_feature (306)..(306): n is a, c, g, or t
  misc_feature (313)..(313): n is a, c, g, or t
  misc_feature (316)..(316): n is a, c, g, or t
  misc_feature (344)..(344): n is a, c, g, or t
  misc_feature (362)..(362): n is a, c, g, or t
  misc_feature (390)..(390): n is a, c, g, or t
  misc_feature (393)..(393): n is a, c, g, or t
  misc_feature (414)..(414): n is a, c, g, or t
  misc_feature (430)..(430): n is a, c, g, or t
  misc_feature (436)..(436): n is a, c, g, or t
  misc_feature (448)..(449): n is a, c, g, or t
  misc_feature (458)..(458): n is a, c, g, or t
  misc_feature (461)..(461): n is a, c, g, or t
  misc_feature (464)..(464): n is a, c, g, or t
  misc_feature (475)..(475): n is a, c, g, or t
  misc_feature (491)..(491): n is a, c, g, or t
  misc_feature (495)..(495): n is a, c, g, or t
  misc_feature (542)..(542): n is a, c, g, or t
  misc_feature (544)..(544): n is a, c, g, or t
  misc_feature (546)..(547): n is a, c, g, or t
  Coding DNA Sequence Number=SeqID_237
acccgcgctaatgaactactactatgactgcacactgactgctgtgtcnaccanccattgctatagattaattacgtnattaanagcactgcgagcatagtatctgtcatgatctgtaccgtcgaggttgatgtgatgatcgtagatagcancaggtcacnactacgacgcaccggacancngtcgtctgtcgtaccgctgatacgtatgtgcagcatcgagcgtaatgagcaagtcatnactccctgnacnncgcgtgtgacnacgncggaccctgtagcctagacttctcgacagagtgcgatnacgtcantgnctcagctcatatagtgaaactacatcancacgcagcacgaagcgantcagtgatgcacgtcgattgtatgactnttnctactatgaatgatcagcgcntctatacggatggcgntatccntagatagtgttnntcgcacacnagntgngtctaccatancatcacgatgatgatnacanctgtgtccgtcgctgctagctgcgtactactagtgactacccggtgntncnncacgatgatcgacgctcagatatgtagtctct

SEQ ID NO: 10017 - DNA, 524 bp, Glycine max
  misc_feature (38)..(38): n is a, c, g, or t
  misc_feature (123)..(123): n is a, c, g, or t
  misc_feature (145)..(145): n is a, c, g, or t
  misc_feature (250)..(250): n is a, c, g, or t
  misc_feature (261)..(261): n is a, c, g, or t
  misc_feature (361)..(361): n is a, c, g, or t
  misc_feature (393)..(393): n is a, c, g, or t
  misc_feature (405)..(405): n is a, c, g, or t
  misc_feature (425)..(425): n is a, c, g, or t
  misc_feature (432)..(432): n is a, c, g, or t
  Coding DNA Sequence Number=SeqID_238
agcttcggtcgtagagagtaatgatatagcatctaaancacataatacatagcggcgtagaacgactcaggcacagatgctgagcgtgcacgtgtgtgcgcggtctaatactaaatatatatntgataaagaaattagcgctgcngcggtgttctgtgtgtggtgagctagtgtgcggaatataatcatgtgagatgcagtggagatatgtagcatcaatatatttgttgctgtcccgcgccccctgctngctgtgtattnttacacgcactcactcgtacgcacagcgatacgtgtacgctcatcgtctcgctgatccgattgtggttcagttagtagatcctacctcgtacaatcttcnttcactggcctagtgacgtcggcatacttctntatataaaaacntatctctcctgcgtcggcgnacgacgnagcgcgcggcgctctcagctgtttgtatcactatgatatgtatagtagacagtgtatattgtcagttgtttctgtgtcataatatctcgatc

SEQ ID NO: 10018 - DNA, 536 bp, Glycine max
  misc_feature (36)..(36): n is a, c, g, or t
  misc_feature (38)..(38): n is a, c, g, or t
  misc_feature (174)..(174): n is a, c, g, or t
  misc_feature (237)..(237): n is a, c, g, or t
  misc_feature (436)..(436): n is a, c, g, or t
  Coding DNA Sequence Number=SeqID_239
agaagtctctcaactcccatcattccagtcagcctngngcctcaaaaacactaaagagagagttcctgactctcaaaaacagctccaaaatgctttagagactcttcaaagaagaatgctcttagagcagcaagcatacatcatcagggacattgttaaaagagcccaattctntcaagacatccttagaatccccacacttaactcgaatgacgaagttgagtctccccgacctgntaatttttctcaccaagagctcagaaaggcatttatcagaggtgaagatgacccagagatcatcattggagaaattgaataccctctcctttcaatggctccaccctcaactaaacttgatttgaactcaaagagatcaacaagcaaagccaacgagtccaagaaaaccaaaagatcctatgccaagaattctgtcctntcatctcctgattcggacagcagcgagtctctcctcgattctttaactgtcacaagggctgaaacccaaagatccgagaccgaagttgcatattccatga

SEQ ID NO: 10019 - DNA, 367 bp, Glycine max
  misc_feature (47)..(47): n is a, c, g, or t
  Coding DNA Sequence Number=SeqID_240
cggcagcgggcgaagcaagcgtggtgcagggagctctcggcagcggncgaaggaagcggctcgtcggccgattcgctccggcacgccgcgggcgaaggaatcggctggaggaggggcagcgagcggtggtcagccgcggcagtcgactggcgtgcggctggaggagggatttggccgcagcggcgcattaggcggcggtgccgtgcagccgtgctggccagggcaggctgcagcagtgcgtcaacggaaggcaattacagaacactggtcacttaatcacttgctttccgccactgatcagtgtttatcaatgaatctcctgattaattgttacactcatcggttacttgattgcttcacatttgtg

SEQ ID NO: 10020 - DNA, 377 bp, Glycine max
  Coding DNA Sequence Number=SeqID_241
atatgtggcttcattgcctgttcttgaaggtgcagagtaccttgtcatagttggaccaatctttctcactttgctgcttttcttcgttagcggcataccattactcgaggaatcggcagacaaaaagtacggtaacttgggagcttatagacactataagaagacaaccagtcccctgattctgttaccgcgaggagtgtacgggtacttaccaaagtggtgcaaaacagtctttctctttgagtttccattgtacagcaagaatctccctcaagaaactacagtctgaggaaactcaaaaaagaagcattgactgagagagatgaagagatgattacagtctttagccacatgtcctgtgttctctcatgatcaaa

SEQ ID NO: 10021 - DNA, 539 bp, Glycine max
  misc_feature (42)..(42): n is a, c, g, or t
  misc_feature (118)..(118): n is a, c, g, or t
  misc_feature (203)..(203): n is a, c, g, or t
  misc_feature (270)..(270): n is a, c, g, or t
  misc_feature (423)..(423): n is a, c, g, or t
  misc_feature (505)..(505): n is a, c, g, or t
  Coding DNA Sequence Number=SeqID_242
ttgcaggtccgacattattccttatcacgcgtacacacatcnatcttatacgctacatatacatgaccaagactatggaagtccgatcagtcgtagctattcgagagcgtgtacatantagtgtctggttcaggtcgcgtagacaggactagcagagagatcgacatctacagacacgagcgcagtggagattggagagaggnagcaactgcgctacagcgtgacagctagcgcgagcgtcgacgacgacgagctacctcgtacgtgacntgcgcgaagcacaatagcgtgcttactagcatgactatgtatatatacataatatgatggagagctcatgtagtcagagcagatggatgagggtagtgcacaagtagagtcaggtgtgtgagatgcatagtgcgagaatatacatactgagtnagttgtctaagtaatatatactattctgatcattctcttctcacatatatatatacacacagagatatgagtcgtcatcganctacaacaaatacagcacgctatatctatatatg

SEQ ID NO: 10022 - DNA, 348 bp, Glycine max
  misc_feature (278)..(278): n is a, c, g, or t
  Coding DNA Sequence Number=SeqID_243
caggctcgccctcagaatgatatatatatatatatatattgtctcaaaggattttgagccacataaatgaacattgaataatttttttatatccatatatcaaggcaacaacataaccatttcaatgattttcagaacatcgatacatccttgcatttctcatggtggtagtwtgttaacctgtgacctcattcattgaagcaggscaagcaacatatagcatagtagtcgtcattgtaagtggaatcaattttaaggaagaaaaatagatattattnggaactcatgacaatttttctgcmacttctatgttacttagtgctggcgtgtatcattgttcatgaattc

SEQ ID NO: 10023 - DNA, 560 bp, Glycine max
  misc_feature (50)..(50): n is a, c, g, or t
  misc_feature (52)..(52): n is a, c, g, or t
  misc_feature (94)..(94): n is a, c, g, or t
  misc_feature (152)..(152): n is a, c, g, or t
  misc_feature (170)..(170): n is a, c, g, or t
  misc_feature (238)..(238): n is a, c, g, or t
  misc_feature (243)..(243): n is a, c, g, or t
  misc_feature (247)..(247): n is a, c, g, or t
  misc_feature (300)..(300): n is a, c, g, or t
  misc_feature (344)..(344): n is a, c, g, or t
  misc_feature (347)..(347): n is a, c, g, or t
  misc_feature (349)..(349): n is a, c, g, or t
  misc_feature (359)..(359): n is a, c, g, or t
  misc_feature (372)..(372): n is a, c, g, or t
  misc_feature (422)..(422): n is a, c, g, or t
  misc_feature (434)..(434): n is a, c, g, or t
  misc_feature (477)..(477): n is a, c, g, or t
  misc_feature (483)..(483): n is a, c, g, or t
  misc_feature (521)..(521): n is a, c, g, or t
  misc_feature (526)..(526): n is a, c, g, or t
  misc_feature (535)..(535): n is a, c, g, or t
  Coding DNA Sequence Number=SeqID_244
gctctccctcactatagtgagacatgataacgcgagatcgctcatctcgnantcgcaacgtataaactctctcctccctcggacgcacgcagancaccccgcgtgcgtgtgataacgatactcaacaccctacacagcgcccttcgacttanagcgacacgcatcggcgntatataggacactcaagcatctgcgcactgtccgtgtgcgcccgacagcaatatgagactacgcgttnatctnctcnacgcgactctatcattacgattctgacacatgagtctccgagcgagcagttantacgtaatatatcgcgccccctgacgcgctcgtttggatgcgcnagncnatcacatgtnctgcctcgcgatncccacactgtctaagataatgatcggcgcgtcgtacaccctcgtgcgcgncgactgaccaancaaacgatctactgatcgacacgaccacgacgccactctatcncgcgancatgtctctacgcctcacacgcagcgacacgactactncttantcgaatcancgagtcgcagagacaatacgagata

SEQ ID NO: 10024 - DNA, 530 bp, Glycine max
  misc_feature (166)..(166): n is a, c, g, or t
  misc_feature (223)..(223): n is a, c, g, or t
  misc_feature (384)..(384): n is a, c, g, or t
  Coding DNA Sequence Number=SeqID_245
tacacgttcactaatactcacctacatatctcacactacgacatctcagagatgaatatatatgactctagtgctagatcataaacaacatcactataattatattcattacaagatatcagtgtatactgtatattattcatatgagtgtgtctattcatctcgntatcgtcgatgtggttgcgatgtgggggtgactggcgcgttcggtgagatagcgatnggggcgtgtagaataagtatggagacgagcacacgcacccacacaactgcgtcagcgtgacgcacgcgcgcggcgtctgctatgtcgcgctcgtcgcgcgcgcccgacgagccacgcggcggagcgtcatccacgctgcaaaaacgagcgcgcggggcgangccgagagaagagcgtgcgtacaagtcacagcagagttgtaatcgcgatcgtagtggactgcgttttggagagtataggtcgacgtcctgtgtcttcgatgtcacgctcgcattgtcgatgttcgcgtgacgattaatgtgtatat

SEQ ID NO: 10025 - DNA, 559 bp, Glycine max
  misc_feature (45)..(45): n is a, c, g, or t
  misc_feature (55)..(55): n is a, c, g, or t
  misc_feature (94)..(94): n is a, c, g, or t
  misc_feature (241)..(241): n is a, c, g, or t
  misc_feature (260)..(260): n is a, c, g, or t
  misc_feature (383)..(383): n is a, c, g, or t
  misc_feature (420)..(420): n is a, c, g, or t
  misc_feature (453)..(453): n is a, c, g, or t
  Coding DNA Sequence Number=SeqID_246
ccacgcgcacagtaaacggcagaatcgacaatacggcggcagagnagccgcatcnacgtctgcgacctcactatctgatatagcccgaaatganatagaagacagcgtatgacgcacgaccatatagaaggaattaacacgtccgacaagaataaatacataagattacaccacacacaccctcgcgacacatctatcatcttgaagacctctatagtgtacgtgagacacagccagagcngcactagtagcactcaaancactgaatgacggacgctcgaactaccgacccacgaatctcactgccacgccacactagctcgcagcagatacacagcagtaatatagcataacatcgaacgactagagagtcagttctgcangcactcgctctagtctccacgcttacacggctgtcancatacgacgaacacacgagtgctgactcgccgntcgatatacagcctgtgacggctcgctctacgcgatatacagcgcgcgtcacgcgctaatgatacaacgctatccgcgacagatcgtcgacaccacagactcagag

SEQ ID NO: 10026 - DNA, 241 bp, Glycine max
  Coding DNA Sequence Number=SeqID_247
ctcagtcagacgtcacagccacagagaacaagcgagaaaccactctgcactgcacgcacgcacgcccacacacacacagaggaagaggaagagagagagggggggatcgacatccgtgtgattcatccttcctcatgaggccgatcagagaaggcgaggcgctggtgggagtcgccggggctccggcagcggcggccggccacggcgcgcacccggggctgtggaggacgcccacgccgta

SEQ ID NO: 10027 - DNA, 405 bp, Glycine max
  Coding DNA Sequence Number=SeqID_248
tcgggggttgggcacctcaaatattaatattatctcaccctgctattggagggtttataacacagtggttggaactctacctttgaagcaatatgtgctggggtgccaatgcttacgtggccactatttgcggatcagtttttgaatgacaatccattttggtgctaaagcaagaaacagagaagcttgagaaggtgtgattctctaagtgaagttttatattctttctgtgagttagagtgctttaggcaggaaaaaagttgtttgagctctcattgtggtttcggcacaaacgtaaacgccttttgcctaatatgtatatttttattgtcatatttgcttcctctgcatgtaaacccaagagtagcaccaccaccaccaccaaagactgataactttttctgt

SEQ ID NO: 10028 - DNA, 550 bp, Glycine max
  misc_feature (436)..(436): n is a, c, g, or t
  misc_feature (514)..(514): n is a, c, g, or t
  Coding DNA Sequence Number=SeqID_249
ttttccgaggtcattatgtgttgctgaatcttcatcaagttttattctttatttttactatgtctgaatctctaaatctctttctccttaaatataaaaccttttatgacctttcacttaacagctgaagcctctgaaaaagttggttctttacatggtttcagagcctcaatgtccatgtggtcatgaatttgatccttaacatctcattcctattctaaattattgttgaatttcacaacgtatactgacctatccatgattcatgcttcaagaccaaagggctcttgcatgaggggtagtgttaaatataaaactattcttgagttttcatctaatagcttaagcttttagaagagttgttgaggctatagggattcaggtagaagtgaaggctggtgtgcaccacaaccatgaagagatggcattgatggantaccagacagcagcccattgccgggtgaaaggtggatattatcatcgtaattcctgatagcagccagtcaacatgcanctccaaatggtggccagatgtccttccttattaaaa

SEQ ID NO: 10029 - DNA, 219 bp, Glycine max
  Coding DNA Sequence Number=SeqID_250
tacagaagcaggaaagggttagaaagtctatcccatctgaagttggaaaatgatgtgggaccggactcatgcaagtgaacccagccaagtctgcattttgcaacaaggggcaaagtgtcgccgaagctattgagggcttgaagaatttccctttactttaagtgggcaagcaacttccctttgctggggtaacttcttgggccaacttggcacaaagct

SEQ ID NO: 10030 - DNA, 570 bp, Glycine max
  misc_feature (33)..(33): n is a, c, g, or t
  misc_feature (45)..(46): n is a, c, g, or t
  misc_feature (71)..(71): n is a, c, g, or t
  Coding DNA Sequence Number=SeqID_251
atctatcttgtaggcagcgtgggctgtcccgtngcacctacaaannccctcggagacaggccagcacgagncgactcccagactacagacgccaacaaatcccaacacgccgcagcgggcttagaagcccccagttgcaacacaaggagaaggctttaccgaggaaagagagagataggattataaacacctagctaattcggccaactcgtagggcgcggcgactactagtagagtacagatcggatttcttgtgtacctgatatagcactcagccacattgtcagtgttagagtatacagctttgagggattatactcgctctctattagtatacaatctctgtcgtttgagtataaggtagggagggttgttcactctgtgcgagtgatagattgtgctgtgtgggcctctgacggatccaaagaagagaatagaggataggagtctacactgtcgcgctgcctggcggggatggcgatcttacctcttcttttattgagagcccgtccctactcttctgtgaggtggtggtctctctttacttcgtgcgatctccgttaccgcaat

SEQ ID NO: 10031 - DNA, 381 bp, Glycine max
  misc_feature (140)..(140): n is a, c, g, or t
  misc_feature (169)..(169): n is a, c, g, or t
  misc_feature (318)..(318): n is a, c, g, or t
  misc_feature (321)..(321): n is a, c, g, or t
  Coding DNA Sequence Number=SeqID_252
gttgctactttgttcggcgttgctcgcacgccgctcttatccttcctgccataataataacttagtcgtaagattgatcgagtaggtgtgtaaagtagatgtggtttatgttgttgtgtatatttattttcgtattattntatgcgtacttcgttatatctttttctcntcgcgatcgtctgttgtgttctgcccgccgtcgagcagcgtatatcatttaagaacttctctctgtcacgtggagcggcgctatgacgaggagacgtagtcattacacatgagctgtaagtattgtagcgtataatagatgatacatcntgnggagctcgcatcgccgcgctccccgcctactctgttgtttcggtgctatcgtccgacctg

SEQ ID NO: 10032 - DNA, 526 bp, Glycine max
  Coding DNA Sequence Number=SeqID_253
gccagacgggtttctctcccgacaaaaagttttttcggccacagaggtttattgaccgacagggggtatctgagttttttgaggtaggagttgggggataaggctccaggggccgcctcctcgaacccgattgttacccaggaccctttccgaatgggcgtttacacccgggcctttcgtttcctttgaagtttatgctaaatagtccgcgttgttcggaccgacctggattttctgtccaggccgattccagctcttccgtgaaggccttattccacggttttccctattcatcggcgtccagatgttgtgggaggttgtccttgtcaaccactattttattcatgttgtactcgtacgtctccagctggttgcgggggtggatccactccgttcaccttctggtcctcctccgcgaactcattcctcctcccggcgccatgcggtcgatctcctcctggctcagcccgtggactagcgcgccgtctgcttcgtgcgggccatcggagctttggtgcttgcgcgc

SEQ ID NO: 10033 - DNA, 497 bp, Glycine max
  misc_feature (39)..(39): n is a, c, g, or t
  misc_feature (88)..(88): n is a, c, g, or t
  misc_feature (122)..(122): n is a, c, g, or t
  misc_feature (141)..(141): n is a, c, g, or t
  misc_feature (167)..(167): n is a, c, g, or t
  misc_feature (206)..(206): n is a, c, g, or t
  misc_feature (214)..(214): n is a, c, g, or t
  misc_feature (219)..(219): n is a, c, g, or t
  misc_feature (233)..(233): n is a, c, g, or t
  misc_feature (258)..(258): n is a, c, g, or t
  misc_feature (359)..(359): n is a, c, g, or t
  misc_feature (403)..(403): n is a, c, g, or t
  misc_feature (417)..(417): n is a, c, g, or t
  misc_feature (419)..(419): n is a, c, g, or t
  misc_feature (421)..(421): n is a, c, g, or t
  misc_feature (428)..(428): n is a, c, g, or t
  misc_feature (434)..(434): n is a, c, g, or t
  misc_feature (438)..(438): n is a, c, g, or t
  misc_feature (447)..(447): n is a, c, g, or t
  misc_feature (450)..(450): n is a, c, g, or t
  Coding DNA Sequence Number=SeqID_254
gtcgcgggccgaaaaattataagagtgacggcgcgggtncggcaacaagaagagagtatgtgtatacagagcggcgcgtaggacgcgngagcggtggagcgagagagtgagagtacacacanatagactgtgctgtagaancaaagcagcgctgagggcggaggcgncgtgcgagcagtgcgacggcgtgatgagaaaatgtgtgngtgcgcgntatgntgagcgcgtcgcangatatgtcgagatactacgaacacnatcgtccatcgcgatacgacgtcggctcagtgtgatagtcgtcgggcgctaatatactcacgacgcagcacggtactatctcattgacacggctcggtgcngcggcgcgtgtgtgaataatatgacaatgatgtacacgcgacgncagcaggcgcgtgncntncgtaganagtagnagtncgcgatagncangatagatgcatactgtacgtctgacagctagtcgaccaccgcataca

SEQ ID NO: 10034 - DNA, 577 bp, Glycine max
  Coding DNA Sequence Number=SeqID_255
cataagacatatccggccattaggtttatggagaatgcatgtggcaaggaaatcagggactatcactacacccacgtagaaaggctggaaaatcaagtcacactcctggagcggtacctggatgaagcaaaaaagagaatcaagaaggtacgcaaaggatggttctatgctgtcagatacatgagctcgtattctactcagatacaaaatacgacagctgctcgtcgcctaagagggcaggacagcaccaaaggggcgatgaaaacagcactcgcaagcacaagaaagttggcaaaaagactacgttgtattggcctgaaatcggagcagtgcctagagactacagatagtatctggtgagctctgttcggcacatcgtacccagtatgtttatgaaccattgcctttgtaatggaaagtaccacctggtatcatgtagctcttctcactttgttttgagcaaggcacagagattatgcttctatgaactagcttgttggcagactgcccttccttactataaattatgcttctatgaaccagcttggtatcagactaccgtcccatgttgtaaatt

SEQ ID NO: 10035 - DNA, 553 bp, Glycine max
  misc_feature (109)..(110): n is a, c, g, or t
  Coding DNA Sequence Number=SeqID_256
agcaaaagccttttggatccctctcttctcttctttgatctccgttacccttttcgttttctcaacacagagagagagagagagtcctttcggagttccttttgccgtnngtgtttgttttttaacacagcgccccccccggggggggggggaacccccaccccccttccgggagagaagaacccccccccccaaaaaaaaaaaaaaataaccccccccccacttgtcttttttttttttttttttataaaaaaagaaaagcgcgcgcggcggaaaaaaaaaaaaaaaaaaaccccgggcgcgttggtgaaccaaataggaaagagaggacggacccccccccccccccccacacacccaaaccttttctttctccccaccccccccccacgagcggggtggttgttttttttgtttttaaacaaaaaaaaaaaaaaaaaacacacccttccttctttccgtgtgcggcgcgggcgcgagtgtaaccaacacttataagattgatcccaaatataatgtgtcgaccaatatgctatctctcggtcctcttacc

SEQ ID NO: 10036 - DNA, 240 bp, Glycine max
  Coding DNA Sequence Number=SeqID_257
gggtgggaaaagtccaactcagatgaagacaaaagacctatcgggcacaacacacgaaatcacaccagcaagacactggacgaccacaagaaagacaccgctcaaacccacccttcccagctctggtggccggcccagccggagatggtggagggggcagcagctgctggggccgacgacgccggctaggtggcccctccgcgacgcctaggaaccgtcgctgccctgcaaaacaatcac

SEQ ID NO: 10037 - DNA, 556 bp, Glycine max
  misc_feature (95)..(95): n is a, c, g, or t
  Coding DNA Sequence Number=SeqID_258
gcgccgcgtctgtattatcatacatagtgtatatacgtgtctctattcctcgggacggcacgaggggcggtgtgccacccagacacgccgcccgngttcaccaatataaaacgcgcagggcagtttactataatagcggcgctcgcgtgatgtacgcgcgttcgcgcaacttatcactcaacaaaatacgggcgacgttcaacggccggcataatattataaattgatgtaagagaatatagctatacacacgtactacgccggcgctgactatcgatctctcaattgattaccttgccccctataaccatcaggcgaagcgcaccacataattcgcttgtaccacctgttgtgtgcgatgcaacagagtgtataggtttcgggtgtggtaggcacccgcatcggtacaccgcattctagtaccacaacaacagtgttcatatgaggtcacacaatacaatataaaataagatgaacataacgagcagaccagtagcggcgattaataaaagagaacagcacacacaccacacgaacagacgatccggcagcgtaa

SEQ ID NO: 10038 - DNA, 544 bp, Glycine max
  Coding DNA Sequence Number=SeqID_259
ttatgctggctaggagatctggttggcgaaaattggtcactttaaagaattaaggcaatacacttgaaagcgtcttcacaccccacaataggggtgcatgagtattgggccgccccttttctatagtcttacaaagtatacttaacaaggtagcattcttttgtcatttactcttttagaagttttagactaactggagtttcggtaggcaagaaatggaaactttaaaacttcaggcagtactaaggaagactatatcatagtaacaatttaagaggtgagggacatacctgagaaatgaaagcatagtgtttacagctgtttaaccttgtaaagagaatatttattttaaagagagttgaaccaaatcctgtgtattaattttacttccaattatattttttgtttttttaatgaagactgtttacatattcaggtttgcctcagcatattgacagcatgtggggtgtcaaaaattctcatttgtaagagttgttttggaaaaaaaaagatgtggttaagtgggcttgggatctgccgtggg

SEQ ID NO: 10039 - DNA, 437 bp, Glycine max
  misc_feature (57)..(57): n is a, c, g, or t
  misc_feature (92)..(92): n is a, c, g, or t
  misc_feature (160)..(160): n is a, c, g, or t
  misc_feature (164)..(164): n is a, c, g, or t
  misc_feature (211)..(211): n is a, c, g, or t
  misc_feature (322)..(322): n is a, c, g, or t
  misc_feature (398)..(398): n is a, c, g, or t
  Coding DNA Sequence Number=SeqID_260
cttccacgcggcgagtgtgaggctagatacacatgcctcgcttcgtacgcgctcgtntacgatacactaccgcatctcacgctctttaatgncatatatgtgatgaggaagacagagatctgtatactatacactctacgctgcatcatacggcgtaacntgcngcacacttcgagacactaacagtcacgtcatgcttcacatgctcctntaactcatgacgcgctagtcgacgacgacgcttccatgcagccaagcaacgacgagcgatcgacgtcatacgcaaccctcgagagagatgcggcagcacattggggacgtncatagaataatctgtagagcgtacgactcatcggccagacagtccgctgcgtagtgtgatagatgtagtgtgtcgnagcgatgatgatttaacgtcaccagtcatacacagatag

SEQ ID NO: 10040 - DNA, 548 bp, Glycine max
  misc_feature (243)..(243): n is a, c, g, or t
  Coding DNA Sequence Number=SeqID_261
ggtatttcccctgcacacattcaatcaaccacccccccctccccaaccaaatttatacctggtgttaggccccccaaaaccggcacagaacaaaacgcccctcctgatcctttattcccggcaccaatttcagaacccccagagccacgtttaaacccccttatccacgcattcattccaggagaaagaggtgcccccgcctcctcctccccctgatatgagtccgattcgatcggaggtccngccgcccccgtcgaggactcgaatccgacctttcgttccctcccaggtcctcttgatgacccccccctcgcggccgatgatgctcccgcccttgagcaccggcacgattaggcggcccccccagtggccaggccaccccggccaccgcttctcggcggcggcggggtctggggtggggtcttcgccgggggtggagcacggttcggcggctggattgtccgaagagaccccgttttggattgggtcgagggtgcccatagatagggtttatggtggctctcgttagcttcaggtttactccgaag

SEQ ID NO: 10041 - DNA, 557 bp, Glycine max
  misc_feature (63)..(63): n is a, c, g, or t
  misc_feature (135)..(135): n is a, c, g, or t
  misc_feature (393)..(393): n is a, c, g, or t
  Coding DNA Sequence Number=SeqID_262
gaaacgtagccgtggcgtcctgtcgccacacgcgggattaggcatgtccccacgctatttacncagacacatagaaggttagacgcgcgacaagagaaagagcgcagagcggcgacgagttgcgcactcctaatnttcgctttgttcttgtgcttcgtcattcaataagttgcgaacattgagcaccgcccttgagagactcagaccagagttaggtgataggaggaaccattgtcaagcaagaataatagaaaagtcaaagacgagtacgatgctcgctggagcgtactcaggtacttttcgggcgccggggtggtggaggtggcgttgtcctgacaaagagctgttttaaataattcacaacgatttctagttgtttttttgtttaattanacatgagggaggaagacaagaacgagaagacaagaaagaataaatacaagtaaattacctcacacaccacgcggacgatcacacatagtataatagaagccggtccctccctcacaacagagaagacttccatacttttgataacatcatctacaagccctcat

SEQ ID NO: 10042 - DNA, 300 bp, Glycine max
  Coding DNA Sequence Number=SeqID_263
ctctcgcatcgtccgcaaatttgtcctcatgtatgccaaaagggcgttcgttcattggtatgttggtgagggtatggaagagggggagtttttttaggcccgttaagatcttgctgccctggagaaggattaccagaaagttggtgcacaggcaaatatagatggtgatgaaggagaggttatatgtattaggaagtgttgcgcctattcaagtgtaccattgtgaggcgtttttcatttcagtgatgtgtgcattgttgagcattccatggaacttcccttgtttccagagtaactttg

SEQ ID NO: 10043 - DNA, 569 bp, Glycine max
  Coding DNA Sequence Number=SeqID_264
atctaccacaggataccgcatgttcttgggtggaaatttagtaacatggaggagtaagaagcaaaatgtggttgcaagatcaagtgtaaaagcagaattcagagctatggctcaaggtgtttgtgagttgttatggatgaagatcatacttgattacctcaaaataaaatatgaagctcctatgggactggtttgtgataataaatccgccatcaatattgcacccaatccagttcaacatgatcgaacaaagcacatagagattgatcgacatttcattaaggagaaattggacagtggtggttatagctaccaaatacatcccttcaaagcttcagttggctgatatgttcaccaagggacttcccacggagcagcttcaagaccttacttgcaaggtgggaatgatagatgtacattcactagcttgagggggagtgttgtgatacattccataattagcacagattttcttctgtaattagtacagatttgatttttttttttatttgtacagattttgttccattttatttcttttcttaattaggtcgttggcagcttataaa

SEQ ID NO: 10044 - DNA, 133 bp, Glycine max
  misc_feature (90)..(90): n is a, c, g, or t
  Coding DNA Sequence Number=SeqID_265
cgatgacgatgttgagcagccgtgcggcaatttcaggtcaggctcattgagggccttttcaaaattatcaagaatggtattgcgcagatngatcgcctcactgagtgatttcatggaaatggcgtggcggcgc

SEQ ID NO: 10045 - DNA, 502 bp, Glycine max
  misc_feature (62)..(62): n is a, c, g, or t
  misc_feature (64)..(64): n is a, c, g, or t
  misc_feature (115)..(115): n is a, c, g, or t
  misc_feature (150)..(150): n is a, c, g, or t
  misc_feature (206)..(206): n is a, c, g, or t
  misc_feature (250)..(250): n is a, c, g, or t
  misc_feature (254)..(254): n is a, c, g, or t
  misc_feature (256)..(256): n is a, c, g, or t
  misc_feature (263)..(263): n is a, c, g, or t
  misc_feature (282)..(282): n is a, c, g, or t
  misc_feature (311)..(311): n is a, c, g, or t
  misc_feature (334)..(334): n is a, c, g, or t
  misc_feature (360)..(360): n is a, c, g, or t
  misc_feature (364)..(364): n is a, c, g, or t
  misc_feature (379)..(379): n is a, c, g, or t
  misc_feature (393)..(393): n is a, c, g, or t
  misc_feature (401)..(401): n is a, c, g, or t
  misc_feature (461)..(461): n is a, c, g, or t
  misc_feature (466)..(466): n is a, c, g, or t
  misc_feature (472)..(472): n is a, c, g, or t
  Coding DNA Sequence Number=SeqID_266
tacggcccgctatactactcatcattttagatgttgctacgactatgatacatatacacttntnactgttatacatgtataattattcgactgtcagcatggctcatcactactnatcaatcgacagtcgtgtcactagtgtacatgggncgacgcggcgattctcagtatataatcttattcgccgacctcttctactctgctgnttcatatatgacaacactgcacatgtgtgaatgatatgcgatancatngngcagttntactcagtgctatatcgcntcgtatatgtgtcggcatcgactatactncagtagcatgacaggtacagcgntagtagcgtgcacgatagacgaatcngcgnatcgcagcgtacgtngcatatcactatcntgtctcanagtgatatcgttgctaacatatgcgtacgagtgcacgatgtgtatcacgttacgatatcnatganactcantctcagcgatatgctgtatcgatctcccac

SEQ ID NO: 10046 - DNA, 412 bp, Glycine max
  Coding DNA Sequence Number=SeqID_267
ccaccgctcgaagctacggaggagattgattcaacctctctctatctatatcggaaacgtctaacggcggactaatttacgtgtcgacggagctagaagcagcttatcttctccagatctctaaccgattctcaccgcttcctgtttcaccggttgggtgatcaaagcaatggttcttgatgggattgtatcttcaccattgaggagacaccagtctctaaagaaacagtgggaagatttgggtagctgctcaaccgttgttaaccggcatcgatatttattaacagcattgcttctcttgggctttctctgcacggtttatctttactttgctgtcactttagatgctaggcacaactcctcctgctacggcttggctgggaaagagaaggcaatgtgtcaagccatctct

SEQ ID NO: 10047 - DNA, 475 bp, Glycine max
  Coding DNA Sequence Number=SeqID_268
ggtttgaagtgtttcacccacatctccaactagtggggttgtggccacgagacagttttgccagcggtgataggaagaggagaggtacagttagggttttgagaatgatgagtaatctcacagctttagagatccgatgaggcatgaggagaagctgagcttggaaatgtcgaggtcaacggcgaaattgaaggtgtggccaaatttgttgccgttttggtggaagttgcaaccaagtcctttgagatccaatgatgcagtgtccctcgtagagatattgggtggaggcgagggatgaatctcgcgtgagaaagtcgtaatgttgcatgggtcgatggcggtggtttagagggcgcaagtgaaggggaattctgggtttaggttcaaaaggcgatttaggaagtggcaacgggttatttgggtggattttttcttctttttctaaattttgattcttagtctcatgttgcttgaa

SEQ ID NO: 10048 - DNA, 531 bp, Glycine max
  misc_feature (139)..(139): n is a, c, g, or t
  misc_feature (295)..(295): n is a, c, g, or t
  misc_feature (416)..(416): n is a, c, g, or t
  misc_feature (464)..(464): n is a, c, g, or t
  misc_feature (500)..(500): n is a, c, g, or t
  misc_feature (506)..(506): n is a, c, g, or t
  Coding DNA Sequence Number=SeqID_269
atctcatcgcagtcttcgcacctaatcttgtaaaatttaatcatattaaaaatatacgcgctgagcaatcatgatcataaggtaacgcactgactgaaacataccaaggtatacaacatattcctcacccactgtttanattttggatgatcatttacagtatagtgtatactgtgagaaatacggatatatatttaacaagaagaatataaaacatacaatagatcacgtatccaaacacggatggggacgcttgtatccagccaccgcacaacagcgcgagcacacccagccnctctcacggcgcagaagcgatcacacatgctgcgagatacacgacattgtttgatgggagcagcagaagaaatacatggttaaagatgagagaggggcggaaggggaggggctggtggggngtagaaaagggagacgaacaacagagcgagtctccttattgtttctcngtgttggtgtggggggaaggactcacaatagatagnagtctngctcacatttattggttttgttccc

SEQ ID NO: 10049 - DNA, 230 bp, Glycine max
  Coding DNA Sequence Number=SeqID_270
tacactctcacactctaacactcctgccccataaacccacctatatttatttccccccatatcccccacacccccacttaatcttccccacttttttccccccccccccacccattttcaccctttcctcttcccacccctccttctctctttctctcacccaacaccctcctctcccaccctctcttccccgcccccacctcctgacaccttccttgacacaatccccc

SEQ ID NO: 10050 - DNA, 587 bp, Glycine max
  Coding DNA Sequence Number=SeqID_271
aagacatgcgttgattgcggaacattcaaaactcctctctggcgtggtggccctgccggacctaagtcactgtgcaatgcttgtgggatcaagagcaggaagaagaggcaagcggctctcgggatcaaaccagagaagaagatcagaaaaagcaacagctgtgacagtgatctaagcctcgaagatgatggccgtaacgtcaataacaagatcaagaaaggtgatgatcacaaaacttgcagtagcaagagtggtactagtactagtagcagctgcagcaaaagagtgagtaagtttttggatctgggattggaagtgccggtgatgaagagatcagcggttgagaagaagaggctgtggaagaaacgcggcgacgaagaaagagccgccgtgcttctcatggcgctctcttgcggctctgtttatgcgtaaacgatggagatcaagcttctttgtttggtgtcgttcgagaataattaaagtgaggggttctgattaattatttaattaacttaagacaatagagataactgtgtaatagctagtgatgtcgtggttttttttggcttgttcccactgatgttatg

SEQ ID NO: 10051 - DNA, 485 bp, Glycine max
  Coding DNA Sequence Number=SeqID_272
gattgacttggtgatattgtgtgttgatccttgagttgtgaatgttgtgaaaatgaatgagacgtgttgtgttatgatgtgatgttgggtgacaaagtggtgaaatgatgtgaggtatgtttaagtaagttttattttgtttttatgatatttatacctacatgttgtctcgttactcttcattagttaggaatgtgataactcactcccggtgtgctatttgtgtttggatcctgtgatgatcttgaagcttatgttcgtgggagcagatgaataggtggatgattatgaagaacctgatgctagaggacacgggaacacaatgctctgagaggatgtgacattagggtataggttctatattaattgtatgaagttttagacggtcttgttttgagccgaagtgaatttattatttatttggacaatttttattattatgttagaaaggtgaatgtgagccttctaccctcttgaaatgctta

SEQ ID NO: 10052 - DNA, 183 bp, Glycine max
  Coding DNA Sequence Number=SeqID_273
aaggccaatcctttattcacaatggctgaggaacaaactactcaagttgccgaactcggtgaagaacaaaagaacttccaagctcaattcaagcttttcggtaagttcgactactccgaaatcaaggttgaagatgtctgcttcaaggattacatcgccgtcagcaacatcaagtcccaagtc

SEQ ID NO: 10053 - DNA, 208 bp, Glycine max
  Coding DNA Sequence Number=SeqID_274
aagaggagttccagagaccggccaaaaaaaaaaaaatggtataacccccccttaaaagtttttaagagaaaggcttgctaagcccttgtgcaagttaagaggaaggctttgcccaaaccaccaccacccaaatgatgttgggaagatttcgtttatgtctgtccccccaagcagcccaaaaatgccaagcccccatggtttaggaata

SEQ ID NO: 10054 - DNA, 583 bp, Glycine max
  misc_feature (61)..(61): n is a, c, g, or t
  misc_feature (80)..(80): n is a, c, g, or t
  misc_feature (318)..(318): n is a, c, g, or t
  Coding DNA Sequence Number=SeqID_275
atgtgcatatgtgtcgcactatgttagacatgcttgccacccacctcccacacgctgcccncaaccactgtcccacgtcntctcggcgcagaacgtactgcaaactgaatatcgaggtgctagccgtctttcatcgcctgatgttgtcgtcgattgactgctgataattggactgcgcacatcgatccttcctgcccctcgcatgcgttgtgactgtctggagagctggcgcagcgttgatacgcaacactgctgcgtgcgctggcgtcgtgtctggacgtggagcgtaggaggcagctggactacgattgttcactncgactatactgcatgactattgctaggcctcataccgactgcaactgcgcgctcgattctgtcgccctgcacgggcccgttattatgcacgcgggcgtcccgagcgcgcgcggctgtccggatgtcaggcgcgtgcgcgtgtgctgcgtgggagtcgtgtgtgggatctcgacgctggatgagtggcagtctcgcgagcgacgcgtgctgtgagtgcacagtgcctgcgagtgcgagccggcagcatactcgtcgcacgctgtat

SEQ ID NO: 10055 - DNA, 578 bp, Glycine max
  misc_feature (136)..(136): n is a, c, g, or t
  misc_feature (296)..(296): n is a, c, g, or t
  Coding DNA Sequence Number=SeqID_276
acgtgtgtcagctctcgtaacaacacgtcatccgtaacgctgcactcgctagagtactatattagatcgcaccgatgacataaacgccgtacgagtgtgcgcagtccatcgacctgtcacctatcctgatatgaanactcataatgcgcactaccaggtgtgcgctggcaataactaccgtgataccaggcgcacgtgaggctcggcgcaactctctacacttgactgccacttgaatatactcctagctagctcatacaatatcattagctactcgtccgctcgtgtcagagaangcggtagcgacgcatgagtctcatctgctctaagtgttgtacgcatcgttagcagcccacgcgtctgcctcgcatcatgaaacggaccgatcgcagcccacccgtgcgcgcgcgctggcgaaagactgttcgtgacgacacgacagtctagtacgtcgcgcactatcgagtgagcaagtcccgaccgcagagcatagaaatgttaacttcagagcaatctcaataagatctcgatacttaattactcagcacgtagcgactatctatcgatcgcgcaacatc

SEQ ID NO: 10056 - DNA, 311 bp, Glycine max
  Coding DNA Sequence Number=SeqID_277
ataggatctgagagtgctggtgcatgaggcaacaaggcctgtgtaaggaaaacctgaacaagctaccatgaccggacttcctcgcattagtgcagctcggtatgcacagatgagtacagctgatggacggcttgcgactgaatagcagcactgtatctggagctggaactgctaattcgactcttacccacccctcagctccgatggatgccagactttctgacgatgctgcgcagtagcattaatgggactgggatgatgaatagtctatagcttctctctctatgaggagcatgcctacacgatagtgc

SEQ ID NO: 10057 - DNA, 544 bp, Glycine max
  misc_feature (162)..(162): n is a, c, g, or t
  misc_feature (288)..(288): n is a, c, g, or t
  misc_feature (386)..(386): n is a, c, g, or t
  Coding DNA Sequence Number=SeqID_278
gccgcctgatcgataccagaactatatgacaagatacaccacgagcgctcggcgatgtcggcgtgcatcttcggctcgcgagctgctcaacgccgccgcacactacatctcatcattctgatatcagcaaatgtacttgcctaccgttgtaccaagtgcgancgctcatacctatcataaatacgatatccacacccatacatactccaaagaagaacacaagacgatcgtgatgacctctcgctctcaacatgagcatcaccaacacagtccagtcagtctcaatcngtggcattcgatatgatatgttacgaagcactcccgcgctgcataccgtccaccgtgcacacaccgaccttctcgacccgactcatacctctgcacancacaccacctcacttcgctcaaacatctactacacatcctgcgtacaccttcatctctcccagatatgcgtttcagactccccgcaagccgcgtgcgaagtgccaatgcgctcccggcgcgagatataacgacacaacaccacaaatatctctctgct

SEQ ID NO: 10058 - DNA, 526 bp, Glycine max
  Coding DNA Sequence Number=SeqID_279
acgagttccaggtgatcgccgacaccggcgaggacgccatcgtctactgccccaccagcgactacgcagccaacatcgaactggccgaggcgctgtccctgatcgcccagcgcggtgtcgccaccgaggccctggaaaaggtggccacgcccggcaagagcacctgtgccgatgtggccgagctgctgggcctgcccctggactgcaccgtcaaatccctggtgctggccaccgacgagaccaacgacaaggggcgagatcgtcaagagcgccgtgtggctgctgctggtgcgcggcgaccatgacttgaacgaagtcaaggccggcaagatcgagggcctgaaggcgggcttccgcttcgccaccgagaaggaaatcatcgagcacttcggcaccaagcccggctacctgggcccggtcaagctgctcaagcccgtgaaggtggtgggccgatcgcaccgtggccaacatggccgacttcatcggtcggtgccaacgacgaaggcttccacataagggcgtgaac

SEQ ID NO: 10059 - DNA, 564 bp, Glycine max
  Coding DNA Sequence Number=SeqID_280
attactaaacggtgagtctgcctctcatggaaaaaaagagagggaggaggtacacctatactggtagtagaacatcgacatcaaaagagaaaactactattgctgtattattagaygwtaacgatgccwtgtatcaaaacacaaggggaaatcacagcaactgtatgttaagttacctactactccctccattcggaattacttgtctcggaaatggatgtatctagacctaaaatacgtctagatacatctatttctgcgacaagtaattccaaacggagggagtaagctttaggagtggcaaagttgcctgtacttgcattttacatgttctacttctaccaactggtaacagtactagcctaacacaagtttacacaactgagcaaagataaaaagagactaggattagtagtgcggagcaatagttcagtggttacaggacactactagtaaaagaaaaagcgaaacaggcatggaaacactgttccaatgcttgcttgatgagcaccactgaagaaaatattcattcattgccttttgtccgtgcgtttcaagccggca

SEQ ID NO: 10060 - DNA, 531 bp, Glycine max
  misc_feature (36)..(36): n is a, c, g, or t
  misc_feature (38)..(38): n is a, c, g, or t
  misc_feature (46)..(46): n is a, c, g, or t
  misc_feature (100)..(100): n is a, c, g, or t
  misc_feature (102)..(102): n is a, c, g, or t
  misc_feature (121)..(121): n is a, c, g, or t
  misc_feature (210)..(210): n is a, c, g, or t
  misc_feature (243)..(243): n is a, c, g, or t
  misc_feature (278)..(278): n is a, c, g, or t
  misc_feature (341)..(341): n is a, c, g, or t
  misc_feature (424)..(424): n is a, c, g, or t
  misc_feature (504)..(505): n is a, c, g, or t
  Coding DNA Sequence Number=SeqID_281
gtttacatcgataattagtcacacaatctgtgaaanangataagtncggctcaacgtcgacatcacaatatcgccgttactccgactctagacgcgaccncnggtagcagcgcagcagatntgatctattaagtctcactaatgtgtgtgttgctgctgagcgtacgcttgcagcattgatcttatgatgtctgagagagtggctgcggncgctggtagtataagagtcggctactacgatanacgtacgacagacttggagagtacgcggctggacnatgtgagcacgtagacagggcgagtgggctgtgagagagagtggtatgcagctgtttggtgcnttagaagcgagacagagggtagattcatctggccactcacctcgtgcctgagtcctactgcgcaggctaataactcaaatganttgtatcgtgtctgcgcgggcctgcggcgatcgcgagatgtgcgaggagcttctcgaggactttgtagcctcctctcctnnccactgtagtgcttcttctagcggta

SEQ ID NO: 10061 - DNA, 571 bp, Glycine max
  misc_feature (52)..(52): n is a, c, g, or t
  misc_feature (76)..(76): n is a, c, g, or t
  misc_feature (83)..(83): n is a, c, g, or t
  misc_feature (148)..(148): n is a, c, g, or t
  misc_feature (246)..(246): n is a, c, g, or t
  misc_feature (257)..(257): n is a, c, g, or t
  misc_feature (317)..(317): n is a, c, g, or t
  misc_feature (326)..(326): n is a, c, g, or t
  misc_feature (438)..(438): n is a, c, g, or t
  misc_feature (445)..(445): n is a, c, g, or t
  misc_feature (476)..(476): n is a, c, g, or t
  misc_feature (486)..(486): n is a, c, g, or t
  misc_feature (518)..(518): n is a, c, g, or t
  misc_feature (530)..(530): n is a, c, g, or t
  misc_feature (538)..(538): n is a, c, g, or t
  Coding DNA Sequence Number=SeqID_282
gcagccggtcgctcatgtgtgtctgggtgcgcctgatagagatgtcagtacngaggagactgcaatcgcacgacgncgaacgngtgtgtgatgtagatatatatctatgctacaaccgcacacaatcgcgcggactacatcacatctnctcatgagcatcacggtacgggtgcagagcgtcagctgtatgagcatagcgcgctctagggtgatataatgtagctgatatatgtcgcgtggcctgancacagtgctgncgctaccgctagtctgatgttgtatgatgcgcgcggagcgacgtcgcagtagatgcatcnctgtagttncactgcattgacagacgcacgatacgagaacgtgcggtgtctgtcacgcacgtatgctctgctgtcacgacttgcagctacgatgatggctcgcttgacgctgcgcgtgcanctcgtgncgcctgctcactgtggcttatgtgcgatgcnagtcgtcttncgacactatcatgatagctactctaatcgatntgcgcatgcgtncatatcgnactgcttagactacgtctgatgcgtctgaatag

SEQ ID NO: 10062 - DNA, 565 bp, Glycine max
  Coding DNA Sequence Number=SeqID_283
aagttcgacgaatatccgaagatcgtagtgtatttcaactaaaagatataattaaattagcacaagttgaagttaaagaacgtccaaccgaacaatttattttcgagctaattgaaaaaaccacaggcaatcgttagttttaacagctcatcgtgatcgtgttaaagaattctggctacaagaaattcgcgagtttgccaaggattacgacgaaactaaagatacagcaactgaagaattgcaaataatttcacccgaagccaaatcaccaccttctgaaaaagaggataaacctatcgagaaaaaagttgcaacaaaacgagacgcaactaccgaagaagctaaaccgcaaaaaatcccaagaatagaagctactgaaagtgagcctagcaaaaaagttgcacaagaagctccgaaaccagaattaaaaaaagaaactaaagaggaaaaagtaacagaaaaacctaaagaagagaagcccaaagaaaaagtaacagaaaaaccaagagaagaaaaagttaccaaaaatccttcagaaaaagctgaattgactcaagatacttca

SEQ ID NO: 10063 - DNA, 163 bp, Glycine max
  Coding DNA Sequence Number=SeqID_284
aggccattacccactagggatgttctaaccaccttggaagaacaggggtgggccagctccattctaagggccttatgttgatttcaagaagggacttgaggtcctctcacggaaagtggaactaaccggtttgggacttgcggaaattctattgggaaacctt

SEQ ID NO: 10064 - DNA, 583 bp, Glycine max
  misc_feature (38)..(38): n is a, c, g, or t
  misc_feature (211)..(211): n is a, c, g, or t
  misc_feature (381)..(381): n is a, c, g, or t
  misc_feature (424)..(424): n is a, c, g, or t
  misc_feature (428)..(428): n is a, c, g, or t
  misc_feature (442)..(442): n is a, c, g, or t
  misc_feature (541)..(541): n is a, c, g, or t
  misc_feature (543)..(543): n is a, c, g, or t
  Coding DNA Sequence Number=SeqID_285
catacgctcattcgcgattcgagtatgatcatccccanatatataatgcgtcaaccctccatcacactcttctcgctatcgctcctaacctacgcataccctatctatctctttatgttcgtaatatattatgcatcactctctgtatcgatatctctctctatgtgttaacacacactcacgaccacactctgcacgatctcatattccnctatgacgacacctcagcgcatctcatatattagtctatctgtcgttgtgtgcgtcgtggtcgatcagcgacacactcgcgatatcatccattgtgctactagcgtgtgacatcgtgcgtgtatgtctcatttacctaatctctctcatgataccctatctgatattggntatacattacgcatgactatacatccacacatcctgaacgaanacanctctcgactatcanttagtcaacacacactcttaccacgctattgcacttcagcactcaccctccagctcacgcgtacgtacgctcattgtctgctctcgccacaaacatctntncgcctaccacgctcaatataatagcacatcgtctcacgcc

SEQ ID NO: 10065 - DNA, 542 bp, Glycine max
  misc_feature (190)..(190): n is a, c, g, or t
  misc_feature (196)..(196): n is a, c, g, or t
  misc_feature (231)..(231): n is a, c, g, or t
  misc_feature (305)..(305): n is a, c, g, or t
  Coding DNA Sequence Number=SeqID_286
cctcgcgcacggaatatctggttcacactgctcagatggcgtggttactggaccccgcgcccctactcgcgccgccactttcctcctaatatattacattatagcgccgcgtatcacccatccatagtgacaacgcgcgggcatctattgatgtttttctatctcctcccccgcctccgcccgcgctatntggtcntaatcatactactccctcgttgtgataatccaggnaagacaccaccctcgctactcccttctctacctctcacccacgtcgcgccgcccgcgcaaccagggcagttgcnaagagatcatgcgaccttactatatctacacaccgcgtacctcctcacccccacctctcactgtattccgccctcatttcgtctacatactatccgctcaccaccaccccgcttatcatcctccctcaccgactcccacgcacgccctgcacaccacgcattatattgtatgagacctatagttagatattcacatctctactcctaccctaatatgccgctctattttatgactcc

SEQ ID NO: 10066 - DNA, 208 bp, Glycine max
  Coding DNA Sequence Number=SeqID_287
aaaatgtttagtgctgtctctaatcatgaatgaaattcataaaatcaggagccagacccacataattttgtgatttctaacaaatattaaccaatagtaaaaagcgtgttattgagtgttttgctaacatttctcttgatgtcaaatatgttgattatgttattgactttgtttttgtttttgtttttgaataaaggttggctaacag

SEQ ID NO: 10067 - DNA, 562 bp, Glycine max
  misc_feature (30)..(30): n is a, c, g, or t
  misc_feature (302)..(302): n is a, c, g, or t
  misc_feature (468)..(468): n is a, c, g, or t
  misc_feature (515)..(515): n is a, c, g, or t
  Coding DNA Sequence Number=SeqID_288
gctaagagtagacttctccgctctacacantgtggatgggcgcgccggctacacccgagctcagtatgaagatacgataacagcatcgacacgacttctcagcactgccagctactgaagggattcacagagctagtcttatgccacaaacctataaagtgtcctcaccttcacccggtattgaggacaagggccggtggggaactacgtcctatacgtggcatgctcatagcacggcccacacgaaactgatagtgtgataccgcagaatcaagccatgagacataacagagaggatacgnctgagcgcgcgcgcggcgtgcgtgacgccgtcacgagggcgtggacgcgcactggtgcgggcacgcacgactcgtctgtgacaagcggagttgcgcgtgctctgcggtcgagacgttgctacacggcgtgcgcccaggcgcagttatctccgcggagccgcctggngcgttagtgcgtgcgaagtgacatcatggggagtgtccgcgcacganctcgcgctgctgtgacgcagagtgtgcgcgaggcaatgctacactat

SEQ ID NO: 10068 - DNA, 467 bp, Glycine max
  Coding DNA Sequence Number=SeqID_289
attcttcatcttggaccattcatggaccccaggtctgaggacaaagataactgcagctaccgtctagttggtgtcattgagcacgaagggcatcaaataaatggagggcactacattgcttatgtgcggggggcaggtcacaaccatcagagcagtggttcttcctcgtgggttcgtgcaagcgatctcgacatcaaggaagtctccctagaaaaagttctcggccgcgaggcgtacatgcttttctacgagaggatggaggactgatgcatgtccggcattgtacccaactaagcaatcagaagggcactgacaaaagaagcagaaggtgttttgatggcctggtgtaccgtcctacttacatagtctatatagtctgtcgtccagtccaattttgttgattttggcgggctgggtcattgcagttgcaggattttgcattggttgcaacttgtagcgtggtcagc

SEQ ID NO: 10069 - DNA, 431 bp, Glycine max
  Coding DNA Sequence Number=SeqID_290
cgccgtcttggctctctctatcattctctctctctgaacccttcagtgagacacaacacacaagctatagtccattggtaatggttaattagttagtgagtgaaaaatgaagtttggtttggactttgttggagtttggacaccactttggtttttgtttggtggaagcttcataacttatgccagctaatctcattcgccccattaaattattcttttgctgaaaagtcgtttctgttttctttttgtgcttttccttcttcctaattattttaagaaactctgtctctgtctgcttcaatccactttggccctcactggaaaagtagtagtagtggtacttaaacgccattaaaagttatgtgatctttggaagtatgatacaggtggtgtgagtgtgatctatctatcttgacttaggagtttggaca

SEQ ID NO: 10070 - DNA, 501 bp, Glycine max
  misc_feature (121)..(121): n is a, c, g, or t
  misc_feature (265)..(265): n is a, c, g, or t
  misc_feature (272)..(273): n is a, c, g, or t
  misc_feature (280)..(280): n is a, c, g, or t
  misc_feature (305)..(305): n is a, c, g, or t
  misc_feature (322)..(322): n is a, c, g, or t
  misc_feature (343)..(343): n is a, c, g, or t
  misc_feature (361)..(361): n is a, c, g, or t
  misc_feature (365)..(365): n is a, c, g, or t
  misc_feature (369)..(369): n is a, c, g, or t
  misc_feature (373)..(373): n is a, c, g, or t
  misc_feature (414)..(415): n is a, c, g, or t
  misc_feature (470)..(470): n is a, c, g, or t
  misc_feature (472)..(472): n is a, c, g, or t
  Coding DNA Sequence Number=SeqID_291
acaagcatagatcgtgcgtcgtatctagcatgcgtataacacatgagtatcatacacaatttacacacttgatccacacacacaacaccagaactctagccacaagtaactatgctgagtnctgttgcatctcatctctctctcacatcgcggataaacataccaaacagctataagccacagcaatagtgagctatagatgtcaacctgtgagctacaacacagctgagaagcgactacaaccacggccactcggtgcgcgtanctgcccnncctgttngtggattgtccgcagcgcggccgtnggcgtggcctgcccgtngtgcgagaattagtgagttgnagagtaggaggtagccantcanacanttcntttatcgaatacatgaatccttatctactacacatctcacnncctctacttactcactcaaacacgtgacatagccgcaatacacagatgttatatnantaatactcgtagtatttctactgcctctc

SEQ ID NO: 10071 - DNA, 140 bp, Glycine max
  Coding DNA Sequence Number=SeqID_292
ggctaattgcgaatctaaggaccttaaattttcaagttataacctgtttaatcttatgctctgcctactgataccaggactaaatattattactgagtatctctttggtatcatctaccccggaagatcaatagcaaatg

SEQ ID NO: 10072 - DNA, 402 bp, Glycine max
  Coding DNA Sequence Number=SeqID_293
agcaagcaagcgagcaagcgagcaaacatcagaaccgagaatgcctaagcaaatccacgagatcaaggacttccttctgacggcgagaaggaaggatgctaggtctgtgaagatcaagagaagcaaggacattgttaagttcaaggtcaggtgctctaggtacctctacacactatgcgtcttcgaccaagagaaggctgataagcttaagcagtcacttcctccaggtttgagtgttcaagacctttgaagatcctcttgaagtcaaagggatatgtcgatgcgacctgctttgaatatctttcgcttggataattttgatttttgttgccttttgaattactattgttcagactctttcccttttctattgcaagactgagtttttattctgttatttgc

SEQ ID NO: 10073 - DNA, 472 bp, Glycine max
  misc_feature (205)..(205): n is a, c, g, or t
  misc_feature (242)..(242): n is a, c, g, or t
  misc_feature (294)..(294): n is a, c, g, or t
  misc_feature (316)..(316): n is a, c, g, or t
  misc_feature (318)..(318): n is a, c, g, or t
  misc_feature (325)..(325): n is a, c, g, or t
  misc_feature (420)..(420): n is a, c, g, or t
  misc_feature (431)..(431): n is a, c, g, or t
  misc_feature (439)..(439): n is a, c, g, or t
  Coding DNA Sequence Number=SeqID_294
gggtgttcacgcgagacacgtcgtcgatggcagtaccgtgcggcgcggtccccctatgtcgctcacgccgatgcgctgttcgccatatctcgcgtgtctcactataagaacagtagtcggtagggacgctgagcccaactatcacacatactcctgcacccagggaactcagcactcacacgcatctccgcatagagatctctgntgcgcagtcgacatgatattaagggggacgtctcacncacacgacgagtcgtgagccgagcgcggcctcccctaccgtcgcgtccacanccccgctattcagtcgtagtcncntccaatntcccacctagttccgacagcggacacgcaggtctcaatgtggctacatgcaccggctcggcttacgaacccgccagtgccccagcagtcgaggantatcgatgtantcactcanacagaacgagtgccacgagggtatgagcgccaa

SEQ ID NO: 10074 - DNA, 521 bp, Glycine max
  Coding DNA Sequence Number=SeqID_295
tatttttataaccatatcgccagtttgtattccactatgaagtacgggaggtggtgctggtggagggaaaaatgtttgattgactgcttttgtccgattattagcagaggttaaaacgaatgggaagaccataccaccacagctacagtggggcgagtgttactaccagaaagtaaaagagattggtgtgcgtaatgattatttttgttttaattgtatcacactacaatgttgttgaatcccatccttaactctcccaaagacggggaggggagtgcgtgggtgcgatcttacacatcaataatcatattagacacttgtggttgttgggatgttggtggttagttggtgaccatcttactgaaatccatttctcacaacatatttgtagtgtgtgggtattgtccttcgctggtacaagaggtaaatggaatggtgtgggtgtttgtggaatgtgcttgaggtggttaaaagaaaaagaagaggaaggaggcttcatcgtatagccgtgggagctgcaa

SEQ ID NO: 10075 - DNA, 580 bp, Glycine max
  misc_feature (106)..(106): n is a, c, g, or t
  misc_feature (210)..(210): n is a, c, g, or t
  misc_feature (266)..(266): n is a, c, g, or t
  misc_feature (284)..(284): n is a, c, g, or t
  misc_feature (315)..(315): n is a, c, g, or t
  misc_feature (380)..(380): n is a, c, g, or t
  misc_feature (521)..(521): n is a, c, g, or t
  misc_feature (523)..(525): n is a, c, g, or t
  misc_feature (527)..(527): n is a, c, g, or t
  misc_feature (534)..(534): n is a, c, g, or t
  Coding DNA Sequence Number=SeqID_296
aaccacttcgtgttgtaacatgttcactctagtgtgtagtagtcacgagctgacgttcagttggcggtggttgtggtgtatatgaaatgtttgttatatgtgatgngcatatcgtgtcatatttcgctgcagataaagcataagcacacaccgtatcaccacacacaactagacaaatagagaacagaagcaagtatccaacaatataanaggtcatatatgtggtatatatataatatattattacaagcgcgcgaggcagacanaccaacaacacccaaaancactagcgcggcgcgccgcagaacacggatnggatgaggattatctcacaacacacttctcctcctagacacaaacgcagtaggagagaaaggagngggaaggttcgcggattccccctgcgcacgctccaccgggagcggatcacacaacatacgtttatcattgtagcccgggcggcgtgcacccccgcccggtgcgaggctggcgcagcccctttgtattctcccacccggctntnnntntcctctnggacgagccgtgtgcgagaaggtttgagcgcaaacaatgcccaccg

SEQ ID NO: 10076 - DNA, 338 bp, Glycine max
  Coding DNA Sequence Number=SeqID_297
gagccgaatcggcttgagaatataaaaaaaaataaaaaaaaaataaaaaataactaaatggattactatgagctctaataaaagggaatatgcctagaactcatcacggtcctgccgacacgtgcatcctcccactccgtgtgagacacctcatgttgggcactcggtgctgtttacagtacatgggccagtggcttgaaattgaaagtcggcgatagtcttgatttcaattatggggctggtcacacagtggacgaagtgaaagaaagtgattacatgagctacaccacttgcatttcactaactacacacagtaatggtatcaccacaatcaccct

SEQ ID NO: 10077 - DNA, 423 bp, Glycine max
  Coding DNA Sequence Number=SeqID_298
gtttccgttcccatttcacagagaaagttgccgacttttcgagctttctccggtaccgcaatgacggcagatgctaaagatgctggaatggatgctgttcagagacgcctcatgtttgaggacgaatgcattcttgttgatgaaactgatcgtgttgtggggcatgacagcaaatataattgtcatctgatggagaatattgaagctaagaatttgcttcacagggcctttagtgtattttattcaactccaactatgagttgcttctccagcaaaggtcgaaagcaaaggtgactttccctctggtgtggacaaacacttgttgcagccaccctctttaccgtgaatctgagcttatcgaggaaaatacactcggagtgaggaatgctgcacagagaaagcttcttgacgagctcggtattg

SEQ ID NO: 10078 - DNA, 455 bp, Glycine max
  misc_feature (27)..(27): n is a, c, g, or t
  misc_feature (36)..(36): n is a, c, g, or t
  misc_feature (47)..(47): n is a, c, g, or t
  misc_feature (52)..(53): n is a, c, g, or t
  misc_feature (59)..(59): n is a, c, g, or t
  misc_feature (70)..(70): n is a, c, g, or t
  misc_feature (80)..(80): n is a, c, g, or t
  misc_feature (82)..(82): n is a, c, g, or t
  misc_feature (98)..(98): n is a, c, g, or t
  misc_feature (101)..(101): n is a, c, g, or t
  misc_feature (107)..(107): n is a, c, g, or t
  misc_feature (135)..(135): n is a, c, g, or t
  misc_feature (155)..(155): n is a, c, g, or t
  misc_feature (190)..(190): n is a, c, g, or t
  misc_feature (210)..(210): n is a, c, g, or t
  misc_feature (239)..(239): n is a, c, g, or t
  misc_feature (267)..(267): n is a, c, g, or t
  misc_feature (279)..(279): n is a, c, g, or t
  misc_feature (281)..(281): n is a, c, g, or t
  misc_feature (287)..(287): n is a, c, g, or t
  misc_feature (289)..(290): n is a, c, g, or t
  misc_feature (337)..(337): n is a, c, g, or t
  misc_feature (369)..(369): n is a, c, g, or t
  misc_feature (371)..(371): n is a, c, g, or t
  misc_feature (374)..(374): n is a, c, g, or t
  misc_feature (379)..(379): n is a, c, g, or t
  misc_feature (382)..(382): n is a, c, g, or t
  misc_feature (401)..(402): n is a, c, g, or t
  misc_feature (405)..(405): n is a, c, g, or t
  misc_feature (409)..(409): n is a, c, g, or t
  Coding DNA Sequence Number=SeqID_299
tacattcgtgtatgatacgatcatagnatcgaatantgacgcagtgntcatnntcgtgntttgcgattcntctactagcncnttcagtcgtcatcatnatntgacancgtcgtttatgacttatactgcatcagntgagcatacatacacatganatcgagctatcgcattatacatacagtatactatnaatgattgcatttatcgagnatagtaatttacatacaaacgatcaaatncgaaccctgatcgacatgcgtcacggtnatcctagtatantnatatcntnntaatgtctatacgatatgctcacacgactaccagactgcgctgatgnaacgatacatactagaattgtcaataagaacncnggnacgangcnggcgagcgacgacgagagnnagncganagtgtctgatggaagtatatataaactgctcactatatatcataca

SEQ ID NO: 10079 - DNA, 416 bp, Glycine max
  misc_feature (80)..(80): n is a, c, g, or t
  misc_feature (339)..(339): n is a, c, g, or t
  Coding DNA Sequence Number=SeqID_300
ggagccagaaccttcgttgaacaaagacaaactgtcgaaccccacaccttcttgaaggaagttgatgttgttgaaaccanacccgttcaacaaactatcgaagtcatggaagccagaaaggtcgtcaaggatgtccaatacactcaagctgtccctgtcaagaagcaaatcgaaaccatcgaacctcaagtcgtcagaaaggatgttgaggtcatggaaccaagacttgttaccaagactattcaagtaattgagaacgtccctgtcaaaaaacaagttgaagtcattgaatctattcccagaatccaagaagtcgagaccttcgagcctcaaaccttnaccaaacaagtcgaagtcactgaacaagtccctgttaccaagactgtcactgtcactgaacctgtccacctcaagaa

SEQ ID NO: 10080 - DNA, 548 bp, Glycine max
  misc_feature (181)..(181): n is a, c, g, or t
  misc_feature (339)..(339): n is a, c, g, or t
  misc_feature (453)..(453): n is a, c, g, or t
  misc_feature (455)..(455): n is a, c, g, or t
  misc_feature (498)..(498): n is a, c, g, or t
  Coding DNA Sequence Number=SeqID_301
atcacataagacaagcaccggcgcagagctcaaagcagagtgtcacacattctggaacgctacgcagaatcgtcgctgagtgagagggcaggttacggaagcctcaacataatggaggagagactaggtagtgcatggactaggactacgttagtagtgaagcgagccatatacatgatgntcttgtacattagtcatattggacgtctatctatatttgtgctgtgtattccacgcgcgggccggtgcagcgagacgcggcagacctcgccatcatcgcgcatatgtgatactctgccacgcgcagcgagcgagagctacagccagacaagtggaagngagtactatccgacccgagacaggtaagggacactctataacaagaacaaggagagattgcaattggccggactactcctctgccgtcgtccaccggcgtgggtatgctcacgnanagccggcccacgcacgctccgccccggcggcagcatggaatgngagcgcatcctcgccagactatatttggagatcgtgtgtggttcaactac

SEQ ID NO: 10081 - DNA, 556 bp, Glycine max
  misc_feature (38)..(38): n is a, c, g, or t
  misc_feature (83)..(83): n is a, c, g, or t
  misc_feature (110)..(110): n is a, c, g, or t
  misc_feature (166)..(166): n is a, c, g, or t
  misc_feature (235)..(235): n is a, c, g, or t
  misc_feature (409)..(409): n is a, c, g, or t
  misc_feature (475)..(475): n is a, c, g, or t
  misc_feature (481)..(481): n is a, c, g, or t
  Coding DNA Sequence Number=SeqID_302
gctgaatcacctcgtgatacgattgatgtatcgcgctnccacgtcctagcagacctgcgatgagtggagcgcgaccgagagtncagcatcagactgcagacacgtcgcgncctatctgatgccacgctgcaacgtgcagcgcgatctgttagcgctgcacgacgtncttgaacagtgtgtgagagcacgctctactctccccgcctctgtactctctctacacacactacactanaccactcttgacacgtttgatgcatcatgtatacatattacacatccacacaacctctacatacgagtcgctatataggagctatgtgtcgcctacacgtcctctatgtagatcagcaacatcgatatatattcacgacgtatgccgagctagactcgatctcacgtgctgtanatcagagcttatgttgcccgcatactgcacatcgtgtgtatctcagatgctaagatgagatggtgntgtcanagtacatgtgtggtcataagagacatacgatacgtacgcagagcgacaccgtcacgtcacgtagcatatagatct

SEQ ID NO: 10082 - DNA, 563 bp, Glycine max
  misc_feature (37)..(37): n is a, c, g, or t
  misc_feature (216)..(216): n is a, c, g, or t
  misc_feature (259)..(259): n is a, c, g, or t
  misc_feature (277)..(277): n is a, c, g, or t
  misc_feature (287)..(287): n is a, c, g, or t
  misc_feature (425)..(425): n is a, c, g, or t
  misc_feature (453)..(453): n is a, c, g, or t
  misc_feature (517)..(517): n is a, c, g, or t
  Coding DNA Sequence Number=SeqID_303
gatgctgtgtgtttatctctcactcccccccactctncgtcccacctagaatcacgctcagcgcagtcatgcatgctagtcgactgatatatacgcttctctacgctacacatcagacttctcatctatcttaccccttggttatttatcgcctctcctgctcattctctcttatactattatatatataatgagtaagatacaatctgatatcgnacactgcatcgtattgcatctgagaatgagcgtatggttctanacttatatctcttcgttnctcgactcancatcttcttctagctcttcactgacacatcattagatctgtgcaggtgactcacatcgtctatataatcgctacatgtatattatctagactactctcgcacctccacactcgctcacgctactctctctcctgcatncactactatatattcttcatcatcaccnacataacactcacctactcagacggatgcttgtcgccgtctagctcagcgtacgtctcaatatncgatcatcatcgtactatacttgacgcgtatcatctcatagactcc

SEQ ID NO: 10083 - DNA, 599 bp, Glycine max
  misc_feature (49)..(49): n is a, c, g, or t
  misc_feature (52)..(52): n is a, c, g, or t
  misc_feature (76)..(76): n is a, c, g, or t
  misc_feature (86)..(86): n is a, c, g, or t
  misc_feature (162)..(162): n is a, c, g, or t
  misc_feature (196)..(196): n is a, c, g, or t
  misc_feature (489)..(489): n is a, c, g, or t
  misc_feature (565)..(565): n is a, c, g, or t
  Coding DNA Sequence Number=SeqID_304
cgccgtagcgtgtgttgagatgaatccttgctcgtggattgagatatanacnacacctccaccgctcacatgctgncgcgctgcanccgctctctctaactcctttccgcgccgcttctgcggactacacacgcacacatagattgcgccgacgttctgtgngcacgtgctgttgatgttgtactactctcttctncatcgcgcgagggtgtcatccagaggtatgaggtctgcggctgatgagtacgactacacaatgtatctctgcctcctgatactagagcgttacgacgatcgctgagacaagacgcacgtgactaatcgcaacataagtggactcatgtgtacctatccacgcgagctagcacatcgataccgtagaccaccgcataagatatatagtacttatgaatgatgaccgtgtcacggtactactataagctaccatacacgtataatcacaaatactagcgagtgacacacaaagtnctaccactatatagatactcaataaatctcatacactactatgaatactgcgtctcgacgcgatctctcacacacngtctactacacgacagagtcttcatgcgtatgta

SEQ ID NO: 10084 - DNA, 499 bp, Glycine max
  misc_feature (434)..(434): n is a, c, g, or t
  Coding DNA Sequence Number=SeqID_305
gatatgagactctccgtctaacgtgcgtgttgcgctctcctactattctgctgtatgatgtataaggactatatatcacccgatactactcatatactcctatatcatactaggttaatagtgatagacgatatgtagcccgcaaatcgtatccgatcttcagggcgagagtctagctgctgggacgaaatgcggtagcgatcgacaacaccatctcgcacgagtcggagagagacgagttgtctgcatgtcttatctttgagagtgttagcgcacatgtctagagatattatgtctaagtacggcgtgagagggacgtcgactcggcggctcactgctatagcctccctcgccgtgtttgcacttcttctagatctcttctctctgctcactctcgcatgcctatcacacggagtcgtccttgctgtgacgcngcgcgatcgtccacacgctctacctcgcctacgcatggcatactcgtgcttatatcactcgtcac

SEQ ID NO: 10085 - DNA, 526 bp, Glycine max
  misc_feature (166)..(166): n is a, c, g, or t
  misc_feature (192)..(193): n is a, c, g, or t
  misc_feature (348)..(350): n is a, c, g, or t
  Coding DNA Sequence Number=SeqID_306
acattgcagtgcactcacgaaggctgactcatggtggcagcttgtttttcttttctactatgtttgagcgacacaccaaacatcaccatagcactacagaagacaatcagtatttgtcctattacattctcaccctcgggccgcattcgtggtgatggactttttngtgattacaaaaaatagcccgtaatnnactagaccagcgcaagacacccacgcaccgcgacgactatctattatatatccacctcatagtgataaaataagggatgattcgagttagttatttttattttttgtctatacaagtaatttataaaggcgcctacttggctcccgttcttcgcnnnaaagatagagcgcttgtgaatatgaaagacgcggcgctcccccacgtgtgggcgcttcgcgcagaggtatagttatagccataggtaatcgaacacacgcgcacaaagggcatctgttcagtaggtggggggggggggtgggaccctcttttttgttatattctctcccctgttct

SEQ ID NO: 10086 - DNA, 559 bp, Glycine max
  Coding DNA Sequence Number=SeqID_307
taataataccaattcctcaccaggcgatcgcatagatgcgcgaaggatgtgaggagtgctatttttatcgtgcttttatccatctaaatatataacaaccacattcgccctagaactataaaaaccactcaaccatccatctgtgttccttttattatatatattgtcgctatgccacgcttctttctgtaaggatagacacaacaagtgccgcggagagtaaaatggtgattaattaaatagtgtcggctctgtcttttaggcgtctgctaatttatcgcacctcctaatttagtttcacagtaactcgcgggcgagttatattctatatttgtgtcggatctcgtggtatggttaacttagagatgaagtcggtggctgacagcgtaagaatattaccctcgacaccacgcgcgcgtttgattatcccacttttgcttagttactgctaaagtggacagttactacaactaacggtgggagattaacacaggttttcgcggcgtagctcaagaagcccgctgccgattgttctatcttccttggttttgagtgcgct

SEQ ID NO: 10087 - DNA, 258 bp, Glycine max
  Coding DNA Sequence Number=SeqID_308
aaagagcatctcctcttagctcttgcttccttctcgagcgtaaaccctagatcccatctccaaaatgttcagatccgtgctcgtccgttcctcttcatcggcgaagcaatcgcttctccaccgcagcttctcctcctccgtccccgagcgcaaagtcgccatcctcggggccgccggtggaatcgggcagcctctcgctctcctcatgaagctcaaccccctcgtctcaagcctctccctcttcgatatcgcaaacac

SEQ ID NO: 10088 - DNA, 499 bp, Glycine max
  misc_feature (157)..(158): n is a, c, g, or t
  Coding DNA Sequence Number=SeqID_309
tatcctagagacattttgctgttagagatgcaactaaggaatttgttaaaaggacagaagaagaaaaatatatatcacaatttgacatttctaaattcatggattttcgttacagagcacaccaaggaattatagctattaaaaaatccaccgttannaaaatgtaaaaaagattgcatgcaagtgtataataaactatgtgatttattttttgtatgtaagaacataatgaatctccatatttctctaactcatattttatcaattgattttctattaattataacttcctaaattcatctataaattgaatttccttaaagagtcaaatctactacatatgactatgttccttgttaaaatttggtgggaatccatcaaattaaaaaaaaagtgggtgggtgaactaaacctgggaaaaggggaaaaggtaaattgggggggtaaaaaaaaaaaagaaaagggaaaaagggtgccaattttatctttctggcgaaaa

SEQ ID NO: 10089 - DNA, 465 bp, Glycine max
  Coding DNA Sequence Number=SeqID_310
ttttttgacggatgaagccttgcacggtggtgtgacccacagaacacctctccgattcagaattccgataagcacccagsacacctaatcccaaatcgtcatcttcaaccgccgcacgagagcggtagaacaagcccagatccgaaaaaaacaacaaagatcatgaaataacaaactcagatctgaaatcgcaacagtatcctgaaaattacgtgtcttccgcactcactccgatctgtatttttatggcgcactggaccgagtcggaggtgagggactaggggtcggaatcgagaaggaagggaggagccgtcgggcatcgttccgtcggcaaggcgccgtcgtcgacggcggtgcaatctttttttactctgtcgacggagtattttggaataagttggactacctctgatttgctgggacaccagcatcagaggatcaaaatgtccttcactctttgatgaa

SEQ ID NO: 10090 - DNA, 208 bp, Glycine max
  Coding DNA Sequence Number=SeqID_311
ctgaggttaacttttgctcaaaaatgtgtgcccgaaccaaacggctggatagggatattgtgaaggcaataaaggtcgacatggaacctatccccatccatagagcctgacgacgcgcccatcattgtacgaacagcaccggtgaaaacgatacctttgccaaaccaaccgatgagaagccttactcaccaaagattcctaaaggttg

SEQ ID NO: 10091 - DNA, 409 bp, Glycine max
  Coding DNA Sequence Number=SeqID_312
tttcacttctcgtgcgttcttcatttttctgccgccgcctgccgccgcctctctgcctggcagccgtcgcctgagtcgcacaggggccgcctctccttctcccgccctgcggtcgctccttcccccccccatcggtcgccgtttcctgagtcgcactggggcggccgctccgtctcccgccctgcgggcgccgccgcaagatcttggacgggccccaagatcttcaacggcgcagccggcccgcgccgcccggcggccctctctctccatcgaaggatcttcggacggcgcccgagatcggttcctccgcgcgtcgtggttgagatccctcgcataggatatcggcatggctggcgaaggcatctcgatagatgaatttatggagtacgactcgatggtcagcagacat

SEQ ID NO: 10092 - DNA, 515 bp, Glycine max
  Coding DNA Sequence Number=SeqID_313
acacgtaccgcacgtagcgtagctactagagagctaggtagctagcacatttcattgattgtcctgctgatccgttcggcatggagatcgcgaggaggaggaggtcgctgtgctcgagccgtcgccggcggtcggcggtggtggggcggaaggtgcgggagctgcggcggctggtccccggggcggcggttatgcccaccgaccggctgctcgtccgcacggccgactacatcgcgcagctccgggccagggtggagctcctcagggcgctctcggagctctgcgaaggccatggccatggcgactcccctagctagttcgcaacctctgctcttgtggtatggcgaatatatacgtgcatatatcgcacgtatagacggatggtatatattgaacgattatggttgatcaagtagcgtataattgagtacctaggtgcgactatacataccaatcgtatgtgttctagaagtatataggggttttgtttttctgtccagtatttcttgtaattt

SEQ ID NO: 10093 - DNA, 568 bp, Glycine max
  misc_feature (64)..(64): n is a, c, g, or t
  misc_feature (99)..(99): n is a, c, g, or t
  misc_feature (145)..(145): n is a, c, g, or t
  misc_feature (181)..(181): n is a, c, g, or t
  misc_feature (241)..(241): n is a, c, g, or t
  misc_feature (260)..(260): n is a, c, g, or t
  misc_feature (278)..(278): n is a, c, g, or t
  misc_feature (311)..(311): n is a, c, g, or t
  misc_feature (330)..(330): n is a, c, g, or t
  misc_feature (333)..(333): n is a, c, g, or t
  misc_feature (335)..(335): n is a, c, g, or t
  misc_feature (423)..(423): n is a, c, g, or t
  misc_feature (443)..(443): n is a, c, g, or t
  misc_feature (447)..(447): n is a, c, g, or t
  misc_feature (523)..(523): n is a, c, g, or t
  Coding DNA Sequence Number=SeqID_314
gtacctgtcatgtacatctgacgtactgatataataggaggacgcgtgtcgcgacatcacagantctatagactactccgtgacgtatagtgactgagntacggtgcagtacatgacactctgacgaacgtgtaacatgtgatgnaatagctgtacgcagccgtgtctgtcacgtcgtatntcagctcacgatgatgaagtcgagcgctacacatgtacgcatagatatgatagacgtgtntcatgacggcacaacagangatagtggtgcaacgcanacacagcgctatcgaatgagtacgatgtacgangtactccgtcagattctcnacntntaatcatatcagctctgtgtataaggatactcatgcatgagctagacgactactggtctgtcatcgcgcttagcatcactatcgtgcnttcgtctcgtgtcatagtancgtngatcgagtgtctgcgtctcgtgacgtggtgcggatgatacttgacagcatagtgtcatatactacatgctgctgtnctgtatcctagtccgcactcattgaagctgccttctacgactgtt

SEQ ID NO: 10094 - DNA, 494 bp, Glycine max
  misc_feature (452)..(452): n is a, c, g, or t
  Coding DNA Sequence Number=SeqID_315
ttatacactgtattcgtcgttcggtaggtgaggcttctagctttgaggtcgaagatcaatacctccactatattccagcggcgagtccttctagttcgacatccttaaatcattatttatccgcctctcaaactgcgcgtcctaagcttgatactaccttcttcgcttcctctctggagtgggcgacgatgcgcgggttggcaatgcgtcggcgtactcaggggatctcagtacacataacatcagcacaacagagtaataagcaagatagaaaacactagccgcagagggcggcacggacacaagctgggcggcacaacaagcgagggacaacaccctcgccgcggcgccgacctccggggcgccctcaggcgcacctccaactagtcggcgtggaccgcgccctcgaacatgttgatacttgttttatcttgttctgttccgtgttgtgntttgtcgcctcattataacttcaaatatacagcgccggcata

SEQ ID NO: 10095 - DNA, 583 bp, Glycine max
  misc_feature (359)..(359): n is a, c, g, or t
  Coding DNA Sequence Number=SeqID_316
atcttcctcggtcttgtgtttacgatttctctctcctcactctctccctcttcttcctcgaagcagagctctttaaatcgctcctcttctgcctcccactctttctccttgttggccccttcgcccctccctctatcactggcactgatgtccgcgttgaccgtggcgaggttgtcaactttcccgatcgggagcctgagctcaatgaggacaccaatatgaagtcctcacaatgacagcggaggcccgaggaagccaccactataggcccggtggttttcattagtgcggtagaaaagtgaaaagaatctgatggaatcgagaaatgtgtgatgatgatggaggaggagaaggagtgngagtgaggaggatttgtagatggtgaagaattcggaggggaagctagggaggtgggaggcaataatggaaacgttcggggggccagggaaatgcaattaaatcaaatttgttagtgtgaatttttctgtggaaatgcagttaaatgatcagccagaggagattgaagtggttgatctacacggtggcagtcatcgttatgcttcaattcatagggagggtgtgt

SEQ ID NO: 10096 - DNA, 438 bp, Glycine max
  Coding DNA Sequence Number=SeqID_317
tatggaccaagaagcaaactgatgtcatgcgcttcttgcagcgggtgaggtgctgggagtataggcagcaaccttccattgttcgtgtgacaaggtctacccgccctgacaaggctcgtcgcttgggcttcaaggctaatcacgggtatgtgaattaccctgttcgtgttaagagggggggccgaaaaagaccactttcccaaaggattggttattggaaaccccccaaccacggagttacccaactgaaattttagccaagccagaggtgaattgccgaggatcgagctggacggaagctgggtggacttatgcgtctcatttcttactgggtgagtgacgactctacttctaaatacttcgtagagaatcgtggggatatagctcatgctcgtattaagtatagatcccgcagtccatagagctcggccatactca

SEQ ID NO: 10097 - DNA, 550 bp, Glycine max
  misc_feature (111)..(111): n is a, c, g, or t
  misc_feature (121)..(121): n is a, c, g, or t
  misc_feature (146)..(146): n is a, c, g, or t
  misc_feature (215)..(216): n is a, c, g, or t
  misc_feature (234)..(234): n is a, c, g, or t
  misc_feature (236)..(236): n is a, c, g, or t
  misc_feature (269)..(269): n is a, c, g, or t
  misc_feature (276)..(276): n is a, c, g, or t
  misc_feature (371)..(371): n is a, c, g, or t
  misc_feature (453)..(453): n is a, c, g, or t
  misc_feature (464)..(464): n is a, c, g, or t
  misc_feature (466)..(466): n is a, c, g, or t
  misc_feature (469)..(469): n is a, c, g, or t
  misc_feature (501)..(501): n is a, c, g, or t
  misc_feature (524)..(524): n is a, c, g, or t
  Coding DNA Sequence Number=SeqID_318
atagtataggcgctgctacgctgcgcgcgcgtatgtctgacacataacacgacagcgagtagcgatcgactcgtatcatgagacgagcgtgctctgctcagacacaatatnagatacgacngagtgcaccatgatgtcagtcatantagtcttcgttgcacgcgtcacagcgcttaatgactacacaatctgatgatataaatctcaaagacgtnncgcgacatcgccgactananctggcgacacatagcatgcgtgcactagacttnagtgcanatagtgacgtcgaccgtgcatgatactcgatactatgcatatagtccactctgagtcgcacgcagtacatataactcaccgtgctccagagtacngatgagatatgagatgacgaagttgccgagagtatgatcgtatcaggtgagtacgtaactatcgactgaacgacactatgtnctcgactatananagnaatcacgacactgctccactactccagtaatntgactactgctcacgagtgactncatacttatgtgttcatccgatgcga

SEQ ID NO: 10098 - DNA, 449 bp, Glycine max
  Coding DNA Sequence Number=SeqID_319
aatcattgcgctgggtctttgtgccgagtcatgctaaaatcctgtcaaacaccatattgcaccacctatcttacatatagtgagtgcaggcaccaattaatcggtcaggataaacttgtcagcggcaaaggagatgccatgccacccaagttctttcgtataagcagcacccttcaattgtaatttgtttactgctactaaaattgagatctgagacacagaaactaagataattgggctttgaatgacatgcctcaaacctcatgcaaataggactttgagttccgcgggggagtttgaaagagaatcttaaattctacaaacggtcaattgaattattatatttaatacgatttaatctccaacaggatatagtaaaggatatagtgacaactctgatggggaagagagagaacaaaagaaaaaaagcctcaacaacctgccacggg

SEQ ID NO: 10099 - DNA, 328 bp, Glycine max
  Coding DNA Sequence Number=SeqID_320
ttcaagactttctcgtctctcttactccagcttgagaaccttcgcaagcggtgaatccagctctaaaactaccactattggcggtgttccaagaaacactagatcagacgctggtactggtttcccaccaagagaggccagcaaatatcttaaggaagaagataccagaggagctggcggcggtactgccagaggagagactgttaccaaccgtaatactgttttagatactgatcatggcaaggtcagtcctcataacagagatactgaaagacgttagatttacataaagtagtaactcttccagaatatttgctatgtgcgtata

SEQ ID NO: 10100 - DNA, 470 bp, Glycine max
  misc_feature (61)..(61): n is a, c, g, or t
  misc_feature (86)..(86): n is a, c, g, or t
  misc_feature (106)..(106): n is a, c, g, or t
  misc_feature (138)..(138): n is a, c, g, or t
  misc_feature (227)..(227): n is a, c, g, or t
  misc_feature (262)..(262): n is a, c, g, or t
  misc_feature (367)..(367): n is a, c, g, or t
  misc_feature (395)..(395): n is a, c, g, or t
  misc_feature (422)..(422): n is a, c, g, or t
  Coding DNA Sequence Number=SeqID_321
agacgatcacatactgcgacactatcattatcatgacatctgacagtagactgcacaaccnatactgtcctatatgatgctatcantcaatacttgtcacgtctgntcactacgcgcaaccaccagtctactatctantgtatattacttatacatatatgataacagagcgatcagcgtattgctgctgtactatctacgcatcactctaacacattcatactctnttaacagacagacacgatattcgcaacatatctcncatttactcatatctactattacatgtagatagaaatatagagagcagagaatagatgatacaaataaacatcgccgctcgtcaagtacgccacatgctcagcantatagtatacacagatatagcaccgctntatcgtgcgtctactatcgtctgtatncgtatatcatatcacgatgcctatgtactggtgacttgatcgatctca

SEQ ID NO: 10101 - DNA, 511 bp, Glycine max
  Coding DNA Sequence Number=SeqID_322
ggttcctaactccaactacgtagtgcctttggacaagttctcgtcctcttcttccatcactcgtcctctgattgagatacttcgagatctcaacaagaagatccctgataacatcgttaagagccacgatcctggatccagtgctgcttcttctggtttcatcccttggttccatgctaatcggatgctcagcttctacgcacctggttggtgtggggaggttcgtgacgtcattttctcagagaatggtaatgtcaccgttgtttatcgtcttaccattcgtggctctgatggtgaggcacaccgtgaatcgactgggacagtaaccatcactgacgatcacatcgaggatccggttgctgcagctgaggaaattgcattttgtagagcttgtgctcgatttggtctcggcttgtatctctatcacgaagagtaggccaagtatgcttaccttttttggttgaacaagtgtctatcaacttgttagagagacccttatgcattctagagt

SEQ ID NO: 10102 - DNA, 375 bp, Glycine max
  Coding DNA Sequence Number=SeqID_323
tctttaccatcaaatctcgaatctattgactgaggaataccgctcgatgaaaccgcctgggacagggattatgttggtggcggcggtgaattctatgctgaccttgcagacaaaagggtcgcacagcaaaaggctcatgtgtcacttgccatggacacattcaagaattaagttcttaaagagccgcacgaagtcgatgctctaataactacgtggaaagattctctgttgatggctacgtgtgaaagcagcactgccttggcaagcggttgtgctacaatattgaagccctatgagttggcatctgtgacatgttgggagctcgctgaaatttgcaaagaagtcgggcttcctcctggcgatgtgaacattctc

SEQ ID NO: 10103 - DNA, 184 bp, Glycine max
  misc_feature (27)..(27): n is a, c, g, or t
  Coding DNA Sequence Number=SeqID_324
gggggcatctctaataacagctaccancactacagccatatcaagcccagccataaccttaataaataagagactaagcactaaaagaaccagacttccctttaacctcagcaacaatcttcttaattaaatccttttcgacatctttaatcttatctaaactctctattgtatctacacttcc

SEQ ID NO: 10104 - DNA, 515 bp, Glycine max
  misc_feature (119)..(119): n is a, c, g, or t
  misc_feature (180)..(180): n is a, c, g, or t
  misc_feature (186)..(186): n is a, c, g, or t
  misc_feature (268)..(268): n is a, c, g, or t
  misc_feature (300)..(300): n is a, c, g, or t
  misc_feature (335)..(335): n is a, c, g, or t
  misc_feature (365)..(365): n is a, c, g, or t
  misc_feature (418)..(418): n is a, c, g, or t
  misc_feature (424)..(424): n is a, c, g, or t
  misc_feature (432)..(432): n is a, c, g, or t
  misc_feature (447)..(447): n is a, c, g, or t
  misc_feature (474)..(474): n is a, c, g, or t
  misc_feature (476)..(476): n is a, c, g, or t
  Coding DNA Sequence Number=SeqID_325
gcacagtcactgtactcaagtctactttgggatctgagagccatatcgaatctgcgcgtaggagcgggtgtgtatacgtgcacacctaacgtcacagtcgtgctacatgtctatttctngtgtcagacgagcacgtagtcatacatgcttcgttctctgtgatctgctagatgaaggggnacttcnctgtatatggctgagttgtctctcgagatcttgattgtactattgagctatctcgatggcgacggcgactactaacataatnagcaacttagatctatatatacagcgctaagncgatatattagtactcaaggctgcagtcatgcatntatgtatcgcacctcatatctagatatatngagatcctagctgtctagagtcgttgtggcagtcgtgggggagagcacactcncttaanatgtggcncgtcttacgtgatgnttgcgtaggagcgagggagaaagagcntntatgagaaagatatatagtatcctacatgctgtctcgtt

SEQ ID NO: 10105 - DNA, 573 bp, Glycine max
  misc_feature (110)..(110): n is a, c, g, or t
  misc_feature (202)..(202): n is a, c, g, or t
  misc_feature (209)..(209): n is a, c, g, or t
  misc_feature (228)..(228): n is a, c, g, or t
  misc_feature (299)..(299): n is a, c, g, or t
  misc_feature (338)..(338): n is a, c, g, or t
  misc_feature (363)..(363): n is a, c, g, or t
  misc_feature (377)..(377): n is a, c, g, or t
  misc_feature (398)..(398): n is a, c, g, or t
  Coding DNA Sequence Number=SeqID_326
ctctctatcttcagatgatctcgatgtctgcagctatgagacgagagcagccacacggagcgacgcggcgcacacactcagcagcgcgctgcgactgacatagtacatcnctcgctatacgtcatggatcgcagacaaacactcactaaatctctcatgagagtcatgacgcgctgtgagagacgctcgagctgtctcgggntcgtgcntgtcgccgttggtactttncactgattgcccaccgtcgcagtgcgctcgacctgacgtgatctgcgtgtctctcgcgtctgttctgttancatacgcgactcattatgatgtcgttcttagcgctatgnctgctatgctgcgcgagtcgccggntgtcggccgcagtngtggaagcagacctgctcccngcagatcagactagcgacgcacgctgactgactacgctatccacacgcgtcgtcactagtcctgtacgagccgacgcgcaaacacgtcacatctccagccgtgctgacgcttcaagtctacgcctactccgtgccgagcacgactctcacgtgccaacgatcgaacgtgctcact

SEQ ID NO: 10106 - DNA, 522 bp, Glycine max
  Coding DNA Sequence Number=SeqID_327
atgataatacactctccatctcctatccatcgcacgagtttctcgaacagtcgaagtagatctcagtgtcagagccgcttggtgactagatcggcggcggttcgtatatccacgggggctattggggtcgtagcagcggcggtggttatgatgacttctgtgtctacagcttacgcagagcttcctcctccgccgcaagacggtgaaacgctatcaaacgtaccgcagacgctatcaggtgaagactgcaagaaacagaggatacaacgacccaaatccaagaacgcagagaaatgcactgttaaatgcgtcaacacttgcattcgcggtggagacggagaaggaccgctcaatatcagaaggccattagtggtgttcaaacaagggtttcgtagccgtaattactgcttagtggaatgttcggatatatgcaacttgatcggagatggtgactatggaccttgaaacgttatcaaaaagaagaaactatggataaaggacctcatgtaccttcatattatt

SEQ ID NO: 10107 - DNA, 434 bp, Glycine max
  misc_feature (301)..(301): n is a, c, g, or t
  misc_feature (373)..(373): n is a, c, g, or t
  misc_feature (403)..(403): n is a, c, g, or t
  Coding DNA Sequence Number=SeqID_328
agtacttcactatgcgatgtccgacgcagactgctggttgctccatctatcagacagatcaggtagcatcaccggtcgatatcatggctcttaacttgccacctttcatactattctcataggttcaacttgtctttcactcttacatctctgttcgttatagtggagttgtctttcttcactgagcacgagcgtgctgggtctagacgtgtatctattctatatctttcttcttctatatcacatatgatacagagtacagcagtcgcgacgcaggccaccatcagtgacgaccatacantctcttatcctcattcttcctattattctcatcagggcgttgtcctgcattcttttatatattattatcttntattctctctatcatatgccctctaccacntcatacagacatcacacagcagcgctcgagg

SEQ ID NO: 10108 - DNA, 511 bp, Glycine max
  Coding DNA Sequence Number=SeqID_329
tttagacgcatttttacggcgccgctggagggcctatgggtgtacacagtcacgagcaggaaagcctgcaggttttttttatagcccaggttctccagggggtggtcaagcaccacccccgttgccttcatttactcagcttgttccccagggattgatctttgtccccctagggcacccatttggggggggcatgtttgaaatggaaaaggtaaaaggtggctccccctatggtgcaggaacttatgctggagatggctcaagcccccctagtgagttggaattggctcaagctttccccccgggtaagtcctttgccggcattgcaaagaggctcaagggatctcaatgatttttatcctccatatatctcccacaccatattctgtgtcaaataaaatgagatgttagaagcaaaaataaaataaaagtgtgagagaataaagtaatacttcatatatcttcgatacaattgttgtcaccacttgtcatcgtcgtatcctgtaatgca

SEQ ID NO: 10109 - DNA, 242 bp, Glycine max
  Coding DNA Sequence Number=SeqID_330
ctatcgaactaggatgatctctaactgctggagaagatgcaggagagcacggactatggttgggtggaagatgcgaaagcgcgacgatgaaatggttatggagttctgcaacgagattggcgtcgaaagaggggttctcaaagtgtggatgcacaacaacaagaacactctcgcgacaaaagacaaccttaacggcaacggtatcggtagcgctcccagtgtcagcgccaacggggttgctc

SEQ ID NO: 10110 - DNA, 500 bp, Glycine max
  Coding DNA Sequence Number=SeqID_331
acaattatggtggtctctaaggaaattttggagcccataattgatcaatggccacggggtttgtttgggaatggttatttgtggatttcggttggggtgaacccgcgtttggtttttttttgacaaaacacaatgtattctttttcccgattgtttctggaaattgggccttcagaggtcagagaatgtttttttggatttttgtacctcctcagtccccccagaggggtgccaaattgctgatgataatgaggggatgatgatttttatggggtaccggaggtttttaaggttttgtggagccctatgtgggtttaatttggttcggggggaccccccagaaaaatttgttttccttagatcttttggcacgggccccatgaaaggttttttattaaaaaaagctcctcaggttttttgtatggttcccccttgggattatgaaccgaaaagaccctgagttttgattttcaatccccaaaggcgcaaatatgaagttt

SEQ ID NO: 10111 - DNA, 551 bp, Glycine max
  misc_feature (43)..(43): n is a, c, g, or t
  misc_feature (45)..(45): n is a, c, g, or t
  misc_feature (57)..(57): n is a, c, g, or t
  misc_feature (146)..(146): n is a, c, g, or t
  misc_feature (264)..(264): n is a, c, g, or t
  misc_feature (336)..(336): n is a, c, g, or t
  misc_feature (357)..(357): n is a, c, g, or t
  misc_feature (423)..(423): n is a, c, g, or t
  misc_feature (467)..(467): n is a, c, g, or t
  misc_feature (490)..(490): n is a, c, g, or t
  misc_feature (505)..(505): n is a, c, g, or t
  Coding DNA Sequence Number=SeqID_332
tgaaaattgattgcgacctcctcatccccatccctactcaccncnacaacagaaaanggctaagcagatggattgtgattgtcgttgtgttgtgtcatatgactagagtataatgctatatacgtgtgcaggatgacagttgcaantagccgtgtgtagaattcgcgcatcacgtatattaatgacgtacgtgatatgctccactatcgtaagcacgttggtcgtggatcagtattcagtgtgacgtgtgcgttgagtgatatngtacctatgtctcagtgtcatactcatgtaagacagataacaactgaaagagtaccacactgaacacatacnacatcaagtctatgcaccttnctgacatacagctacattagcatagtgcgcatgtagatcagtattaccatatgcagcgatgtgtcntgatgtctgctatgctctcgctgctcattttgcacgctagtcancgctgtcatagcgacatcggtgnagatggacccactcnagcccaggcattcacagtagctgagatgagagacgcgccaccgata

SEQ ID NO: 10112 - DNA, 351 bp, Glycine max
  misc_feature (26)..(26): n is a, c, g, or t
  misc_feature (39)..(39): n is a, c, g, or t
  misc_feature (93)..(93): n is a, c, g, or t
  misc_feature (95)..(99): n is a, c, g, or t
  misc_feature (101)..(102): n is a, c, g, or t
  misc_feature (106)..(106): n is a, c, g, or t
  misc_feature (111)..(111): n is a, c, g, or t
  misc_feature (114)..(114): n is a, c, g, or t
  misc_feature (121)..(121): n is a, c, g, or t
  misc_feature (124)..(124): n is a, c, g, or t
  misc_feature (128)..(128): n is a, c, g, or t
  misc_feature (140)..(140): n is a, c, g, or t
  misc_feature (149)..(149): n is a, c, g, or t
  misc_feature (176)..(176): n is a, c, g, or t
  misc_feature (180)..(180): n is a, c, g, or t
  misc_feature (196)..(196): n is a, c, g, or t
  misc_feature (211)..(211): n is a, c, g, or t
  misc_feature (245)..(245): n is a, c, g, or t
  misc_feature (272)..(272): n is a, c, g, or t
  misc_feature (280)..(280): n is a, c, g, or t
  misc_feature (285)..(286): n is a, c, g, or t
  misc_feature (292)..(292): n is a, c, g, or t
  misc_feature (302)..(302): n is a, c, g, or t
  misc_feature (314)..(314): n is a, c, g, or t
  Coding DNA Sequence Number=SeqID_333
atctatcatacatccgatgcgcgcangtcgtcactcgtnatcatcgcatcatcagccggtagcgacgctcagtgctcatcgtgtacttctatncnnnnnannctantagtnatngatgtgntcncgtncgcgctgatganacaaatagncaaggtaatctagacaccacagtacanattnatgaaagaatgagtanatgatgtgtaagtanaggagtgatgctatctactgcgcatcgtcgactnctgtgtctactacgctctgcatccctnctctgttnttttnntttgtngaaagaacanataaatatatcnaatactctacactcaatataacagatcatacagtgtg

SEQ ID NO: 10113 - DNA, 493 bp, Glycine max
  misc_feature (91)..(91): n is a, c, g, or t
  misc_feature (196)..(196): n is a, c, g, or t
  misc_feature (306)..(306): n is a, c, g, or t
  misc_feature (356)..(356): n is a, c, g, or t
  misc_feature (412)..(412): n is a, c, g, or t
  Coding DNA Sequence Number=SeqID_334
gtttgttgcggtccttgttatgcatgtgaaatgaactatggcacacatgagtcatgcaacggaccagagagctcgcgtttactctacatgncaacacctagataccgctggtcgtatggcgtggtcgtagagccacgagatgtccctgtcatatagtacgcgtgctcgcgtggagtccgtcagtatgctcgctggnccgccgcatcctgcatagacaaaggactatctcaccaatgggtaaccaccagagagcttgcaatgaccatacgtccagacacggacaggaaggatgataagacttgaacnatctatgctcacatagacaagcgacagtgaacagcataggctcatatatngccttagctacaaccctgcgcaggagggcatatcactcgtcttagcttgccttatngtgtggcctgccgtcgtcctcttcttacatacgtgatgcagagatcactcactagtatctctgtctggagtgtcgctggcg

SEQ ID NO: 10114 - DNA, 449 bp, Glycine max
  misc_feature (109)..(109): n is a, c, g, or t
  misc_feature (113)..(113): n is a, c, g, or t
  misc_feature (130)..(131): n is a, c, g, or t
  misc_feature (144)..(144): n is a, c, g, or t
  misc_feature (285)..(286): n is a, c, g, or t
  misc_feature (290)..(290): n is a, c, g, or t
  misc_feature (312)..(312): n is a, c, g, or t
  misc_feature (338)..(338): n is a, c, g, or t
  misc_feature (367)..(367): n is a, c, g, or t
  misc_feature (393)..(393): n is a, c, g, or t
  misc_feature (395)..(395): n is a, c, g, or t
  misc_feature (398)..(398): n is a, c, g, or t
  misc_feature (408)..(408): n is a, c, g, or t
  misc_feature (420)..(420): n is a, c, g, or t
  Coding DNA Sequence Number=SeqID_335
tcgtgcgtctgtgtgtttctaatatttgtgatgacgtatcgcagtcctacttgatagcgagcgagtatcgagtgacgccttcccatattagtcctgctcgttacattcngcanaccgcgcgaatccattnnaatagagcgtcantcatcgaagcgcgccacgcgtatacagtgtaactagatctgacccgataacgagaatagtaaagccagtcgtagcactacatgcgacgagacgcggcgtacgctattacttctgccgcctcacggcagagtcgcatcgtanntacngcgcggcgacgtgctctcgtgntgtatacgtcatagctcccgtccctncaccctccatctaggcactgtgcaccaanacagaacgagataagatatttatatnantantaatcgcagntcggtaaaccantcgagcaagacttgctatttctatctctt

SEQ ID NO: 10115 - DNA, 72 bp, Glycine max
  Coding DNA Sequence Number=SeqID_336
gcagtgtctccggatttgtggaatgtgctcgatgatgtgcactcctgtcaggtcattccactggatggtgca

SEQ ID NO: 10116 - DNA, 577 bp, Glycine max
  misc_feature (138)..(138): n is a, c, g, or t
  misc_feature (186)..(187): n is a, c, g, or t
  misc_feature (213)..(213): n is a, c, g, or t
  misc_feature (245)..(245): n is a, c, g, or t
  misc_feature (252)..(252): n is a, c, g, or t
  misc_feature (367)..(367): n is a, c, g, or t
  misc_feature (397)..(399): n is a, c, g, or t
  misc_feature (441)..(441): n is a, c, g, or t
  misc_feature (486)..(486): n is a, c, g, or t
  misc_feature (543)..(545): n is a, c, g, or t
  Coding DNA Sequence Number=SeqID_337
tatgtgctgagcactgtggctagtgcttaatggttatcgtgtgagcgcgcacctgctagataaagacgttgatactatgtgattatggtgttgtatgtttgctctatgtctatgtattatgtgtatctgatagtatanggtgatgagttatcagtcattatgtctggacatgagatagatatcatnntgtcgtacatctctcacagagagacngtaaggagatcgattgagtgggtagtagatantagggangtgcgtcgggtggtgacatctagaattagaacaagcatatgatcggcttgcaagatgttggtgaggtgaagagaagagccgcgcgaggcgacgcgagcattgctgtgcatagcanagctctcatagggtatatgtctggcgtggnnnggaaacctcatatcatatcactgctctttgatggtcttatanagactctgtgtctgttattttcctgcgcacttcttctatataccnttatttgttatattgtgatagctcgttcggactcttcggtgttgtttcgtgggggtnnntggtgtggttatgttgtgttcgtacctccgtc

SEQ ID NO: 10117 - DNA, 278 bp, Glycine max
  Coding DNA Sequence Number=SeqID_338
agtgtgtgtgcagagctcgcgaaaactatggttgcttttgacttaggtcatggttaggtgatgctatttgggtgaaaggaattgacttatatcctactaagtttggtgagtcttagtaagctttaaatgctttgcacttgtaatttatcttgtggctatagtggtgatttgtgatcacatactgttctggtaaatccgggtatgtattcaataaaagagtttagcccaaaaaaaaaaaaaaaaaactacgtgcaccagagcagcaaactgtgtatagt

SEQ ID NO: 10118 - DNA, 569 bp, Glycine max
  misc_feature (336)..(336): n is a, c, g, or t
  misc_feature (416)..(416): n is a, c, g, or t
  misc_feature (490)..(490): n is a, c, g, or t
  misc_feature (502)..(502): n is a, c, g, or t
  Coding DNA Sequence Number=SeqID_339
tattatcgtgtgtgtttggtgcccaccatccttgtgtgttacactcctctgctacgctttgtgtggtgcttgtatcgtcctctattgtccattataatactatgaacttattattaattgagctaagttccatctccacatatcaataatatataccacttctattaatgagctttggcatgtcatggtcttgtgatggtctgtgtttgtgcccctccttcctccttgctgtaaccgttgttgtgaatatgtgttaggctggatgatatctctgtgcaacggacagtcctcactctcatctcatgtgcctctattcgttcctcgttctgtgtcttngtagttagtacactatcctgcatatgtatacatcgtgatatgtaccatctatatctggatcagctcatcgatacgagccngagcgatccgttgcaatatcctatgtgcaccaaccatcatgatatggatgtactgtgcagtctgcgctagacangatagatactgngtagattatgtgacgtgatacgggacgtcacgtgctgatggggtctacgtcgcttactacctgtgta

SEQ ID NO: 10119 - DNA, 504 bp, Glycine max
  misc_feature (243)..(243): n is a, c, g, or t
  misc_feature (284)..(284): n is a, c, g, or t
  misc_feature (397)..(397): n is a, c, g, or t
  Coding DNA Sequence Number=SeqID_340
ctctaccatactccatgcattgttgatagtcagagcactactcacgaggatgacatattagtggtgtcacgatggtgggtcgagaggtgtggaattgttgtgagcgatgtcgcaggtgcacggcaggagggcgctgttcggcgcactccgtagtccgagagacggcgggagctggctcggtgtgcgttccgcgctagtgggactcttatcgcacggtaggaggcagacacaacgacccacaancatcgcagatctactagtcctcgcctcgtttctctctctcngctaacgagtgtcatgagcgagatcaagcggtggtgtaggcgcatgtgggctgctgtatgcgcgttagatcaatatcatgtgctgcgctatggctttatcctatcggaatatntagttgtagctctgacacacgcaaacaagcatactatctctatacgattgtgctgatgcgcgatgcggtagtattccgccctgtgaacgcctatcagaatccacact

SEQ ID NO: 10120 - DNA, 277 bp, Glycine max
  Coding DNA Sequence Number=SeqID_341
aatatcctgactaccgaggcttgaggagctggatgtttcatctaatgttgaataatccctacctgactctattggattgctgggcaaactcaaaatctttaatgtggcagccaacaatctaactgctcttcctgaatccattgatcctatcatgctatcttgtagcatcatctaaaacaacatcgtcttcctggtaagagaaaatccctttcgtaaccatgtctaagagcaaacttagtggggggaaacatacacatatatccatggtaggaacgac

SEQ ID NO: 10121 - DNA, 411 bp, Glycine max
  Coding DNA Sequence Number=SeqID_342
atatagtgcgttaagcggcgatttcaggagggcatatcacatcaagtcccttcacatgagcatgtcgaataataaatataaaagaaggggtgagggctgttccggtgcaactagcttacgaaacataatatatggtggcgtaagaaacgtgacatatctctgccgctgaggcggcaagctagcgaattagacatatatggtgttctaccttctgttatgtcgacttattctattatatattagtatgtcacggtatgtatcggatagatagcgagaatattttatattatggtgggtagatgtaaacatcgttataatcaacggtgatgcactcttacattactactctgccgcgataaccccacgcgcgtgagggagagcggctcgccaactatagggatggaccttcat

SEQ ID NO: 10122 - DNA, 522 bp, Glycine max
  misc_feature (100)..(100): n is a, c, g, or t
  misc_feature (111)..(111): n is a, c, g, or t
  misc_feature (155)..(155): n is a, c, g, or t
  misc_feature (220)..(221): n is a, c, g, or t
  misc_feature (346)..(346): n is a, c, g, or t
  misc_feature (349)..(349): n is a, c, g, or t
  misc_feature (353)..(353): n is a, c, g, or t
  misc_feature (357)..(357): n is a, c, g, or t
  misc_feature (370)..(370): n is a, c, g, or t
  misc_feature (384)..(384): n is a, c, g, or t
  misc_feature (484)..(484): n is a, c, g, or t
  misc_feature (495)..(495): n is a, c, g, or t
  Coding DNA Sequence Number=SeqID_343
tgctctgtctgcagtctatatgactgctgtgttatcgcgaatgagaatactgtggtgtagatcgcgctaactgcgtcgatatgtatatgaatcatcaagncagtattactnctcatagtacgtcacggtataggacaacttagacacggacagcngacgacctgcgacatggagactagacgcgtcgctcggattactgtgtaatagtgtcatgttgtgnngatagatctcctagtatgtactgatcaccgctgacgcgccgcacgacacgcgcggtgacagatcacacgtacgcgagcagtaccacgagatatcgatagaggatgatataccacgcacgacatanganaganatantcgtgggagatgnagtgcacaggcatntgagtactgtagctctatacctacacatcacatcgcgcacactgctcatatagacacctacaagccactacataatcacatatcatacgtgatactatgngcgctcagcantcggactatacctattatgcccagacc

SEQ ID NO: 10123 - DNA, 487 bp, Glycine max
  misc_feature (210)..(210): n is a, c, g, or t
  misc_feature (228)..(228): n is a, c, g, or t
  misc_feature (249)..(249): n is a, c, g, or t
  misc_feature (260)..(260): n is a, c, g, or t
  misc_feature (345)..(345): n is a, c, g, or t
  misc_feature (350)..(350): n is a, c, g, or t
  misc_feature (353)..(353): n is a, c, g, or t
  misc_feature (379)..(379): n is a, c, g, or t
  misc_feature (400)..(400): n is a, c, g, or t
  Coding DNA Sequence Number=SeqID_344
tgtaagcgcgagagaaggtgcattaggtaaagatataagagaatgaagtggagagtaagaaagaagtagttgagtacagagaggattgggaaacgacgcatagcactcagacaactaacacagagattacgcacatcaacatatatagcaacatcgcacagcacaagcacaccactcaggcgagatatcgctgcattctgtcccacatangtttccacgtgcacgccncatgcgcattcgacctcagantaactcatacntctctccagtcgcgctcactcgatgcgacttatattatatactcctctcatctcacgacgttagatcagggtgccgctgaggcgncgcgnggngtcccgtgccgccagagcagacgagnagcgagcaacatagtacagcnacgtacagcgcgcactcgcgcccctaactaccctctcctacgagaaggggggagagctctctccggtgactcgcatatctctccttt

SEQ ID NO: 10124 - DNA, 533 bp, Glycine max
  misc_feature (46)..(46): n is a, c, g, or t
  misc_feature (91)..(91): n is a, c, g, or t
  misc_feature (95)..(95): n is a, c, g, or t
  misc_feature (111)..(111): n is a, c, g, or t
  misc_feature (137)..(137): n is a, c, g, or t
  misc_feature (179)..(179): n is a, c, g, or t
  misc_feature (190)..(190): n is a, c, g, or t
  misc_feature (224)..(224): n is a, c, g, or t
  misc_feature (229)..(229): n is a, c, g, or t
  misc_feature (235)..(235): n is a, c, g, or t
  misc_feature (271)..(271): n is a, c, g, or t
  misc_feature (310)..(310): n is a, c, g, or t
  misc_feature (316)..(316): n is a, c, g, or t
  misc_feature (328)..(328): n is a, c, g, or t
  misc_feature (363)..(363): n is a, c, g, or t
  misc_feature (374)..(374): n is a, c, g, or t
  misc_feature (377)..(377): n is a, c, g, or t
  misc_feature (391)..(391): n is a, c, g, or t
  misc_feature (409)..(409): n is a, c, g, or t
  misc_feature (419)..(419): n is a, c, g, or t
  misc_feature (493)..(493): n is a, c, g, or t
  Coding DNA Sequence Number=SeqID_345
cgtgctgcgtcactgtcgcgacagtgtagaaggtagcgagagtganatgatgatggacagactgagctgatagataccgtaagcattcacncccnatcatctcatgctagnatagctaagtgtgtgtggagatcatnctatgccgcagcgtgagcatgagagtaagtgagcttcgtctnacgcgcaacgncacgtactgagcgtgcgcgtctcaagtgtgatantgatnagatanagctcatcatcgaagcgatgcgtctatgtgagtgtntgctagttacgcgactgagtcatcgcagacagcgagcgnagaganctatgcatacanagcagtcgactgtcgcctcgctctggtgctgtgcncgatgtgaganagngagtgcgtgtgtgnagcatcactgtgagcagntgtgtagtancactagtcgagctctgtcgatagtgtagagtgcgatgagaggacatgatgatgtagtgtagaggaacgtcgagncagatgtgactgatattagtgagtactgtggcgtgagact

SEQ ID NO: 10125 - DNA, 396 bp, Glycine max
  misc_feature (46)..(46): n is a, c, g, or t
  misc_feature (80)..(80): n is a, c, g, or t
  misc_feature (163)..(163): n is a, c, g, or t
  misc_feature (182)..(182): n is a, c, g, or t
  misc_feature (235)..(236): n is a, c, g, or t
  Coding DNA Sequence Number=SeqID_346
ctctccaaggaacgacagcagcagacacaggaggaacccgaggaanagggcaagacaacggagaagagaaaggggagagnggagaaaaaggacaaacacgagcacgcaaacaagaagaaacagacaagcggcgagaacagaggaaaaggaagggactcaaggngaccgcgccagaacgcganagacaaaggagagaacaacgaaaaagaaaaggggaaaccgtttttttcactanngacggaaaggtaaatattctaatgaagaatgctgctacaaatataagaaagaagataacagataacacagaagaggatatatcgagaataatgggcacgaaatttgagtcaagttaccatttgggtgaagttgaaaacgcatttctaaaagaatgtggga

SEQ ID NO: 10126 - DNA, 439 bp, Glycine max
  misc_feature (79)..(79): n is a, c, g, or t
  misc_feature (250)..(250): n is a, c, g, or t
  Coding DNA Sequence Number=SeqID_347
ttggacttggattctgccatcagaagagtccttaaggctgcctctttcagagacaacctcgctaaaggtcttcacgaanttctgcaaggccctcgataacagaaagaagcctgctctctgcttgttggctgacaactgtgacgaaccccaatacaagaagttggttgaagccctctgcaaggaaaacggcgtccccctcatcagagtccccgatggcaagcaaatcggtgaatggatcggtctttgcaantttcgatgctgccatgaaccccagaaaggtcagaaagtgctccagttgcgtccttaaggccttcgctatcgatgatgaagctgccaacctcgtcagagaagctattgccaagaacagcgaaatccaactctcctaaataattacaacatctcgttttgatttttaggttcatcctcaaagattcattgt

SEQ ID NO: 10127 - DNA, 469 bp, Glycine max
  Coding DNA Sequence Number=SeqID_348
aaaccgctgggctccatacgacaaccccaaagggggaactcgccgaaaactccgggggaaggggcttacttacatcacgggggacccgctacccagagattgaccccaacccttctggaggcatcggacttaaaggcagcaaagggggggcgcgatatcctgaggcaaaatcgccgggtccccaagcgggggagaacctagtacgtctgctatcctctaaggatgacaccacgcactctcagtcgcccgcctcatatacttagttagaccccccgggggggccgaaacgctcgacggccgcctcaccaaatcagtagcagctgggcgagcgtgcccacatcttggatcgagccacaccgcttccgctgtacagcgccccgcatgcggcctcacgacgtgactcaaacactatcacagtcgcgctgaagaacatagatctctgtggcatgcactgctcatacggagcgaa

SEQ ID NO: 10128 - DNA, 283 bp, Glycine max
  Coding DNA Sequence Number=SeqID_349
ctgcacaagttagttgcaatttttttttatctcttttgtttttggatttttttttataataaataaaaaaattatcgtatgttggtttgttttgttctttcgttcattatttattgttataattgttttgcttgtttgagtttttatgattgtacacgaactatttagctatataaactgactccaaagaagattcgtagtttcctctattaatgctatctcttgttcaattttatttttattgaacttttttgtttctttcttgaggtattggcatctcaaa

SEQ ID NO: 10129 - DNA, 450 bp, Glycine max
  misc_feature (130)..(130): n is a, c, g, or t
  misc_feature (338)..(338): n is a, c, g, or t
  Coding DNA Sequence Number=SeqID_350
ctggaggagaagctcactctgctcttactgagtttgatgaggagcgagaaagacattaccccaatagggggggtccctcactatggggtggtgaagggggagtatatcatgggcaaggggtgctgcgttnggcccaaaaaaagggggattacattgcgccaatccctccttaagcagacttctcgtgtggctctgggggggagcaagctcaagtgtatcgacacctcttcaaaggttgggcatggggcggttccaaaccacacaggagaagcagaaggtctttgggcgcctcaaagcataattttgtgaattggggtgggatgcgtggtttctattcngttaccatatcttataaacatattggaggtgttctgtgttgagattatggggccccgagtggtgaggtttttccccccttaagtgtggcaaacttttgtggagactgagctt

SEQ ID NO: 10130 - DNA, 528 bp, Glycine max
  Coding DNA Sequence Number=SeqID_351
gttcgtttaacgtctcaacgccacaccgacaccccgcgaccctctcttagtactattcacatcacgttcgcgatagggacacgccgcacaacttctactgatgactaccatatttattttaatactagccgtctcacgacgccgcgtcgtatgcccgaccgttaacatcctcatttacatattgtgaccatccgattttgccccaccgagccagcgtcaagtcaacccatacagacaaattgtgtgatcgccgctcgcggctcacatgataattactccataacaaccctgcattcaccgtataattccaccagttgccttatttccacctgtccacgtgttctccgccttctctcgggtagattctcggcactgatgaactcgtacactgctacacgtcgcgtatagtgatagacctcccacattacacatcgcaagttgatattaatcatatactctcgtccaatgttagctgccaccgccggacgagcacttatactcgcacacccgctcaactagtatgctcag

SEQ ID NO: 10131 - DNA, 461 bp, Glycine max
  misc_feature (55)..(55): n is a, c, g, or t
  misc_feature (60)..(60): n is a, c, g, or t
  misc_feature (151)..(151): n is a, c, g, or t
  misc_feature (170)..(170): n is a, c, g, or t
  Coding DNA Sequence Number=SeqID_352
tattccacagataatcttcttcaccctcgagacaatttgtagtgttgttgtcctnctgantactatacactaaggcaccactcctctaccgcgccgcgtgatgatatcttaatctataataatatctacatatctacacgcgcgccagcgnacacgtcatctcatctaanctctcaacatctatccttatccagagacgctatcattctccgctgataacatattcttaaatagatatctattatataccctgatagattagcgagtagcctcagcttgataatctcgtctctctcatcaacatgtaggtataacacatacacatcccgacagaacaacatacaagataatataatatacgctttcatgaataagcacctactgccgcctcctgaggaggcgggggctcccctccacttctcttctattcttgtacttcttctctgtttctactaatagag

SEQ ID NO: 10132 - DNA, 323 bp, Glycine max
  Coding DNA Sequence Number=SeqID_353
atgaccatgcatatgtaaatgtagcacaaacttacttacaaagcaagtgcttgattgtttattctttgttttcagtatgaacaattaatctaatattttagggcaagaactattgtgaatttgtacgtacatcatcaactattgtgaatttgtaccatttttaagtgaaagattaggaaagaaagcaaataaagcatcaaacgacctatgttttttatttagggtttagatatatggtatttaaaagagtttatttatatttataaaagtgatttataatatccttataaatttttactaagcccatttatctacatattgta

SEQ ID NO: 10133 - DNA, 557 bp, Glycine max
  misc_feature (126)..(126): n is a, c, g, or t
  misc_feature (176)..(176): n is a, c, g, or t
  misc_feature (275)..(275): n is a, c, g, or t
  misc_feature (304)..(304): n is a, c, g, or t
  misc_feature (453)..(453): n is a, c, g, or t
  misc_feature (491)..(491): n is a, c, g, or t
  misc_feature (506)..(506): n is a, c, g, or t
  Coding DNA Sequence Number=SeqID_354
tcactatcacgtcactatatatctgatctacattcacttacatatgatgacagtttagcatcatatcaagtgctcacttgtactaatagatatcattgatatcatatcaacctttacaacatgtcnatgatagttagacatcgtttattatgcgcaatatagtacgagtcgagtcnagttatagatatgaagcagcggctcgcccgtgtgtgccatgttcgtacatgcactcatgcatacacgggatctagcgagtaaagacgtgagaatatagncgtcagtatgttacacgaatagatagatngtgacactcatattgagacgatggtcatgcgtagatatcctctctatctcacgttctattgcttacgaacatcttcgattgcacaacagctcgtggatcgtacatatacatatataccgagcacacacattgtacataccacgacagantagtcatgtgatcagactgttgatgaatccagataacnagcatcaatagaatnatatagatatatatgttataactataaacacacccaacacacgacagatag

SEQ ID NO: 10134 - DNA, 164 bp, Glycine max
  Coding DNA Sequence Number=SeqID_355
ccttcaacaggcgtgatgataattgtctaggtaaccacttagaaatcatcatgcagatcttcgtcagaggtcaggagaccatctcccttgatgtccaaccttttgactcggttgagactgtgaagacccagattcaagagagagaaggcattcccgtcgaccag

SEQ ID NO: 10135 - DNA, 565 bp, Glycine max
  misc_feature (61)..(61): n is a, c, g, or t
  misc_feature (156)..(156): n is a, c, g, or t
  misc_feature (315)..(315): n is a, c, g, or t
  Coding DNA Sequence Number=SeqID_356
tgagaaactctggtcacgcagccatttagtgcttcagtctttgttgatataacgctcctgnaactgctctcatctatactctcatgatgagatgattcattacctatactgagaatcataatatcttagagatacacaacaaacatgcccgcgacngaacacgtcatgaaaggacatgatgtcgcacttacgtcgctcgtgatgcacgcaagatattgttgtagaccaccacacctcgcaccatcatcacacacacgtgagtaaagtagagattgtattatgcgcgagccgcacgctctgaataaatcacatcancgataatgctcgtggtcgtccacggctcaacgggagcagacgtctcgaactagaccgacgaacaacacaagacgggaaagtcgaaaccgacacgacgagacaacaaataccgcatacagcgcctcagacagagtggtagtagatgaacatccacattcaccactaggtctgagtaatctccctcaaattacatatcaacaagacatcgcgcttacgaactccgcttgcttgtaccactacccattactat

SEQ ID NO: 10136 - DNA, 133 bp, Glycine max
  Coding DNA Sequence Number=SeqID_357
cgttatcatatccaccgggggaaaggctgctaagaagcaactcgacaccaaggctgcaaggaaatctgcgccgacaactggtggagacaagaagcctcatcgctatcgtcctgtaactgttgctcttcatgag

SEQ ID NO: 10137 - DNA, 531 bp, Glycine max
  misc_feature (148)..(148): n is a, c, g, or t
  misc_feature (213)..(213): n is a, c, g, or t
  misc_feature (248)..(248): n is a, c, g, or t
  misc_feature (267)..(267): n is a, c, g, or t
  misc_feature (319)..(319): n is a, c, g, or t
  misc_feature (408)..(408): n is a, c, g, or t
  misc_feature (470)..(470): n is a, c, g, or t
  misc_feature (475)..(475): n is a, c, g, or t
  misc_feature (490)..(490): n is a, c, g, or t
  misc_feature (492)..(492): n is a, c, g, or t
  misc_feature (501)..(501): n is a, c, g, or t
  Coding DNA Sequence Number=SeqID_358
gtctagctgtatatgcgaggtcgtcatattcgaggctgtagtgctagtctacgaatagtagttaatcaagcttgtgaatcacttgtatgtgcagctatctgctgagtgtgtgttctcgaccgcatgtccgtctcgtctctgacatctncttcgcagatgcaaccgcgttatgatctcctatagaagccacaagcatgcgttgcgcgacacatncgcgtgcgcgctcgctgtcttcgatttacatagtngatgtgcgtagtacatatntgatatcagaatgcctaacgtgacgcgtgtcagatcagcgtatactatcgcngcgacactgttattgactatacgcggctgctctcagtcatctgacagattcgctactgtttttgcgacgtactcacgcatggtggatcntgtgatataccgagtcatgaccagttacgcccgctgtactgtatcgtatctggtgtacactntccgnttcgtgcgtcatganangaatacgtnatacattcacggtgcactatgtctactatc

SEQ ID NO: 10138 - DNA, 528 bp, Glycine max
  misc_feature (81)..(81): n is a, c, g, or t
  misc_feature (186)..(186): n is a, c, g, or t
  misc_feature (188)..(188): n is a, c, g, or t
  misc_feature (237)..(237): n is a, c, g, or t
  misc_feature (258)..(258): n is a, c, g, or t
  misc_feature (265)..(265): n is a, c, g, or t
  misc_feature (330)..(330): n is a, c, g, or t
  misc_feature (386)..(386): n is a, c, g, or t
  misc_feature (410)..(410): n is a, c, g, or t
  misc_feature (454)..(454): n is a, c, g, or t
  misc_feature (468)..(468): n is a, c, g, or t
  misc_feature (470)..(470): n is a, c, g, or t
  Coding DNA Sequence Number=SeqID_359
gacgagctgaggagactgcctgtctcatatcgacaacgctagtcacgcatgacgacgagcgtccatcgtgagaggagactncacgcacagagaacgcgcgactcgcaccacacccgcgagacgctatacagctcacaccacgcgagcaactagactcgcacacacacaaccgcaacatggagacananaaaactatacagacactacatatctcagatatcatctcacgtctacgcnccctgctcgcagctcagacangtgcacnctgtacggcatagcagaccgctcgctcgtcgtgtcgcatcgatgcagcgtgcgatccgacggacncggtcgatggcgcacaacacactgtgaaagcataaccatctatagatgtgtatctntccgttagctgtgatacgtagagngggataggtccttgttgttggtgcagcgcgcgtgagggcgcttnttcgctcgatactntntacacatccgtcccgcggggtgccggtgtaaataagcgaactgccacgcgataacggg

SEQ ID NO: 10139 - DNA, 514 bp, Glycine max
  Coding DNA Sequence Number=SeqID_360
acatacttcagaaagcgggcggcaaggtttcgacgcacactggtttcgcatcagcagtcgggctaggtctaggactctatacggcattccgactacgagctatgcgccttgcatacttcagagctttccgagccatggagaagccggtagaagtgcgcttcgcagatggtcgtactgagcctatcccagacatcacagcgaaaatatctgggccttcacgctggggcgatgctgcgacctacttcctcttttccgttggcggcctcttccttggtggtgaactgggtctgttgacgggtacagccagcgcagcgagaacggttaccaaggacccggcgagtagggagaggattgagaaggcgtttaagaattaccgaattgatgtgctacagagagagattgagcagctgaagggcaagagtaaattcgaggagttctttagtagtgggccgtytagtgcgtaggtcgtcaagcctacggcctgagctgtagtatctgggaagctgcatttcac

SEQ ID NO: 10140 - DNA, 491 bp, Glycine max
  Coding DNA Sequence Number=SeqID_361
tatgaatcgctttacggaatccaatatgtcacctgagtttcgaattagatattgccgcaaatatctgttagacagcaatatcctagttgggactaattgtaacacttctttgtctcttcgttgatgtttaaaaattcgtcttacaactctcttccagaggataatagactctatcaaagtgatactacatgtaaggattgttgctacaatgacttcaactcttgctgaataaatgtcatcttgaaagctgctcaatgtcgtattgtagagaagcataagggttgttgtatatacagcaattaaattcgccaggttttcggccatgctgctgaggatcagtattaaagctgacattgattttgaactagcggagtacatatcataatattgagaaccatatgtatacatatcactggtcaatgtagaaagactcatcttattgcttcctgctgcaagggtttgacaggtgcctacaacatcgtcatcataag

SEQ ID NO: 10141 - DNA, 176 bp, Glycine max
  Coding DNA Sequence Number=SeqID_362
acgagggagttatgctgggtctatgttcctccacatcatctttctattggtggcatatatcttgtcaacaccaaagaatgtcattaggccaggcttatctattcttgaagagattcagactgttgtttcgggaggtatgtcatatgccacagatccaatcaactatggagtcacgc

SEQ ID NO: 10142 - DNA, 459 bp, Glycine max
  misc_feature (26)..(26): n is a, c, g, or t
  misc_feature (81)..(81): n is a, c, g, or t
  misc_feature (271)..(271): n is a, c, g, or t
  misc_feature (423)..(423): n is a, c, g, or t
  misc_feature (431)..(431): n is a, c, g, or t
  Coding DNA Sequence Number=SeqID_363
gattacaattacatcaccacagctangacatcgttcgccgatagtgtcattactgtctgctcacgagtcgtcgtactcttngatactggctcacgtacatacctctatgatattatccacaccacaccacacagcgcgactgtcgagtctactgtatactagtgttctatatctcgatgagtctagttatgactcacatgtcttatctatagcagggacgatggagagtgcatatatcaacaatacatgattgctcagttatggtgttgtntatttctctagcgtgtcagggcgtcacacgcgcctacactcagcagcaaccaccgacgctacctacgtacagacagagaggaggacaaataaccgtttaactcatggtgggagtgatgcggcgctcgcttatattcgtgagacaatacaccnctgcgttnttctgctctgtcatagcgtggtgcagca

SEQ ID NO: 10143 - DNA, 536 bp, Glycine max
  misc_feature (94)..(94): n is a, c, g, or t
  misc_feature (134)..(134): n is a, c, g, or t
  misc_feature (199)..(199): n is a, c, g, or t
  misc_feature (418)..(418): n is a, c, g, or t
  misc_feature (442)..(442): n is a, c, g, or t
  misc_feature (448)..(448): n is a, c, g, or t
  misc_feature (486)..(486): n is a, c, g, or t
  misc_feature (504)..(504): n is a, c, g, or t
  Coding DNA Sequence Number=SeqID_364
tgtcgtgacgtcatcgtatactctcgtcgtgtacacgggcacagcgatactgcgtagtcggttctagcagctacctcttttgcaccgtgtctgncatgaccggacgtgctgctacgtactagtcatactcacancgagcgcgtcatcaagtatgcgacgaacatgctgatgagacggcttccttcgctgtagcctactnattcacatagatcaggtagacatcatctctatcgaaccgtacagtatgtgcagtctatagcgaagtcgatgtagaacggacgtcgtacgtatgctcgtatccgcatcctgacacgcgccgtactctcgacgtatcgacatgccactaatcgagacgatatgacgccattctcgacaactaagaacactctccacgtcacactgccgcacgtggataatntatatgaggaagacgacacaaccncgaccngacacgattagaatgatcgacgttcgtcacgtcatacntgtagctgcgcggcagantctacatatccatgcttgattctaccggtgat

SEQ ID NO: 10144 - DNA, 452 bp, Glycine max
  misc_feature (279)..(279): n is a, c, g, or t
  misc_feature (315)..(315): n is a, c, g, or t
  Coding DNA Sequence Number=SeqID_365
cccgccggattctactcaacaaagttggggggtttcccccccaattaaaaaacccctgtttgtaatccaccagattttttcgaccaagaaacttctaccagcggtcttccccacaaaaaagtcttaccggttcattaccccaatttttagcctacaaacaacatggaggagtaccctgccacatcccttccagagtgtgaagcctttttcccgtgcatggttccaacttttcccgcatccctttattttggtagggagcaaccttccccagttcagctngctttgaagctgaagcttcacttggccgtatccaanggattagtacaccctcagcgaaccatgcagagaaagcactgctgcaaaagattttccgaaggagaggtcggaattggacttagaatctgccaccatggtgagtgtggggaaaggaaccaaaggttgcgtgtgcaagt

SEQ ID NO: 10145 - DNA, 248 bp, Glycine max
  Coding DNA Sequence Number=SeqID_366
taattttgacaaccgtgctggaaatattattcaggttgacagagagttttattggatgtttggtccatcagaaaacgtagcgcatgtatgtggttctcatggcccaccatctgtagattctggtcagattggtactgatgttaatcagctctgttttgctcagttgacaccgtatatgtatcaggcgatgcttcagcaggtttttagtcttctcagccaatgcagataactgtacctgttttcataac

SEQ ID NO: 10146 - DNA, 157 bp, Glycine max
  Coding DNA Sequence Number=SeqID_367
aatggtcttgggtgatctgtggcacggttagacattaccaaaggtggatcaaatcccaatgcacaccacacccttggtgccaatgaacttgttataatgggtggaagggtacaaacactgcttggtttaataacccgcgatggcactttataccaag

SEQ ID NO: 10147 - DNA, 540 bp, Glycine max
  misc_feature (58)..(58): n is a, c, g, or t
  misc_feature (73)..(73): n is a, c, g, or t
  misc_feature (241)..(241): n is a, c, g, or t
  misc_feature (278)..(278): n is a, c, g, or t
  misc_feature (323)..(323): n is a, c, g, or t
  misc_feature (331)..(331): n is a, c, g, or t
  misc_feature (336)..(336): n is a, c, g, or t
  misc_feature (446)..(446): n is a, c, g, or t
  misc_feature (479)..(479): n is a, c, g, or t
  misc_feature (490)..(490): n is a, c, g, or t
  Coding DNA Sequence Number=SeqID_368
acattgagctctctcgacgagtgacccgatatcattacgtctctcgccgggttagagntgtagagtcagatgnaccacgaacaataatagtaacacactacgagacatatatgacttcctctctcatgtaatatcgctatgatgtcataattcgaccactctgtccggtacactcacagcgactggattcgcgacgagtccatacactacacatcgtcacagtagagacgtcatgctatgncgaatgaaccaaggagtagcgtcacggcgcgtgcgangaggagtagtcataggcacgctggctcatatgagtgaagattctncgctgctntgcanccgcacgattgtgcttatcgcgcactgcgtactgccagcgaatcgctcatggtgagccactacagatcgtagacaggagcgacagcttcagtaatgtacgctctatgtgnctatgttagtcgctcatatagacgcgcgctttnctgctgtcgancgtctagcgtagacagacgcatacagtatacatgacacggatcgcatcta

SEQ ID NO: 10148 - DNA, 497 bp, Glycine max
  Coding DNA Sequence Number=SeqID_369
gcgggatcacaatcgcctagtttaatcgctggcgttatatggaaatttagatgtaagtaatcaaagtgattgttaaggatgtctagcaaacacgtattgaaaggaggtggaaacaccaaaagctattggttctttagttattaactaggcccccttcgggggcagaacaggaaataacaacaatagcactcctatgggtaaacctaatatatcatacgcagtgaactgaaacatctaagtaactgtaggaaaggaaatcaaccgagactccagaagtagtggcgagcgaaactggactagcctatcgatgaattgttaatagaatactttggaaaaagtagtccatagaaggtgacagtcctgtacattaacaataattctgcgcgccttcggcgcgatagtaagtagagtggaggaaattccgctcgaataagccttcactttttttcttgaaaaaaaaagtagggcaatagggataccattctctaaggctaagt

SEQ ID NO: 10149 - DNA, 451 bp, Glycine max
  Coding DNA Sequence Number=SeqID_370
gccggtcaaaatactctccatgagacctttttttttttttggacatcactctccatgggacatactaccagattctctctgtcaaagaagatatgacgaaatccgcaacagctatcgatccgccatccttcactctcacccagacaagctaaacggttgtagctcagacgaaaagttcctcaagattcaaaaggcgtggcaagtcctaagcgatgcggagctacgcgtggtttacgacaacgacctccgatcttcgagactagacggagtaactgctgatgagttgattcagaattgtttggttcagctttggaaattctccggcaagctgtttgacttttgtactcatctttgttaattctttaagaaacttattataatgggaatcgaaagggcctattggatttcttacctctatagctaccaatcttgtgacactgtcttgttttca

SEQ ID NO: 10150 - DNA, 412 bp, Glycine max
  Coding DNA Sequence Number=SeqID_371
agcaaatcgctcagctctgttgtatttttcgctttagctatcattcttactttcacaacagtagctcctgggcaagcaagcgctgcaactttcaaaggaattccttttgaacagcagcaaatcattaaagaattattggagaaaaacgagcgtgtcatcaacattctcatcaattcatttgttgaggaagacaacaactacacatttgatgtgaaaaaagctgttgagctcggactaactgaagaagaagcggcgactgctgagaaattcttagatcgcgcagctgttcttacaatcgttttcagtgaaagcctcactaaaaacgaaaaagggaaattggtttttgatgcagaaaaagctgttgaacttggtcttacaaaagaagaagcggctaaattcgaaaagcttttca

SEQ ID NO: 10151 - DNA, 489 bp, Glycine max
  misc_feature (94)..(94): n is a, c, g, or t
  misc_feature (176)..(176): n is a, c, g, or t
  misc_feature (257)..(257): n is a, c, g, or t
  misc_feature (455)..(455): n is a, c, g, or t
  misc_feature (462)..(462): n is a, c, g, or t
  Coding DNA Sequence Number=SeqID_372
ggagacggcgagacagcacccacaacaagacggggtacgctatatatggaaatggctgggaggagtagaggagagatgatatagcctcggcctngcgctcgtcctctgtagttgagttgttgttttctttcctgtcccgtctaccgtggcgatttaatactataattaacatacancgtctctgccatttttcctccctccccctcccacaccacatccgcgcgagagagagcctaccgcaccaagcaccacaaaanatctgcgcgcgggtctattacttattattatctcttcctacacctgatacgatagattaccaacgaacattagcagagacgctgcgagtgtaccggaacttaggtggggtgtcgcttctcgcgggctcggcatagagcccaccgcatacctgaagcggacaccgcctggcatctcaacagaatacaccaccgagcgcntatatgngagacgacaggtgcgaggtctcacgat

SEQ ID NO: 10152 - DNA, 566 bp, Glycine max
  Coding DNA Sequence Number=SeqID_373
agctgaaaagaactaccacccctgagccattctagttatgccgatacccccatgcctctgacaccgattcaaggccttggagtaacaaggttcccgcccaggaaaatgagaatcgccaaacggtaacttattgtatatggttcaaaccgttggtgccccagaggtagacgacttcttgcccgagctcgacgctggtggcaaacctgtcacggtattatctgcgtgacgccacacgtattgctgttgcagccccattttggaacgcagaagcagtttccggaaatgtcggatctcgcgagggaccagctcgggaatcaacacccgtgcgagcaggtaagtggagcagacgcacccgttgtcgcaatcgacccacaggaattgtccactcgatgtcaattactatgtttttttttttcttttaactaaatttttcagtttcaatttgacaaacaaatcccaagtttcatgtcatacataaaggaaagttaaatgagcaagatctgaattatctttcttattctatcccagtaaaaacaataataacttctactcaattgccttgttgc

SEQ ID NO: 10153 - DNA, 519 bp, Glycine max
  misc_feature (81)..(82): n is a, c, g, or t
  misc_feature (108)..(109): n is a, c, g, or t
  misc_feature (129)..(129): n is a, c, g, or t
  misc_feature (131)..(131): n is a, c, g, or t
  misc_feature (134)..(134): n is a, c, g, or t
  misc_feature (146)..(146): n is a, c, g, or t
  misc_feature (152)..(152): n is a, c, g, or t
  misc_feature (172)..(172): n is a, c, g, or t
  misc_feature (206)..(206): n is a, c, g, or t
  misc_feature (210)..(211): n is a, c, g, or t
  misc_feature (219)..(220): n is a, c, g, or t
  misc_feature (228)..(228): n is a, c, g, or t
  misc_feature (245)..(245): n is a, c, g, or t
  misc_feature (258)..(258): n is a, c, g, or t
  misc_feature (350)..(350): n is a, c, g, or t
  misc_feature (374)..(374): n is a, c, g, or t
  misc_feature (387)..(387): n is a, c, g, or t
  misc_feature (413)..(415): n is a, c, g, or t
  misc_feature (448)..(448): n is a, c, g, or t
  misc_feature (468)..(468): n is a, c, g, or t
  Coding DNA Sequence Number=SeqID_374
tgttgtgttgatgtgtgcacaccgtggcgttgttcgctgtgtgttggtctgtttcagcgcttatctatctgtgtggccgannttgtgattcatgatctattttgcttnnctctgtatgttctttaccgntnttngtacatatcacntgtctnatgattaggaaacagcacanaaacagtaagattcagattaggcttatttaagantaannacacacannagaatganggtgaagatgggaacangcaacggagacangagaggcgcccgcgcaggcgtagcattgagtcatagtcgactacgcacaccggcgaccgcgcgcatgactgtgtgtggtacctgtttgatangtagagccgtctgccgcgcaggtngggatgcagcagnatagagcgtgctcgcgcggctcgcgnnngtggggtgggtgcgtctgctgtcctccgcgcgncgcgggcggggaggggcgcngcgagggtgtatggtagaggtatgagataatgggcgggagctgcacgcacg

SEQ ID NO: 10154 - DNA, 450 bp, Glycine max
  misc_feature (31)..(31): n is a, c, g, or t
  misc_feature (56)..(56): n is a, c, g, or t
  misc_feature (63)..(63): n is a, c, g, or t
  misc_feature (132)..(132): n is a, c, g, or t
  misc_feature (143)..(143): n is a, c, g, or t
  misc_feature (176)..(176): n is a, c, g, or t
  misc_feature (178)..(178): n is a, c, g, or t
  misc_feature (192)..(192): n is a, c, g, or t
  misc_feature (196)..(196): n is a, c, g, or t
  misc_feature (203)..(204): n is a, c, g, or t
  misc_feature (207)..(207): n is a, c, g, or t
  misc_feature (228)..(228): n is a, c, g, or t
  misc_feature (254)..(254): n is a, c, g, or t
  misc_feature (267)..(267): n is a, c, g, or t
  misc_feature (275)..(275): n is a, c, g, or t
  misc_feature (313)..(314): n is a, c, g, or t
  misc_feature (321)..(321): n is a, c, g, or t
  misc_feature (324)..(324): n is a, c, g, or t
  misc_feature (330)..(330): n is a, c, g, or t
  misc_feature (338)..(338): n is a, c, g, or t
  misc_feature (347)..(347): n is a, c, g, or t
  misc_feature (349)..(350): n is a, c, g, or t
  misc_feature (361)..(362): n is a, c, g, or t
  misc_feature (408)..(409): n is a, c, g, or t
  misc_feature (412)..(412): n is a, c, g, or t
  misc_feature (420)..(420): n is a, c, g, or t
  Coding DNA Sequence Number=SeqID_375
gacatgggagcggtgttctatttcggtgttntgctgatacgtcgcgcgcgcagggngaaaganccgagggtgtgcgcggtgagagagagcgaatattctgccagcctatgtgtcggccgcgcgctcttcttnctcttggaccnccgctactcttagtaccgttgagttataacacncncgcacaggtgtgtnttcntctttcnncgnctagcacacgcgcgacaggcntgtttgtgcgggatgcgcccgctctnttctccgcctgangcggcccnacgccagacgttctttcgctccgcgagcgagcagcccnnaataatnctncgctantagccgcncgcgggcgncnnaaatacattcnntccccgctcggcaacagcgtaatacacaccggcacccgacatgcgnnggncgaagagncgctcgacgcgggcctcatgcggcacgcga

SEQ ID NO: 10155 - DNA, 434 bp, Glycine max
  Coding DNA Sequence Number=SeqID_376
attcgtgtgactatacttcggaggcgtgattatgttctactatcatgcgtcgttcctcgcagtctctccctcatagatcgctatgaaatacgtctccccacgcagagacgcgcagcaacacaacatgaaggagcggcgaagcctcagaacggtcccatgagtctgcggaggccttctgttcctcgcgcccactcgtcgtgttacgtggtgctgaggacgacaacgctgccgcacgctccgactgctatagccgcgtgtgaagcagcccgccttcaagattgcatgccgcagaccgcccacagatccgggaggtaatgtgtttctctcaagtgtctatgataacagtagcgcgatcctcgtatatgaggaatgagttagagcgataatgaaagtggccctgctccctttcgtctcgttctgttgaatgcactcca

SEQ ID NO: 10156 - DNA, 570 bp, Glycine max
  Coding DNA Sequence Number=SeqID_377
tattgcctgcaattaaacggtggttaatgagatgcagattagctacttgctatcctgggaaatgcatgcttattttacattgttttaaacattagtttatgtacagctaaatttgtaacaggattatgggcattgcttttatcgggaattcactgacatgtacatttctaaaactcaaatttgttttcttctaaaactaatgatagtgaattcatgatggtttatttatgtgggtagtcatttagtattgtagggttctcttgtgcttcttcgaggatctaggaaatcactgattaattattttccaaacttatttctttgtggttgtagcagccagagttattatatattatgtgcaacgtatttcaaagttgaattttattccaattttttgcaagaaaaaaaaaaaaaaaaaaaaaaaaaaaaaaaaaaaaaatgattcctgcacacccgacgggatccactagattctagagctgccgctcaccattgtggagaaatcctaagttttgttcccctttactggagcttaagttcagaaattggacggaacaggttccatagcgtgat

SEQ ID NO: 10157 - DNA, 461 bp, Glycine max
  misc_feature (410)..(410): n is a, c, g, or t
  misc_feature (432)..(432): n is a, c, g, or t
  Coding DNA Sequence Number=SeqID_378
gtatcataaacctcaaccagctttggttattgaatgatatttgatgtttccatatgtagagtgtatctgaaattgggttcaagaagcactcagccctagaggagtactctaggtttagcaggagagcactcttggatttgttttccattctattccatatcagtcagagctagggatattggttcgagagtgaccgcggggctaactgtgaagagttatggtgcaactaattgttaaggctagatgattcaaagactactaagttattagatagtggaaaaacctcacattgggtggggactagatgtagcctccatgttagagatcaaacctgcataaaaatccttgtgcaagaactttcttccatttccctctcattttttgtttgattggttgctcttgtttgttgntagttgaaattttcatttttgntttctgacatctgatatctcatattgcgc

SEQ ID NO: 10158 - DNA, 467 bp, Glycine max
  Coding DNA Sequence Number=SeqID_379
ccggttcgctgtgatgtttggagactttgggcatggaatattgatgtctctttttgcactctggatggttttgtttgaaaagagtcctaaattggcacgtggtcaaggcgagatcatgaagaccttttttgaaggccgttacatcatcttgctgatggggcttttttctatttacactgggctcatttacaatgactgtttttccaagtcactgaacatctttggctctggttggaatgtttcagccatgttttcatcagaagtttggaggaaggaggatttatccaataagatgctaatgctggatcccaatgtaacaggagtgttcacaggagtttatccctttggcattgatccaatttggaatttagcaaccaatcgcctctccttcctaaactccttcaaaatgaagatgtcggttatccttggaattattcatatgacctttggagttgttctgagtgcct

SEQ ID NO: 10159 - DNA, 568 bp, Glycine max
  misc_feature (203)..(203): n is a, c, g, or t
  misc_feature (243)..(243): n is a, c, g, or t
  misc_feature (343)..(344): n is a, c, g, or t
  misc_feature (380)..(380): n is a, c, g, or t
  misc_feature (530)..(530): n is a, c, g, or t
  misc_feature (537)..(538): n is a, c, g, or t
  Coding DNA Sequence Number=SeqID_380
aacatatgtatcttcatcctccttgttgtgccattcgtgaggttgttcgccatatcggtctcgggtcgcctcaaagtcgacgcccgcgcggctagaggagagcaacggcacgtggacgcgcgcggcccaggagaagggaagagaaggagataaaagagaggacgagggagaggtacatcgccgaaccagccgtggtagcggcngcgcgtgtgggaccgccggtctcttgttgtgcgtggctgncggcgaattgcagactcatatatactgtgaagtatctccgcgcgcgtatattgtagtcacggttttagacgtgtgagtggatgtgttgtcgtagagtaannttgatggcgcttggtgctcttcaggtgcactgctcncgctccgcccccccgtcgtgttgcgcgtctgtagcgcgcccacacgcgccgacaagcgcggcaagttagagagaaggcgtgtgtgggatgcggggtgggggtaggggtggggcggtgggttggattgggggaggtctcccccagtccgcnggcgtgnngcgcacgtgtgtgtgtgtcaggtcttctgc

SEQ ID NO: 10160 - DNA, 522 bp, Glycine max
  misc_feature (32)..(32): n is a, c, g, or t
  misc_feature (95)..(95): n is a, c, g, or t
  misc_feature (174)..(174): n is a, c, g, or t
  misc_feature (196)..(196): n is a, c, g, or t
  misc_feature (284)..(284): n is a, c, g, or t
  misc_feature (332)..(332): n is a, c, g, or t
  Coding DNA Sequence Number=SeqID_381
cgcgcgacactctatcagataacaacctgatnatgtgatatcagtggctcgctgctagcggtgcggagagcagcactcatctcactgctcgcgcnagtggtgctgtgatctaagtatacggtagcatagcgtagtcgatattataccactcaccaccacacacatacaatgaantacctgccttgtagcgcgtgancacgtgtaccgtcgccatcgatggacgagtaatggtgcgtgcgagtactctcctcgcaagcctatacgtatctgagggcggacgcaantgcgagtcgcctgcgtatctctacgcccctctcatcgcgtcggtatgnttcacacgctgcctcgtgtactctactacgcatgatactcgctcagtacgtcttacactatctgtcacaactagtatatcatagagctacaccacacgtaatcgcacgcgacgcctcggtaccaccgacgcgatcgcaagagtaagccggtgagacggactatgcagacccgcatagcacacacaagtgt

SEQ ID NO: 10161 - DNA, 582 bp, Glycine max
  misc_feature (88)..(88): n is a, c, g, or t
  misc_feature (435)..(435): n is a, c, g, or t
  misc_feature (469)..(469): n is a, c, g, or t
  misc_feature (480)..(480): n is a, c, g, or t
  Coding DNA Sequence Number=SeqID_382
aacgtaatacaaagtctcccgctctcgcgttactgtatcacattcctgaattctctgtttatgatggccttttctactgatttagttntttcttgcccactcacgattctatgtctcgaggcgataccgctcatactccctacctcgtatcccactctcgctctccgtcaggccctcctctagcgctcgcgccttctatctgctcaccgccgcgcccacgatatacatactcagcacactactagcaagtctcggcacacgtgaacatatcaaaacagatagtatagtaactcgacgcgactcactatagactactgaatgaatctctacaactctctcgctactagtgccgcgcgtgtcgctgaccgcctcggtacgtcacgcataacatcttgcgcctctcttggtcctcttctctcacatattgacaatcgngtacacatcaatgtgagttctcttgccctctgtntatctcacacntgccactcctgaatgcgggcgggcgggcgccccaccttcatccccactattattgctcgatctgtctccgtccctttcgcctctgcgccgacaataaataat

SEQ ID NO: 10162 - DNA, 382 bp, Glycine max
  misc_feature (181)..(181): n is a, c, g, or t
  misc_feature (264)..(264): n is a, c, g, or t
  misc_feature (267)..(267): n is a, c, g, or t
  misc_feature (287)..(287): n is a, c, g, or t
  misc_feature (290)..(290): n is a, c, g, or t
  misc_feature (352)..(352): n is a, c, g, or t
  misc_feature (355)..(355): n is a, c, g, or t
  Coding DNA Sequence Number=SeqID_383
tttacatctctcaacctgctgttgttgaacaagaagttttggtcaaccagaaacttgaaggagtcagaacctatgttgagcaaagacaaactgttgaaccccacactttcttgaaagaaggcgatgttgttgaaaccagacctgtccaacaaaccatcgaagtctttgaagcaagaaaagntatcaaggacgttcaatacactgaagctgtccctgtgagaaagactatcgaaaccatcgaaccccaagttatcaccaaggaantcnaagtcatggaaccaagactnggnaccaagaccattcaagtcggcgaaaccgtccctgtcaagaaacaagtcgaagttattgaatncgntcctatcatgagagaagttgaaacctt

SEQ ID NO: 10163 - DNA, 533 bp, Glycine max
  Coding DNA Sequence Number=SeqID_384
aagcgaataatacagcacgcgaattgcaaaaacgcgttgagcatttagaacgcattaatatcgatattaagacgcgtctcgacgaaaccgtacaattgtacgaacaaacccaacgcgatttgagaaataaacaacaagaattgcaacgttgcgttcacgaattggacaagacacgcgaacaaaaagatgcattggcacgtgacaataagaaacttgccgatgatttacatgatgctaagaatacgattagcgaactcacccgtcgtatgcacgaaatggaattggaattgcgtcgattggaaaacgaacgcgacgaattgactgctgcttataaagaagctgaagctggacgacgagctgaagaacaacgctcgcaacgtttggcatccgaattcggacaattcagacacgaggccgaaaaacgtcttcaagaaaaggatgacgaaattgaagctatccgcaaagcgaccagcattgaaatcgaacagttgaacgcacgcgtagttgaagccgagactcgattgaaaactgaa

SEQ ID NO: 10164 - DNA, 592 bp, Glycine max
  misc_feature (27)..(27): n is a, c, g, or t
  misc_feature (40)..(40): n is a, c, g, or t
  misc_feature (83)..(83): n is a, c, g, or t
  misc_feature (85)..(85): n is a, c, g, or t
  misc_feature (94)..(94): n is a, c, g, or t
  misc_feature (102)..(102): n is a, c, g, or t
  misc_feature (136)..(136): n is a, c, g, or t
  misc_feature (150)..(150): n is a, c, g, or t
  misc_feature (182)..(182): n is a, c, g, or t
  misc_feature (188)..(188): n is a, c, g, or t
  misc_feature (214)..(214): n is a, c, g, or t
  misc_feature (219)..(219): n is a, c, g, or t
  misc_feature (226)..(226): n is a, c, g, or t
  misc_feature (265)..(265): n is a, c, g, or t
  misc_feature (267)..(267): n is a, c, g, or t
  misc_feature (270)..(270): n is a, c, g, or t
  misc_feature (289)..(289): n is a, c, g, or t
  misc_feature (342)..(342): n is a, c, g, or t
  misc_feature (357)..(357): n is a, c, g, or t
  misc_feature (372)..(372): n is a, c, g, or t
  misc_feature (422)..(422): n is a, c, g, or t
  misc_feature (445)..(445): n is a, c, g, or t
  misc_feature (474)..(474): n is a, c, g, or t
  misc_feature (510)..(510): n is a, c, g, or t
  misc_feature (565)..(565): n is a, c, g, or t
  misc_feature (567)..(567): n is a, c, g, or t
  Coding DNA Sequence Number=SeqID_385
acgcgcgtctctactcgctggtatgtntatgtcttgcatnctctactcgtcagcagcgatcttgtgcagtgagcctcgtcggnantcagagaangcatcagnctatcgcgcgcgtgcatgcgtagtgatgtagatntggatacatctgcnatacctgcggtgcatattgacgcatcacgcangctcgntgacggtcagatcggtagtgttctgnagtgngattgtnttctgatactgcctctacacgtcaccccacactcgcgancngtngatctacgtagtgaatganctgttgtggatgacgtcattgacatgatatgggtgtcagtagaccagtctcgntgtacagagtgctgnatcatctactacagnatcatctacctcgcgacgcgcgatatagtgtataggctatattgacgtcnacacgacacacagtgtctgtganagtgaacgagacatatcatgatacgagtntgcagtctgatgagatgtctgatagcacgagcagcncgtcagcggacacaatgcgatagacgtaatgctacgacttgctgctgatcagtcnangcatctcctatcttgatagctcgtt

SEQ ID NO: 10165 - DNA, 148 bp, Glycine max
  Coding DNA Sequence Number=SeqID_386
agttgagcaccagtcactttcatgtcatgaattttggacgcttgttaatgaagaacttggtaatatagaaccatgcagtctgtttactctaccgtgccagcatgttaatgttagccagttaagtcgtctggtcagaagatagcataga

SEQ ID NO: 10166 - DNA, 584 bp, Glycine max
  Coding DNA Sequence Number=SeqID_387
ttttccatgaggttttcggcttgatagattaattaatagattaataatttaaaattcacctaatcattaaagtattttacacgttcccgtgcttgaagtaattgcagtatcaactctgtcgtcacccatatcttctcaayaaatggccctgtgaaactgttgtgtgtgcagtttctaaaaaatgcttaaaatggagggacgttagaaaatagagaagaataggcaagatagagtaaaaaaactgaaattcaaactgaaataaattaaaacaaaatgaaaaggattttctgtgaggactttaattctcccagacatatcaagttccaaagtattgtagttcactaattactactaccgctacttagtcacccttatttatccttagtttttttatttataatgtgatttaaaagataagatgtttaactgatctagcatattttgctattaataaaaccacgtgtatatatatatatatatatatatatatatatatatatatatatatatatatatatatatatatatatatatatatatgtatgtatgtatgtatttttctcgatgtgtgtctgtgtgaaagt

SEQ ID NO: 10167 - DNA, 513 bp, Glycine max
  misc_feature (160)..(160): n is a, c, g, or t
  misc_feature (197)..(197): n is a, c, g, or t
  misc_feature (200)..(200): n is a, c, g, or t
  misc_feature (291)..(291): n is a, c, g, or t
  misc_feature (312)..(312): n is a, c, g, or t
  misc_feature (440)..(440): n is a, c, g, or t
  Coding DNA Sequence Number=SeqID_388
aacacggcggaggagtcagcatacaactccacgcgcatcgaatagatgtaaacagatattgtataatgtgcctgtgttttaatactgtcatagcgcacacgacgcagctcactcggtacctaggtacaggacgccagggagtagtgaaataaaagagatnttccttatacagaggcatgacgagcagcggagctacngcngcagagcgctgtgagtccacgcgagacacgtccggagagacatagcgaggccacgacggcagaatggcatgatgttcgaccctcatgacgncgctccctccgccgcgcatgnagcgcgaccggcggcccgcccagcgtccggaataaagcacgtagaacagacagcacagcacatcagcggcgcaagctaatcattatattgcggctccgcgcggagcccctcgcgcagcgctgtgctcnggcgcgtgtgtggtggtgtgttaaggtgaggaggaagagcaccacaacgacatcaacgcacactcagtacaca

SEQ ID NO: 10168 - DNA, 480 bp, Glycine max
  Coding DNA Sequence Number=SeqID_389
gaccggaagaaagccctcccgccagtccatcaggaatactttctctcgaatgacccccgcctccccaacaaaaaggaggttgctgagggaggcctcctccctccggtggaacccccccccaaacagggtggccgcctcacccacccattggatcgcccccatccaggccgcccccgtggccgccacctccctcaagctgcaggaggaggagcgtgagcgccgcatggacttcgtgccggagaagtcggcgctcgaggtcgacgagatccgcgtcgacaaggagaccatggacatgctggcgttcctcggcatggctgacctccccggcgtcgagcgcgcccccgaaaccacctcctccgccgcccccgcccgcccgccctccgaccccccccgcgctggcgcccccgccttcctcccccccctccgcccccgtcccccttcatcttgccttgtgtctttttgagctctgttacttgtggc

SEQ ID NO: 10169 - DNA, 552 bp, Glycine max
  misc_feature (67)..(67): n is a, c, g, or t
  misc_feature (90)..(90): n is a, c, g, or t
  misc_feature (119)..(119): n is a, c, g, or t
  misc_feature (122)..(122): n is a, c, g, or t
  misc_feature (412)..(412): n is a, c, g, or t
  misc_feature (448)..(448): n is a, c, g, or t
  Coding DNA Sequence Number=SeqID_390
ttggagctaggtaccaaggcgagatggacgtacaagacgcgctcccagccgcaccgccggggtgagnggtggaggggggaggggagtcangatgggatgttatattggatatggtcggnagntgtttattttatattgttcttgtttatattttgtatcactataactaagagagatacgcaagatgcaagaggagtagccgcgacagccacaacgtcacacggtcccggctgcataacgcacacgccagagactatatatggaacaacagacgaacagcgcgcgaaacccgaggcgggagcacgcatgggatcgcacatgaaacgcatgaccatccagcgaggtctccggtggaggtgtgattatagagtataggctagatcatacgaccctgcacaggctaacgacacgncccacccccaaaaaccatagacacaccacaccaaanacacaaaccacaaaacgcgcaagaacgcacccgacaaaacgatagagcagcaaaacacggagaacgaagagagagagcccacagccggagagcccaggcagaag

SEQ ID NO: 10170 - DNA, 302 bp, Glycine max
  Coding DNA Sequence Number=SeqID_391
tccaatgtcgggtactcgcagatcgcttcgccaattgcgtcttcccttttctcgctttcgttctcgcactcttttattttgcctccttttgcttattgttgatgattagggtttctgaatcggtgcttgattgtgttggttttgtgaatgtttgattttagggttttgtgtttctgaagttctgcgcggctctgaattttgtggtcttggaagaaatgttttttttggggggggggattgcttagtcacgggtggttgtaatttttgtttttttgaatgttacgtggtggaatttgatctgt

SEQ ID NO: 10171 - DNA, 544 bp, Glycine max
  misc_feature (30)..(30): n is a, c, g, or t
  misc_feature (53)..(53): n is a, c, g, or t
  misc_feature (101)..(101): n is a, c, g, or t
  misc_feature (107)..(107): n is a, c, g, or t
  misc_feature (247)..(247): n is a, c, g, or t
  misc_feature (256)..(256): n is a, c, g, or t
  misc_feature (291)..(291): n is a, c, g, or t
  misc_feature (321)..(321): n is a, c, g, or t
  misc_feature (501)..(501): n is a, c, g, or t
  Coding DNA Sequence Number=SeqID_392
gagtactattcgactgtgtcgtatagctgnagtaatttgctatacgtcatgtncgtgtgctgtcacgactctcgcgtgtcatctggcgcgagcgcagaggngacgangagcatatgcgcagagtcgcgtcgtcacgctacaggcgcgccgcgcaattcaacatctactctcacgcgcatacacgtcatcatggtcacactgctagagtgacgtgtattcactaacaactacgcaatactgcagccgntcactaccnatgtgttcgggcgtcgagtagtgcctagcgcgacntgcacacactgaggatgctcacgacaaagnaagagataagtaagagacgctatagtacatcactacattaaacactactgcgtatcgagaacgacgtgtgtatgtatgcgcgtggagtagtagacgcgcactcgtgtctatataggcgcgctgctccgtcgttgtgtgctctctgctgagctagatcggattgataataatagatcatangttctgggcagcagtgtcagagtgcagaactatccgtgtgctc

SEQ ID NO: 10172 - DNA, 487 bp, Glycine max
  Coding DNA Sequence Number=SeqID_393
ttgttgtttcctcatctaaagcctatacagacacaaagaacatatataacactttctaatatgttctagaatctagatctctacccattctccttattcactttttcttgagataaatggaggattcagaggaagaagaacttctaaatcttactctttcagttgatgctggtaggaagaggagaaagaaaggaaggacaagggatagtaataataataatagtaacactaattctgttattattcctattaagtccaacgaagggatgatcttcaggctcctccaaatgatgggtcctgcaccacatactcaacttgatgccgatgtagctgctgggatgggtatgccagacaatggaccaaagctaatgtctatgtaacttcttttttggtagtgggtgagacgatagtcttaggagctggtgttataaagatatagtgtttgttatttttcttctttttatgttactagtactggttattctat

SEQ ID NO: 10173 - DNA, 580 bp, Glycine max
  Coding DNA Sequence Number=SeqID_394
atccgtggcgcacacgtgcatgttggaagacacgcgcgcaacaacgcgccgcgggtcgctgaccacgggactcatagagtgcactctgcccatgtgagcatcgtcaattacaggcggtgccgcccgccacgcgagcagtgtagtcatggcgtggatgagtgtagctgtctggagtggcagcggcagagggtggtggcggagagcgcgcttcggggagaacagcgtggagagccgtatgtgcgcgatgctgtcctgagcacacgcgcgacacgaccgtgctgtcgcacttacctctatcacacagctctcgctctcgctgcgagtcgatgcccccgcgcactctcatcatactcgcttctcgcgggtagggtcactgatcgtgacgcttgtcaggcgatgcggtctgagtatacgcgcggtctcgcgactgccgggtcgagggagtatgagtgaccgctggcgtcaccgacgtgccagcgacggcgacggagaacgaggcgacgggcagtggtctagcgccgtcgcgcgccgtgcgggttatgtgctcagtgcgtatgtgtagcctgtacgacatgagcat

SEQ ID NO: 10174 - DNA, 424 bp, Glycine max
  Coding DNA Sequence Number=SeqID_395
aggagcagcacacgacatgaccagtgctcgtccccgacagacagcggtcctctttctcatgtgcgccgtctccaaacgaaggcgcatacgcacgcacgcacgctcgccggccagacatgtacagtgtcgcccgcgcggggtctcgcgctcccgcgtccggaccccgcggctctccggtcgctcccgctggccgattcgtcgggttcgcatcgatcgggcagccgcttgctgcgccgcgcgcgctcccgcctcttttgccccgtgaaaatgggcgaaatcgtcgaggtcatgtattcatgtcctgctgttgtgctggttccgttcacgggcgtggcaatggcatggattacggggaggtttgccgagcaggtttgcctatgtgtgggtgaactgggtgcggtttttcgttttatagcctgcagcc

SEQ ID NO: 10175 - DNA, 539 bp, Glycine max
  misc_feature (328)..(328): n is a, c, g, or t
  misc_feature (349)..(349): n is a, c, g, or t
  misc_feature (354)..(354): n is a, c, g, or t
  misc_feature (480)..(480): n is a, c, g, or t
  Coding DNA Sequence Number=SeqID_396
cgcgcgtatatttgtacacgggcgtgagtaacaaatagttatgtacgcacggctgcacgactgatcgcgagaaagtgatacgttgtacacggaataatactatgactatcgacttcagtattacgagcgggtaagtcgcatgtagcgtatctgtatctgtctgtatgtaagagagtgatgcacagttgaacaatgctgctgccttctgcacagtctgattatacagatatgctacgaaatatggtgtcatgcgctctctagtactatctctagacggcgccctgcgcgtcatcgcgcagcgtgtagcgcgctcgaatgatagcacaancgagagatatgtcatcgttgncatcnactatgacacgtcttgagtactgctcccgcacttatatgctcgcagctgagagggcgtaaaaagacatagcgaagagagagagacggtatgaacgctgcagacgacgtatgcgattacagtatggnatcacacgatacgaatggcagtagcgtatagaccaagcacgcacgctcagtgtagatgc

SEQ ID NO: 10176 - DNA, 557 bp, Glycine max
  Coding DNA Sequence Number=SeqID_397
gggcttgaatcaacggttctttagaaccaaggcaccatgtaggaagtttagaggtcaaacttcaaatgtccctggcaataagcatacatttaatcgatctatgtatcatacacttacgtagaggttgaggttatttagcaggtactatatatgtacctcgtgccgaattcggcacgaggatgtatgctaaatacttccgttcacctttccctgctcgttcaacttatcaagtagctgcattgccattggatgccatagattgaaattgagtgcatagcaggttatataagcaccaagagtaatagtatatctggctccttcagcaaacttggttaattacacgggaagggacatatcttagtattttggagttttactttgttttgttctttggataatcttgcccttttgattacatttaccatcctagcgaggtctctaatcttcggattctctctctcaaagattaatgcgcctattaaaagtgaaagcaacttagtcattgaatgttcttgtttcagcttttgtgacagcgtatcacatatgacagaccatga

SEQ ID NO: 10177 - DNA, 426 bp, Glycine max
  Coding DNA Sequence Number=SeqID_398
caaacttcacttcattttatcagagattgtagggttttaaatgggggattttgaatcaattaaagtaagtggaaatactaatctaatgatattgttagtatcttatctctcattctcactctcatacgtttttaataactaatggccttacgactttatgatcatctgggatttttatctcacaaaaggaatgatcttccactgatgcatatatagttaattaaatatataagagtgatgttattatttacattttcatgctatatactttgaagtcatcgcaaacggtacgttgctataattatatgggtgtttgcaaatatatatattagtttcactgaaaatatccagagactaaaaaaaaaaaaaaatgcaacaagcaaaaaaaaaaaaaaaaaaatattaactaaaaaaaacttgctgctg

SEQ ID NO: 10178 - DNA, 283 bp, Glycine max
  Coding DNA Sequence Number=SeqID_399
tatcagagtgatagtaattaccgtattcctatttataggtgcagcaactgcagaagatgcagcagctgaggcgcatgagtcccctaccctacccccggtgagcaccgctccgcctgggcccgcggtcgacgcgccccctccagcccccccccgcccccctccccgcacctgcccccccgccccccgggggcgcaagacccaagaaacaaaccccccccccccgccccccccccgccccggctcgccctcacctgccccatcacagagggacgcccccgcccca

SEQ ID NO: 10179 - DNA, 302 bp, Glycine max
  Coding DNA Sequence Number=SeqID_400
cccccccatatgttgattacaatagcactggtggagtagagctaggttttggacaatcactcatctaaatcttgtcaaatagtggtgataaggatttatgcgtaaaatctacaggatttttatacttagagattttgttcgtagttatcatcctttgttcaggattgtaaatgtgtccgtcttcagcaatcataggtttaagcatttccatcatagtgatactttggaattgagcatgttacatgcatgcttctttttatttttcattttctgttttgtaagttaggattcatcaaaacaag

SEQ ID NO: 10180 - DNA, 404 bp, Glycine max
  Coding DNA Sequence Number=SeqID_401
gtcattctcttatttttcgtctgcgacacaatcgattgactattaacacatgtttgggtcaattcgggcgcttaaagaacagagtcgagtacagctcaagacccgtgcctccaaacctgattgcagcagagaaagaagaaccttacaaggaaaatgacaaaagctagattgaacctgaaaagtttgatgtttgattttgctaacaggaggagagcttaccacacttgagatacgagattctctcatttcttccctcgaacaacttcatgaagaacatggtgatcttctctctgacctcgctgtcagcttccctgatccaccaccaccacctgctgaagatagaccagtttcttcacctccacctcgtggtctcacatattccgctgcagatgttcggtacagtt

SEQ ID NO: 10181 - DNA, 600 bp, Glycine max
  Coding DNA Sequence Number=SeqID_402
agcacgcccgtgtaatgatttcgtcggcggctggtagggcgtccacgctctctacgctcctttctccaacatctcacatatagcaaccggcgctcaatgggtgtgtgatcagccctacacattctatactccattgtgcacacatcgctgtgcaagaccatacacctcccacacagtattcaagcgcgttgttatgcactggtgtgaccgaacgaattttttctcatactcgtgggtgtccatataatcgcccgccgcgctcatgttgatagtctccatgtaatcgagctcgaggaatgcaggtgagaattctgccctcttaagcgctcccgcaggagtgtctgcctctcgcgcactcttctcctgggttggcgggtgcttccatatatagtgatatgttctgatttttcgctcgtctgtggctcagttgagtagcagggtggcaaactctcccggtctcatcgttcgcaaacccctctgcgcgacacgcccacccagcttcatatcaacaagtcggtcatatgtgcggcggccgacgagaagatatgaaacaccacaggcggcaacaccacagcgatctcagcgctacatacaacggtg

SEQ ID NO: 10182 - DNA, 170 bp, Glycine max
  Coding DNA Sequence Number=SeqID_403
gtcctattcccacgcatattgggtcccgcctggggagcctaatgagtttgcgtgccctcattaattggcttgcgctccctgcccgttttccgttggggcccccttttttgccgggtgccctaatgattccgccttcccgcgtggagagtcttttcccctgttggtctcct

SEQ ID NO: 10183 - DNA, 457 bp, Glycine max
  misc_feature (432)..(432): n is a, c, g, or t
  Coding DNA Sequence Number=SeqID_404
gaccatttttcgcataggacacttaacttatcattgcagctcatatctgaataaaaatatagtaaagctcgagtctgcagtgattatggacaattctatatgtaatacactatatccgttcaagtctctttctcaaggttcctaaacatatttttatatttcatttcaatatcctgcagctctttcttcatcatctgctcaagttttattctctccgagtctacttcctccctatcttctatcctattcccactctttctccctggacttttatcattaaataactgatctcttttcgtttctaaaagatcccgagtcttatacacagactctttatttagactaggatttgatgtatgcagtcctgacttaaaacatgttgatcctgctttggaccctgctgctgtacttacgcttgtactaattgaaggngtcttcttattcatgccgtcaatcc

SEQ ID NO: 10184 - DNA, 400 bp, Glycine max
  Coding DNA Sequence Number=SeqID_405
acaattctaattacaatcttttattttatgcagtatctctggagaatgtccaacaaaagtgataatcaaaacaaaaatgaattagatgagatatctttatcaattcagaataagtcaatcaatagcaatattgatttcaatcaaataaaacaaaatgttctcaatgctaacttaggtaaatttgatgacatattaaatggtataaacaaagagtatgtaaacaatagtggtttggattggggtcataatcctgatgatactgtagctaagaaaatattaagtgatcctacaggtaaaaccttagaagaaagtttaaaacaatttacaaccaatccaaaaactaacagcaaaaatggaaatacaaaacccaaacaattaaatagccaacaatctacatctt

SEQ ID NO: 10185 - DNA, 283 bp, Glycine max
  misc_feature (108)..(108): n is a, c, g, or t
  Coding DNA Sequence Number=SeqID_406
tctccgactattccgtgggcagcattcgcgacatggtcggctcagaatgtcgacatggacgaatatccttggcccacaagccccccgaccgcgcgtgctcgccacccnattggccggcggagcgtcgcgggtataaacgctggtgcgcgtcgcctgagccgcacgccgccgcgcactgtctctttccaacgcacccgagcagtcaactgaacggcagccaaccaagcgtcccagccggtcaccgggaggcttcgccgcgtgggtgggcgtcccgggagcagca

SEQ ID NO: 10186 - DNA, 143 bp, Glycine max
  misc_feature (76)..(76): n is a, c, g, or t
  misc_feature (100)..(100): n is a, c, g, or t
  misc_feature (104)..(104): n is a, c, g, or t
  Coding DNA Sequence Number=SeqID_407
gagtgatttgatcaatacccccttgtgcagtgggaacctacatgttgtttatatggggatatgcatttgcagatcnattcacagaacggactgctaagtnttcngtgacctatattactgtgaccaacttcttaaaggtccgg

SEQ ID NO: 10187 - DNA, 392 bp, Glycine max
  Coding DNA Sequence Number=SeqID_408
gcctgaaaacctttctttcacataaagatgtacttttaagatagtttcaaagtattaaacaaacaaacaaaatgtttgaagaaccgcacaaaaaagaacaatgaaaataaacgaaatttatcttaaaaaatgagtcttttgtaacattacccttaaaacatgaatccttagtatttatatactaaagtacactatgacaaaaattttcaagaatctttttcaattttttgttgtgaaggaacaaaggagctctcgtcataataactaaggatgccatcatcttagtacttgttccttgtatttttccaaagcgattcgtaacatacaatttcgtaaagaaaccgccttttaaagtcaagactcttttcattcggaaatctatcttgatttaa

SEQ ID NO: 10188 - DNA, 211 bp, Glycine max
  Coding DNA Sequence Number=SeqID_409
caacttcaccgacaatctcttccatcccctctactgctcctgtcaccgagtcccccgtatcattcctccaatacagaagcacgacactgggtagactaatcggagtgaacttccccaactttgttttaagagtcccatcgctgctgcggatcccttattctgccatcgagattgtcagcggtgcaatgaggattgccgacgcaaccaagaa

SEQ ID NO: 10189 - DNA, 316 bp, Glycine max
  Coding DNA Sequence Number=SeqID_410
ttaccgagagaaaggatcagcccttgcggcagtataatcccatgtggttccaatcggcttggtggaaacagtgtccctgtctttcaaatgaaacttgctgggaaaagtactggggatgccccaaaggcttgaaaaacgattttcgggcttgcttttggctaaaaaacatggcaaaacccccatggccccgttttttcgccaaaggggaattggacccaaatgtttgaagaatatttgggcccttggggggagggcccccaggggttctccccccaagggggaattttttggtgtgaaaaccggatttttctctaca

SEQ ID NO: 10190 - DNA, 579 bp, Glycine max
  misc_feature (27)..(27): n is a, c, g, or t
  misc_feature (76)..(76): n is a, c, g, or t
  misc_feature (93)..(93): n is a, c, g, or t
  misc_feature (109)..(109): n is a, c, g, or t
  misc_feature (111)..(112): n is a, c, g, or t
  misc_feature (167)..(167): n is a, c, g, or t
  misc_feature (250)..(250): n is a, c, g, or t
  misc_feature (300)..(300): n is a, c, g, or t
  misc_feature (351)..(351): n is a, c, g, or t
  misc_feature (432)..(432): n is a, c, g, or t
  misc_feature (530)..(530): n is a, c, g, or t
  Coding DNA Sequence Number=SeqID_411
atgtgagcagatctagagtacggtcgncgcgcaccaccacctccatcaccgtccgcatgatatatgtatagagctnctagagtgtgcgtgagnaaaaccccaacaaccncnncaccccacggacactgcgcatgcgtcataataatatatatatcatttactctctntcttctgtcgtctctttatttgtatcttatgtctgtctgtcttgtattcgtctcaatctgttgtcttgtgcgtataaatatgnagagagcatcattcgcggcctgcgtacactctcttcgctctctgcacctncacccccccgcctcacaccccacacagcgtgcggtgacatcccactcctanatttgtctgtataacagagtctccgtactcttctcttgtgtgctgtgacatattcgacttgttctcgatccgtgtctcctnctctgctcgatggggcgacgcgcgtgagaatagtgtggctgttggtcgtggtcacgctcttctcctctcttctgtgtgtctgactcattcatcattcncgacactacagcgtcaccatctgtgtgcgcgcgggctacatagcacaac

SEQ ID NO: 10191 - DNA, 385 bp, Glycine max
  misc_feature (90)..(90): n is a, c, g, or t
  misc_feature (92)..(92): n is a, c, g, or t
  misc_feature (94)..(94): n is a, c, g, or t
  misc_feature (137)..(137): n is a, c, g, or t
  Coding DNA Sequence Number=SeqID_412
aagtcaccgccgctagcctggaggcctcatgccgccaccgctcgcccctttctctgtaggtcacccacgcacctgggacccggggccgtngncntcctccccaccaggctcgaggaggcccgaggaggtgaccatgnggagcgcgcagccgtcggagccatgggtagatccagccgggaccgtcggcaaccatccctccttccggcgccgatgaagaattgaagaggcttgaggagaatgggcgcatgggccgtgcgcgtctcccgcgctaggagccaccggtcctcgtcatctgctaggatccacgaggaatcgatccatataatgtttgcgaggagctcggttagtgttgatgcctcaagggtttatgcatgtcagttccatg

SEQ ID NO: 10192 - DNA, 392 bp, Glycine max
  Coding DNA Sequence Number=SeqID_413
aagactaaccagaccatcttctctatattttctcttcttctcttttcttcatgtgtctctgcccagcttcggacaggtttctaccagagatcatgcccgaacgttgaaaacattgtccgtaacgccgtccgtcaaaagtttcagcagactttcgtcaccgctccagccaccctccgtctcttcttccacgattgcttcgttcgcggatgtgatgcttcgatattgttagcatctccgtcggagagagatcatccagatgacatgtcattagctggagacggatttgacacggtggttaaggcgaagcaagccgttgatagagatcctaactgccgcaacaaagtctcttgtgctgacattttggctctcgctacacgtgaagtcgtcgtttt

SEQ ID NO: 10193 - DNA, 374 bp, Glycine max
  misc_feature (311)..(311): n is a, c, g, or t
  Coding DNA Sequence Number=SeqID_414
actggccgagcctagcaagaagcttctttcaagaatggatgtcctcatcaagaaccccaccggcagcacgacccccctgagggtctacccatcggacaccgtgcgtgatgtcaaggcaaagattcaggaacaataccccctcttctttggtggggtgcagctggatgacagccttacactggccaattacaacatccagcatgaatccacgatcgacctccgcgagaagatgaacatgaaggtctacgtgacagagacggtggcgggcaggaccatcacgatcaacgtcaacagtctagacaccgtcgatnacttgaaatccaagatccaggaccttgagggcttcccgaaggctcagcagtgcctcgtctttg

SEQ ID NO: 10194 - DNA, 286 bp, Glycine max
  Coding DNA Sequence Number=SeqID_415
tgccaaatataaggcctgcccatctcgccgtccttttgcacgaggggttctcaattggctcagttcctcttcgtggtggttggtcctgtggacccgggggaggcttcctccacttgcgagctgtagtaccctgttggggagaatgaagctcctggccttgccatatgtgggcttgcccgcccggccccggtggggtacctgtttatttggttttccattctttctcgatccctattgtttctgtgtcatcttccgcgggttgtttttgctagctttgctacggtta

SEQ ID NO: 10195 - DNA, 372 bp, Glycine max
  misc_feature (50)..(51): n is a, c, g, or t
  misc_feature (126)..(126): n is a, c, g, or t
  misc_feature (343)..(343): n is a, c, g, or t
  Coding DNA Sequence Number=SeqID_416
gactatgccgtgtttgaaagcgcgcgagcgcagtcgtggatcctgatggnncgcgcagcggcgctgaagtagagtcgcgaaaactcccctcgtcgaagtacaagggcgtgtgccccagccaacggncgctggggtgcgcagatttacgagagcaccacggcgtgtggcttggaacgtcaacgagaagagaaggcggggcgtgcgtacaatcccccgcgcagcgggtccgcggaaagggacgcgtcacgaattcaagcgctcgccggcgccaacgacaaaagggaaaaaatcgagtcctcactcgcatccaaacccgagatcgtcaaatgctgcgaaagacacntacatgacaagctggacaagaggaacccc

SEQ ID NO: 10196 - DNA, 218 bp, Glycine max
  Coding DNA Sequence Number=SeqID_417
atggaaaagaccgtgtggtgctcacatttgatgggaagtatctgcctcacactgaacagaaagccgcgaatatgatgtcgaagttgccctgcaaggcaccttgagataatgagatggctggtactgggagaaggggggtatgtagcttcactaatgtctgcttatacttcggacaaaaaaattgagcgtcccttttctagtctgaatgatcgaccaaa

SEQ ID NO: 10197 - DNA, 93 bp, Glycine max
  Coding DNA Sequence Number=SeqID_418
gttattctaatgtgtgccgttgaaggttaccgtatggctggtgggtcactaggagaggtcactgaccccatctaccctgttggctgcttcgac

SEQ ID NO: 10198 - DNA, 530 bp, Glycine max
  misc_feature (49)..(49): n is a, c, g, or t
  misc_feature (88)..(88): n is a, c, g, or t
  misc_feature (92)..(92): n is a, c, g, or t
  misc_feature (105)..(105): n is a, c, g, or t
  misc_feature (116)..(116): n is a, c, g, or t
  misc_feature (165)..(165): n is a, c, g, or t
  misc_feature (197)..(197): n is a, c, g, or t
  misc_feature (257)..(257): n is a, c, g, or t
  misc_feature (353)..(354): n is a, c, g, or t
  misc_feature (399)..(399): n is a, c, g, or t
  misc_feature (426)..(426): n is a, c, g, or t
  misc_feature (495)..(495): n is a, c, g, or t
  Coding DNA Sequence Number=SeqID_419
caatctaagacacagcgacgcacaacaacaccagtgagtggtctgtcgncgtcttctctgtctctctattactactcttatatttatnatanggtactatcttcncatgtttgatngatatagtcaccacacgcacagcaacacagacgagaattacgggcgaanataagcgagggcagcacaaacagtcggtcggngcgcgcggcgatatgtgcagacgtgctctctcgaccagacatctattttgtctagaaggntggtgagtcgggtggttactatacacacgtaagcctgcctcacacattggtgtataaatatattatagagtgtaagatcccatcctcacgtctcgnngtgggtcacaggtggtgtgtatatcaatctagcagtgcgatatantggtggtggtggtggcgcacataccanccagcatccctactctctctcctcgctcgctctcggtctgcccttctctcaactatacgaaggagatgngtgggaaaacagatataatagaggcctctgcgttg

SEQ ID NO: 10199 - DNA, 429 bp, Glycine max
  misc_feature (93)..(93): n is a, c, g, or t
  misc_feature (95)..(95): n is a, c, g, or t
  misc_feature (210)..(210): n is a, c, g, or t
  misc_feature (219)..(219): n is a, c, g, or t
  misc_feature (232)..(232): n is a, c, g, or t
  misc_feature (268)..(268): n is a, c, g, or t
  misc_feature (301)..(301): n is a, c, g, or t
  misc_feature (370)..(371): n is a, c, g, or t
  Coding DNA Sequence Number=SeqID_420
ttgagcatctccatcttgatctgatatattctaagctgaggtcactcgcttcatatctgcaactgtaatatctcccatacgcatctcatgatnanggtacacagcgaccagacaaacaactgacgcgatatcaaccgcggtagcagacgtcatcggagggcgcacggagggtcgaagaagatagtacagtaaggagaagagagatatgtngcgtagtangagatgcgccggnaggcttggcgccgtttccgggggaggagggcgcatngagagtagaagtatggagatcggcgtccccgcncctcgcccgccgcggctccgccgagtgtccgaagccgcgcctgcccctccaggggatcacaaatccctnnctctttgggcgcgtgaagggtcggaaagcctcggggtgtcaacgggatacatatcaac

SEQ ID NO: 10200 - DNA, 533 bp, Glycine max
  misc_feature (439)..(439): n is a, c, g, or t
  Coding DNA Sequence Number=SeqID_421
ccctaccctgatggaagaccttattatgagaagttcaactacggtcttatcaatgataatgactactgtgagttggttgatttctataaccttgcccatcctgagaacatgttcgaatcgatgaacttcttcactgattactcaagaactggtttgaccagatctttggttgtcagaaagatcggtgtcgataccatgagacaagtctccagatatatggagaagaaggacttcaactctgctcagtatcatttgactcctctgatcaccaacttcttcaccaagagagtcgatatccatatctaccacaccatcggaaagcatttcaactgtgccactcagatgtacaaccacatccccggacacggtgtcctcaagagaaaggatcttattgtcgacagtgttgattcctatgctgctagattcgaaggtggcaganaacactgcttcaacaagaagaagttcttcccttactcctacagactctacatggaagacgaatgcaaggctttcttcgaacacatcaactctga

SEQ ID NO: 10201 - DNA, 475 bp, Glycine max
  misc_feature (431)..(431): n is a, c, g, or t
  misc_feature (443)..(443): n is a, c, g, or t
  Coding DNA Sequence Number=SeqID_422
tggcctgggcaggaatatccgcgaattataccagctcaaaacagatgcctagcgtgtaaatacgcgcttttttcagtaaattgtagtaaatccatgcatacagatgaaagctgtcgcctggttattacttgcttgtttacttccctgcctgctcatggggcagaattacctgcgtggagaagtgaaggatgagcaggggcgtttattacagggcgtacgcatacaattggcaagcaccggcacttatccatattataccggcaacctgggcagctttggcatcccttcttccaggctcattgataccatcacattgtcttacgaaggttatgataccctgcgtactgccatcgataccaggaagccccagttctttgttttgaaaatgcagcctgagttggcaaatttttacagggccaggctcagctctntcaccaaccatnttcaaacagaaccagttgtacctgcttctgta

SEQ ID NO: 10202 - DNA, 532 bp, Glycine max
  misc_feature (96)..(96): n is a, c, g, or t
  misc_feature (455)..(455): n is a, c, g, or t
  misc_feature (497)..(497): n is a, c, g, or t
  Coding DNA Sequence Number=SeqID_423
gggccgtctctagtgtacaaaatagtaggtgtgataacagagcagaccagtatcgacagtttagtgttccgtcggtctaaactcgaactacacctnggacagaagcgagccgagggagatctagcgtgtcagctcttggtcgtgactgcgcgtgggtgagttgtcggaggtaaagatactctgatacacgtccgcatcactactcatctcgtttgtaaggtggtagacttacgtccatcactgcgttctatctgcttcagaccagatcccgtctcagtctggctgaggaattaccgggtgtacgctcggcaaggacgagggggccgcgcctttattcctcgcagggagcagagagagcgccggggcgcaggtgctctgtttgcgcatctaaggacgcattcttagtgttaagtgggatattgtgtagtgaactcttcccgccagtgccgcgtggnggattccacttatttataatagtagccgtcctcgctctatantgtcgttaggagattggccaagtgttcggcggcac

SEQ ID NO: 10203 - DNA, 519 bp, Glycine max
  misc_feature (130)..(130): n is a, c, g, or t
  misc_feature (365)..(365): n is a, c, g, or t
  misc_feature (382)..(382): n is a, c, g, or t
  misc_feature (418)..(418): n is a, c, g, or t
  Coding DNA Sequence Number=SeqID_424
agtcccacaccatagcaacgagcgaacaaaacatcagatgcgatcacacacatacgcgatgcgtccgacgccctcctcatctacgtcttagcgcacatcacgctcccgactctacaacacactagagtanatcagactaacacaatctgactgacactgcctacatacttaaacagactcataccttcagtatatcttctccctaaccttctcacgtcgtcacgcaacctaccgactcgcgctcgtctgcatgacagtacatgatcatcctacacgagtcgtgtgtccgcacgacacgactactcatctttacgcacagcactagcgatgcgtgccaatcaagatagagagaaagacacacatcnagacagagagacgatancaagaacaatgacacgagacgactagagtacatatnacagcatccgctgcgcgcgcctcgacccgtcataagtcatataatgatatgtatagtgtgtatgcataacgacgtacgggctatgtgtgtcgtatgagata

SEQ ID NO: 10204 - DNA, 315 bp, Glycine max
  Coding DNA Sequence Number=SeqID_425
catgaggtgggtctccccgacgaatcgaaacatctcccgcgtctccgacttgacagcctcggaaggtgttagggccaccgcatgctccaccccccatcagggcttctgggacaaaccccacccaatgatcgccccgaattttcttccctggggggagattggccaaaaagttccaatcccgaattgcctaaaggggtttcccttttacaatggggggaaaaacccccccgagagttcgaattcccccaaaaaaagggccccccccccccacccccaaaggaacccgagaagaaattaccaaaattctgaagcggg

SEQ ID NO: 10205 - DNA, 407 bp, Glycine max
  misc_feature (123)..(123): n is a, c, g, or t
  misc_feature (233)..(233): n is a, c, g, or t
  misc_feature (335)..(335): n is a, c, g, or t
  misc_feature (367)..(367): n is a, c, g, or t
  Coding DNA Sequence Number=SeqID_426
gatggtgtatgatgtctcgcctaactgcatattataatttatgtcatagtgatatctacgcatgcatgatgcaaggacatgttacaacggacgctcagctgacactattcgttgcgagccgcntgcgccataacgtcataacgccgtccggtagcacggtcgagtgtggtaagcgaggagcacacgaaagagatcgagagagcagatggaaagtcgaccggaggataggaagncggtgcggatgggcggtcgaggcgcgcggcgcgcgctgccgcgaggcggcatcagatcctgtgcgcattgcactctcctgttcgtctcttggcgtgattgcntacggagtggctaggatgttgcagtcgtcgcngaccccgcagctcgctatatcgcgtctcgcgcggtgtcga

SEQ ID NO: 10206 - DNA, 334 bp, Glycine max
  Coding DNA Sequence Number=SeqID_427
tcatttcaaaccactctctgtaaataggtgtttgctgggttcttaatttcagctacgtaggccccccccccttttttctggtgattggaaacattttttttttttgaggaagataataatgggagcggtttgttcggctggtatggtggagaaaaatggtgaacttggagggaagagtttggggttttctgggaagcttaagaaggaaaatagctttgtgaatcggagagaagctttttcagattcaaggtctaatagtggtcatgatagaaagaaaaagaagcatgatactgggttttcccgtgaacttggtctatcgattccttcacctggg

SEQ ID NO: 10207 - DNA, 419 bp, Glycine max
  Coding DNA Sequence Number=SeqID_428
gcaaactcgacgatttgacgtagctttttgagcacccgccgcaaacagtaaacagaatggattctcagatcaagcatgctgtggttgtcaaagtgatggggaggactggttcgcgtggtcaggtgactcaggtgagagtgaagttcacagactcggaccgttttatcatgaggaatgtgaaaggaccggtgagggaaggagacatcctcactcttctcgagtccgagagagaagccagaagactccgttgattctcttatgcaaagtcttctcaggatttacattttgatgctcatttagctttttgttttcgtctgagattgaagcctttgttgttaagacaatgtttgaatctagaaatgaatcttttatgacaaacgttttgtgccaccattgtcattaccgtaaacgttacaacg

SEQ ID NO: 10208 - DNA, 548 bp, Glycine max
  Coding DNA Sequence Number=SeqID_429
agtacatagctcttcagttcttcacactgatctctttgacaaaagagtcacagtttcctccttttgttggtgtttttctggccctcagcgttaacgttgtggttaacagccatctcctcagcagcagctttgtcttgatcttccacgtgcttctttggtaaaaaggcttattttccacactatgaagtcactctgactatcaaggttaaggtcgaccctgcggagcatcatgttgcaaaggctggctcaatctcatgaattatgctcattgccttgaagagattgcccccatttcagtctgcttaaatttttcttaagtgcccagatcgtccatgagtgataatttcctgcacttttttaatcaacccatcttcttttaaatatcttaactgcttcatcaaaaacttcaaagcccatggctttatattctttgaccattttgacataaacaaccttcttgagcacccttttggttccaaaaggacaagaggcttcatccttttctcttttccggctgagacacattataggatatacccgccgccttt

SEQ ID NO: 10209 - DNA, 566 bp, Glycine max
  Coding DNA Sequence Number=SeqID_430
tgccggatccatgatttgacatctttattgctggatgagcctcgtatggacttgatataattttcccgccgaaaaactctcactgatctgatctgaatcatgtttctttgcagacgccgtccccgcccaataagcctgacgcttcttggagtactccacggggatccgtccgtcagggtatcacctccctcgacgcatcagattccccgatacccttcctcgcatgctttcaagagaagaagactccctggtgtggactaactccaccccatacctactgcgtaacacctcaaacaagagcagattgcatctcaacgccaatgtatacgttctcgatgccttcaacggcgaaaaaagtcttcccacttaaccactggcgaaaagcctcttccagatggcccatcacagcaaacatctgcttaacatgttgactgctctcctcgctcagcggctgcctttaacccgtcatcctcaagctaggtgatagttggctgtccacacctccccgggccttaataccaccttacagggcgcctcataggagcccttgcggatgaacgatcggt

SEQ ID NO: 10210 - DNA, 556 bp, Glycine max
  Coding DNA Sequence Number=SeqID_431
ataagttcgcagacacaccgtgggtggcgagtgagagccagcacgaacccagaagcgatgcacgatctcgccctattatgtgtctcgtagaaagttagttgatgaacattcgactggtcgaattttctgtgtcttactcttactttttcgctgccacacgcgtatgaatttgatttgtaatattgcaatggcttctctcgacgttgttttgtgcatacgtgactggactatattaactcctatcaagcatatagcgcacgtcgcttatatctctattctatctcgctcgccatacatgcgcatcgtgacctggctatatcatgataaaccatgaggggtatatggaccagtgactctatgaactttcgtctcacactagagctggaggaagatataggcgcgcgagcgtatacaagaatgacggagaaagatctgatggtcataattactctttctgatactactgaaagaatctatagaatgcggggtgggcgcttctccctcacgcccctctcacctcctgttgagggcggcgctcctatttaccactatatag

SEQ ID NO: 10211 - DNA, 390 bp, Glycine max
  Coding DNA Sequence Number=SeqID_432
gacacccaaagcctgacgaacatgcccccgaacgcccaccatcggcttacgtcatcttctcaaatcaggtgcgagagtcgctgaagggacaagatctttccttcaccgagattgccaaggtggtcggtgagaaatggcaggtcttgcccgccgaggaacgcgaaggttgcgaacgacaagccaatggtgcaaaagagaagtactatgcggaactcgccgagtacaagaagacgccaaactacgaggcttaccagaagtaccttgaagactttaaggcgaagcactcagtgcctactaaaggcaaacgttcgaaactggagtccgaaaccagtacttcaacacgagggggcagctacgaacagaacgaccaagccacaaatcgagcattaa

SEQ ID NO: 10212 - DNA, 598 bp, Glycine max
  misc_feature (43)..(43): n is a, c, g, or t
  misc_feature (107)..(107): n is a, c, g, or t
  misc_feature (215)..(215): n is a, c, g, or t
  misc_feature (235)..(235): n is a, c, g, or t
  misc_feature (254)..(254): n is a, c, g, or t
  misc_feature (257)..(257): n is a, c, g, or t
  misc_feature (354)..(354): n is a, c, g, or t
  misc_feature (435)..(435): n is a, c, g, or t
  misc_feature (437)..(438): n is a, c, g, or t
  misc_feature (445)..(445): n is a, c, g, or t
  misc_feature (460)..(460): n is a, c, g, or t
  misc_feature (475)..(476): n is a, c, g, or t
  misc_feature (479)..(479): n is a, c, g, or t
  misc_feature (505)..(505): n is a, c, g, or t
  misc_feature (515)..(515): n is a, c, g, or t
  misc_feature (549)..(549): n is a, c, g, or t
  misc_feature (558)..(558): n is a, c, g, or t
  misc_feature (566)..(566): n is a, c, g, or t
  Coding DNA Sequence Number=SeqID_433
gtagtggtgtgcttctatacttctggtcgatgtaagacagcancacaaattgcgcgtacgcacagccgtgctcatccgtgtactcatgcgagacggtgtatatcaangagtcgtgggggagtgtatagtaacgaatgtgccgtcgagtcaaggacgtgagagccacaaaactacagataggaggtcgagatcgagcggagagagacagaggcgcnagcacagagacgcgcagacngcgtgcgacacacacactnaancagtgagcaagagggtagtgagcggcacacacaccatctctccactctacccactgcgaagaatactcgccgcgtgtgcgtagtgctctgtattgtnatcatccctacatcgtcgcctctcgtcgtcgtcgcgccatacacaatcgagacgcaagcagggtagacggccagagatgangnnttagganatatagtgaaatagnggtgccagcgctccnngtngcctggccggggcgcgggggggtganggaaaagganaataatactatacaacatgagaacaatagcatanagagatganggtatgtntataattgtgtgcgacaccgtatacaatccca

SEQ ID NO: 10213 - DNA, 241 bp, Glycine max
  Coding DNA Sequence Number=SeqID_434
tgcaggctctgtttggattccatcagaaatgaaaggcctggatgaacattgagaccactttgtgtgttaacctcctgcggactggtgctctaccacaaaaagagggtccctcttatgaagcacttctgcttggttctcttaggctacaccatctgccccttatgatccttttgatttcacacacgcctttgaacccgctacctataaacgattgtggagacatttatgcatactagggcta

SEQ ID NO: 10214 - DNA, 389 bp, Glycine max
  Coding DNA Sequence Number=SeqID_435
tttcctgcacactcaaggagctggctttggccctttcttttatcttcccatgatggaccattcaaaggaagctaagatttggaacaatgtgttagacaaacctgacaacgtggcatgcatcgtaataggaagcatgcaggcaactgttctgatataaacacttcctgcagtgtttcaaataagtgaaatacagtatgaactgaaggaccattcagcgcgtttgaactgtgggcattgggatcacattttctgctatgttaagaccttccaacctcatacatatcgtctcttaccagagacggacctacttgtcatgactctactcttcatgaagagatcttctgatctgtatctcatgacgtgccacacgcacagcgtgcatgctatgg

SEQ ID NO: 10215 - DNA, 467 bp, Glycine max
  misc_feature (59)..(59): n is a, c, g, or t
  misc_feature (125)..(125): n is a, c, g, or t
  misc_feature (213)..(213): n is a, c, g, or t
  misc_feature (217)..(217): n is a, c, g, or t
  misc_feature (231)..(231): n is a, c, g, or t
  misc_feature (252)..(252): n is a, c, g, or t
  misc_feature (266)..(266): n is a, c, g, or t
  misc_feature (328)..(328): n is a, c, g, or t
  misc_feature (374)..(374): n is a, c, g, or t
  misc_feature (376)..(376): n is a, c, g, or t
  misc_feature (378)..(378): n is a, c, g, or t
  misc_feature (387)..(389): n is a, c, g, or t
  misc_feature (391)..(391): n is a, c, g, or t
  misc_feature (404)..(405): n is a, c, g, or t
  misc_feature (418)..(418): n is a, c, g, or t
  misc_feature (437)..(437): n is a, c, g, or t
  misc_feature (439)..(439): n is a, c, g, or t
  misc_feature (442)..(442): n is a, c, g, or t
  Coding DNA Sequence Number=SeqID_436
tctgtgtatgtcgtgttcgagctctatccacaaggcgggatagaagaaaagagacagcngcgacacgcggcgagctgcgggcgcgcttaacaatgataacagtagagagagcgtaaattgtatgnatttggaagaggagattgtgaatgcgcataattcgtatgaagataagtatagcacagtgtatagtgcaatagatataagttcactctntctntatttgagataagnaattaatgttgtcggtggctntagtgtagctagantatacatagatctctacctactttctcggtttgtgtaagagatacaagtcgtgttgtctttntttttattaataatattatgtggtacacaacaaacatggagagaantngnccctttctnnntntttctttgttttnnttgtgagtgatgnggagcgcgcagcttctctngntcnatatagagtgcatccttccggtggg

SEQ ID NO: 10216 - DNA, 592 bp, Glycine max
  misc_feature (26)..(26): n is a, c, g, or t
  misc_feature (30)..(30): n is a, c, g, or t
  misc_feature (44)..(44): n is a, c, g, or t
  misc_feature (60)..(60): n is a, c, g, or t
  misc_feature (68)..(68): n is a, c, g, or t
  misc_feature (75)..(75): n is a, c, g, or t
  misc_feature (100)..(100): n is a, c, g, or t
  misc_feature (158)..(158): n is a, c, g, or t
  misc_feature (189)..(189): n is a, c, g, or t
  misc_feature (200)..(200): n is a, c, g, or t
  misc_feature (214)..(214): n is a, c, g, or t
  misc_feature (225)..(225): n is a, c, g, or t
  misc_feature (274)..(274): n is a, c, g, or t
  misc_feature (302)..(302): n is a, c, g, or t
  misc_feature (338)..(338): n is a, c, g, or t
  misc_feature (347)..(347): n is a, c, g, or t
  misc_feature (364)..(364): n is a, c, g, or t
  misc_feature (370)..(370): n is a, c, g, or t
  misc_feature (376)..(376): n is a, c, g, or t
  misc_feature (388)..(388): n is a, c, g, or t
  misc_feature (391)..(391): n is a, c, g, or t
  misc_feature (396)..(396): n is a, c, g, or t
  misc_feature (398)..(398): n is a, c, g, or t
  misc_feature (400)..(400): n is a, c, g, or t
  misc_feature (405)..(405): n is a, c, g, or t
  misc_feature (408)..(408): n is a, c, g, or t
  misc_feature (412)..(412): n is a, c, g, or t
  misc_feature (427)..(427): n is a, c, g, or t
  misc_feature (429)..(429): n is a, c, g, or t
  misc_feature (436)..(436): n is a, c, g, or t
  misc_feature (439)..(439): n is a, c, g, or t
  misc_feature (441)..(441): n is a, c, g, or t
  misc_feature (470)..(470): n is a, c, g, or t
  misc_feature (492)..(493): n is a, c, g, or t
  misc_feature (501)..(501): n is a, c, g, or t
  misc_feature (504)..(504): n is a, c, g, or t
  misc_feature (531)..(531): n is a, c, g, or t
  misc_feature (537)..(537): n is a, c, g, or t
  misc_feature (562)..(562): n is a, c, g, or t
  misc_feature (565)..(565): n is a, c, g, or t
  Coding DNA Sequence Number=SeqID_437
gtgccgaacgcgcaccaagggatganaggnactgagaaaccagncgaccgactcgcacancgtacgcncgcactnactaccactcacactgcgcattagngagatacacacatcacatcgcagacgactgtatcatacatcatacatcaaccacaacngacccacacaagcagacacacatagtgagantgagatgcaantcgtgatgacacancaagagcgaancgcaacacgcatgaccacgcaacgatacggtgagccgtaggagcagagnataggagtgatgatgatagtgacgaagnatgagatagaggagacgacgcgcagtcgtgatgctncgatcagcngcgtcagcagtcatcantgagtncgctangaaacgatcggncgnatatnantnacagntcncgtngatcgatatcgacancngaggacntananaatgcacgagtacatgaggcatgaagatnaatcaaccaatcgacgactaanntaaatacnttntataaatccatccgtcgcgatctccgncgtcgncgcagggtcgcgactaatctagcanctnccatcacgagcaacacagactgatcgg

SEQ ID NO: 10217 - DNA, 433 bp, Glycine max
  Coding DNA Sequence Number=SeqID_438
ttctcttcatgtttggtctccgaaataccgtctccttctacatttcctgaatcgatgccagccttgatcacctctctgcggatcctccccaggagtttctcctaggactcgtccagggccaccaccaaccgcaggttgtactgggaccagaagaagtgtattgcttgaagttagatttgatagtaccatatcctacgacaagtcagaaaaagcacgggcaaaagccgcctatctgaggagtcgtcctagtagcctctccagggttttgtcgtcgggcgcttctacttccacgatgtaaggcggctgaaaggagatggtgttgggggtgttggatgtcgtggtagaaaaaagaatgagattaaggaggtgaaggagcagaagaaagcgaagggggaggatgggtaggatgagggcattaggagtctgtgacaat

SEQ ID NO: 10218 - DNA, 217 bp, Glycine max
  Coding DNA Sequence Number=SeqID_439
tgtggatatcctgagccagaagctcatggatcaaggtgttggtgattctagaaatattaaggttttatctttttggtacataaaccggattgttgccttcaggatgatcttgggcagggaaggccttacgtgcttgcttagcggtttggggatatcaattaagacctatgccccttgaaatgcagtgtggtgggctacatattctgtctgccaaagg

SEQ ID NO: 10219 - DNA, 391 bp, Glycine max
  Coding DNA Sequence Number=SeqID_440
gggctcgttccaaataaacgtctcgccctccaatctcagcatcacccacctcagttctgaacgaaaatgatcactgaacgacacgttttctacgcacaaccttcctaccagttcgcaactcactctactccaccgcgcgattcggccctcaagctacgtcacacggcggattgcaagcacgcgagctttcaactactacctcgggaggtgacgactgtgctggactgaggaatgttatggaatgctggtcaatcgcctgaatggcacattggggttcttcgggagtttacttgaacacgattacgacggtcactctaacaccggctcgctacctcttgtggaggcttgctttgactgatacgtcgcatgtggacatgcgataacggaatca

SEQ ID NO: 10220 - DNA, 207 bp, Glycine max
  Coding DNA Sequence Number=SeqID_441
ctaatgagtgccctaaaacaaaataaaatgagccgcccacactaaaccggtttaaaaaagaaaaacctgggaaaaaaggtgtattaaaaaatcccccaacccaaaaagagaggcccaattgaatatagagagcttttgcgcttaaatagctgactgactccatgctcttgcgcgttccccccgcgcgagctttaacagctcaaaaaa

SEQ ID NO: 10221 - DNA, 491 bp, Glycine max
  misc_feature (276)..(276): n is a, c, g, or t
  Coding DNA Sequence Number=SeqID_442
gcaagcgatagcagcaagcattacaacaggtagtgggagtcataatatgtgtgtgggatatatgtgagtaggggcgagacggaaaggaggtacaggatggccggcggagcgtgaacgcaagcgacccgccctgggatgccacatggggtgggggtgtgcaaatgaaataaacgtggtggagtatcgagcgttcggaggtaccgaggtagtgatatgagtatataggttatagttcttgtcaacccatcggtgtgcgctggaccccatctcttgtcngcgggtgatggatcaaatgtggagacaccatggtgggggtgaggcagcgctacccgtagttatggcgaacgagaccgtgaagtgggttgatttgtgtagtgggggtgtcccttgctcgtaacccataacttacggagggtggggtacgcgcggtagtcgtataggaggaggtgagatgtggttgtgtcgcaccgcaagtcagatcgcgcgcgttg

SEQ ID NO: 10222 - DNA, 452 bp, Glycine max
  misc_feature (59)..(59): n is a, c, g, or t
  misc_feature (402)..(404): n is a, c, g, or t
  misc_feature (413)..(414): n is a, c, g, or t
  Coding DNA Sequence Number=SeqID_443
atatattacttctacacattacacatacaatcatacatatatgtttatttgtgttgctntttgtatggtgttgtgtagatgtatatcagattatatggtggcttagatgtgcgaacgcttatatatgttatagtgtagaggagatgtgaggagtcttacacgacatatatgttgatgtgtactctccgtcgccctagcccaccacagcgtgcgttcgagcatgcggtgccgcatcctccacacgctgccgctccctgcgctactcgccaggctcacgtcacctcttacatgacttgagaggagccgcgacacagtgagcccagatagtagcccgagcgcgaccgcaccaattcgactcaacgagcagtctctcctaccaacggcactcgatacgagggcatnnnacaaaaacnnagaggaaggaaaggagaacgaacaacaacgaccggcca

SEQ ID NO: 10223 - DNA, 541 bp, Glycine max
  misc_feature (191)..(191): n is a, c, g, or t
  misc_feature (211)..(211): n is a, c, g, or t
  misc_feature (246)..(246): n is a, c, g, or t
  misc_feature (262)..(262): n is a, c, g, or t
  misc_feature (306)..(306): n is a, c, g, or t
  misc_feature (352)..(352): n is a, c, g, or t
  misc_feature (370)..(370): n is a, c, g, or t
  misc_feature (459)..(459): n is a, c, g, or t
  Coding DNA Sequence Number=SeqID_444
tgcgctccaggcgtcagctaagcaagacatagttctgatatccctacgcgctattgcctcctcgcatcatcgtccgctgttctcactagcttctccacctatcgtggcgctcgcaccgcgataactctcgtattatatagtataatcttgtactcaatgtatatttatattatctcatgtcagtggaagantcagacgaccacaatcgacntgacgtctacacacgcagcgtaactgtcaggagcnatgacacaagaagagnagagacggtgcagtctcgcgagctgatgagacgcacagcaccancacggcggcgatgccggtgtcgactcgcgacgctcgtaataacacnatatcactcactacgtcntaataatgcgcagccgcgctgcactttcgtccctcgtctcctgtcactactcgctctgcctctgcgctcgagtatacgacggggcgcancgtagtcaatcatgtatctgatgagtgtgcaccaatagtctactgcactctgactcgggtcatggagttgccacgacggtaa

SEQ ID NO: 10224 - DNA, 176 bp, Glycine max
  Coding DNA Sequence Number=SeqID_445
acccgacccgaggaatattgtcttgccagctggcatcgggcgccagcgcaagccatggcgccgaaaggacggcggccacacgaacttcgaaaataatgctggggttactgccaaccccaagggagaaatgaaaggttctgctatcactggtcccaatggaaaagagagggcggatt

SEQ ID NO: 10225 - DNA, 524 bp, Glycine max
  Coding DNA Sequence Number=SeqID_446
ttttgccgaggcgaaattggaaccagaccttaaaaaattggagggttttgagttggaaaaacaattttttcagccagcaattacagttcctgcagccccagtgcaggtcccagttgggcgccaactttctcgcccagttcctgaaaagggaactcctgaagaagatgaattggcacctttccaggctgagatggccctttgagcagaattttccaggcattttttgtgtccaagatgcggggcttcaaagaggaattgtacccccttttccggggattcctcctcgcttatctgggaaattattgagctggccaggggatgtttttaaaaggtgaaaaaaaaaaggttcataaaagtcgttcaaaacttatttacttttttttgggaggggttggaacccccctttcctttatacgtaacaattattgagccattgggcttttttatattttatggggtggagtttaccatggccagtttaaccaaggtattttttaaccatgttccaccgaagtataaggaat

SEQ ID NO: 10226 - DNA, 270 bp, Glycine max
  Coding DNA Sequence Number=SeqID_447
gttttgcagtaaacaatcgttcttcaaataccaacaaaagttttcgcccagcccttggaaaaggtaaaaaaattgtttttcttactagagttgatcctttcccagaagctttacgggttgttttttttggggttaagaatgaaattctgagttttaccgccactaatcctatgctaacggtcttttttgagaactgtaagagtctcaaatatctggttgatgagtgtcctttggcatttgtgacttagcaggtagtattttattccctta

SEQ ID NO: 10227 - DNA, 301 bp, Glycine max
  misc_feature (26)..(26): n is a, c, g, or t
  misc_feature (29)..(29): n is a, c, g, or t
  misc_feature (32)..(32): n is a, c, g, or t
  misc_feature (79)..(79): n is a, c, g, or t
  Coding DNA Sequence Number=SeqID_448
tcgtgtcgcttcatgtcgccgccggnggnggngggcccctccatctatcccgcaccggatccatccccgtctaccccancaaatgccccttcccattcaggtcgttccctcgagctgcggcggcccagtcctgcctctagagctaacgcggccgcagtggcggcaggactgactggtgggtttggaacccccgaggtctccggcggcgggcacagatccagctccgcggcgagccaacttgagtcagactcgtggggatggtgtgcggcaaggcggagcagaacacggacgtgcccttcac

SEQ ID NO: 10228 - DNA, 543 bp, Glycine max
  misc_feature (307)..(307): n is a, c, g, or t
  misc_feature (339)..(339): n is a, c, g, or t
  Coding DNA Sequence Number=SeqID_449
atatttcgcagaaaccgcgcgcagggagtatttaacccccagcgggtggcggggcgtggggaggggccggggccgttcccttgtcggggtggggggggggggggggccccctcccaccttttccagggggtggggtctgttcggtctcccggaaccttccgaaacgtgttataaggatggagggcggtgcggggaagttggttttttgttgttgttttgttcggtgtgccgaatgtgcaagccgctcacgacgtggggggggggacctattgggtgccccttccctttcgtatgagatccctcaggnccggctcccgggggggttgaataattcatgcngggggggcagagtaggcagaggaagggatacaaatctaggcaggctttggcgccgagccaggttgcgcttgaacaatggccatgggaaaagaaaattaagggatcccaagcgctaggtcagtgtggataaataatatcttaagactgcacctctgtctgggcggggggcaagaagggtttccaccacccaaattcatatttagg

SEQ ID NO: 10229 - DNA, 520 bp, Glycine max
  Coding DNA Sequence Number=SeqID_450
cacgccgggcccactaggcaggttgccccggcatgatgtccccgggacggaagttgctcagattgatggtgccccaaggatgggccaacccttggagccaatattgatttcaggccaaaaaccagcccctctggctttgagatcattggcccttccccaatgctttggattcagtggggaaccgttcatcctgggcttgtcctagctgctgctgaatccccctgaaattgctgaggcttaattaatgttgcaccaaattaggttaaaatagtatcaatgcttgcacctagaaataataattgtagccttggacttagggaattaagctttgaaggtgttagtagtgatctattggggggggtgatgcgcctctatgaagtttgttaatactatatgaagctttgagggggttgctagtgatctattgtgtcttaccttccccgaagcctaatttaattgggtcttttttctattataaatggagagggtggggtaccatccataccttcgtctcaaaaaa

SEQ ID NO: 10230 - DNA, 586 bp, Glycine max
  Coding DNA Sequence Number=SeqID_451
gtcgaatatatagatgggcgggtacggcgtgcgggtggtgatggtggagggttggtattgagagtccgcggtgaaaaggctataagataagctgagtggcaataatgagcgagaggcggtggggaccacgacgcaccgacgcatatacggatctatttaagtatttaaatatccaaggtgtagcgaggtagttgggttgggaggagatatatgggtgttgcataagaaaagagaggaaaaagacgagagaattatgcgcatatgttcgctcagacacccgcaaggtcagacgcaaacccctgtcgatgcggcgtagagttcatgagatgggagaggagagacaacatcctctctccccaacccgcccgggcgcgacgcaacaagtcgatcgacaagacaaattcaacgacgcaaacaacaaaacatttcaaacctacccatacccagcctaagcgtgtggggccaggacgcgcgcagagaagtacggtaatgaaagaagagcgcgaaagaaccgaggcgcgcgaaggaggcgggagggggaggtataaaacacccaaaattacgtactccacgtataagcgagaga

SEQ ID NO: 10231 - DNA, 464 bp, Glycine max
  misc_feature (33)..(33): n is a, c, g, or t
  misc_feature (59)..(59): n is a, c, g, or t
  misc_feature (80)..(80): n is a, c, g, or t
  misc_feature (114)..(114): n is a, c, g, or t
  misc_feature (142)..(143): n is a, c, g, or t
  misc_feature (146)..(146): n is a, c, g, or t
  misc_feature (148)..(149): n is a, c, g, or t
  misc_feature (173)..(173): n is a, c, g, or t
  misc_feature (284)..(284): n is a, c, g, or t
  misc_feature (376)..(376): n is a, c, g, or t
  misc_feature (426)..(426): n is a, c, g, or t
  misc_feature (432)..(432): n is a, c, g, or t
  misc_feature (438)..(439): n is a, c, g, or t
  Coding DNA Sequence Number=SeqID_452
gtttgtgtattatcattgctattaattgtatgnatgtcattatattataagtatatatnctagttatatttatctaaacnataataatataatatatatcttatttcaacaatngtacatatatgatattttaaagaagagnncangnnaatatgacagacatcacacagatnaacacaacatataccatagacataataataagaacaagaagacacacccgacacaatcgtatgctcgtctcacgagagtatttatgtatacttttgttctgttcgagtgtnggtctcgtcggtcctggttttctgcttactgcgtgatatatatatatataatcttgcatgttggatatactcgagtgaagattacactaatnacctcgcatcttcaatacacatatgagtgtaggaggatgtgcgtgtgcangtacgntatatnnagatacctgactatatatgtactgc

SEQ ID NO: 10232 - DNA, 428 bp, Glycine max
  misc_feature (33)..(33): n is a, c, g, or t
  misc_feature (139)..(139): n is a, c, g, or t
  misc_feature (204)..(204): n is a, c, g, or t
  Coding DNA Sequence Number=SeqID_453
taacaacacaatcacagcaaccatctcctcacnaataaaaaattgtaggcgagcgagcagaaacacaccacacaaccacacagaacaaaccatagagacaatcatatcaaacacactactcctcatacagatctaacanatataccatacaacctctctaacgtgtctaacaacaaaaaatgctacgctaaaacactatatttntctattctaaatctctgtcttgtgttttttgccccacaccaccatagtgtgaactcgactggcccgcaaaaaacaccccacgtcctctccatactaagacacaggggagtgtaatagaaggaaagatcagaaaggtggatgtttcagcgggtggtggcagggcgggagagaacagcgctccccacaacacgagatccccagaggcgcgtgcacacacaaccaat

SEQ ID NO: 10233 - DNA, 550 bp, Glycine max
  misc_feature (457)..(457): n is a, c, g, or t
  Coding DNA Sequence Number=SeqID_454
atcaaagaggccacaccataccatattcgccatgtcgcacgccatgcccgcaatccaccccacccaaactacccccgcgtcctgaccatgcgtctattgatttcaatgcctgctctcctcaggaaactcccacaccgcccactccacgccaccctcccctctcacaaaaccaccggacccccctctcgctatcaactctgatacctccctacgttacacgcctctacccctacccaacattccggaataacaccttcaccccaattagtactacccccacgcactctttcttcacactaccactcgttaaccaccccactagctccatctgccccatccacgccgtacatgtcatctctcttgacccgtggtcgctccctccgacccactattgctcgactcccctccttacacctatcacatctcctacgctctcatcagaccaaagcacgcgcgnttcgctctcacatacactcaccacatcagctttattaatcttccgcccaaccccctctacctccacactacacgatgccacatactcccatgt

SEQ ID NO: 10234 - DNA, 545 bp, Glycine max
  misc_feature (82)..(82): n is a, c, g, or t
  misc_feature (90)..(90): n is a, c, g, or t
  misc_feature (92)..(92): n is a, c, g, or t
  misc_feature (102)..(102): n is a, c, g, or t
  misc_feature (127)..(127): n is a, c, g, or t
  misc_feature (138)..(138): n is a, c, g, or t
  misc_feature (140)..(140): n is a, c, g, or t
  misc_feature (150)..(150): n is a, c, g, or t
  misc_feature (156)..(156): n is a, c, g, or t
  misc_feature (166)..(166): n is a, c, g, or t
  misc_feature (177)..(177): n is a, c, g, or t
  misc_feature (179)..(179): n is a, c, g, or t
  misc_feature (181)..(181): n is a, c, g, or t
  misc_feature (209)..(209): n is a, c, g, or t
  misc_feature (252)..(252): n is a, c, g, or t
  misc_feature (258)..(258): n is a, c, g, or t
  misc_feature (281)..(281): n is a, c, g, or t
  misc_feature (310)..(310): n is a, c, g, or t
  misc_feature (318)..(318): n is a, c, g, or t
  misc_feature (347)..(347): n is a, c, g, or t
  misc_feature (369)..(369): n is a, c, g, or t
  misc_feature (390)..(390): n is a, c, g, or t
  misc_feature (433)..(433): n is a, c, g, or t
  misc_feature (447)..(447): n is a, c, g, or t
  misc_feature (483)..(483): n is a, c, g, or t
  misc_feature (496)..(496): n is a, c, g, or t
  Coding DNA Sequence Number=SeqID_455
gcacgcgacgccgacagacacacatgccactctcgctctacgcgccgtctcgacgacctcacgcgccccgcacgcgcacaancactacanantacatacagntactcactatattgatattatactntactctgcatncnatatgcgatnctgtcnctgcagtaangcctgaccatncnancgagtacgtagctattcaaagcgtgtgnatgacaggatatgacgctgactctctcatgctgtccacacgtngctctnccgtgcatgtgcagatcgcacangaaacatctgtactgcgcgcatgtctgcnctcatctntctcatctctcgttggctcgtgtcgcacngcgatagcacgcccaacgcgantcggtcgaccagagacggacnagacctagcatatccagatataccctagcagaaacatcattcnagttcacaaagctnggcagcgctggccagcgctccgtatgcgctcgcacncacagccatgcancatcacagacagacgtcgtcgacagcgcgacgacaacggaacgaacgca

SEQ ID NO: 10235 - DNA, 464 bp, Glycine max
  misc_feature (120)..(120): n is a, c, g, or t
  misc_feature (132)..(132): n is a, c, g, or t
  misc_feature (139)..(139): n is a, c, g, or t
  misc_feature (159)..(159): n is a, c, g, or t
  misc_feature (204)..(204): n is a, c, g, or t
  misc_feature (219)..(219): n is a, c, g, or t
  misc_feature (285)..(285): n is a, c, g, or t
  misc_feature (288)..(288): n is a, c, g, or t
  misc_feature (314)..(314): n is a, c, g, or t
  misc_feature (330)..(330): n is a, c, g, or t
  misc_feature (333)..(333): n is a, c, g, or t
  misc_feature (337)..(337): n is a, c, g, or t
  misc_feature (397)..(398): n is a, c, g, or t
  misc_feature (421)..(421): n is a, c, g, or t
  misc_feature (428)..(428): n is a, c, g, or t
  Coding DNA Sequence Number=SeqID_456
ttgtcgtagctgagtgagccgctagctacctgccgaccttctactcgcgctcctctgctcgtcgtggtcttatctgccttctgtacgtatgcttgtcgactctgcatcatcatcctgcgncgatgggcctgncacgacncgtcatgcgtcggtgtgcgncatcgtcactcgtggagcaggtcgctatcctcgatcagtgtggtnatacatggatgtgcntacctcactccccgctcgcgctcgcgacgtgcctggcatcacgcccgctcgctgcgagcgcctccncgngagcacggacgacactgcgctcgcgncgccctgtacgcgcantgngccngtcgcgtctgacagcccgcacatcctacctccagtctctaccactgtctagcccgcaaanntccaacatcgtcagactacactncgctctntcacacgacacgtctacgcgtctctcctgatcgcga

SEQ ID NO: 10236 - DNA, 376 bp, Glycine max
  Coding DNA Sequence Number=SeqID_457
acagcttggagatccatctcgacctgctgcctaggagactctatcttgctgggatcctagagcaagagtttctaaaatatcagcagcagcagcaaggaggttcccaaagccagaaaggaaagcatctagatgatgataacgaaggaagcaacatattgagtggcttcgcccttgaattcttgaaagaagcgttcggcgtgaacatgccgctagtgagaactccctggtgagaacgtagatggtggttagtggaagcccatttgtgaccgtgaaaggaggtctaaagagtcacagcttccgccttgaggaagccccgcaagaagaagttgattgattgttgaaggaagagctgccccagtggcgtggagaccgacaa

SEQ ID NO: 10237 - DNA, 441 bp, Glycine max
  Coding DNA Sequence Number=SeqID_458
agctcggcgagaggtgtgcaccatatcgcttaccccaacgcaccagagtcggggaagactgaactgagagccatatatggacaactgtgtcaagacgataagcccatgggtaggagatccgatgccacaaaccggggacagtttgccgcaaccgtggaagctccccactagaaatctgacatcaagcctgtgtttgttgatctcacacaggaagatcaagatgctgttcggcaacttgctcgaagaaggaagtgaagcctctgggaaaagctgtgggaacctcaagaaagagcggcacatattcagaccagacatagccaatttttctcacgataagacatggcgtgactggctacatggacgctaatcagctaatatcagctatgcgaaactgctgggactgaccgcaccatgtcagaaaaggtccctgcacatgatcgc

SEQ ID NO: 10238 - DNA, 530 bp, Glycine max
  misc_feature (116)..(116): n is a, c, g, or t
  misc_feature (125)..(125): n is a, c, g, or t
  misc_feature (202)..(202): n is a, c, g, or t
  misc_feature (380)..(380): n is a, c, g, or t
  misc_feature (482)..(482): n is a, c, g, or t
  Coding DNA Sequence Number=SeqID_459
gtcggagtaccaaatgtcaatcatacatactcgacactcgtcccgccacctcgcaatctcgtcctagctacgctactcgcatctccactatacatgatgtgtgtcctcgcagcctnactatgtgntgaggtatagtcgcgtgagtgcattgtcatctgtctcacactctgatgtcctcgtaataatatatatacggatatancgcactctcgacgatttacatcatcctgtggactctatcggacgatgctgcgtagtcctctacgctggctcatcgatatagtcactcactgcatattatactcgtagcacaccgtacactgtctgctcccgctgcactgtgttgactcatatgctctctacatctctctcgctcaccncatcgcatgctgctccctaccacctgtcgccttatctctgcaacgctcatgacgtcatacgtacatctatcgctctctacctctagacgctcgactcgaganatctctcgcgtgtatgtgagatagtgtgcacggtagctatcgtatcgc

SEQ ID NO: 10239 - DNA, 595 bp, Glycine max
  misc_feature (29)..(30): n is a, c, g, or t
  misc_feature (40)..(40): n is a, c, g, or t
  misc_feature (42)..(44): n is a, c, g, or t
  misc_feature (46)..(46): n is a, c, g, or t
  misc_feature (106)..(106): n is a, c, g, or t
  misc_feature (148)..(148): n is a, c, g, or t
  misc_feature (153)..(153): n is a, c, g, or t
  misc_feature (155)..(155): n is a, c, g, or t
  misc_feature (158)..(159): n is a, c, g, or t
  misc_feature (163)..(163): n is a, c, g, or t
  misc_feature (194)..(194): n is a, c, g, or t
  misc_feature (196)..(196): n is a, c, g, or t
  misc_feature (200)..(200): n is a, c, g, or t
  misc_feature (208)..(208): n is a, c, g, or t
  misc_feature (211)..(211): n is a, c, g, or t
  misc_feature (215)..(215): n is a, c, g, or t
  misc_feature (235)..(235): n is a, c, g, or t
  misc_feature (265)..(269): n is a, c, g, or t
  misc_feature (284)..(284): n is a, c, g, or t
  misc_feature (296)..(296): n is a, c, g, or t
  misc_feature (299)..(299): n is a, c, g, or t
  misc_feature (367)..(367): n is a, c, g, or t
  misc_feature (386)..(386): n is a, c, g, or t
  misc_feature (388)..(388): n is a, c, g, or t
  misc_feature (396)..(396): n is a, c, g, or t
  misc_feature (398)..(398): n is a, c, g, or t
  misc_feature (401)..(401): n is a, c, g, or t
  misc_feature (478)..(478): n is a, c, g, or t
  misc_feature (492)..(492): n is a, c, g, or t
  misc_feature (503)..(503): n is a, c, g, or t
  misc_feature (528)..(528): n is a, c, g, or t
  Coding DNA Sequence Number=SeqID_460
ttgtaggttggtatttgtgtgtgtagtannaacccccccnannntntaatatattagttaaatatatgtgtgtgaattacatatgctattggctgctggtgtaggnatagtgtgtgtgcgccacaccaccaccccacgcggcgagcanccgcncngcnncgtntgtacggaggaagggtggtgtgtggttgcgngnctcnatcaggcnccngttngatgccaaacacagcactcnacccgaagccggacgtggtagtacgtgccnnnnncactataccaccggntgagatgacaanaanctacagggccagcacgagtgccatgcggcgtcgttgacggttatcagaatgtgtgcgttatgtattangttagtgtatgagttggtnanagtgttantncgnaatattaatgtgtactgtcagaggaaagagtcgggcaccggtcggtgaaacaacacaagcgtgggaactgatgactntctaccggctactntaccacaactntcacaactacaccatcagtaatgcngaaccacaccatacaccagacaacacacacaacaaatcaaacatcacccaactatgtaagacaagag

SEQ ID NO: 10240 - DNA, 491 bp, Glycine max
  Coding DNA Sequence Number=SeqID_461
gtgccttagggagaggatgtctcattgatgaatcccaacaagctgggagggcagtatcagatctgcgttgcgctcattaataacagaggaaagctgttagttgagattacgatgtctttcggagagatttcatcatatgagttcaaagaatgccatatctctcgctccataatggccgaccgtttgttgtccaattctcagctgacatctgagaacacattgggtacatcgaccataagctcattagtaacgatgtctaggaaaatcagcatgttaagcttttttaagaaaccatgtggtgtcttccacttgaatagaaggagtacattatctttttaaagaatctgctgggaaccatagagtgtctacatatgtcaaaattattactagaggtgtttatttcaggaatgtaaattgctttatgatatttccccccccccccccccccttaagtatctacaaacatgaggtgtccaattcttacatgatat

SEQ ID NO: 10241 - DNA, 178 bp, Glycine max
  Coding DNA Sequence Number=SeqID_462
gtaaaacctaggatggaaccagctgttaatcacacatactctgtgcctttttatctctgtcaaatgtaattatcagctgcagcaaccggcacaccgacctagccattccaccggcccttgttataaaatacaccgagggcttcactccggtaacatcgcccagcctggagcgaggcag

SEQ ID NO: 10242 - DNA, 351 bp, Glycine max
  Coding DNA Sequence Number=SeqID_463
caatgctttgcatatggatgtttgagattgtgatagcatgtcacctaaaaaattattctttttatcacttacctactcgaggacgagcaggagttaagcttggggatgctgatacattggaaatgtatctataatttttgatgctccatgcttgtttattgccaattactttatgttttacttgtgcttcttggtgtttttattgatttcctgccactaacatattgacaagatgccaaagtggccagttcctgttttcttctgtttttgattccagaagagctgaaaaataaatattcttaaaattgacaaaggaagctattttacgaagttttacactggaagactcca

SEQ ID NO: 10243 - DNA, 254 bp, Glycine max
  misc_feature (93)..(93): n is a, c, g, or t
  misc_feature (131)..(131): n is a, c, g, or t
  Coding DNA Sequence Number=SeqID_464
cgtttgggaccgatcgaccacttcacttcccggaggccgaaacccacaaagcgtcccccgtcgccgtcttcgtccaccctcccgctaaaccgnctccacaccacccacccaccgccgcctgcgcctagggntccgccccccatgaccgtcggcgagccggagatgccggcgtcggcgcgcaggcgtttcttcctcgccagcgtcgacgcgctcatcttcctcaattgcgggctgctgtgggtcctctgcgcggg

SEQ ID NO: 10244 - DNA, 399 bp, Glycine max
  misc_feature (160)..(161): n is a, c, g, or t
  Coding DNA Sequence Number=SeqID_465
gcgagcgaaaatcctgaaaccaccaacaaaccatcgtccacggacatggaccttaagaaagtcttcaaccagttcgacgccaatggcgacggcaagatctctgtctctgagctcggcaacgttttcaaatccatgggaacgtcgtacacggaggctgagnncaaccaagtcttggacgacatcgacatcgaccgcgatggtttcatcaacatggaggagttcgccgccatctgccgctcatcctcctctgccacagaggtccgcgaagcattcgatctctacgaccagaacaagaacggtttgatctcgtcctccgagatccacaaggttctcaaccgtctaggtatgacgtgttcccgtcgaagactgtgtgagaatgatcgggcgtgttgacactga

SEQ ID NO: 10245 - DNA, 583 bp, Glycine max
  Coding DNA Sequence Number=SeqID_466
atccgacatgtgtccggtagtttcagggatcacaaccagagacgaagctatatcttgtgagctgggcatgcgtgcgctctcgttggcagttggtaagataaaggtcaaagaatcggccgactatcgtgagactatggagaggtttcagagctccacaggcccagatcctgatgaggacggtgttcttagacgtggaggcagcctagtaatcaagtttcttgagaacgaggatataccagggtttaacaaattttgcaaagagaagtttaagaaagtatctctcctgaggcctaaggcgacgaggtctagttcgagggagatctacatgatctgcgaagggttgcggtagaagattggccaccactcacctcccatgagatcttgcaagcttgtgctgagcagagtggctggaccaagaactctacaaatttgccggtgagctgtaggcgtgtaggcctgagatgatgctaacttcatcggcaattcatgattactgagttgaggaaactccgatggtatctctcctggaggtgatttggtttggtgcctttgttaaagaacagccgtattggctttgcgttcg

SEQ ID NO: 10246 - DNA, 419 bp, Glycine max
  Coding DNA Sequence Number=SeqID_467
tgttgaatgacttagatctgccggggcagtttcattccagagatataattatatcgattgataggtgggctagttcagtttcggcaaactcatcgccaatgaatgattgggaacagaaggaagctgtggaagaaggctcatactatgaggctggataggtagtcccggattcatggaaagatgatagtcagctacacccagattcagatgattttacaaaaacaattgagggtctgcaaagtcagtagtatgggagggattagcagaatgaaaggttggagcaatcattgatggaaagaaacagcttagttcagagatgggaagagcctgtaaatagggttgaaacgccttcacatttgcagttgatggaggcggaggataaaattgaaaggatagctagtgcgcctgaaatagtataa

SEQ ID NO: 10247 - DNA, 439 bp, Glycine max
  Coding DNA Sequence Number=SeqID_468
tggtcatggttgattcctacaccgtgcttctgcatgacacctcttctacatttgccatcactcctgatgccatattctgacctctaaccttcttgcccgatttgtttacgacctgcaccgatcttgtgcgactaacgtgctgcgcgattggctttgcattcacctttatactagttgcgcttgatccctacttcatcaacctctccatggagcacataatttctacttaccaccggacggcaactatggctatccttcttgactacaatggtacactaatgcctcaatcatccaccattgataacagtcccagtattacatccattgaaattcttagcagtttgtgtatagataagatccacatggctttccttgttagcgctagaagtcgaaagatgctttctgaatggttttgtccttgtgacaatctgccagttgc

SEQ ID NO: 10248 - DNA, 393 bp, Glycine max
  misc_feature (294)..(302): n is a, c, g, or t
  Coding DNA Sequence Number=SeqID_469
ttccttctccttcccttgaacttggaaccacccagaataattttttccttggcaggccccgggacctcccccttttcccaagcgaaaggacaagccacgaggtttctttttcattcgggctggtttcctttcccccccaatcagggatcatgaggaagcccaccactttttttctttcatcttcatgaaaaaatttccctccccctcactacgggagagacccctgaaggggttttatatagagatttaattaagaggggtgtcttgtttgtgaagcgaccctcccccccctannnnnnnnngtttgggggggggggggggggtggtttttttatgtatatatgtatatgtatattttttttggggtggtgcacgcaatgagagaggctaatt

SEQ ID NO: 10249 - DNA, 453 bp, Glycine max
  misc_feature (26)..(26): n is a, c, g, or t
  misc_feature (40)..(41): n is a, c, g, or t
  misc_feature (135)..(135): n is a, c, g, or t
  misc_feature (156)..(156): n is a, c, g, or t
  misc_feature (169)..(169): n is a, c, g, or t
  Coding DNA Sequence Number=SeqID_470
gagactgtacgagcaacacaacgacnagaagatggggggnntgttctgttgagaaaaggtgaggtagtggggcgcgcgtcctcttcctgcggcattcgccaaatggatggggctgcgcacagagcagctggtggnggtggggtgggcgacaaaganacacggctatagncttgcaggtggtgctccaactcactagcacctccaattatgcaggggctcatgtgtttccactggattatctgtatatctccttttataatacatctcaccacctttgtgttgtcctcggatagcgtggaggagtctctttattttttgttaagaaagagagagcagagagataataagcggtttaccctcgcccacccccgccgggggatgtcctcacctagtttcccatgaaggaggcctagcccaccacacgcggaggatggcgcccacacactgatgtaa

SEQ ID NO: 10250 - DNA, 547 bp, Glycine max
  Coding DNA Sequence Number=SeqID_471
ctatgatattactgacactggccgaggatcagctggtgattactatacagagcggcttcctgcacccactttgtcattcctttcatatgctgaagagattaaagcacccgacaacagtgggtctctaatgcgacttcatggctccatgccggacaatgcattacaaaagaatccagctgagataaactggaatctccatcatatgattgcatcaggtaaatgatgtccgactcaaaactagactagcggcggatacatttcaaacataagagctggggcttcttccaattatctatatgcaactccgtacggccttaatctcgcagctggcactgaacgccgcaatatgacgaccccaatactcaatactgcatttatatatgcatgcatgcgtgaaagatctgcaaatctccgtcaccagataattgctgtgatactgaaccatctgatgcctgaacagtttgcttttcgaacatgctttgtaaatatgctgacttttgtatcacttgcaggcaagtcatattgtggaacccagcaacggattgca

SEQ ID NO: 10251 - DNA, 487 bp, Glycine max
  misc_feature (88)..(88): n is a, c, g, or t
  misc_feature (115)..(115): n is a, c, g, or t
  misc_feature (139)..(139): n is a, c, g, or t
  Coding DNA Sequence Number=SeqID_472
atgatggcgaaccaggatgacctcgccaccctcatgacggccgagcagggcaagcccctggccgagtcgaaaggcgagatcgcctatnccccctccttcatcgactggttcgcgnaagaaggcaagcgcctctacgggnatgtcattccaacacaccagtccgacaagcggctgatggtgttgcgtcagccgatcggagtggtggctgcaatcacgccgtggaatttcccggcggccatgatcacccgcaaagccggtcccgcactcgccgcaggctgcaccttcgtctgcaaacccgcgcaccagacaccctactccgccctcgcgatggccgagctgggacggcgcgcaggcattcccgccggcgtgttgaatattgtgaccggcatggatgcggttgcgatcggcggggaaatgacttccaacccgatcgtgcgcaagatcaccttcaccggctccaccggcgtcggcaagaagctcatggcac

SEQ ID NO: 10252 - DNA, 494 bp, Glycine max
  Coding DNA Sequence Number=SeqID_473
gagtttcctggttgtgttgcgcagtgtctttcggggatttatgggttgcctgtggggtgggctacctagtcgtagtgggtgggtgtctgatggaaagtcttttatttcttatcggcttggtctatttgctttgtggggtgctcctctctctttgtggttgggcacctttatctcgtgatgtttgtgggcatgtgaatactctgaatgtgcatttcgaagtttgagaagtttcgacgcgttactgccattcctgtgaatgtttcggttgtgcacttgtagaatttggggtaatttctaattcgcgatcgaacatgttttgagaagttatatagtaatttgcaggctgtaaattgctctaatgtaggccgggttgtttgtcgtggcttcaaatttccttcctgttaacccgggtcatgttatatgtttccaaatgaaatttccacttcatgctagtcgcttagcactgggtggcgcagagtactagctgcatctca

SEQ ID NO: 10253 - DNA, 423 bp, Glycine max
  Coding DNA Sequence Number=SeqID_474
tcaaggagagaagcctttccttaaggttttcccacccaatttcaaaagatggtttgtacataaatttcggtatttcaagaaaatttcaagaaaccgtttttaaaaacccttatttaaaggcgcagctaggggcattacttcatgtaaaactatcttttgatgtttcagggtccctgctgtgtggtttatgcaataccttaagaagagaaaaatctttaatagagcttgagatggatacagaagtttcgaataaagatttttggtatgattttaggaaagaagctaagaattgtaaatatttgtcctatatataggagtttgtatttatctgtcggcatactaattggtgataaatacatatttactgttactgtcactttcactcccgatattccagtttatatggacggaatgtgtcgatat

SEQ ID NO: 10254 - DNA, 393 bp, Glycine max
  Coding DNA Sequence Number=SeqID_475
tgtaatccgattacatcgctagtcacggccgataccgcccaccccgaatctcgtgtttcttctcgccttctgccccaccatctcctcatcaatctctccatccaggcgaaatctccgatagggatggcatggggcggaggcgcccaggttcgcgtggggcgcgagagcagctgagccggccggaaagctgtacgcaccggtgttgctcaacctgtccggcggctccggcgcgcgagccgttcatggcggcggtccagaaggatgacgtggcggccgtggggcagcggtacgcggcggacagcagcgaggcgccgtcccgtccatggtagcgcaggatttggctcccgtgatcgcaatgttcgcgctgatgcaaggctgttgttcttgtgataa

SEQ ID NO: 10255 - DNA, 559 bp, Glycine max
  Coding DNA Sequence Number=SeqID_476
tacaaaaccctctcgcttatctgctcatatgcctggctggtcccacctctggggtaaaaacaaaacccgcccgcggcgggggcgcgggcgggagtaaacaagaaactcgttgtgctcgcgcccctcctcctcctaaccgccagcgcactgtgaacttctgctcgccacgtggaaaatcggtgtgggttgtggtcgcgcgccacaacattgcggcgcacaacatctgtctctaatcacttcttaatatcttccctcttcatcctcctccctcttcgtcatctgccgttgtctgtatatctcgcgcccgctccgtctccctcgcttccctctctcgccacctctctcacatacagtggtgttgcgttgcgcaaccactatggtggcgacaccatcgtccgtctccgcctctgtctaacattgctggtgtcttggtatctctactttggctagcgtcctatctccctctcctcgctccctttctgcacaccggcgctcgcgctaaatatgtgcggtggtgtgtgggtgtgaatatatatacattagatttccttctcctctt

SEQ ID NO: 10256 - DNA, 458 bp, Glycine max
  misc_feature (380)..(380): n is a, c, g, or t
  Coding DNA Sequence Number=SeqID_477
atctttgctttcctcataatctcaggctttgctgcttatccttatcgagaagaaaatcatataatcaaccttggagacccaagttggggcctcgctaaccaagagtttccacatggactctttgtttatttttatgaaccttattgcaacccttgcagacaaatgtggcccgaaattattgaagctgctcaatattttgcaactcatggttctaaagtcaagattgctaaagttgagtgccacgatgaagtcaatctctgcaacgcacaagaagttcgagcttttccaactctcatgctgtatattaaagatagacccaaggtcgagtacagaggatcaagagatgctcaaagcattcaaaagtggatttcaaaggttgntgattcttcctacgaaaccgttgatagccttgatactttgttcagcaagttcagcggagctatccttttaaatgcaga

SEQ ID NO: 10257 - DNA, 378 bp, Glycine max
  misc_feature (31)..(35): n is a, c, g, or t
  misc_feature (38)..(39): n is a, c, g, or t
  misc_feature (332)..(337): n is a, c, g, or t
  Coding DNA Sequence Number=SeqID_478
accacgttgtaacaagaagtttcagaaaccnnnnncannacagtgttattcaaagaactaaatctccaacttcgaaaaccttacttgagaattttatacgttgtgatcaagagacgaggacaaatgaacttgggtttgaccaagctaaaagtagaagttatgtccccaactggggcattagagataactccattcctttgggcagaactacctctatacctcctcccttatgctcacagtgtcagaataaagcaccagtatttggaaagcctccaaaacggttttcttacaaagagctagaggaagctactgatatgttctcagatgagagnnnnnnggctgaaggtggatttggtgtggtccacaagggaatactca

SEQ ID NO: 10258 - DNA, 514 bp, Glycine max
  misc_feature (69)..(69): n is a, c, g, or t
  misc_feature (117)..(117): n is a, c, g, or t
  misc_feature (247)..(247): n is a, c, g, or t
  misc_feature (253)..(254): n is a, c, g, or t
  misc_feature (260)..(260): n is a, c, g, or t
  misc_feature (320)..(320): n is a, c, g, or t
  misc_feature (401)..(401): n is a, c, g, or t
  misc_feature (423)..(423): n is a, c, g, or t
  misc_feature (472)..(472): n is a, c, g, or t
  Coding DNA Sequence Number=SeqID_479
atatcttcggtcttctcgttctgtatctatcatccatgtgtatattttctgtcatatggttgtgtgagntatttgaataaagtttatggtctctatactgcatacacatctgttccnatacgggtgcggtggcgagtgtgtagggcgtatatctatgctcatcctatacaaccctctttcgctgttgtcgtgtgttagagacgtgttcgttcgtctcgtgtgtgtgtgactctgagagcgtcagcantcatcnntctcgntgcaatgatccgcacgtcatatgctgggcggtcgggctctcttcatacttattcaagttntgcgtctctatacactgctgtatgacactctctgacttggtggcggatcgtgtcgtgcgtacaagatagataactaagaangtgtatatacatatacactacntatcacacgttgtatgggctatatcacactctgctatgcgactactgantacgtggcggtactcgtgactctctgctacatatgatttgat

SEQ ID NO: 10259 - DNA, 340 bp, Glycine max
  misc_feature (99)..(99): n is a, c, g, or t
  Coding DNA Sequence Number=SeqID_480
aacaactatcgaagtctttcaatcaagtcaacggaaaccatggattcagagatcgcctacgacttctctccagcgttcataatctacaagagtggccgngtcgagcgcctcaccggtgaaaccatcgtccaatcttctttaactccccacaacggcgtcgtttctaaggacgtcgtttattctcccggcgagaatctctccgtccgtgttttcctcccggagaaagccgcgaagaccggtgagaagctccctctcctcgtttacttccacggaggagcattcatcatcgaaacccctttctcaccgacttaccacactttcctcacgacgtctgtatctg

SEQ ID NO: 10260 - DNA, 587 bp, Glycine max
  misc_feature (185)..(185): n is a, c, g, or t
  misc_feature (277)..(277): n is a, c, g, or t
  misc_feature (345)..(345): n is a, c, g, or t
  Coding DNA Sequence Number=SeqID_481
tgctctaagagtgccgcttgtgtgagtgtgacagcagcaacataatatcgagtatatgctccaccaattatcacctactaagtagatataaatgtctgtcaaattacaacaagccctcgtacttagacgtcagttcttgtgtacttcctattttatatactatatcgtatatagaggttcgcctnttctatcccggtgcgtgtatcattgtgttcgtgtacctataatagcttatcctgtactatgcagttcacgtagattcgtcttctctgtgacncacgatcttctctgagacacatgtcgtgcttatgaatcgacttactgcatactacaatagctacaatncaatccacttggctattactcgcctcactagcgaccggcagccgcattgctgtcaattacatattggtttatagcacagtgtatctgcgtgatcgtctggtatgatcacactccacttcacatatctgtcattacatgtgcttatcttgtctcgtcgatagcatatcaagacccgggctctgagacgacgtataatctcgcgcgtgcactctacagctatgctatcgacgtctgtactctga

SEQ ID NO: 10261 - DNA, 385 bp, Glycine max
  Coding DNA Sequence Number=SeqID_482
tagcgtgtaagtaattgtggttgttgttgttgttgttgtttagaattgttgtattggatctgattgattggaattgggaaggtgtagggtagagaaattgggaacaatgagtgaggtgtttgaagggtacgagcgtcaatactgtgagcaatcggcgaatctttcgcggcaatgcactgcggcttctgctcttgatggaggtaatgcaatcaaatcactttcttcacacacactcttcaattcaacacttgttctgttattgttgaggttgatgatttttaggcccttgtggaaatggaaactatgggaacgggaagaatgttgtgaaatgtaatgatcaggttcggttgacaggaagacgatagagttttttgccttttgtgat

SEQ ID NO: 10262 - DNA, 551 bp, Glycine max
  misc_feature (87)..(87): n is a, c, g, or t
  misc_feature (148)..(148): n is a, c, g, or t
  misc_feature (178)..(178): n is a, c, g, or t
  misc_feature (298)..(298): n is a, c, g, or t
  misc_feature (300)..(300): n is a, c, g, or t
  misc_feature (307)..(307): n is a, c, g, or t
  misc_feature (316)..(316): n is a, c, g, or t
  misc_feature (381)..(381): n is a, c, g, or t
  misc_feature (387)..(387): n is a, c, g, or t
  misc_feature (390)..(390): n is a, c, g, or t
  misc_feature (418)..(418): n is a, c, g, or t
  misc_feature (503)..(503): n is a, c, g, or t
  misc_feature (507)..(507): n is a, c, g, or t
  Coding DNA Sequence Number=SeqID_483
acgctctatctcttattacgcaccaccgcctctatgctatgtgttatatatatcatatgtgattacacacgacgctcactgctgctntgtgcgtgagacgtcgaccgcacgtgcgtatatgtgtgtgtagagtgacacacgtgcgtcngtgagactagtgtacgtatgtatgctgcantgatcacgaagcgcgatcgcgaccgccattgttataatatagtaaatagtgatcatctgtgcagatacagcgacacgcttaatcaagcgttcatacctcctaactccagatgtacggagncnatcatancacgatgantatagatagcgatcaagcctagttctgtagagtcgtctcatcaccgcagctctgtagttatctgngaattngantagacgtactgtacatcatcgaccctcncatgagtgaccgcaacgtaacatcaatcgacacactgatgtatcgtcaactcggtctcagttatgacatactgatagtacatgtncgcntgcgtgtacgcactacatgattaagactcatgctactgtcgccc

SEQ ID NO: 10263 - DNA, 537 bp, Glycine max
  Coding DNA Sequence Number=SeqID_484
atcattgcgccttgcagcagctacgccttctacttaaatcgtaagaaggaactctctctccaccgtcccatcctctttccactcaacttctgccaatgcgtccgtttgcacctcaagtcgcacgcttcacgaacagatcaacttcatcctcaccagcactacagtccgcagcaagttattttacatccggttaccgcagcactccttctcccacacaacaacaaaccagaatgtcttcctccaccgagactggcgagcttaagctcgagagcaccgtcaagaccgccactggtgtcgagctcagcaacgagcagaggactatcgtgtcttcagtgctggacctcttcgctggcaggccctcccttgccaagctacagctctggaaggacgatgccgtcttcagcgaccccatcactgtcgcaaagggcaggaaggagtttgagcctcaatggtacggcctccaaaccgccttctccgaaatcgagcgcaaagaccacagcgtcacctcctccggcaaccccatcgagctagacatga

SEQ ID NO: 10264 - DNA, 379 bp, Glycine max
  Coding DNA Sequence Number=SeqID_485
aggcttttacgctcatcgaactgctggtggtcatcgcgatcatcgcaatcctcgccgctatcctcttcccggttttcgctcaggcgaagctcgcggcgaagaaaacgacctgcgtttcaaacctgaagcaaatgggcacgtcgaccatgctctacacgagcgactacgatgatgcctactatcctcaccggttcaactgccgcaacgccgcgaacgctttcatcacgtgtcctgactatctcgacgcgtcgaacaacctgaagccggaagccaaaatgctgagcggcggcgccgagcagcgctactactgggtttatctgctccagccgtacacgaagaactatggactcttcctgagcccggccaactcgaacggttt

SEQ ID NO: 10265 - DNA, 459 bp, Glycine max
  Coding DNA Sequence Number=SeqID_486
gagagaccatcagcggctagcttcacagaatccagcggcggtgacgaatccatccatggtggaggaccaccgccgtgaccgcgcccggcagcggcggccaggcatgctcgtggtggcagcgctcggggctctcggcctcctcgccctctccggcacggtgctggctgcctcggtcgcggggctggccgtggcggtgccgttgctcctactcgccatcccggtgctcgtcccggcagcgctgcttgccgctctgacggccaccggcatgaccttttcaggctcgctggccgtcggggcgacagcgctgctgtcacgcttggggagcgcggtgaggagggcggccgcaaccccgccggactacgtcgagttggggaagcggcgggtggcagaggtggccggggagcagacggcgcacattgacgccggaccggcgatcagtccagagcaagtggcccgcaa

SEQ ID NO: 10266 - DNA, 390 bp, Glycine max
  Coding DNA Sequence Number=SeqID_487
taattggtttctccggccgcaaaatcttctttgccacctatgggggatgggggggccacggggggggtgccttttctgggaagggtctccccacgggggataggggtggggcctccactgtgaggcaagctgcaaagagcattgttgtaaatgggctttgtaggagggcgatattgcaaatgtcttataccactggggggccccagcccctttttgtgtttttttacccttatggccctggggagatccccgtcaagggaatcccctgcattttgagggggaggtttgtattcaggcctggcacaatttcccccaccccttatttcaagaggggggggaaagggaggtttttgaggagtgttgcatatgggcactttggcggagatgaac

SEQ ID NO: 10267 - DNA, 204 bp, Glycine max
  Coding DNA Sequence Number=SeqID_488
ttgtcatcatggcagggatcatgctggtggaaatgaaaagataaagcaattggtgcctggaatcaaggtctatggtagtttaattgataacgtcataggttgcactgataaggttgaaaatggggataaggagtcccttggggctgatatttatatattgtgtcttcacacaccttgtttggaaaactcatcaacccgctacta

SEQ ID NO: 10268 - DNA, 80 bp, Glycine max
  Coding DNA Sequence Number=SeqID_489
aaacatgtaatcgagacaggacagcccaagcagagccaaaccggaggagaaggggaatctaactcgagccttaatttaag

SEQ ID NO: 10269 - DNA, 301 bp, Glycine max
  Coding DNA Sequence Number=SeqID_490
aactcatcactcaattttcgctggccttcacctcgtccttgtagcctctctctcagattttaaaaggaacttttgcttttcttcgttcccaaggcaattcagagagtcaacatgtctggtgatgaagctgctgctgctcctgctgttgttcctccggttgccgaggcagctgctgccattccagaggacatggatctgttgactgcattggagttgacgctaaggaaagctcgtgctcacggtggtgtggttcgtggtctccatgaaagcgctaagcttattgagaagcgttctgctcagc

SEQ ID NO: 10270 - DNA, 551 bp, Glycine max
  misc_feature (33)..(33): n is a, c, g, or t
  misc_feature (84)..(84): n is a, c, g, or t
  misc_feature (101)..(101): n is a, c, g, or t
  misc_feature (103)..(103): n is a, c, g, or t
  misc_feature (162)..(162): n is a, c, g, or t
  misc_feature (167)..(168): n is a, c, g, or t
  misc_feature (214)..(214): n is a, c, g, or t
  misc_feature (249)..(249): n is a, c, g, or t
  misc_feature (286)..(286): n is a, c, g, or t
  misc_feature (324)..(324): n is a, c, g, or t
  misc_feature (384)..(384): n is a, c, g, or t
  misc_feature (391)..(391): n is a, c, g, or t
  misc_feature (417)..(417): n is a, c, g, or t
  misc_feature (422)..(422): n is a, c, g, or t
  misc_feature (480)..(480): n is a, c, g, or t
  misc_feature (492)..(492): n is a, c, g, or t
  misc_feature (496)..(496): n is a, c, g, or t
  misc_feature (501)..(501): n is a, c, g, or t
  Coding DNA Sequence Number=SeqID_491
tactgtgagcgcgtgactacctaattgtcgttngtagtactatatgtcatgtgacactgatttagataatatcatatctgatantaactagtagtctcatnanatatagcacaacactacagtctcacgcatgcacactataaggtagatgcgtaagagtgncacgnnttgggcgtgtgtgttgctttagcatgatctcaacgtgccgaatatnattgacatacgtagagtaatatgtgataatatatncaatcatagcataaccgtgccggtcgacgcgctcgtnagtcgaatcgttctgctatcacactctctgacatatgnatttatagcgtgctgagactacagtatacagtgcagtacgaatgactgtgagacacacangaagatnggagagacgctacgatcgctgtcttncactngtatgatgaatatataatttatcattgttacattagtattatagtcgttatgttgatnattgataataanctcntatanactgtgtatactgtgcaagggcatcactctctcactgcttatatggtgta

SEQ ID NO: 10271 - DNA, 545 bp, Glycine max
  misc_feature (76)..(76): n is a, c, g, or t
  misc_feature (267)..(267): n is a, c, g, or t
  Coding DNA Sequence Number=SeqID_492
gtcctacgttggaccacgttgcgactgcggtgtgcacatcgcgccacgggacgcgagcgcctggcgcgtctactcnagggcaatagcctcgcatcgccatacaccaagctacgtagacgacgctctagcgtgcgaccttgatccctgctcttacgcataagaatgtgtgtggacgatctatatgcatctcactttctgatctatgtgtggtatattgtatgctctaagatactgttatattaaatgtgatctctaaccatcatgtantgctacacaaccgccctcacttaccaccgcgtgcctcgtcacgtcaatcagagcaactatctctctcgcacacgcgcgtccgagcgtatatatgtaactccgatatatgaattcattctatatacttacgctcctactatgttcatgtgagtagattaacaatattaatatactcacgtaacttatactgatcactgaatgacgaatagcttacataactatactacacatcatataattacacttagacgcctactacacatgacgcgctcgtacag

SEQ ID NO: 10272 - DNA, 275 bp, Glycine max
  Coding DNA Sequence Number=SeqID_493
actacctccagacctttcatgatggcccacgtaactactggggtttcactccgactcccgcttctagtgagaacaacatcgacgcgatcgtctctccagaggctgcctttagcgactaccaaccggagatccgtgacgaacgtagaggagatgtacgtgaagactcaggcgtgctacgcggcgtgcaagcgaccgactgtggatatagactcggtgatcgacgccacttgaagcggtctctgagatactcttcaagtgctcatccgctcgaggcg

SEQ ID NO: 10273 - DNA, 555 bp, Glycine max
  misc_feature (99)..(99): n is a, c, g, or t
  misc_feature (417)..(417): n is a, c, g, or t
  misc_feature (504)..(504): n is a, c, g, or t
  Coding DNA Sequence Number=SeqID_494
tgtcgttttctgacagcactacgcgcactatccacaaccgtcatcacatgcctcctctcatcgcgtgcggcttgtcgcgctctcggacgaccagccccncgttgctcgctatatatcattctctatctcattgtgtgagtatgctccgcgccgcactgggcgagtcaatgatgcgcgcagtgcgcgcaataaagcacggcgctgtcctcgtcgacactccgcgcaccacctacgtggagatgattgtgtccgctatctctcgtgtctactcatcacatacccgtccatgatgatcctctgttcggctctcattactccgcactgtatactatgtgttccagattacgtacatttacgacagacatcttatatcattaggcattgcatgaccgacgccgtctgtctcacacatttagngtgttcacgagcgcgctgttctgcagcgtatatagtgctgagtgatactgtcatttctgtcttcatacgactcccacctatctcccnctgaaatccacgcatcatcctcatacttgtctattgctgctaccaactctg

SEQ ID NO: 10274 - DNA, 251 bp, Glycine max
  misc_feature (110)..(110): n is a, c, g, or t
  Coding DNA Sequence Number=SeqID_495
ccaagagcaggtagaccaacactttgaaccctctaaaagccaggaaggcgactagaggaaagaagaaagaagaagtaaaggaagaaagaggaacaaaattattcaaaagngaaccagttgaggactttgacaaagctcttgtatgaaagttgaggcaccagaaatactcgatgccgatattatcaagtggtatgctggcacagagaagcatgaatccaccaagcgtgaagtgataaagcatttcagcaaag

SEQ ID NO: 10275 - DNA, 327 bp, Glycine max
  Coding DNA Sequence Number=SeqID_496
attatatatggacgacctcccccaccttctgggggattacctgaaacattgaactcagatgaacaaaaaatccttaaactgccattgaaagataggttcttccttcaaccattgtctccaattgatgctgcaaaaagggcaaaggaatcacccaaggaaatggttgtttttattaatttgattgaaaagaaggctctgccatatgtttagaatgatctgcttctcagggccgaatatctgggcttagatcttaacactgtcattgctgcaaaccctaaggatgacaagaaatctctcgatgaactcagtggaaatctcttccaatat

SEQ ID NO: 10276 - DNA, 426 bp, Glycine max
  Coding DNA Sequence Number=SeqID_497
aacgattagctctcgagtgttgttgtgtgttatcaccacctgaagattctctgtctctcccccgatcctcgtcgttctctcgtccaatggcggaagctgtgtctgctcaaactccgtcgctctccgagcaatatcatttggagaatgaagtgaagcaagttaaagaatctcctgaagaaagtagtgaggaggagactactgatgagatcacgcttgagacagctcctgctgatttccgtttcccgaccacaaaccaaacaaggcattgtttcacacgttacatcgagtatcacagatgtgtagctgctaagggtgacgatgctccagaatgcgataagtttgcaaagttttatcgatctctctgccccagcgaatgggttgataggtggaacgagcaaagagagaatggaactttccctggtcctc

SEQ ID NO: 10277 - DNA, 421 bp, Glycine max
  Coding DNA Sequence Number=SeqID_498
aaactgaaaatttcctctactctcttgcttctcactctccctctcactcccattctcattctcattagattccatcacgaaccctaaaatcttctttgatcttttcatcttccactctctccatcttcttccttcttttttaaattttgtgtattcacaactatcaccatcgaacagtgacaccctactccaccacacaagttgatcaatcctctcccttgtttattttgcatctccctttccctcttggtctccgacagcaaagggagatgcgaaataaagggcatggtgctggtgtggaaagaggcggtgttaggaaaagagaaaggaagtaggaaaaagagaggcaaatgataggaaagaaaagggacaccatcgcacatacgacggtcgaatatcatcgtgctcgaagaagactggg

SEQ ID NO: 10278 - DNA, 491 bp, Glycine max
  misc_feature (41)..(41): n is a, c, g, or t
  misc_feature (95)..(95): n is a, c, g, or t
  misc_feature (219)..(219): n is a, c, g, or t
  misc_feature (255)..(255): n is a, c, g, or t
  misc_feature (318)..(318): n is a, c, g, or t
  misc_feature (434)..(434): n is a, c, g, or t
  Coding DNA Sequence Number=SeqID_499
gaaacgcgcacagaatgagaaagagagaactcacacacacngctcataacacacatcgtgaacatatatttataatacaccaaactgtattgcgnacgtgacgtcgataagtgttgttggtgcggtaagaagtaagacatctggtagcgagaagtcaggatgcagagtgcatcttctacacaacaccgcggacacaagtcgacgagcagaccgaccacnttaagttttagaggtcagagagagcactcgcgatcnagtcggtacgagcgggcgcgccgcgcgcttccccggcgcggcgttcgcgctgcgcgagctctncacgtggtacggagttagagcagagagagacgaggaataatatatatattaagaagatatagtatttgtcttattgtttctcgtcgcacagtaccacgcgtgtagagtgataccanaatcattatgatattagaagagaagtacttgttctccgactatctgtgctcacagag

SEQ ID NO: 10279 - DNA, 352 bp, Glycine max
  Coding DNA Sequence Number=SeqID_500
cgcaaacactcacatcgcagcaactccaaactctcaaaaaaactctcgacaaaatggcggaacgtggcggagaacgcggcgccgagcgaggtggagaccgtggtggcttcggtcgtggattcggaggaggtcgcggcgaccgcggtggccgcggcggtccgagaggacgcggcggcagacgcggaggccgtcccaccgaggaggagaaatggactccggtgaccaagctcggccgtctcgtgcaagccggaaagatccagaagctcgagcagatctacctccactcgctccccgtcaaggagtaccagatcatcgacctcctcgttggcccaaccctaaaagacgaggtgat

SEQ ID NO: 10280 - DNA, 239 bp, Glycine max
  Coding DNA Sequence Number=SeqID_501
tttccgagcattatgagataaatcctgaccatcaaacttattcttactatagacctcggaattatctcacttggcgtgcggtataccataatgaacaccatgattgcccaagagttcatgcaaacagacttcaccatgggaaggagatacgaccatagtaatatgataattaaccatactacagatcgaaaacccgtatcatttacatgtacattatagatcgaacacactgaccttgt

SEQ ID NO: 10281 - DNA, 597 bp, Glycine max
  misc_feature (122)..(122): n is a, c, g, or t
  misc_feature (140)..(140): n is a, c, g, or t
  misc_feature (303)..(303): n is a, c, g, or t
  misc_feature (516)..(516): n is a, c, g, or t
  Coding DNA Sequence Number=SeqID_502
atatgtgtgtgtcgtgtcaataaacaacacccccgtcctgttcggtgcaaataactcattgctctctctcttgagtccttgcgcctgtacataccgccgcctacccgtgcccgtactctaantacggtgtcatagctcanactgtatcaatatatgcgtgatacatccggcgggtcgttgcggttcactctacatacaatactatcgtcaaaacgacgccgtgtgcgccgccgcccgctcctgcgcgccgcctgcaccactctatcgcaacttctcttcctccgtcgtcgtccatacacttcntgtgggtcgttgttattacttcttgcccttcctctgtcttgatctataatatcgcgtgctaccgacgcgtgtggaactatcagctgtccctactctctcttccgtcacatattcaactcgcgctctccctcgggctgcgcggtctgacaactctcgctgcctggtgcggtgtgcatataaatcatggtgcgcgacgacgcacgggtgagaganaacaatagtgtggctgcggagcgcgagatacacacaacaacatatctcgacgctcgtcgaacaagaaacagcgtggcgcgt

SEQ ID NO: 10282 - DNA, 465 bp, Glycine max
  misc_feature (111)..(111): n is a, c, g, or t
  Coding DNA Sequence Number=SeqID_503
tctacctctggtcttctgttcgttggtggagcgcctcctgctctgtcactccgcgctcgtctttacgttgctaactcgatcaattctctcttctgtctgctacccatctcntgcccctctccccgcctcccgcctcccgcatcacactctatccatatccatccggctacgtggtgatatatgctctgttcactacacaactctcctcgtactcgtatacacactctctctcgtctgcctctgtcagtgtctcactactctcttctacaattgtgtgatttcgcgtgatgtccgctcgccgatactcctctccgctgccctacacgcgtgtcgacctcagctcgctcgatctcgacatgaactcgacaacccttcactcacagaacctagtgatagataacctcatcgcaaaccgcccaaaccgcctgcgacggcgtatctccctcgtcgcgtgatgatatgtgt

SEQ ID NO: 10283 - DNA, 570 bp, Glycine max
  misc_feature (485)..(485): n is a, c, g, or t
  Coding DNA Sequence Number=SeqID_504
gtcttcatctagcagggcgcgctcgcaaccgtagagtgatatattatatgtttacgttactactagcgcatcgcattccttgctagagcagattggtgtgcggtgtcgaggtgatgcgtgttaaggtgcaaaataaaataatatattagtgttcgtggttaactataatatatcttacactctaatatatcaaaggtcttgtaacaacgattgagcaggcgcaatacaagcctgagcgcatgtgtcatctcctactaaataaataataacgcgcgctcctctcgagagctcgtacacatatatacacaggcaaacacagagggcgcggttcgcgatataatatgcgtcgtggacgagtattatataggtgtaggtcgcgtatgtatcgtaattatatatatttctacatataataaaatatatgtcgttgtgtatattaatattttttagtttgatttgcgtgtggggagaatgattacttcacncagtcgcggctggcgtggcgtggtacagggcagcagcgacacgactggctatcggcgctggatgactgatatccacagcgaacaa

SEQ ID NO: 10284 - DNA, 341 bp, Glycine max
  Coding DNA Sequence Number=SeqID_505
tgggctttgttgctctcatcagccacacatatggggaaatccgtttttgcccaaaagaaatgacgttggatgggtcatgtccacttgggacttcaggacaaagctgctttcttgaattccttgatagattgggagcaagtgccatgcctatgaattgctcttgtaaagatgatcgtaccaagaataaacgcctatgcacttgtaatgttgtgtgtagaacatgagacaattttgcagcagtccaaattaatcataaaataaaaaatgtgtactgatcttgtatttacacatgttgagaattttgaaaagccatgatcacctactgttcgatccagttatta

SEQ ID NO: 10285 - DNA, 478 bp, Glycine max
  misc_feature (27)..(27): n is a, c, g, or t
  misc_feature (72)..(72): n is a, c, g, or t
  misc_feature (115)..(115): n is a, c, g, or t
  misc_feature (118)..(118): n is a, c, g, or t
  misc_feature (127)..(127): n is a, c, g, or t
  misc_feature (221)..(221): n is a, c, g, or t
  misc_feature (228)..(228): n is a, c, g, or t
  misc_feature (249)..(249): n is a, c, g, or t
  misc_feature (259)..(259): n is a, c, g, or t
  misc_feature (285)..(285): n is a, c, g, or t
  misc_feature (308)..(308): n is a, c, g, or t
  misc_feature (310)..(310): n is a, c, g, or t
  misc_feature (322)..(322): n is a, c, g, or t
  misc_feature (399)..(399): n is a, c, g, or t
  misc_feature (401)..(401): n is a, c, g, or t
  misc_feature (427)..(427): n is a, c, g, or t
  misc_feature (429)..(429): n is a, c, g, or t
  Coding DNA Sequence Number=SeqID_506
tatgactatggaactgaatacgctccngtctaccctctacaatcatggtgagtcgtccactcaccctcgccntatcacgtcactacctcacagatcgtaccacgcttcacctcgnccncatcactanctacgccctcacgtcatatgatatttgcctgctctcgtgcaccgcggccgcctctcccacacaactgtcgtctcaatctctatatctctctgtnctcctantacgttgcaccgcgtcgctgnagacgtctgntcgctccgtcacgcgtatacttgcanctacactcatgcactattgccancntcattcgcacanatatcgagtgcacgcctctgtcgctacagatacagctcttcaatcgtacacgcgcctaccgccacgtatgtagtacntnctcccgtcccactactcgacatctcncngaactcgcgatctacgatatccgcactattctcttcctcgattaacgcg

SEQ ID NO: 10286 - DNA, 457 bp, Glycine max
  misc_feature (165)..(165): n is a, c, g, or t
  misc_feature (295)..(295): n is a, c, g, or t
  misc_feature (307)..(307): n is a, c, g, or t
  misc_feature (402)..(402): n is a, c, g, or t
  misc_feature (411)..(411): n is a, c, g, or t
  Coding DNA Sequence Number=SeqID_507
accatgaacggctagtttagtctgtaattttttgcatcatcctaaatatggtaagatgatgttggcgtaagatcgcctactatctcgagtctctagcggggtacgcacacacgtgctgatgtgacatagcgatcgggttcttcacacaacaatccctagctcggncgtgtccatgtctcaactcaaatacaatatatttattcaattgtaagaacaccactcggcgcatgcaatattaatcaccgataaaagtaccgtagataaatctcatccaaaaaaatagatgcgggatgtnagcgcgcgctantcgcgagcataaaactatattcatctacacaatactacagagtgtgcacccaacctacaccacaaacagcctctctatgtgaagaacagcacaantagcaaganaaatcaaaagaagagcacgaagaaagcatcaaacaaacactcacgt

SEQ ID NO: 10287 - DNA, 568 bp, Glycine max
  Coding DNA Sequence Number=SeqID_508
gagtttgattcaattcctacatctgaactaacaaacaaaaaaagagaacaccccctcagacgttgctaccacccccattactatccatgatccaaggcttaatggtttaaacacagttatagagttgcatattcccatcattttggcttcccacaggagaatctatttgattaatacagagttagccagaagactttgaacgcacatgaggcagaagcagctgcagaacagacagtttcaaaggtagaagctgccatgacagcggctgaagaagctgcaaaggaagcagatgcagcagaagctgctcgagcttatgccgaagaagcttcaaagacactgaaaggaaaaaaacatctgcaaagtgatggtttgtacgtgaggtgacatagaagaataagaagctaaatgtgttacaggtgatgagagagagagaagcgcagaagtagtgtttgttgttgaagattttcgacttagaaactctttttagttatttcgtgacaaaaaaaattctttttagttgtaaagcagtaaatctcagatgctaaagccattgtattattgttcacac

SEQ ID NO: 10288 - DNA, 522 bp, Glycine max
  misc_feature (28)..(28): n is a, c, g, or t
  misc_feature (43)..(43): n is a, c, g, or t
  misc_feature (51)..(51): n is a, c, g, or t
  misc_feature (56)..(56): n is a, c, g, or t
  misc_feature (89)..(89): n is a, c, g, or t
  misc_feature (93)..(93): n is a, c, g, or t
  misc_feature (105)..(105): n is a, c, g, or t
  misc_feature (128)..(128): n is a, c, g, or t
  misc_feature (130)..(130): n is a, c, g, or t
  misc_feature (135)..(135): n is a, c, g, or t
  misc_feature (142)..(142): n is a, c, g, or t
  misc_feature (156)..(156): n is a, c, g, or t
  misc_feature (169)..(169): n is a, c, g, or t
  misc_feature (171)..(171): n is a, c, g, or t
  misc_feature (212)..(212): n is a, c, g, or t
  misc_feature (226)..(226): n is a, c, g, or t
  misc_feature (309)..(309): n is a, c, g, or t
  misc_feature (321)..(321): n is a, c, g, or t
  misc_feature (365)..(365): n is a, c, g, or t
  Coding DNA Sequence Number=SeqID_509
taaccctcctggctcaagtacgcgatgngggtagagaccgagnggactacnatctntcgctgactagctctcgctgtctataggacganaganttgtcgttctangcgcgctgccctagttaaacgtntntatancattagnagaggtacgcctantgatgagcgactncntcgactctactatgcactgccttcgtgatagcgccgattcntgctatgagtgtgnggatgcgatctatgcgcgctcgatacataatctactctactttcgggatacgcaatcactcctatgtacctctggcgctatangctgcttggtanatatgatagagtagggatgttgcaggtaggcaggatatatctcngctgccaggcatatggtttggcaatatacacgtatatatgatggccattaatatcccgcgactccgcgacacacgccgactgaggcggaggagaggcggctgcccattagcgctatgactagatctagagagtgcggagggcgcctctacagctcac

SEQ ID NO: 10289 - DNA, 572 bp, Glycine max
  misc_feature (367)..(367): n is a, c, g, or t
  misc_feature (403)..(403): n is a, c, g, or t
  misc_feature (408)..(408): n is a, c, g, or t
  misc_feature (444)..(444): n is a, c, g, or t
  misc_feature (456)..(457): n is a, c, g, or t
  misc_feature (464)..(464): n is a, c, g, or t
  misc_feature (537)..(537): n is a, c, g, or t
  misc_feature (543)..(543): n is a, c, g, or t
  Coding DNA Sequence Number=SeqID_510
acaccccactcgtagttacgcattacaacaacacctccgcatctaagatcgggaaacatctcaacacaccaccacggactgaaactctcacatcacgagtaacatcactaacacctcttatacataacatacagtgaccgcaaacactaacacctcgtctgctcaaccttccacaccactctccgctcactcctctctactcctagtcgatccctctctggttcactcacatctcctctcacgcccacacctcccacaccatcaccacctacacacacgctacatcaacctcacgccgcgccacttccttccctatctccacatctcaccacactcacactcacgccgaataatcacaactagcatncgacgctacgtatactctctctatacaatgaatacnactancacaacgcactactcgcgcacgccaacatgtccccnctacgcccgcannatctctntctcatacttctcggttattacgctctctctctacttcacactgcgcacagatttcatagcgactcgtcgccnccatcncactctcgacactcgacagcggacaaaga

SEQ ID NO: 10290 - DNA, 235 bp, Glycine max
  Coding DNA Sequence Number=SeqID_511
tattagcaaccaaaatacctgaattttggcaccagaaaaaaccaaactaccttaaccaatggccctggttggatggaatattccaccaagcccatataaaatcctccgatttatcctggaacccaattttttacttttaagatggaaaaggccgaggtcggacctaaaggctttaaagggcaagcaaacagaacatgaatcgatggacgaggaccttcgaagatgtataaaaaat

SEQ ID NO: 10291 - DNA, 170 bp, Glycine max
  Coding DNA Sequence Number=SeqID_512
gcgtccgaatagctttctactacagcatagaatttgaccgccgtcaaaatgaaacgagaacggtgattcgtagcatgatatctattggtaaaggcgtaaagaccatgcttggcaccacttaatgtatccgaggagtctagatcctgggcgcgactactactgccacggta

SEQ ID NO: 10292 - DNA, 461 bp, Glycine max
  Coding DNA Sequence Number=SeqID_513
aacgctattgtgtacagatctcgacgccaccaggagtagtcgacgacctcctccaagcggaccagcttccaccgttcatccagaggcagactagctcagcgtgggccagcgcagaaactaatgaatgcccgccgacgagatcggcagagcactcccccccagtcgctaaacacgcctaatatctcatcacatagccactctggcacgctaactaagaaaatatatagagcgattctgctcgcagtaccatatctaacaaataagagataagttgcatccacatatgaccactcaactcgtaaacataattaacccacggagcgagacctaccaggccaacagcagctcagcagactactcagaccgagcatcgttcggggcgacgcgcactaacatctcctaatcttctatcttctctcgcatgaaaggaatcttcttaggaatacatcctcctccttagg

SEQ ID NO: 10293 - DNA, 569 bp, Glycine max
  misc_feature (65)..(65): n is a, c, g, or t
  misc_feature (340)..(340): n is a, c, g, or t
  misc_feature (413)..(413): n is a, c, g, or t
  misc_feature (457)..(457): n is a, c, g, or t
  misc_feature (493)..(493): n is a, c, g, or t
  misc_feature (510)..(510): n is a, c, g, or t
  Coding DNA Sequence Number=SeqID_514
gatacgggcactagcactaaacatgtataaagaaaacggtcgactcgagacaagagtgacataanaaatcccttctgcgcgacctccctacggtaagtcgaaatttgagagcacataatctgcactggacgaaatacgacgcagcacctccaacacatatacctctaaactgctggctctatgtatatcttcgactcagctcggccaatccacgacaaatgatcagtagattatcatcagagagagacaatacaggagtgcagtaccaccttcgcaccaacacactatccatgtcctctccatctcctctcaacacactagctctaactaagtcgactancaatggatcccgctacgcagacgcccatattagaactgtcgtgaatacagaagacacacgagtcgatatattntgtgatgtggtggacacttctctcatgcgcaacccacgcgaaancgaagtcctcaccacgcgccacaacctgactatatnacagcgcgcgcgcaacntccattctaacacgcgagcatatgcacgagcggcgagacacacatccttctgctcggac

SEQ ID NO: 10294 - DNA, 351 bp, Glycine max
  Coding DNA Sequence Number=SeqID_515
agttctactgagtctgcgtttgcatcttctactccttccgtttgcttcttcttcttcttctagatctgatctccaatttcacccccaaggtttgaaaagtctttgtcactttattatacaaaatgggtcgtggaaacagctgtggtggaggtcaaagctcactcaactatctttttggtggaggtgatgctcctcctgctgagccaaccaacaggactgctgcacctgctccggcagctgtgactgcaacagcagctactagtactactgttgagcctgctaagatcaacaaggagatccctgctggtatcaaaactcctgtcaacaactacgcccgtgctgaaggacaga

SEQ ID NO: 10295 - DNA, 544 bp, Glycine max
  misc_feature (26)..(26): n is a, c, g, or t
  misc_feature (451)..(451): n is a, c, g, or t
  Coding DNA Sequence Number=SeqID_516
atagatgctttctagcgtaatccccnccagccgacatatctgattagcgatatccgcgcgattacacactcgctgtataaccaccctcggtaacaacaaccgtcgcgccgtgcctagaggtagcccctcatcacatcatgacgtctatgatcgcacctcacccaatgtcgcctctgtcgctcactgctgacatccgtatctctctaattaacgtcgtatttgtcgtatataggaagagtgtgttattgtaagatatgatgcgtatactacactctcacgcgagtgcgtgtccttcctacgcctctattcggtacatctagtttagtaagtaactcaaacgccccctctgtgaattgtgtagtacctctcggttgctctctgcttgtagaattcggcggatacgcccatcctgccctgctatgtctaccacacatatccgactgtgtaaaanatagtcttatactccataatatatgtgcagatgcttctacgagagagccccgcacagctagctctgcctattgtgacgccactcgacgatatt

SEQ ID NO: 10296 - DNA, 583 bp, Glycine max
  Coding DNA Sequence Number=SeqID_517
ggcagataactgttctaacctcaataaaactaaaataataaaacattcgctacatcccaatgtcatatcccaagaagcaccccgtcaacgtcaaccctaaagccaaggcctctcaaccccaacccaccaattctagactcactgaagaaaagagagaaaagctcctcgctattcaagaaagagagcaactcaagggtctcttagttaacaaattcctcgaaaaatacggtaaggaaaagaaagctaatcaagactacgttaacaaacaagttaatgagttcatgaagaacgaaaagcttactgaggaaaacctcaaaaagcttgaacaaaagattaaagatggtactggtgctaaaggtccagtctctcaaaaggctgatgataccaagagtcaaatctctactcatagcaagcaacaaaatgaatccaatatacatcaagtaggccaaggccaatatgctcatcatcatgaacatgatgatgcagtttccgttacttcatccactaagccaaaatctgtgtatgctcagggtgattctgacratgaatgggctactatgttgaagtatgacaccgaactcta

SEQ ID NO: 10297 - DNA, 381 bp, Glycine max
  misc_feature (241)..(241): n is a, c, g, or t
  misc_feature (277)..(277): n is a, c, g, or t
  misc_feature (288)..(288): n is a, c, g, or t
  misc_feature (328)..(328): n is a, c, g, or t
  Coding DNA Sequence Number=SeqID_518
tttttcgccccatttttgtccagcggcccaacctttttaatttttttggaaaaccccggttttcccttttttcacaagaagttcccttttggaaattatgggggcccaatacaaatagtctttttttaaaaattaaaacccccttttggttggatttgttttgaaaatggaaatatcccccaagtcaaagtttgattaaaaacccaagaggatatttgttggcgtttgtttggtggtgaanttaaagacccatcggcgggcgccacgacagttgtgnttatgtaccgnttttcggcggcggagacgacgtgatgagagggggagaagnccgtgatgtacgccgcgatgggtggcgccattgccggtgatgtggtggcgaga

SEQ ID NO: 10298 - DNA, 506 bp, Glycine max
  misc_feature (248)..(248): n is a, c, g, or t
  misc_feature (294)..(294): n is a, c, g, or t
  misc_feature (367)..(367): n is a, c, g, or t
  misc_feature (369)..(369): n is a, c, g, or t
  misc_feature (389)..(389): n is a, c, g, or t
  misc_feature (391)..(391): n is a, c, g, or t
  misc_feature (403)..(403): n is a, c, g, or t
  misc_feature (405)..(405): n is a, c, g, or t
  misc_feature (422)..(422): n is a, c, g, or t
  misc_feature (432)..(432): n is a, c, g, or t
  misc_feature (437)..(437): n is a, c, g, or t
  misc_feature (463)..(463): n is a, c, g, or t
  misc_feature (466)..(466): n is a, c, g, or t
  misc_feature (469)..(469): n is a, c, g, or t
  Coding DNA Sequence Number=SeqID_519
tcatctactctgtctcttaacagcgtgatgtcatcgtcttggattatgtgtcatatgtatgatagttgtatatgtctgtatcgtgttatcgtgtgatctctccgctggcgcgcgcgctgctctgtcactcgtgcttgtctctgtggtgcgcgcctctatcactctcctgtcatcattctcctcgtctcctaattacatccactccgcatcactcttcatctacgacgtgctgatgctctgtcatcagntacgtacgtgccgtacttacttcctcttaactcattgatcgtgacnatctgtatcgtatagtcgtatatccacttcgtctgtacacactgagacagcctcgattgatgtccgtcgtgangngatgcgcttgagtcacacgncnctatgctgacgngncatgttctctcgcgtcncgctatcatnaccancgtcacacataccccaggactcagtnatnctngtgatgctaccgcgtgctgtgatgacgacgcgtgtca

SEQ ID NO: 10299 - DNA, 396 bp, Glycine max
  misc_feature (30)..(30): n is a, c, g, or t
  misc_feature (38)..(38): n is a, c, g, or t
  misc_feature (60)..(60): n is a, c, g, or t
  misc_feature (65)..(65): n is a, c, g, or t
  misc_feature (79)..(79): n is a, c, g, or t
  misc_feature (95)..(95): n is a, c, g, or t
  misc_feature (106)..(106): n is a, c, g, or t
  misc_feature (108)..(109): n is a, c, g, or t
  misc_feature (133)..(133): n is a, c, g, or t
  misc_feature (146)..(147): n is a, c, g, or t
  misc_feature (153)..(153): n is a, c, g, or t
  misc_feature (157)..(157): n is a, c, g, or t
  misc_feature (181)..(181): n is a, c, g, or t
  misc_feature (183)..(183): n is a, c, g, or t
  misc_feature (187)..(187): n is a, c, g, or t
  misc_feature (189)..(189): n is a, c, g, or t
  misc_feature (211)..(211): n is a, c, g, or t
  misc_feature (313)..(315): n is a, c, g, or t
  misc_feature (323)..(324): n is a, c, g, or t
  misc_feature (338)..(338): n is a, c, g, or t
  misc_feature (342)..(342): n is a, c, g, or t
  misc_feature (344)..(344): n is a, c, g, or t
  misc_feature (347)..(347): n is a, c, g, or t
  misc_feature (354)..(354): n is a, c, g, or t
  Coding DNA Sequence Number=SeqID_520
ctcgcagtgctcacgagattgcactatatnaccaccgncgtcacctgcgagaaggcgctnagctnccatcgacacagcnacggcagagagcaacntggtgctcacncnnccccccgccgcactctgcggcggncgcgccgttcgtnngtcagngagngtattacactcactctgcgcccgngncgcntngtgctcctgcagacggcagcancactacaacagaaagacattaaactaacgagatacttctacataccgcgcgcacgacgatcgctcatgcgcgagcacggagcgcgaacacgatagaaagagnnnaccgccannccgcgacctctctncaancntcngcctcgnctcacacagcagccccacgacagtgtaactcggctcggcagg

SEQ ID NO: 10300 - DNA, 519 bp, Glycine max
  misc_feature (452)..(452): n is a, c, g, or t
  Coding DNA Sequence Number=SeqID_521
gacgcagtcgaggatgttgtgatacgtggataaggtgtgtgtgcgagtgaggagtaagccgaaagggagggagaggtgttagagtaacagtaattttgtattatagatgcagtcgttgtttgtagtacgatatctagcgataatccctactctcctcgctctaactcaacattaccagaatattatcacttaattaggggaagagaaatgccgcagacccgtgtcatccgcgaagcattagcaacacatcctaccgtatacgtcaactatactcatcgccactctcacaagcgggcgcctgtggtagggcgtttcgcggggttgtcagaagatgtcgcgatcggagggactacgcatatgttacacgtatttcttcccgtcacacacaatcagatggtagcactcgagattgtcacaactaccctttacctgcggtatgacaacgtcttaanaccaattggtggaacggcggagagttgggggcagggtaagggagcatcgcggcattgtaggccagat

SEQ ID NO: 10301 - DNA, 583 bp, Glycine max
  misc_feature (206)..(206): n is a, c, g, or t
  misc_feature (328)..(328): n is a, c, g, or t
  misc_feature (393)..(393): n is a, c, g, or t
  misc_feature (462)..(462): n is a, c, g, or t
  misc_feature (486)..(486): n is a, c, g, or t
  misc_feature (488)..(488): n is a, c, g, or t
  misc_feature (555)..(558): n is a, c, g, or t
  Coding DNA Sequence Number=SeqID_522
atgaattggtgcgatgcctgcgatcttgtagatctatgttcattcttgtagtaagagtggtctgtttattgtagcactagagcagctacgtcgggaggtggtatcacgcaggagagtgaagttcagcgtgcgacgagatctagtgtcgtgctacctagttaatcgcatctaccagctcgaggaagggtattcatacgagatagccntgattgtctgtctgatatacactgtctataagatagcgcggctggacctctttctatccatatactcattgtgttcgtacactgtgctcacgcagatctgctagagatgtagatgatctagncacaatcctaagatacgataatatgcgacgcagcgctgtgtccgacaggcagcttcttcgtgagnagatagctcaccacacacttagtactctctcagtgaacctgcttctagagaatagacaatgaaagactnaggtggcgggttatgcctcgtgcntncccctcctgagcgcgcgtgctgcgcgtaagataaccgacctgtcaccctataattggcgcacccccnnnncctcgtcgcatgtctgagtgacaga

SEQ ID NO: 10302 - DNA, 585 bp, Glycine max
  misc_feature (26)..(26): n is a, c, g, or t
  misc_feature (109)..(109): n is a, c, g, or t
  misc_feature (135)..(135): n is a, c, g, or t
  misc_feature (198)..(198): n is a, c, g, or t
  misc_feature (223)..(223): n is a, c, g, or t
  misc_feature (229)..(229): n is a, c, g, or t
  misc_feature (258)..(258): n is a, c, g, or t
  misc_feature (284)..(284): n is a, c, g, or t
  misc_feature (314)..(314): n is a, c, g, or t
  misc_feature (370)..(371): n is a, c, g, or t
  misc_feature (404)..(404): n is a, c, g, or t
  misc_feature (439)..(439): n is a, c, g, or t
  misc_feature (448)..(448): n is a, c, g, or t
  misc_feature (462)..(462): n is a, c, g, or t
  misc_feature (490)..(490): n is a, c, g, or t
  misc_feature (492)..(492): n is a, c, g, or t
  misc_feature (495)..(496): n is a, c, g, or t
  misc_feature (505)..(505): n is a, c, g, or t
  Coding DNA Sequence Number=SeqID_523
gccgagtcatcgatctcgtgacgcanctgatcgctcgacattcatcatacagtgcactgtatgtatacatatatacatatagctacttgtgatactttcgctcattatnctcgagcgctttgtcgcaatcagaantaatatagtgcgagatgacatcagatagactagtcgagaacatagagtgacgaaatatgcgangcgacgaaatacgcatacgatgtangcgtgngatgaacgactgtgacgatacagctacantctcgatacacatatatttacaactntacactgtcttctataacatacgattatantttataattatataaaagttgatacgatgtggtcagtaggaggagtgtatgagaannaatagtagagagaaggagcgtccaccgacgccngcgcgagcgacaggcacgacgacccacccgaacangatcacgcncccacacgacaacngcacaccgcacccgcacgccacgaccgntngannacacccacncgcccaccagacagcgcaggcatacgccgcacaacacatatgtcagaaagacagcagaggcaagcgcgagacacaacaaa

SEQ ID NO: 10303 - DNA, 414 bp, Glycine max
  Coding DNA Sequence Number=SeqID_524
acgagagcccggtggttctgataatgggatgctcgcaaggaggaatcggccacgcgctggcacgtgagttctcagataagggatgtcgagtggtggcgacgagccgttcgcggagtacgatgacggatctggagcaggatccgaggttgttcgtgcaggagctcgatgtgcaatcggagcagagcgtgagcaaagtcatgtcgaacgttatcgataagttcggacagatcgacgttcttgtcaacaacgcaggcgttcagtgcgttggacctcttgcggagattccaatgtccgccgtggagaatacattcaacaccaatgttttcggttccatgaggatgactcaagcagttgtacctcacatggtgtctaagaagaagggaaagattgtcaacgttgggagtatcactgtta

SEQ ID NO: 10304 - DNA, 569 bp, Glycine max
  misc_feature (26)..(26): n is a, c, g, or t
  misc_feature (57)..(57): n is a, c, g, or t
  misc_feature (80)..(80): n is a, c, g, or t
  misc_feature (132)..(132): n is a, c, g, or t
  misc_feature (442)..(442): n is a, c, g, or t
  Coding DNA Sequence Number=SeqID_525
ttatacacgtgacacatgagcgtcgnagtatgaacaagaagaatattacacaagaanatcgacccaccgcgcttgatcanggtgtattagataatgctcgaatcaacaccacattaccattacatatacttncattacgtagctgtttgataagcgaacatcatgctgatttcacgagcaacaccaaagaataataacctaatgtgtatgacacctagagacacactacgtagcaaatacactccactcttcttcgagcattattcttgagagcgcaaatgataccaggcattaagttgctcgtgacgacaatatcacactcatcgcgacactctgagaataaacgccgattaacacatacaatacctctaacacatacacattatatacactagagaccctatcttgcaggcactgcagcgagctatacaatgccgcgggnagatcacgagactgatgtacgatcggcagttagacagcaacagttaatcttctcgatctcaaacaccatcgactcgaagaccacgacctcacttgactccatcgtgcgcctgctccataataagaag

SEQ ID NO: 10305 - DNA, 436 bp, Glycine max
  misc_feature (195)..(199): n is a, c, g, or t
  misc_feature (358)..(362): n is a, c, g, or t
  Coding DNA Sequence Number=SeqID_526
gcttgtgcagtttgcgaggctgtttaagaatcatgttgggtttgattcggatgcgtatttggatattcatgggattgggatgaagctgtattcggaggcgatggaggatgcggtgacgagtgagggtgctcaggagctgtttgacattgcggcggataggtttcaggagatggcggctttggcattgtttaattnnnnnagtgtgcacatgtcaagggcgaggaagcgggtgagtattccagaggatgggtcgagggagtctgagtttgaatttgttaaggcagggtatgagtgggctcggaaggagtacatgaatgcagagaagaggtttgaagaggctgtgaagattaaatcggannnnnatgaagggctgcttgctcttgggcatcagcagtttgagcaagcaagactctgctggtcttatttgattgcgaac

SEQ ID NO: 10306 - DNA, 559 bp, Glycine max
  misc_feature (30)..(30): n is a, c, g, or t
  misc_feature (50)..(50): n is a, c, g, or t
  misc_feature (215)..(215): n is a, c, g, or t
  misc_feature (405)..(405): n is a, c, g, or t
  misc_feature (408)..(408): n is a, c, g, or t
  Coding DNA Sequence Number=SeqID_527
gtaagcgtgataccactgacggtcagcacnccacaccgtcctactgaggntaccagttcatatgactcaagaacatactgctgttcactagacgagatgacgacacacagtgtatcgttgtcgtatccgcgatgacgatcgttgagacagcgcgtatcgcgtatggctgctgtcgtcacgcgaacgatcataaataagaactcgatgagtctgangtgctgtcgagtgaacgcatacgtacgctgtacgcgacgtcgctatatactccctgccgtcgttgcgcgtgtgcccgcgattgcatgacgatgcatcaggatcgatgctagatcactcagataatcactcagaattacatccgcgagccgttaccatacggcaggcactggcgtctagagagaaagagantcntgctacctacccgatcgacgtatggcgcatctgaggaccgtcacatgatcaaatcaccggatatgcgtatcttgaggcggcagtgatgggcgacgcagacgcggcgagaagcgccagcgcaaaatatgatgaacaatgtgccgtgtcgccg

SEQ ID NO: 10307 - DNA, 279 bp, Glycine max
  misc_feature (207)..(207): n is a, c, g, or t
  Coding DNA Sequence Number=SeqID_528
atggtgaagactgtcatcacatccatacagtaaatcactggacttataccatagatggtaaggctacaacatgtctggagagtattgaatccattgatgaacagaacaaaacaatcacctacaagctcttcagtggagacattgatcataactataagaaatttaagttcacctttcaagccattgataaggatcaaggctgtgctnttatataatggaccgctgaatatgaaatgctagctgatgatgttgactctcgttatcgatacatcgaatacc

SEQ ID NO: 10308 - DNA, 588 bp, Glycine max
  misc_feature (54)..(54): n is a, c, g, or t
  misc_feature (107)..(107): n is a, c, g, or t
  misc_feature (248)..(248): n is a, c, g, or t
  misc_feature (253)..(253): n is a, c, g, or t
  misc_feature (332)..(332): n is a, c, g, or t
  misc_feature (337)..(337): n is a, c, g, or t
  misc_feature (379)..(379): n is a, c, g, or t
  misc_feature (391)..(391): n is a, c, g, or t
  misc_feature (490)..(490): n is a, c, g, or t
  misc_feature (529)..(529): n is a, c, g, or t
  misc_feature (536)..(536): n is a, c, g, or t
  misc_feature (553)..(553): n is a, c, g, or t
  Coding DNA Sequence Number=SeqID_529
tgattcgtcactacgtctacgccatacaacgctcgcgcgcagacgcagcgggcnggacgcagagagctatatacacatacgccacacacccactactcggctcaccntagatacatagactaatcggtcattcgtaacaatgtatacatacatcatctacaacaacctcatcctaacgacatctctgcgtgacactgtctctcatctatgctacctccgtccgcgtgttccactcttgtcacgcacgnacctnctcttctctctactactactgacatatccgcacactgctgtatctctgtctatatctgtctctacactcttatgctatnaatancgatacatcgacactacctccactcacgataaacgtatgcangatgtagtgcgntatgcgctgtctgttagtgtatatgatgacgagcgcatactttccatctcatacctatttacttatctcaatcactgtatcattcttacactaacaacnctctgttgtgttgtcgctgctcccacacctactatattncttgatngctctgcacctgtgtgntaccacacagatacgctttgtcgattgtgtgcacg

SEQ ID NO: 10309 - DNA, 581 bp, Glycine max
  misc_feature (29)..(29): n is a, c, g, or t
  misc_feature (39)..(39): n is a, c, g, or t
  misc_feature (76)..(76): n is a, c, g, or t
  misc_feature (111)..(111): n is a, c, g, or t
  misc_feature (114)..(114): n is a, c, g, or t
  misc_feature (116)..(116): n is a, c, g, or t
  misc_feature (125)..(125): n is a, c, g, or t
  misc_feature (141)..(142): n is a, c, g, or t
  misc_feature (175)..(175): n is a, c, g, or t
  misc_feature (178)..(178): n is a, c, g, or t
  misc_feature (301)..(301): n is a, c, g, or t
  misc_feature (307)..(307): n is a, c, g, or t
  misc_feature (330)..(330): n is a, c, g, or t
  misc_feature (334)..(335): n is a, c, g, or t
  misc_feature (361)..(361): n is a, c, g, or t
  misc_feature (384)..(384): n is a, c, g, or t
  misc_feature (391)..(391): n is a, c, g, or t
  misc_feature (393)..(393): n is a, c, g, or t
  misc_feature (398)..(398): n is a, c, g, or t
  misc_feature (402)..(402): n is a, c, g, or t
  misc_feature (407)..(407): n is a, c, g, or t
  misc_feature (411)..(411): n is a, c, g, or t
  misc_feature (421)..(422): n is a, c, g, or t
  misc_feature (454)..(454): n is a, c, g, or t
  misc_feature (462)..(462): n is a, c, g, or t
  misc_feature (471)..(471): n is a, c, g, or t
  misc_feature (473)..(473): n is a, c, g, or t
  misc_feature (516)..(516): n is a, c, g, or t
  misc_feature (539)..(539): n is a, c, g, or t
  misc_feature (541)..(541): n is a, c, g, or t
  Coding DNA Sequence Number=SeqID_530
atgagacgacccacacacacaatacaccnccgcgtacgngctgccgtacagccctgcacgcgcctcctctcacganccacacacgcttatgcgtatcacactccatatatntcncnccccctctntcccacaacaccacannaggattatcacataatataccactaacacacgnatnacactctgcacctatccatatgtatactgatcagttgccttagagctacacaacacaccgctgtgcgacctattaacttcataagatcagacctattataacatttcaataaataataaaaangcaggngggtcctacatgaatgagcacgngtgnngtgttgtcttatatctagtaaaatangcagattacacagtcgcgatacnataatangnactcnaatnccttngccnctctaccaannctcctcagtcactcgtactgcttagccatgtnctctcctnttgcatagntntgtcactcagttagttctgtctcacgacacacacagaaccagntaacacacatatctacgcgtgtnantatgatcatatggcgttgcctgactctctctaacacgaca

SEQ ID NO: 10310 - DNA, 468 bp, Glycine max
  misc_feature (30)..(33): n is a, c, g, or t
  misc_feature (39)..(39): n is a, c, g, or t
  misc_feature (55)..(55): n is a, c, g, or t
  misc_feature (74)..(74): n is a, c, g, or t
  misc_feature (93)..(93): n is a, c, g, or t
  misc_feature (95)..(95): n is a, c, g, or t
  misc_feature (127)..(127): n is a, c, g, or t
  misc_feature (144)..(144): n is a, c, g, or t
  misc_feature (172)..(172): n is a, c, g, or t
  misc_feature (195)..(195): n is a, c, g, or t
  misc_feature (207)..(207): n is a, c, g, or t
  misc_feature (232)..(232): n is a, c, g, or t
  misc_feature (250)..(250): n is a, c, g, or t
  misc_feature (293)..(293): n is a, c, g, or t
  misc_feature (295)..(296): n is a, c, g, or t
  misc_feature (312)..(312): n is a, c, g, or t
  misc_feature (316)..(316): n is a, c, g, or t
  misc_feature (349)..(349): n is a, c, g, or t
  misc_feature (434)..(434): n is a, c, g, or t
  Coding DNA Sequence Number=SeqID_531
ctgtgttgggctatgaagccatggtgaaannnngacccnccgcgcgcgcgaccanagattcccctcccgcatgnatacgggagaaggcgatananttgagacaggccagcgactaaccgggtcgagnagcgcagatggattaantattcagttgtgatagagaggtatcggntactgaatactcacatctgatgngagaggtatgangtaagtacatgcagctaggctacgntctcgcttgtgccacggnagtaccttgagtctgaatgtggcaccgagacactcgaacatgnannatgaatatacaggagnatgnactacgccaatacctctactagtatgcgtgctnagctgatacatgtacgtcatctacgtcgagtgcgcgaccgcacacaggaactcgttgctgcaagtatacgtgcatagaggctganaagactctatatacgtgcgatcacagagtagata

SEQ ID NO: 10311 - DNA, 531 bp, Glycine max
  misc_feature (35)..(35): n is a, c, g, or t
  misc_feature (178)..(178): n is a, c, g, or t
  misc_feature (195)..(195): n is a, c, g, or t
  misc_feature (239)..(239): n is a, c, g, or t
  misc_feature (242)..(242): n is a, c, g, or t
  misc_feature (316)..(316): n is a, c, g, or t
  misc_feature (376)..(376): n is a, c, g, or t
  misc_feature (398)..(398): n is a, c, g, or t
  misc_feature (407)..(407): n is a, c, g, or t
  misc_feature (458)..(458): n is a, c, g, or t
  misc_feature (494)..(494): n is a, c, g, or t
  Coding DNA Sequence Number=SeqID_532
actacgctgcatacctctagagttagctgacgaanctagatctacctcataccgagtcatctatcgataacctctgatgctgcgccattttccttgatcatcgtctcgttgtctacgtgtgacaatatggctagtggcgcacgcccctgcactaacgtaccacatactactctcgacnggcgcatagctcgtgcntatgatatacaaacacagatgctcatcatctcgtgtgtcggcgncangtgatctgaatctccatgtggcacgcacgtctatgtatgatgctgctgggctgtgtcctgtctgcagctattgntcatctggtatggtaggtcctcggtcattcatggtcatctagtatttctcactcgactanacacgtttatacttcactctcntctcacgtnctctacgactgcgtgtatatatacacacgatatgcgatatgtcacaacatnatcgtatacgatgacattgtgatgactcagcactcntataatgaccactacgatcacgtactacattagcgag

SEQ ID NO: 10312 - DNA, 382 bp, Glycine max
  Coding DNA Sequence Number=SeqID_533
agttctccgggctcttcctctagactccacgcggttgcgacggtagcgagctgccggggcccgttgaggaaagatgactatgctatgccggctgccatcattacgatggcaaatgtggggcactgcatgtggcaaatatgtacaggtgctgccttagcattattgatcctggtgattcggatatcatcacgacactgcctggcgaacaaaagtttcttgaagcgctttattttctggcctcccaaactctcccccctcagaaagcgaggcagagaggacacgccgagaagcagcagcgctgctggatgcatgtcccatttatttaaatatgggaaaaatcagcgatagcgacaaccacgaggattcacccaaacaaaccttg

SEQ ID NO: 10313 - DNA, 571 bp, Glycine max
  misc_feature (158)..(158): n is a, c, g, or t
  misc_feature (207)..(207): n is a, c, g, or t
  misc_feature (347)..(347): n is a, c, g, or t
  misc_feature (412)..(412): n is a, c, g, or t
  Coding DNA Sequence Number=SeqID_534
ctgtcttgtgtgtgtagtgaccccaccgacataacagccccgccccaccacaaaggttcacaccaccccctccccgcgacagctcgtactagattagactgtcctatatggtaaatcaacaccatcacacaaggtatatatagatatgtctatctagntcaatgatcgcagtatgtctgtgttaggacctgtgccaatctcgtgccnggacgctacgcgcaggtgagtgactatcgcggcccgcgcgccagttcttctacattctgtattctttgccttgccatcctcctagctcctgtactcgggtctgcatcctgcgacgcagaccggactactacacatattantggtacgagtgccagagagaactaactagttgcacatgcaagagacactcgttgtgctgtagcgntggctctctctctctctgctctgggaatcgtgttctagggccgcagagataagagatcgaacacacgatttaccatcatagagcaatccgatgaaactatgtgaatatggtgctatacgtaccataatccacgctgatacacatacacgtgtcgcctgc

SEQ ID NO: 10314 - DNA, 379 bp, Glycine max
  Coding DNA Sequence Number=SeqID_535
cttcaagcgacggacaccagaaatccagcgcccgctgatgtcctcaccgatcagaacatgctcacttcaaaaacggcgcctcaagtcattctctccagacaataggggggtgacgaagggcgtcactccaaataagattggcgcctattgtacaccggcactaggacatcgtttgtggagcgagagcgggtgcgcgacgcttacctttgggaccgcgccaaggagaacggcgccaacgtcatcaacggcttgttcttgaaaatggatattcctaaggataataactccccctacagtctgcattactctagctacgacgggaaaaccaatggagctggtgagaagggcaccttggacagtgacgctgacattggcgccg

SEQ ID NO: 10315 - DNA, 500 bp, Glycine max
  misc_feature (145)..(145): n is a, c, g, or t
  Coding DNA Sequence Number=SeqID_536
aatgatatatccagggctgcgcgtagagtgagcgtcgtattataatagatgtcaagaagtgcatgagactagtaaagtcgcggcatcagcttggggcgcctacgcatacacgagtgcggacaccttctagcccctcaccttctgngcacagctatactgtgtcatagttagataaaggcgtcgtggggggccatatcatgacgagatggtgtagttggagtctggcatgacctatattatgatgacgtcttattacatatcgcgcttgcggtggatagcaagacacaagaacgaacaaggagggataagcgtcgattagttgtggcgcgagggtggatgagggcgcgcaatgaaactagatatgaatgcgaatggcgacgagagtagtgcatactatatgagtgcgtacaacagcactcatgtgccgccttcttcgagaggagagatgagtgagagcatagaaaggacaagctacagatatatcttctgcggtgtctgtt

SEQ ID NO: 10316 - DNA, 422 bp, Glycine max
  Coding DNA Sequence Number=SeqID_537
gctttacgctttaccgtgttgaggttttacgagtggtctgtgtagaggagcacggttccatttgctaggcccgtcagatgcagtcatggaagatgagatagatgagcccggcaccaagcccatgggggtgcatgctcggccagctacacggcgttcgttacgatcttctacgctctagagctccagctgttgtgatagacggagcagagtcctgacaccgcgggagcaggtctcctgcgccgcgtatgaacgtgcgacatgaggcgacagagcgccgcgtggtaggtgggcagcctcagccagacgctgaagcagatgctcgttccgtctcttgctcacgtcgcggcgaggaacacgcacaagtcgtcgagcgttgcgagcgtagtcgtcatcctcctttctcaccagtcagtagacaccag

SEQ ID NO: 10317 - DNA, 385 bp, Glycine max
  misc_feature (178)..(178): n is a, c, g, or t
  misc_feature (338)..(338): n is a, c, g, or t
  misc_feature (354)..(355): n is a, c, g, or t
  misc_feature (357)..(357): n is a, c, g, or t
  Coding DNA Sequence Number=SeqID_538
gaatctgatgtaaaggtgtccaacctgtggtgaaaaacatggttcgattctttagcgcggtgtcgattctaattctggttgccgtgacagcattgatggtagtgctaccactgatgttgtcaccactccctccgccaccgcttgttctcctcttcttccctgtcgggataatggcggngcttatgtttgtttgcggtttgtggttgtcggaggacccctgactaccaaagacatccttttctgaggattgtagaataatagaggaatagaaaggtttgcaagcacacgtgattcttcttgctcgagaacactttttactttttcttgtgataagagangaaaaacaactgtttnngntttagattgtacagcaaaactggctgat

SEQ ID NO: 10318 - DNA, 124 bp, Glycine max
  Coding DNA Sequence Number=SeqID_539
cgatatgttgctccgtcccgatgaactcaacctcgatctcatcagatcggtacgtaaatctcctctctctatccctcatgatcttcaagagatccagatggaagtagagattcatagtctagtt

SEQ ID NO: 10319 - DNA, 518 bp, Glycine max
  misc_feature (104)..(104): n is a, c, g, or t
  Coding DNA Sequence Number=SeqID_540
tcgggatcctcctccgagcaggaatccgtcatcatcccctcgagtccgggaactccgttaccgttaactattcgcccgacgcgcttctcctcttcctcctcctnctcctgcgagatcgaaatcgaaaaccctaacacaccggcgtcggaggaagaagaaggactattaaagaaattgaagagtaacgaggtgtttgagcaagaagaaggcgtaatcgcgctgagaaagatcacgaggaacaaagaggatgctagggtctcgctctgcacgccgcgggtgttactagcgctgcgtggcgtgatcgcctcgcgatgcggtgttgtccaggccaacgccgtgggcgttcgtggtaaccgtgctatagaaaatcagaaccagatgatgcatcttaagtcgcgcatcgcagcgttaatggcgtagacgtggcgagtagactggttaagttgtcgcattacgtgtatcatcgcgtctgattgggttgatcgatgatcaatagtaggcgattgtgccttcaacaa

SEQ ID NO: 10320 - DNA, 591 bp, Glycine max
  misc_feature (106)..(106): n is a, c, g, or t
  misc_feature (111)..(111): n is a, c, g, or t
  misc_feature (193)..(193): n is a, c, g, or t
  misc_feature (196)..(196): n is a, c, g, or t
  misc_feature (198)..(198): n is a, c, g, or t
  misc_feature (200)..(200): n is a, c, g, or t
  misc_feature (223)..(223): n is a, c, g, or t
  misc_feature (253)..(253): n is a, c, g, or t
  misc_feature (301)..(301): n is a, c, g, or t
  misc_feature (336)..(336): n is a, c, g, or t
  misc_feature (345)..(345): n is a, c, g, or t
  misc_feature (379)..(379): n is a, c, g, or t
  misc_feature (389)..(389): n is a, c, g, or t
  misc_feature (405)..(405): n is a, c, g, or t
  misc_feature (444)..(444): n is a, c, g, or t
  misc_feature (446)..(446): n is a, c, g, or t
  misc_feature (539)..(539): n is a, c, g, or t
  Coding DNA Sequence Number=SeqID_541
atcgtcatgtgccacgctatcgtatgctgtcggctcgacgtcgctgctcgactctcgcgcgagatatggctaactgatgataccgacagatcatgtctgcttggtntactntggtcacgatcacgaactgcgactctaatgatcttatgagcaatgaatatcctacacgagcatgtagtcccacgcagactanttnangngcacggtatgaactatagcgcgnacaacgagctgcacggtaagtcgagagtantgtgatcacgacacagcagagacgtagacatgacgctgtcccagacgnacgcactggctacagcgcactacgtagacgggatngctgtgatnatatactctatctgcgtcatcatatcacactctngcatgatacntgatgcgcgcactgancgtctcagtacatgccatgccttcacatgtcgcgcgtcncnacgtatgtcaagattatttgcataacctctcgtcgcgcgagcgaccgagcgttgtatgcagaacacagcttactacatcaaaattagtgtgtnatgaggacactataccgttatacgtaccttctgtcatgtcgctactacaagt

SEQ ID NO: 10321 - DNA, 588 bp, Glycine max
  misc_feature (311)..(311): n is a, c, g, or t
  misc_feature (390)..(390): n is a, c, g, or t
  misc_feature (439)..(439): n is a, c, g, or t
  Coding DNA Sequence Number=SeqID_542
atgattgtccagaccattgaagaggtaacatcagtaggcatgtataacagattatcattcttctgttgattaaatattaacaagcatagatagtaccaaacgcttcgacaataacaagactcatttatactaagatatatagatcagtctgcgagatgtaagagtctatatgacatgtatcagcttaatatacaatccaccgcacacctcctccgccgcgcgcgtacacgatcgagaatcgatatcgatcgcgtcgctgtcatgtctcacaccaacatgatgatcctagcgtctagtcagcaagcagagangcaatagacactagtcatatacgtctcgaatatatatgtgatataaccacaacgtatatacttcactactgcatgctcnctcacatctgagaatactagctagactcgcgtatctacgcgtcacacgntgattgatgctcagagtaaggacgatgaagtgatgcagatgcaatacatctgcaccgtcgtgtaatattgcaatatctcgtgacacgtcatcagacccactcaatcgatacgagcatgaacaatgacgactatatcaccatcgacgtaa

SEQ ID NO: 10322 - DNA, 534 bp, Glycine max
  misc_feature (29)..(29): n is a, c, g, or t
  misc_feature (169)..(169): n is a, c, g, or t
  misc_feature (249)..(249): n is a, c, g, or t
  Coding DNA Sequence Number=SeqID_543
acacgttgctaggtttttagttatgtgtnggcgcgggggggtgcacccaacgccccgcccgggcggttgtttatattcgcggcgggcggatagtcactaatcaaaataagtgatagcgggcgatcgggacatttatataatataaagagggggcgggtgagatgttgtnattatatgtatatatagattgcgggggttttattaaaatgcggcactcctatccgggaacgataatattataatattttnaggcggcgcgtgtagataaatgctgtgggcgccgcgggaagtgagagtgtgtataagaagtgtgatgagtgttggaaaactattccgcatagtcgtagtttgagtgcgcgcgaccctcgacactaccactattcgtattaacaaaaccagtgctcgcgccgccttcagagtataatgggtataaaataagcatgggtgaaactgcacaggcgcgatagtggtgtgtgcgtataaccgatgcggatgaacagcgtgaaaggcgtggaattacagcgcgcgcggaaa

SEQ ID NO: 10323 - DNA, 588 bp, Glycine max
  misc_feature (370)..(370): n is a, c, g, or t
  misc_feature (442)..(442): n is a, c, g, or t
  Coding DNA Sequence Number=SeqID_544
tcctcgcccctcaattgtaaagtagtacttcgttgttcctgcgacgtacaccaagaactcggcagtctgggcgcacagcagtgcgatacagctacactgagcgcgacgacagctcgtaaggctatcttctagatctgcacacatcatcgcatctgataccgttcctgacgtcattcatgtcgcatcatcccctaccacgatactctgaatctcgcaatgatgtgcgcatgagaacgagagcatgagagaaaactcacgcttggctcgcggctttatctagtgagaactgctctgcgcaggtacctatatcgcgacacgtaccaggacatatacagccatccagctaacgcgcatgtcacacagacaggtnctagtacgcacatacgtacgcagaaccagcacacacaacacaagcaatcagcctatgccagtagctcacganagtagcttagatgcgtgtgagcgtagcatcatctcgctctatcagctcacgatctacgtatcactctcacgcgctcttgcgtgtctacgcgtcgggtctctcgccacgacactcttgtggagtgctactcgcaatgtgtgtcctat

SEQ ID NO: 10324 - DNA, 394 bp, Glycine max
  misc_feature (207)..(207): n is a, c, g, or t
  misc_feature (313)..(313): n is a, c, g, or t
  misc_feature (333)..(333): n is a, c, g, or t
  Coding DNA Sequence Number=SeqID_545
aaaggaactcagcacgcgaacgcgcggatgacgcaaagagacaaagaaagagcgcgaggagaagaaaggatgagagagaggaagacgagaggcacagaggagagcagagaagaactaacgagagcacagtagagtttacacacatgatagacgtcagcaggtaaatgcgtggtagacgcggcgacggcgatccgtgagagaggacgnggaggcaacaggaagcgcacgcgagaggcaggaagcgagcgggagacacaaaatcgacagataggaaacgcgcgcacacgacagacgcaagacagacggaggaggnagcacacacacggtgagaancacaatgaaatgagaaacaaggcgaggaagagagacaacagagtgtggaaaagacgaggac

SEQ ID NO: 10325 - DNA, 533 bp, Glycine max
  misc_feature (463)..(463): n is a, c, g, or t
  misc_feature (487)..(487): n is a, c, g, or t
  Coding DNA Sequence Number=SeqID_546
agtggcaaggaaacccagttttcaggaacactcccatctgggtctaacctgcaagcttttgtgattgaattcttaatcacctttttccttatgtttgtcatatccggggttgccactgatgacagagcgatcggtgagttggccgtgattgccgttgggtccactgtgctgttgaatgtgatgtttgcagggccaatcacaggagcatcaatgaacccagcaagaaacatagggccagccattttacacaatgaatacagaggaatatggatatatatagtgtctacaactcttgaggccgtggctggaacatgggtataccacaccatttaggtcacaggacagccccttggtgagatcaccaagagtaccttctttctttaaggaataggagcgtgtagtagctctagggtgatttatttaccaaattattgctcaattgagagtgtatcatgtgtcatgnccagaggagtacataatcgggaanagttgtatgtccaaattgatagtttcgagatcatgtgacgggctga

SEQ ID NO: 10326 - DNA, 522 bp, Glycine max
  Coding DNA Sequence Number=SeqID_547
tatatagagacgctgtcgcgctctctcggggtgtcacacacatactcacaagagaaacactccgcgtaggagattttgtgacacagggagggtgtccactcttcttcttccacagtgaggtctcccactatttttgggggagggggcgctttatacacaaggggttttctcgcaaataaaatggtggcgagtccccaggaagaggggggggctcatgtcacaggtatatctcgcgcaaagagaaggggtttctcgagtatttgggggtttgatatgaagaggagtttttatttttttatttacacccgtgatttttgtcacagtcactcacctcggggggcacagtttgtgtcgagaatatttttctgcgcgggtcacacacaaggggtaaaatcttctctgggaaagtgagacgctcgcaagagggggtacactgtttttctttctctgttcccaatatttgtttttccgccagagacccaccacacacatttctcgtggagcgccgtgtactcataaaat

SEQ ID NO: 10327 - DNA, 536 bp, Glycine max
  misc_feature (110)..(110): n is a, c, g, or t
  Coding DNA Sequence Number=SeqID_548
gcaacaagcgtgatttgaatagcacagatggtgataacaatgaggagaaattaagctcctttataaagcaggggaagtaagtcaatgaaaaataaaatggtttgaagatnaccattatgagtgctcgctctaaaatccagaatgctaccaatcactcaagtgatggaatagaaaaatcattatttgaaatgtgatcctcatatacatggacagaagagcaatgactttaagtatgacatatttggatggattattcttgcagtgggtatagtagcatgggtgggaatggccaaatctaacattcccccgccacctccaagataaacatatttctttgatgaatcattaccaaattattggtgattagttattcactttagattggaagttgtgaactaggtattgcacatgtggttggtttctacttactgagttcatttatcatttacagtttaccgtaaaaaagattggttttaagaattagcatttttaacatatgttgcccactatttgtagccttactggttttaagaatt

SEQ ID NO: 10328 - DNA, 549 bp, Glycine max
  misc_feature (151)..(151): n is a, c, g, or t
  misc_feature (157)..(157): n is a, c, g, or t
  misc_feature (219)..(219): n is a, c, g, or t
  misc_feature (234)..(234): n is a, c, g, or t
  misc_feature (386)..(386): n is a, c, g, or t
  misc_feature (464)..(464): n is a, c, g, or t
  misc_feature (466)..(466): n is a, c, g, or t
  misc_feature (471)..(471): n is a, c, g, or t
  misc_feature (498)..(498): n is a, c, g, or t
  misc_feature (513)..(513): n is a, c, g, or t
  misc_feature (515)..(515): n is a, c, g, or t
  Coding DNA Sequence Number=SeqID_549
gctcacgcgacatcattgtctttatactatctcataactcccaccactctctcgctaacacagctgtacatcgcacaccgcactatctctcctatagacacccgcaatagtaaatctcctactgacacatcactctccacataccgccacnccactntagagattgtacatctccctctctctctcccacgcgttcacacgcagactcagatacctgantgtgcgcgtccacanatacgacgactccacctcatccccctcgcctctccgactcgggtatatttatcacgtacagtaatcacaacatcgtctcacggctcactcacacgctacaatctcgcggatacaatatagctactcgtcgacgatgatcataagcacagctnctgactctcagtctacttcgccgtcacgtctgcgcaacactacactctcgtcagttatctacaatgaaactcacgagnancagtnactatcatcattatcatctgatgctcngcgatcaatcatgcntnctatgatctacattattgacgtatctgctactag

SEQ ID NO: 10329 - DNA, 546 bp, Glycine max
  misc_feature (182)..(182): n is a, c, g, or t
  misc_feature (196)..(196): n is a, c, g, or t
  misc_feature (210)..(210): n is a, c, g, or t
  Coding DNA Sequence Number=SeqID_550
tacacgctcgaggtgcgacacatacgaagtgtgacaggtctagcaaggagattatcgccgtatagacggagtagtagaggaggtgagaggtcgacacagaagactatcgatgacatagagagcagatgtcgtgcgcagacagcggcgagagtagacgcgagtgatagactatctcatacttncatgctggtagagncatgatagatgtgngtcgtgatgattgatattgtcaataagtcgatgagagctatcagtgatactagtggccgctaagatttctgctacgccagcgcaacagtaaagagactaccgcgcggcagtgacactaagcggcgagcatgactatgtgcgagtcgaaacagagaacaagatatgagcagaagcgatgaagagtcgtgtgtaggaagagaactatggacagcgtggatcactccgcgtacagtgaggaaggtgagaggggagtggaatctttatctcatataatctataactgctgtggagagggtcgctgcgtctgcgacatatctatactcgtgtcgcgcgtct

SEQ ID NO: 10330 - DNA, 543 bp, Glycine max
  misc_feature (51)..(51): n is a, c, g, or t
  misc_feature (272)..(273): n is a, c, g, or t
  misc_feature (301)..(301): n is a, c, g, or t
  misc_feature (316)..(316): n is a, c, g, or t
  misc_feature (424)..(424): n is a, c, g, or t
  misc_feature (438)..(438): n is a, c, g, or t
  misc_feature (518)..(518): n is a, c, g, or t
  Coding DNA Sequence Number=SeqID_551
ttgctgctcctacgtatcttatctgcagttctacgccgccgactgcacaanatcagagtctctgtagatatgtaaatattcgagtatctgttcttgcacaattctagtaccgcatccttgtccccctccgcaccacagctagctatttctatgtaaagtatgtgcacgtatgatataaccacattcatcttacaggccgcgacgcctccacagaatcagtacggtctctctgtcatctctgtgcctacgttcaaattacatcgacatgaagnntgatgacgtaactgaatagagcgactcntgccgtggtagcacnttacagctacactagatgaagtacactatgcgtgcacacagactgctacttcgtgctaagctgttgtgaagtagtaaacaatatcaacttgcatactagcgcgcgacnttagagtatatatnctgcgtatatagtaagtaataacgagctagacgagatggtgtgacgttacgacagtccatgagcatctcatgttcgttgntagactcgcacgactacgatataga

SEQ ID NO: 10331 - DNA, 355 bp, Glycine max
  misc_feature (279)..(279): n is a, c, g, or t
  Coding DNA Sequence Number=SeqID_552
aacgagaatctcaggaaccacttccatggagtctactacactcgctgctttctcaatcgtctcggcaacaacgacggccagaaccactggtccttcattgcctctcatcactagtcacaattctggcgtccaccctctattgctcgctcgctcctctccggccgttcgcggtcttggtggcttgggagctgctgttttgccggtgaaccgacgccgtttgcagtgtttgtccagctcatctccgtccttcagtggcggcggtgctggattcggcgggtnttgcggcggaagcggcggtggaggtggaggaggatcggatagtggtgattcaaagtcgaaattgggtgctggagca

SEQ ID NO: 10332 - DNA, 496 bp, Glycine max
  misc_feature (151)..(151): n is a, c, g, or t
  misc_feature (240)..(240): n is a, c, g, or t
  misc_feature (413)..(413): n is a, c, g, or t
  Coding DNA Sequence Number=SeqID_553
agtacacatacttgtcttagcccagcgctacgttcctcgcgacgcgccacgagatgttgtatactagagcctctgacgatctcttatcaaaccagccgtcactgagttagatatagttccatgacctcctcactatcacactccctacacncacgcgcacgacgccacgagctagcttaggctatatgtcgtgtcgcctagctacatcgcggccgtcgaagtagcacgcgtcggggagantgcgaaaatatactatgaatgtcacgctgacgcgtatgtttagatgactctacaaacttcgtctctaacaatcgcaactctctggtgtatccgtgtctcaacagaaccacgtactacatagacagaaatactccgtgctcgagcgctactcgataagcaacgcacccggcagncgtcccccgatatcgactacgctatcccagtagtatacccatctcacctctatactgcggttctacttactctgcatgtctgt

SEQ ID NO: 10333 - DNA, 172 bp, Glycine max
  Coding DNA Sequence Number=SeqID_554
tattgtgtatatttgaaccctccccctccccccacaacaaggtataggttctgtcattagtgatagattaagagatataaagagctgggtaacatcattcatgtagcggctgctccaaatagtttgcttcagtatgtttccaaatttgatagttgataataatttcatgcta

SEQ ID NO: 10334 - DNA, 594 bp, Glycine max
  misc_feature (224)..(224): n is a, c, g, or t
  misc_feature (342)..(342): n is a, c, g, or t
  misc_feature (569)..(569): n is a, c, g, or t
  Coding DNA Sequence Number=SeqID_555
gagcactcatctagagctacacactaagtgtgatttcttagtgtacttaagtgtttctgtatgtgtggtactcgcagcacgagggtgtatccgcgtgatgtgttgagataatattctataataaagtgaatagaggatccgtgcgatggcgtagggagcaaacgacagtcgcgcacagtgaggcgaggggtcggcgtaatattaaacatcactataccgcgagngttgacgagtgtagcgttcaggtgagacagatcaatgctctcgcttctgccgcctttctccctgtccatctcgcctcgctccctcactcctgtctagtcgccgagacttatcggtgcngcggggtggcggataactaaagataatcattcgtccttcgttcatcactagacttataccacacatacaagtcggtcaaataataactgcgactgcatccaacaacacatcctccatcgatttgtctgatgtcattttttactgattaatgatattgtcgtaatatagttatttatagtgctgtattactaatagattgtctgttgcggactcaccttaggctagancacattcattaatctcgcttctctc

SEQ ID NO: 10335 - DNA, 114 bp, Glycine max
  misc_feature (50)..(50): n is a, c, g, or t
  misc_feature (52)..(52): n is a, c, g, or t
  Coding DNA Sequence Number=SeqID_556
gaaaagtaaaaggacagtgtcgtctaggtgaatggaaaaatgggaggggnantcaaaagaagatgaatggtaacgagggtattggaaaacgagcagaagagattcatggaaata

SEQ ID NO: 10336 - DNA, 585 bp, Glycine max
  misc_feature (74)..(74): n is a, c, g, or t
  misc_feature (483)..(483): n is a, c, g, or t
  misc_feature (504)..(504): n is a, c, g, or t
  misc_feature (522)..(522): n is a, c, g, or t
  Coding DNA Sequence Number=SeqID_557
tatatttttcccttattcccaccattactagagacacttttaataataacacaaacccgaataaccagtacggnatttattaaatacgcaatactctcgcacgtcgttctcggtccccaccccatctgcgatataacatccacttcctctccttctcactattggttttaatggacctcgggatcctctcacattcctatctccactctctttattctcttttttctactcgctattatcttttctcccctcgcacaccgccctcgtctcctcacctctccccactccccccacccccccccgcccccctctacacctttataccctccccactcgccctcactccacatactatctacaccacacaaccctctcctcaccctactcacaaacatactatctcccccacctccatcccacttatctatatcacaccacacactctacaacaatacatcacaaaccgattacttacacgttctnacatctctttccgtcctcgantgtcccatgcctcgctancctatcactccttttctagtttattctctgatcctccaacccctctcgtgatatactatgttc

SEQ ID NO: 10337 - DNA, 578 bp, Glycine max
  Coding DNA Sequence Number=SeqID_558
gtcacctatttggtttacctccgagatatagggactctgtaagggctataacacctgggttgcctctgtttctttacaattacactactcaccagttgcatggtatcttcgaggcaacaacttttggaggtactaacattgatgccactgcttgggaagacaaaaagtgcaaaggagagtctagatttccagctcaggtaaggatcagagtgaggaaaatatgcaaagccttggaagaggattctttcaggcctgttcttcaccattatgatggtccaaagttccgccttgagctcactgttcccgagacattggatctgctagatctctgtgaacaagctggctctccataagccggggatcaacctttgcaataccacgttgctaagtttgtctgaaacggcgaaacctatctaaatatatatatgcatattaccataagagcgtaagcttttggggtttagttaagagtctagttcaaatgtatggtttactaagaagcgactattctcagttcttgttgtgtctagtgtgtgagtttgtctgtgtctgtaagagtcttgataacccttttgaga

SEQ ID NO: 10338 - DNA, 290 bp, Glycine max
  misc_feature (36)..(36): n is a, c, g, or t
  Coding DNA Sequence Number=SeqID_559
aaaagcagcgttggccaacgaatgggaacgcggaantgatgtacgtgtaaagtgatgaccgacgaaaagctcgagactctgcggcaacagaattgcaggttagcccaccctctgtggacaactctcccggaatgggcaaaaacatcttcctcgcaaccagatcctggaagggattaggctgggggaaaaggaatgtggatcccttggtggggggctggggggggcccaaataaactctaggggggcgggggggatccctgccccccatgtaggctttctaattctttggg

SEQ ID NO: 10339 - DNA, 433 bp, Glycine max
  misc_feature (108)..(108): n is a, c, g, or t
  misc_feature (124)..(124): n is a, c, g, or t
  misc_feature (211)..(211): n is a, c, g, or t
  misc_feature (217)..(217): n is a, c, g, or t
  misc_feature (223)..(223): n is a, c, g, or t
  misc_feature (288)..(288): n is a, c, g, or t
  misc_feature (299)..(299): n is a, c, g, or t
  misc_feature (302)..(302): n is a, c, g, or t
  misc_feature (306)..(306): n is a, c, g, or t
  misc_feature (349)..(349): n is a, c, g, or t
  Coding DNA Sequence Number=SeqID_560
acgtgctcgtacatctctcggcgttgctgtcgccagacgtgtatagttagctggacgtaatattccctatcatcttgtatcgcgtcacgcgctaatctccgacgctgntcgtagccagctattngactgacgtatgatcacagacgatcgtccaccgttctaatacacatgtactgaactactcgtatgctgtattgacgtatcgtcatcntacttngctcanactgcatgtgtcttgaatctatcttccgtgctcattgcacgtcgtagtcgtcagacagtacactnacatcggtcanagnagtnttgacatcgcgatccgatcatacaggctatccgctacagagcngctcgcgcgcgtcgctttgactgtatcggttgacgtgatattgtcgatggacgatcatagcggtgacggcaatcgtatgtgcat

SEQ ID NO: 10340 - DNA, 413 bp, Glycine max
  Coding DNA Sequence Number=SeqID_561
ttattgggtgtgtcagaaacttgttttaaggagaagctactgagagagctgttatatgaggttcgaagctttggctatgccatgaaaattttgaattgtacaatatgggtagcaacaggactattgtttggtttagaagggaccttagaattgaggacaatcctgcattaactgctgctgcaaaggagggttctgtactccctgagtatgtatggtgccctaaagaggaaggacaattttatcctgtaagagtgtcaaggtggtggctgaagctctctcttgctcacttggatcaatcgctgatctctgtcggacccggacttgtgctgagtaaaaccctcagtactgctatcgctgctgtagttgtgcgtaaggcgcttaaagcaggctaaataggccgaatccatcgctat

SEQ ID NO: 10341 - DNA, 570 bp, Glycine max
  misc_feature (31)..(31): n is a, c, g, or t
  misc_feature (47)..(47): n is a, c, g, or t
  misc_feature (72)..(72): n is a, c, g, or t
  misc_feature (88)..(88): n is a, c, g, or t
  misc_feature (102)..(102): n is a, c, g, or t
  misc_feature (109)..(109): n is a, c, g, or t
  misc_feature (125)..(125): n is a, c, g, or t
  misc_feature (135)..(135): n is a, c, g, or t
  misc_feature (148)..(148): n is a, c, g, or t
  misc_feature (178)..(178): n is a, c, g, or t
  misc_feature (182)..(182): n is a, c, g, or t
  misc_feature (236)..(236): n is a, c, g, or t
  misc_feature (238)..(238): n is a, c, g, or t
  misc_feature (243)..(243): n is a, c, g, or t
  misc_feature (248)..(248): n is a, c, g, or t
  misc_feature (253)..(253): n is a, c, g, or t
  misc_feature (293)..(293): n is a, c, g, or t
  misc_feature (299)..(299): n is a, c, g, or t
  misc_feature (302)..(302): n is a, c, g, or t
  misc_feature (312)..(312): n is a, c, g, or t
  misc_feature (342)..(342): n is a, c, g, or t
  misc_feature (390)..(390): n is a, c, g, or t
  misc_feature (393)..(393): n is a, c, g, or t
  misc_feature (402)..(402): n is a, c, g, or t
  misc_feature (408)..(408): n is a, c, g, or t
  misc_feature (424)..(424): n is a, c, g, or t
  misc_feature (454)..(454): n is a, c, g, or t
  misc_feature (460)..(460): n is a, c, g, or t
  misc_feature (468)..(469): n is a, c, g, or t
  misc_feature (522)..(522): n is a, c, g, or t
  misc_feature (536)..(536): n is a, c, g, or t
  Coding DNA Sequence Number=SeqID_562
gactctgatatgtgactgatgtcatgtaaanagtttcgcatgatcanacgcacttacgactctactcgtcgnacgacagcgctgcatnacttagagaagtanacagcgngtatgcgacatatgtnagtgatgacnactacgacctgtncttacggcgtgacgcgctcaccgacgagtngatngactacgaatcgagtgatggtgcggaagcggcttgacgcatactacacataaanantatcnacgtntatcnttgacagcacacagtacgcaacgttcttgatactataaanaatccnganatatggacgnaaccatacacagcactcgcgtagatataantcatcctggacaactcatcaacatacgcgacgactatcgtaatgctgntcntctcatatncatcancacaactctatctcancgtatcatctttccttctgctactatcttnttcatnctgcgatnntctactatacgttcgtagcacgtactaggacgtacatacagacacgtaagatnaagtatacaataantaatgcgctaagatacgctctgcagcccatcatg

SEQ ID NO: 10342 - DNA, 571 bp, Glycine max
  misc_feature (229)..(229): n is a, c, g, or t
  misc_feature (376)..(376): n is a, c, g, or t
  misc_feature (458)..(458): n is a, c, g, or t
  misc_feature (460)..(460): n is a, c, g, or t
  Coding DNA Sequence Number=SeqID_563
ctcgcgagataggacgtcgtcggcacgcctagatatatagatataagaaacgattttgcgcatacgtgagatactataagaagcatcgtgtcgcatatcagaccgccacccgtcatccgatatccatagcgtccttctaacaacgatcataacgagacacgaacgacaacacgaagacgagcagattagttgatacgcatcgaaaaagcaaacgaaaaacacgaagtcnacaaataaggcaaacccctctcatcgaaatagccacataccccacaccagctcgtccacgttcaccacttccatctcccacaacctcaccactcgccaccacaccacccgccgccatgccatccgcctcatcactaaaccatccccnccaacccaccacctcgcagcaacccccccaccagcacccccccacttctctccgcacttacttcgcatcacttatatcttantntttttcattgtggtatgttcggaagttggactgtgctcgtccgcgtaaggagtattctttgaagatgtagagacgcccctcccttccgccggtgtcttgtgtttatggtaa

SEQ ID NO: 10343 - DNA, 580 bp, Glycine max
  misc_feature (29)..(29): n is a, c, g, or t
  misc_feature (36)..(36): n is a, c, g, or t
  misc_feature (118)..(118): n is a, c, g, or t
  misc_feature (125)..(125): n is a, c, g, or t
  misc_feature (128)..(128): n is a, c, g, or t
  misc_feature (307)..(307): n is a, c, g, or t
  Coding DNA Sequence Number=SeqID_564
ggaattgtagcttatagccctttaggaanaggcttnttggcagcaggacctaagcttgctgagaatttggaggacgatgattatcgaaagggtctaccgagattccaagaggagaatntaaaccncancaagattctttatgagaaggttcaggcgatggcgacaaagaaaggctgcactcctgcacaacttgctcttgcatgggttcaccaccagggagatgatgtctgtcccattccaggaacctccaagattgaaaacttgaaccagaacataggagctttatctgtgaagcttactcctgaanagatggctgagctggaagccatcgcccgaccggattttgtgaaaggagaacgatacgacagcaacatggctacttacaaggactcggagactccactactgtcttcttggaaagcagcataaaccgcatctttggactgcagtttatgatcggtttgaggggtaaatgggatgaaggcgttggacgaatgccgttttattgtgcttttggttgtgtgtgtgtgtgtgtttgaataagtttagtttaatggatgggtctgcgagtttgcaataa

SEQ ID NO: 10344 - DNA, 563 bp, Glycine max
  misc_feature (87)..(87): n is a, c, g, or t
  misc_feature (208)..(208): n is a, c, g, or t
  misc_feature (217)..(217): n is a, c, g, or t
  misc_feature (241)..(241): n is a, c, g, or t
  misc_feature (387)..(387): n is a, c, g, or t
  misc_feature (415)..(415): n is a, c, g, or t
  misc_feature (426)..(426): n is a, c, g, or t
  misc_feature (515)..(515): n is a, c, g, or t
  Coding DNA Sequence Number=SeqID_565
gactaactgtttcatcttacctcatcgatatcgctctaaacagtacagctcatgttgatgtcggtttcttgatacaaatattatgtngatcattttactatacgttggtatgagatatctgcgctaaacaagcgctagagtggggtcccagataatcgactgctcgcgtgatatcagttacaacgtgtctgcgactcatcatcgtgangtctgatcngttcattcttactccatattattnacacgatatacatgcgcgacaatatcaatccttgatagttgccatcctagcttactacctgtaacctcctgctacacattatgtgagcgcactgcactcgcccccgtctctgttctgcagtatatacactcgatcgaacgctatgnaagttatctactattgcgatgtaagtcncgccgctccangagagtctcagcactctcgttcctccttatagaatgtgcgactggtcatgacatcgtgagtatatggcgtcgcgaacatatatgcatgnatagtgtctgtgtatctgtgtgcgtctactctcatcgtgtcctgcaga

SEQ ID NO: 10345 - DNA, 534 bp, Glycine max
  misc_feature (43)..(43): n is a, c, g, or t
  misc_feature (187)..(187): n is a, c, g, or t
  misc_feature (192)..(192): n is a, c, g, or t
  misc_feature (196)..(196): n is a, c, g, or t
  misc_feature (285)..(285): n is a, c, g, or t
  misc_feature (300)..(300): n is a, c, g, or t
  misc_feature (315)..(315): n is a, c, g, or t
  misc_feature (357)..(357): n is a, c, g, or t
  misc_feature (369)..(369): n is a, c, g, or t
  misc_feature (377)..(377): n is a, c, g, or t
  misc_feature (396)..(396): n is a, c, g, or t
  misc_feature (400)..(400): n is a, c, g, or t
  misc_feature (402)..(402): n is a, c, g, or t
  misc_feature (416)..(417): n is a, c, g, or t
  misc_feature (460)..(460): n is a, c, g, or t
  misc_feature (484)..(484): n is a, c, g, or t
  misc_feature (499)..(499): n is a, c, g, or t
  misc_feature (508)..(508): n is a, c, g, or t
  Coding DNA Sequence Number=SeqID_566
tgtcgtggctctagtcgcatatgactatacatcagtgagcagncgcggtgcgacgcgacaggctagatcgtagtatcgagtgtgactacttcaggtcgatgatcctgcgccagatctcgtaagcgtagcagatacgcgtcgatacactactatatacactagatcggcagcgcgtgctgcggcagcngtagnagcngagagacatgatgcacgtgagcaacagtgagcatgaagacgtcagatgcacggagatgatgagtagagtagagagatcaatagtatatnagaatagatacgacntctctagtctatatnaatatagtgaggatcgactacatggagagagatgtatatgantagatgatctanactcacangatatcagaatctctaaanatantnaatctactatgatnnaatggttctatgacgagtcgcgatcactcactagctacactgntggctccgtctcatatcgacgccngcgcgtcgtgcgtcngcacagccncatcgatacaggtcaatccacacaga

SEQ ID NO: 10346 - DNA, 554 bp, Glycine max
  misc_feature (27)..(27): n is a, c, g, or t
  misc_feature (82)..(82): n is a, c, g, or t
  misc_feature (94)..(94): n is a, c, g, or t
  misc_feature (206)..(206): n is a, c, g, or t
  misc_feature (237)..(237): n is a, c, g, or t
  misc_feature (453)..(453): n is a, c, g, or t
  misc_feature (496)..(496): n is a, c, g, or t
  misc_feature (505)..(505): n is a, c, g, or t
  misc_feature (519)..(519): n is a, c, g, or t
  Coding DNA Sequence Number=SeqID_567
gtcctcgccgcgattattatattaacntctgctgacgcagcgtgtgcgcgcgctggatgatgtatgtgtgagtaatatatantatatccgcggngcgtgcgtatatatataatagcggcggcgagggtgtgcggatggagacgttgacgagtcatatattaggcgtcgcgatcgtcgctcgacgcgcgcgccgattattttgtatnacatattgtatatgtattatatgaaatacgnggtgcggttcgtggtcagtcgttgcgctgagttgctgggatatcatataagcacgcgtcgctgtgtgctctgcgtcgcgcgcgatcgggagaatatcgcatgatgagacacactcggctacggcggcgtgtcggtgtacgtgtgtgcgcgcgcgacgactgatagcggcgtcagcgtactatatcgtcacacgcggcgcgggcgcgcgcgcgcganatagagagtcgagtctacagagcgcagtgactgcgcgcgtcgncgcgcagcncgggcgtattgatnggatagtgtattcgtcgctcgatgcatgctcgcag

SEQ ID NO: 10347 - DNA, 574 bp, Glycine max
  misc_feature (129)..(129): n is a, c, g, or t
  misc_feature (228)..(228): n is a, c, g, or t
  misc_feature (362)..(362): n is a, c, g, or t
  misc_feature (492)..(492): n is a, c, g, or t
  misc_feature (496)..(496): n is a, c, g, or t
  Coding DNA Sequence Number=SeqID_568
ttgaaagtcgtcacagttcacgccgcgcagagaccattctgacgtgatataacataattctaatatctactagtattatataaacaccctccaccgcctgatacagcgtacatgggctcaatataattntgatgtgagctcactattgtctcgtagtgtgtgatcttgtatattgtaatattatggcgcggtcgtcgactatctacacacgccgacgcgcggtgaggngaagtgagagggcacaagatgagaggagagagagaaggaacatagagaaaagtagcggcgaatacgcgcgctcctcgcacgctgcgcggcacacaccagcgacccggctccacactatatcattctgtactcancacgatgcgcaggtaccaatatgtctgatgtgttctgtatagcacgtcgagtacgcgatgatctaactctagtgtcgctctcatacatcacttcaacgatacacgcattgaagccgcgcgaccactgcangtancaacgcgatatactatatgtgagtgatgtgatttattgtgctgatccgcggacacctgcgcgtagctctatgtgatgt

SEQ ID NO: 10348 - DNA, 448 bp, Glycine max
  misc_feature (185)..(185): n is a, c, g, or t
  misc_feature (196)..(196): n is a, c, g, or t
  misc_feature (199)..(199): n is a, c, g, or t
  Coding DNA Sequence Number=SeqID_569
aagactccgggcacgactttatctggcccgcgaggaaaaacgatgggggtgaaggagataactctccggaggagcctgagaagagaatgaaggaaagtaacaaaggatatttaatatgggggagggccccacagttgccgataccggagaatcctgcgattggaggcgcggttactcactgcggncggaacacggnggnggaaagcgagaacgcggggtcgccgacggcgacgtggccccagattgctgagcatcctctcaacgagaagccggcggtggatgtgtcgaagataggggcgccggcgggggcgaaagagcggaggaactggaacgagcctgggagcgaggcggcgaaacgggaagagattggaaacgccattgcctccccgaggagcgaggaacaacaagacggaggaacgaggaagaaagcccaggagccaagcggcgc

SEQ ID NO: 10349 - DNA, 573 bp, Glycine max
  misc_feature (27)..(27): n is a, c, g, or t
  misc_feature (92)..(92): n is a, c, g, or t
  misc_feature (252)..(252): n is a, c, g, or t
  misc_feature (354)..(354): n is a, c, g, or t
  misc_feature (480)..(480): n is a, c, g, or t
  misc_feature (541)..(541): n is a, c, g, or t
  misc_feature (544)..(544): n is a, c, g, or t
  misc_feature (546)..(546): n is a, c, g, or t
  misc_feature (548)..(548): n is a, c, g, or t
  Coding DNA Sequence Number=SeqID_570
gagtctagttaacagcttacttgagtncgctcatatcgagtagatcactgcacgtgtgatagatgatgcgtgtatgatagtgcgtgagcaanagtggtcacgacgtcatacgtgatatgtggctgcatgacagggtggtcggcggacggagacggagtgcagtgatagagaggaatcgtacggataacatagaattgtagactttgctatgtgtgacagtgtcatgtgcactacacacattatcacgtcgtngctgtcgtgtgtagtagcgagagcgtcaagaatgactgatgatggctagtacgtggtgtgcgcggtgtaggaggagtataggcgcgtaaagcgatgtaatanagagcgcagcggaggcgtgatatgtgttgctgtgctgttcgtagattacgtgtgagatgtaggtgcagaggatgagagtggtgaacagagtagaacagtatagagattgacgctgatagcgtgagnaaagtcgtacgtaggcgcgcgcgtcatcttacatatatcctcacattttggccgagggggnggntngngctctgtgtgtctgtgcgcgtacct

SEQ ID NO: 10350 - DNA, 546 bp, Glycine max
  misc_feature (38)..(38): n is a, c, g, or t
  misc_feature (89)..(89): n is a, c, g, or t
  misc_feature (162)..(162): n is a, c, g, or t
  misc_feature (172)..(172): n is a, c, g, or t
  misc_feature (183)..(183): n is a, c, g, or t
  misc_feature (200)..(200): n is a, c, g, or t
  misc_feature (269)..(269): n is a, c, g, or t
  misc_feature (306)..(306): n is a, c, g, or t
  misc_feature (328)..(328): n is a, c, g, or t
  misc_feature (364)..(364): n is a, c, g, or t
  misc_feature (433)..(433): n is a, c, g, or t
  misc_feature (459)..(459): n is a, c, g, or t
  misc_feature (487)..(487): n is a, c, g, or t
  misc_feature (495)..(495): n is a, c, g, or t
  Coding DNA Sequence Number=SeqID_571
tctgcctcatgatcttactatccacacgatgtatcaantgactgatgatgatccgagctctgttgtgatgtgtctgaggtaaatactgngcatacactgcattctctctataaccgacctctgtgactagtacgacgtcactgtatgcactgatatgtgtgnagatactaanggaagatatgnatgtaggaggagtacancactctcactactcgactcgcatgcaggcaccgagcacgcgtcatgacacagatgtgctaactctactngtatatcgtcacgaactctcagcacatcacacgcggnctccactcacaacgagagaganctcatcatctcttcaatacactattcacacaactcnatctcacatcgtatcatacatctactcactatatacgaacacacacacgcactagtattatactaacanacacacatgatatatatatgctcgtntccatttacgcgatcacgatgacgtatnctactaancactaataatgaccatatactaacatatgcgcaatccaacatcaatccaga

SEQ ID NO: 10351 - DNA, 555 bp, Glycine max
  misc_feature (36)..(36): n is a, c, g, or t
  misc_feature (130)..(130): n is a, c, g, or t
  misc_feature (174)..(174): n is a, c, g, or t
  misc_feature (182)..(182): n is a, c, g, or t
  misc_feature (186)..(186): n is a, c, g, or t
  misc_feature (197)..(197): n is a, c, g, or t
  misc_feature (203)..(203): n is a, c, g, or t
  misc_feature (210)..(210): n is a, c, g, or t
  misc_feature (337)..(337): n is a, c, g, or t
  misc_feature (339)..(339): n is a, c, g, or t
  misc_feature (346)..(346): n is a, c, g, or t
  misc_feature (356)..(356): n is a, c, g, or t
  misc_feature (369)..(369): n is a, c, g, or t
  misc_feature (462)..(462): n is a, c, g, or t
  misc_feature (491)..(491): n is a, c, g, or t
  misc_feature (510)..(510): n is a, c, g, or t
  misc_feature (530)..(530): n is a, c, g, or t
  Coding DNA Sequence Number=SeqID_572
atatgaagaggtgatccgacagcatgcgactacatnactactcacgactataactgtgatgacttcatcgatatctaaatgagactgccgcactgcgactgagagcgcatatcgacgatgtagttctagncttgtagcaatgacactctctagatcggatttgattcggtcgtncgcgcgcntgcncgacgtcgctnctcagntgcgcgncgcatctgcgcgcgtctggctgctcgcgcatgtcatccgctgctgcctcactctcactctctcacttctctactcgctcgcgtctctctcctctctactctgtactactctcccatctaatctccanancgaacanacgcaactanagatcacagacanaccgactcacgtcatgataatacgtacacaatgatgagtgatgagacgaagatatatcaattagactacaccatatatatgacagagacatgncgctatgactcaggtagcgctctgctcantgatcttatgtgtagtagnagtgcacgtgcagtgtgcgngtctctgtactgtactatcatcgtt

SEQ ID NO: 10352 - DNA, 385 bp, Glycine max
  Coding DNA Sequence Number=SeqID_573
tcgagagccgaaccaactcctgttttttctggcgacaggctcacttttgctccgaatggcctccgatggtcaaaaccgagatggatgcataaactgatgcaaatggggttccaccaagggggactccaaatagcggttccatgtcttattattcctgacaccctccacttaatgagaggattattttatccatgaccagaagatctggttctgcacacccatggcatgacctcgagatgggacctggagctccaattatcttcaattgactgattgaaattgggaaagggagcaaggtgaaatatgaactggacaaaaagtcggagcttattaagatcgaccgcgtgcattactcatcagctgtttatactgacaactatgggtt

SEQ ID NO: 10353 - DNA, 306 bp, Glycine max
  Coding DNA Sequence Number=SeqID_574
gagcagtgcttctccaccggtaagcgactgctcttcatccttgccttgcgtcctcttttgctagatccatggccatggaggtaagatgcagcgggcaaggctgcctcatcgacatcaagcttcgtggtgatgatgctgggcatggacgaacagcaagtagcagcatcaccaccattgcgggaagctcggtggtggcgagatctattcattgaggcatcaccaccactcctccgacaagcacgccgctggttgacagctcttcctcatcttctaattcaatttttctaggtagaagagatgcatctc

SEQ ID NO: 10354 - DNA, 441 bp, Glycine max
  Coding DNA Sequence Number=SeqID_575
aaagatgtcaccgttttcgacgctcattgttatcctcgtatcttccatcatgattcaccaccttccattggcgagctccacacaatggtgcgtggcctctccgacgtcgaaagagaaacagctagaagaaaatctcgggtttgcatgcgctaatggagttgactgcagaccaatcctagaaggcggagcctgttacaaccccaatactccattaggccatgcgtcttacgtgatgaacgcatattacgcaacccatgaccgcaccgactacgcgtgcaagttctttttcccaaacagtgccatgttgactactacaaaccctagttatggtagttgtgtctatgcttaagtattttcgttggttttcgatatgtgatccacggcatacctcatagcctgataggatgtatggttatggcagatccaatgtcgtttttcttt

SEQ ID NO: 10355 - DNA, 383 bp, Glycine max
  misc_feature (26)..(27): n is a, c, g, or t
  misc_feature (37)..(37): n is a, c, g, or t
  misc_feature (44)..(44): n is a, c, g, or t
  misc_feature (154)..(154): n is a, c, g, or t
  misc_feature (180)..(180): n is a, c, g, or t
  misc_feature (182)..(182): n is a, c, g, or t
  misc_feature (232)..(232): n is a, c, g, or t
  misc_feature (282)..(282): n is a, c, g, or t
  misc_feature (288)..(288): n is a, c, g, or t
  misc_feature (291)..(292): n is a, c, g, or t
  misc_feature (303)..(303): n is a, c, g, or t
  misc_feature (330)..(330): n is a, c, g, or t
  misc_feature (358)..(358): n is a, c, g, or t
  Coding DNA Sequence Number=SeqID_576
cgccatctcatacaacctgcactaannacaccacgancgccgancattcacaacacaccccaccgaccacaagacactcgtctttagtacttcgctctcgcttcactgtaccgtacgtgatttctgcatctacgtacctcaccttctgcgcgcncacctatatacctctagtcaccggtntntattgtttagtcattcaccgtcgttccgcataccgctctcggacgatctnttattcctctgctctttatcgcgacccctcttcacctctcgctccgtctncctctnctnncgccccagcanatcgatagggatagacagtaagagagncacgcgctgccgacaccacgctggagancacgtgcgcggcagttcgccgaaga

SEQ ID NO: 10356 - DNA, 438 bp, Glycine max
  Coding DNA Sequence Number=SeqID_577
aggttgagaacctgagctccttcttcttctcatcgatcaagatggggaatacgaattgcatcgtcggaggttgcatagatcaagcgagcgttggtgtggtagaacgctggggccgattcgagcacatagccgagcctggttgccacttcttcaaccctctcgcgggtcagtggctcgccggagtcctctccacccggatcaactctctcgaggtcaaaatcgagaccaaaaccaaggataatgtgtttgtgcagctgatttgctcgattcagtatcgtgtggtgaaaactaatgctgatgatgcgttttacgagcttcagaacccgagagagcagatccaagcttacgtttttgatgtggttagagctttggttccgatgatgactcttgacgctctttttgaacaaaagggagaagtagccaagtctgttcttgaag

SEQ ID NO: 10357 - DNA, 365 bp, Glycine max
  misc_feature (157)..(157): n is a, c, g, or t
  Coding DNA Sequence Number=SeqID_578
ttcccagtcacggacgtgtaaaaggacggccagtggaattgtaatacgactcattatagggcgaattgggtaccggccccccttcgaggtcgacggtatcgataagcttgatatcgaattcggcacggagcaggcttcggaattaacattgatattnttaataacaggcaaggttattcaaggtcccaacgaatgacactactgaaatgtgaagactgtcaaggtatccttaaggaaaagttttagcaatggttatttatctcccatttcacacaacaaattatttatttgtacagttattcttttagggaggggaaattggggatgctgatgggagtaaaccagcacaagataggttgtaaagt

SEQ ID NO: 10358 - DNA, 393 bp, Glycine max
  Coding DNA Sequence Number=SeqID_579
gcacgaggccaaactccgaatctatagtttctgaggaaccagaggtacgccaagaagcataacaagaagagcggtgaaacaatcacggaagaagagtcccctgctggtgtaatagctgccattggatttctcccctttaactggcgatacagcagcaagtaccagcccagcagacaggtgcaggtcaactcagctagcaggcgtaggatgcaggtacaagtgatgttgtcaggatggttggcgaaataggcccatgcaggattcaccatgcatgtgtagaataaaccctttccgtaaattgtttggaaagagacgcaaatggagaattagtttgtaaatctaatcagttggattcaatttgtgtcagatgatttgatgcgttgagtcttactt

SEQ ID NO: 10359 - DNA, 561 bp, Glycine max
  Coding DNA Sequence Number=SeqID_580
aatatccatctgatccaactgtcgccttgggttacctttctgctgcctttctccttgcctccacaatagctggatacaaatccttgttcatgtcttacaagggaaggtctgttcccaactctgtcttgttcaaaagcaccaccttctctgtcttcttcaacattgccttgatcacatctggactggcactgtctctgttgctatggccaaccattacagagcaacttcacttgacacgtaatgtccatcggaacttagagaccagttgccccacggctaagaccggtctgcttggtggaggtgcctttgtttcattagactcgtgccttttctggttggtcgctctgatgctcgctgataacgcacgtgaagaccattttgatgaaactgagaacaggaacgtcaatgggaactcttcctctagggatgttaatctcaagattgatgcttgagagaataatctgcatccgattattagtattgggttttaataaatggttttttacattattctattacttgtttgattaagaaaataactattcgtttcttctggttctt

SEQ ID NO: 10360 - DNA, 484 bp, Glycine max
  misc_feature (37)..(37): n is a, c, g, or t
  misc_feature (45)..(45): n is a, c, g, or t
  misc_feature (65)..(65): n is a, c, g, or t
  misc_feature (107)..(107): n is a, c, g, or t
  misc_feature (132)..(132): n is a, c, g, or t
  misc_feature (158)..(158): n is a, c, g, or t
  misc_feature (169)..(169): n is a, c, g, or t
  misc_feature (284)..(284): n is a, c, g, or t
  misc_feature (286)..(286): n is a, c, g, or t
  misc_feature (294)..(295): n is a, c, g, or t
  misc_feature (306)..(306): n is a, c, g, or t
  misc_feature (359)..(359): n is a, c, g, or t
  misc_feature (362)..(362): n is a, c, g, or t
  misc_feature (374)..(374): n is a, c, g, or t
  misc_feature (380)..(380): n is a, c, g, or t
  misc_feature (387)..(387): n is a, c, g, or t
  misc_feature (391)..(391): n is a, c, g, or t
  misc_feature (402)..(402): n is a, c, g, or t
  misc_feature (406)..(406): n is a, c, g, or t
  misc_feature (408)..(408): n is a, c, g, or t
  Coding DNA Sequence Number=SeqID_581
gtgtacttatttcagtacgattcagtatagagcatgntgtagagnaggaatgatcaacacgtcgncgcgcaactagacatgacatcactgatcacttatattgttanaatatgtgatacgtcggtatgtatngcgcagatcagctacactatcttagnatcatgctacnacagcgtgcaggaacagtaaagcagtcaccgcaaatagcagcaactaagatatacaacgatgagaggtgtgattcgacatatatgcagcacatacaacgtccttccacacagctngncggggggnncggggacagtnacacatctcacaccatatcacaaccaccacatactgcactgtactctgctagnagnagagtgggaggngtgaangttgggngggnggggtgtgcanctcncnccacattcggcggcgccacctctactcgcccgcttagtcgcatctacacgacggctctgagaggatgacagatcta

SEQ ID NO: 10361 - DNA, 561 bp, Glycine max
  misc_feature (284)..(284): n is a, c, g, or t
  Coding DNA Sequence Number=SeqID_582
acttattatatgtgtcgccgctccgagcttgatgtgttgatcgtggtaaggtggtgattaaattgtacccgcactgctcgtgttcgccgactcagtctcttagtccatcgtcgcgaattagcgagcagttaagaccaccgcacatgaagacacaaagcgaaccgagtgtatgtatattaataaggctgctagctgagctctgtctatatcctacgctcatactatatataagcacaaattctgctaccgcagtcggtatgtcgaccttgtcgccggcgattggncactgataggtgatgagaggcgaggagcgcgagcggcagacgcggcgtatatcttggatggtgtggagacgtcgtcgagtgtcatatggcatgatatattctcgagcttcctctctacagcttcgcacgccacgctatactgtcgagtagcgaggagagcgattatgcgctatagtaggtgtgataaacattatactcgtgacgtgtctgaattatatgtagatgacagtatgtgtactagagatttgtgatgatcctcggtgcgacgtacgtagaa

SEQ ID NO: 10362 - DNA, 566 bp, Glycine max
  misc_feature (41)..(41): n is a, c, g, or t
  misc_feature (71)..(71): n is a, c, g, or t
  misc_feature (79)..(79): n is a, c, g, or t
  misc_feature (130)..(130): n is a, c, g, or t
  misc_feature (199)..(202): n is a, c, g, or t
  misc_feature (204)..(204): n is a, c, g, or t
  misc_feature (207)..(207): n is a, c, g, or t
  misc_feature (212)..(213): n is a, c, g, or t
  misc_feature (255)..(255): n is a, c, g, or t
  misc_feature (258)..(258): n is a, c, g, or t
  misc_feature (342)..(342): n is a, c, g, or t
  misc_feature (350)..(350): n is a, c, g, or t
  misc_feature (367)..(367): n is a, c, g, or t
  misc_feature (468)..(468): n is a, c, g, or t
  misc_feature (494)..(494): n is a, c, g, or t
  misc_feature (496)..(496): n is a, c, g, or t
  misc_feature (509)..(509): n is a, c, g, or t
  misc_feature (516)..(517): n is a, c, g, or t
  Coding DNA Sequence Number=SeqID_583
gtagtgagcagatcatctcgtcgtcgcgaaatagatacgtncgcactcgtcatcaatctctcagttagtcnctgtcgtncacaatactatctaactgacatgcacgcgcgcactgtgtgcgagcttgacncgtcgagacacgtctgtatcgtactgctctcagcatccgcgccgcccgcggctgatgcacgctacgagnnnncntancctcnnctctcgtgccgctatgtgcgtacgtgatgtagtactatacgntantcgttgcgacgccggcatagcgtgtgtctctgcccacggtctacgcgtatatgcgcaggtgcgcgcagacacgatgacgtgcanagccgcanctacgacgtatatgtcntcctatctattgtcctgtcgtcacagtgcgtcgacgttcttcacgtagcgtacgtgtcgcgacattcgcatgctagtgttacgtaccttaacagtgtcgtngccgtctgtcgcgacgcgtcgtcgcncngacagtgtgattntgtcatnntctctcgcgattcgtgctgattcgtagtagtcctgatccgacgtatcat

SEQ ID NO: 10363 - DNA, 202 bp, Glycine max
  misc_feature (29)..(29): n is a, c, g, or t
  misc_feature (33)..(34): n is a, c, g, or t
  misc_feature (70)..(72): n is a, c, g, or t
  Coding DNA Sequence Number=SeqID_584
aattagcaaacactgagggacacccatangatnngtaagcgcggttgtcgcaaagctggtgacccactgnnnggtattgaagaatcatggtggcgccaccatgcctgggaaactcgcatcgaaattaatgctccctccctggcaaaaggaattcatttccgaaaatggagggcctccgccaattcccaaaattttgggctat

SEQ ID NO: 10364 - DNA, 429 bp, Glycine max
  misc_feature (38)..(38): n is a, c, g, or t
  misc_feature (45)..(45): n is a, c, g, or t
  misc_feature (53)..(54): n is a, c, g, or t
  misc_feature (137)..(138): n is a, c, g, or t
  misc_feature (165)..(165): n is a, c, g, or t
  misc_feature (170)..(170): n is a, c, g, or t
  misc_feature (174)..(174): n is a, c, g, or t
  misc_feature (184)..(184): n is a, c, g, or t
  misc_feature (227)..(227): n is a, c, g, or t
  misc_feature (243)..(243): n is a, c, g, or t
  misc_feature (250)..(250): n is a, c, g, or t
  misc_feature (253)..(253): n is a, c, g, or t
  misc_feature (255)..(255): n is a, c, g, or t
  misc_feature (271)..(271): n is a, c, g, or t
  misc_feature (289)..(289): n is a, c, g, or t
  misc_feature (291)..(291): n is a, c, g, or t
  misc_feature (293)..(293): n is a, c, g, or t
  misc_feature (302)..(302): n is a, c, g, or t
  misc_feature (335)..(335): n is a, c, g, or t
  misc_feature (339)..(339): n is a, c, g, or t
  misc_feature (362)..(362): n is a, c, g, or t
  misc_feature (367)..(368): n is a, c, g, or t
  misc_feature (370)..(370): n is a, c, g, or t
  misc_feature (376)..(376): n is a, c, g, or t
  misc_feature (400)..(400): n is a, c, g, or t
  Coding DNA Sequence Number=SeqID_585
atagacgtcacgtagacgtacagagtcgcgacatctanctctctntgcgaagnnatcactgcgccaggctggaagactcatagtcgtgagctacgactatagcgccgctctagacgcagccagttcctctctctacnntgagcacgttctctggacgtcataggngtagnagangagagctcgncctacgggtgcactgtacgcaggcgcgtacgcgcgcgaagagnttgatatgacgtgganataaacntancntgataaccggcgcgtncgcgatgagcgtgtcgtncntngtcatgtangctaccatgagagcagcgacatcatgacgtcgncgtnttgcatgacagacatctagcagntatanntncacatntatatccgtgtgtaaggacatatnacagcctatgatgctatacgtctagtagt

SEQ ID NO: 10365 - DNA, 600 bp, Glycine max
  misc_feature (33)..(33): n is a, c, g, or t
  misc_feature (46)..(46): n is a, c, g, or t
  misc_feature (62)..(62): n is a, c, g, or t
  misc_feature (119)..(119): n is a, c, g, or t
  misc_feature (128)..(128): n is a, c, g, or t
  misc_feature (160)..(160): n is a, c, g, or t
  misc_feature (170)..(170): n is a, c, g, or t
  misc_feature (190)..(190): n is a, c, g, or t
  misc_feature (210)..(210): n is a, c, g, or t
  misc_feature (220)..(220): n is a, c, g, or t
  misc_feature (242)..(242): n is a, c, g, or t
  misc_feature (266)..(266): n is a, c, g, or t
  misc_feature (338)..(338): n is a, c, g, or t
  misc_feature (368)..(368): n is a, c, g, or t
  misc_feature (376)..(376): n is a, c, g, or t
  misc_feature (413)..(413): n is a, c, g, or t
  misc_feature (423)..(423): n is a, c, g, or t
  misc_feature (427)..(427): n is a, c, g, or t
  misc_feature (430)..(430): n is a, c, g, or t
  misc_feature (459)..(459): n is a, c, g, or t
  misc_feature (474)..(474): n is a, c, g, or t
  misc_feature (505)..(505): n is a, c, g, or t
  misc_feature (525)..(525): n is a, c, g, or t
  misc_feature (542)..(542): n is a, c, g, or t
  misc_feature (545)..(545): n is a, c, g, or t
  misc_feature (548)..(548): n is a, c, g, or t
  Coding DNA Sequence Number=SeqID_586
agtctgacactgatacgacacgcgcgacgtcantgacgcgactcgntcgcgagtctactcantctacgttactctcatagtagactgctttgtgacgctagagatgaccaccaagactngatgactancacgtgacaacgacgctagacctcgtgtggcntcgaaatagnagacggtcttgcggcgccantacgcatcgtgcatagtacntctctgaaanctctgaaggccacgacgtgatnacgatatagtggccagagtagccntgtaatcatagtacgattacaccgcagtcatacccaagccacggcggcgggctgcgtgagcacagtgctccntgatggagcgctattaccattgagctgggncggttcantagcgccgagcgacgatcgagtcctactgcatctcangcatactgcngtgncgnacgtggtatggtcgcactgacgtgccaanacgacaagggcgagnagcgacgctgacgcatggtcgcgccatgacncatcagatatagccgcaaancggagattgtgggacgnagnctnaatcgacacatgtcacgagcgataaacacaaggatgacagatggcgccgttt

SEQ ID NO: 10366 - DNA, 545 bp, Glycine max
  misc_feature (32)..(32): n is a, c, g, or t
  misc_feature (334)..(334): n is a, c, g, or t
  misc_feature (350)..(350): n is a, c, g, or t
  misc_feature (366)..(366): n is a, c, g, or t
  misc_feature (373)..(373): n is a, c, g, or t
  misc_feature (493)..(493): n is a, c, g, or t
  Coding DNA Sequence Number=SeqID_587
ctgacttatgactgtagatcctactgtaatgnagttacttgactgctcgatgagagctgagagtcgcgcatacgatatctactagagcgatgaccaatgaacgcgcgcggagcgacgagtagaccgcgagcatggaagatcaaaccgctcagcgactagtatcacgatgcgcgattcactgctatatgccgaactcagtggacgtgcgtgaggtgcgctcggctcgtgtggagactgcgtatatgagatcggaataacgtgcaatcagacctagcgtgtgtactcttgacactctcgcacgtatctgttctgcgtatcatcttgacgactgacnatcgcgtagcaagctngcatcagatgagcagnagatgancttacatatggagtgtgaaccttgcgcatagcgcgaagcgatacgttcttcaccacacgacacccatggagatatacaaagcagctcgcgagtgctccctcttcgtctgatagtcataangtttatgtgttgacctaagcatgtctcgcatctcgtactgtcacgatcgaca

SEQ ID NO: 10367 - DNA, 541 bp, Glycine max
  misc_feature (306)..(306): n is a, c, g, or t
  misc_feature (330)..(330): n is a, c, g, or t
  misc_feature (421)..(421): n is a, c, g, or t
  misc_feature (511)..(511): n is a, c, g, or t
  Coding DNA Sequence Number=SeqID_588
ttctattctattgccctgctcgggtgtctcacatcgcccgtactcgcgagacgcagcgaccgcgctgacgaccgcgcgtcgctcggatagtagttacgcgtaaaacgcctgcgtatttcttctccaacgcgtacattatgcttcgatgtgttgcgctcctctgcgtctgctctcctctgatagtatgtatatcatactcacttcctctcgtcttatgtttgctgcgtatgccgcgttagacacgcgtccacggcgtggtggatctgtgtgatcgacatgcgccatggagaggatatgtcgccgatngatgcgattcgcgtgtcactaggngcgtctataaacgaactcgcggacgcaagtattagccagccagaactagatgaagatgcgagtctcatgcacgccgctcaacgatggagantgtatgagtggacatgcgtgcctctcgacactgtgcacagcgcatgtcgcgcatgagcacacgagttagcgcgatcgcgaacatgtaganagcgcgcacgacgcgatgtagcgagccaac

SEQ ID NO: 10368 - DNA, 265 bp, Glycine max
  Coding DNA Sequence Number=SeqID_589
gggtaagacccatagcgacgaactgatctgggatatggtggctttcgtaaggcaacttccgcgtatgtcacccgcccaatatcaggcggcaatagccagtgcgcccgaagaccatgacgcgatgatgaaggatatgcccggcatgacgaagacggcgccatagcgttgcggctgctccgtcgctgttgctcagatctgcccgctatgtgcgatgctttgacggacaggctggaccggctgctgagccgcttacgcaacgaaccga

SEQ ID NO: 10369 - DNA, 534 bp, Glycine max
  misc_feature (222)..(222): n is a, c, g, or t
  misc_feature (239)..(239): n is a, c, g, or t
  misc_feature (250)..(250): n is a, c, g, or t
  misc_feature (271)..(271): n is a, c, g, or t
  misc_feature (303)..(303): n is a, c, g, or t
  misc_feature (400)..(400): n is a, c, g, or t
  misc_feature (476)..(476): n is a, c, g, or t
  Coding DNA Sequence Number=SeqID_590
tcacctcaccttttcgttttcacgtctctcgtgtgtgctatactcacgtcgctctcctcgtctcggcatctgctcctgctctgcctcgcgtgtcccgttcgtactgcataaatctccattaccacatttctccgtactaccttagtcgaaaggtacgaagtgtgatctagtagtgacaccaccgactgtagttccatctcgtctcttcgtcgattagtgtgnattcactgttgagcctnctttctctctnttgtaagtgcacagcctattnacttgtgccatgtttgccggtgtgccattganattagagtcataatggtcatgctattgagggtagattcgatggtgtaactaatcgtgatacgtgtaatgagtgcgtcgcgatagagtcgcatgctangtgttgaaccgagctcatgagagaccacataaaggagacgtccacgacgtctcctcacgcctatctccacgacganagcgcactacacctgcactagcttgtatacactataaatatcgcagcactgtcaccca

SEQ ID NO: 10370 - DNA, 418 bp, Glycine max
  misc_feature (301)..(301): n is a, c, g, or t
  misc_feature (384)..(384): n is a, c, g, or t
  Coding DNA Sequence Number=SeqID_591
tatattttgaatagcctcccggaaaacaaaattttattttttagtattacaagcgttaaaagtttcaattaatgaatcaaacactgttgaagcatactcgactaactcaacgtcgagactgttatattttctgatcatttggatctcctcttcagttaattttcctttcgtatctttattcttaaccattccactcgaattgtgaacccatcccaaaggttttgtaagattaaaaatagtatttaaaattggaaatgtttcatttaatcttgaactgattccaactaaatcgaatttctgnaaattcatttttgccttttctaacatcactctcttctttgcctcgtcatttccgacgtttaataaataataagaataatcggnctcaaaattggaaccctcgatttcatttacataa

SEQ ID NO: 10371 - DNA, 537 bp, Glycine max
  misc_feature (235)..(235): n is a, c, g, or t
  misc_feature (273)..(273): n is a, c, g, or t
  misc_feature (361)..(361): n is a, c, g, or t
  misc_feature (459)..(459): n is a, c, g, or t
  misc_feature (511)..(511): n is a, c, g, or t
  Coding DNA Sequence Number=SeqID_592
acaccactaatattgtgccctctctcaccggtgtcaacttctactcactaacgtcctacgctccgcacatcgcattcaacataccatctcatcgttattctcacttcctctagtcccgtggcactactagtcactattctaagcatttctcactcacacttcccttattctgccctcttcctcccctgtattatgtatcgtctcctccgtccatcatactcctcgctatagaatnatcgataaatctatctcgcgcgccttgctactcgcgcnccaccgtgccgtctttgttgtctcacgctgactcctctctcctactattatatagcctcacacagctacttctctatcgtctctcaantactatcacctacttaccactactctctatatatagcgcccacacacctcatcacatgcatactccatgtagatagtcataccacattcctaactctncataatctcctccacagccctcgcctctcactattaacctctcaacagactnctttcactcacactaccgacttcata

SEQ ID NO: 10372 - DNA, 314 bp, Glycine max
  misc_feature (39)..(39): n is a, c, g, or t
  misc_feature (44)..(44): n is a, c, g, or t
  misc_feature (49)..(49): n is a, c, g, or t
  misc_feature (61)..(61): n is a, c, g, or t
  misc_feature (92)..(92): n is a, c, g, or t
  misc_feature (101)..(101): n is a, c, g, or t
  misc_feature (111)..(111): n is a, c, g, or t
  misc_feature (113)..(113): n is a, c, g, or t
  misc_feature (132)..(132): n is a, c, g, or t
  misc_feature (139)..(139): n is a, c, g, or t
  misc_feature (146)..(146): n is a, c, g, or t
  misc_feature (179)..(179): n is a, c, g, or t
  misc_feature (221)..(221): n is a, c, g, or t
  misc_feature (238)..(238): n is a, c, g, or t
  misc_feature (247)..(247): n is a, c, g, or t
  misc_feature (257)..(257): n is a, c, g, or t
  misc_feature (273)..(273): n is a, c, g, or t
  misc_feature (276)..(276): n is a, c, g, or t
  Coding DNA Sequence Number=SeqID_593
tctgctgatctcgtgtctactgcgtacttatcctgcaanctacngtacntagtcgatctcntcaagccgactgacactacatcatgacgttngatggacgnagatgaacantnacatatacacacgtaaccnagctcanctcaacncttactgtcgatgatcagctagcgtgtatacanaactgacgtgtatctgaagccctgctcataacgactacgtgntgctcatcgcctccttnatgtatgtngatgcgcacngtcagtctatatcctnganctttcctactatctattgacacgacctccatgacacac

SEQ ID NO: 10373 - DNA, 108 bp, Glycine max
  Coding DNA Sequence Number=SeqID_594
tctttaaagatgacgcagtgatccagtttctaaatccacaagttcaagcatccggagccgctaatacttgggctgcccgcggatcacccccaacaaagaagatgcagg

SEQ ID NO: 10374 - DNA, 285 bp, Glycine max
  Coding DNA Sequence Number=SeqID_595
agaaacaccaacctgtatgcggccaagaggctctccttcttctcaattgcgtcacggagtctcctttcgatcaagagaaatgcctccgcttcttgcaatctctcagagaatgcgtcctctcaaagaaagttaacaagttcgtgataccaagtcaggaacatgccagtgagggagcagctaacaagccaccttcataaccttgtttgtttcccttttcttttgagatgtaatctctcacataccttgatggtttcatataagactcggaactagaggtttctatat

SEQ ID NO: 10375 - DNA, 489 bp, Glycine max
  misc_feature (26)..(26): n is a, c, g, or t
  misc_feature (370)..(370): n is a, c, g, or t
  Coding DNA Sequence Number=SeqID_596
taggcagcgatcatgctcgtagtgangcggcgacttagtgattgctgagctctcatacatgacgtgacatgtaaagcgaaatagcacagagactcgactgggaacggactcgtggcagcgtataagcagagtactcagacactgatatattaattacattatatgacttgatagatctatttcatacgtagataatgatacaccatctgcacctcgacgcacatagacacgcggcgcgcgacctgtatcgcatcctctcgatgtagtgaccatagagtggtgatgtagtatatacagagaagacatagacaataataatagttatgcattacagtgatagagtaaagagctcatagcagacgcggaatgnatgatgacggaactgctgtcgcggtcgcgcgggagatacgacttcgctctcatcctctcttttctcggtgtcttggtgtgtgataattacataaatacatagtctaattgtcgcctaag

SEQ ID NO: 10376 - DNA, 223 bp, Glycine max
  Coding DNA Sequence Number=SeqID_597
gagacctttcagacagacggcttccggggggggccaacaggctgcccgtatcagcaattaggaaaggcgaggattccgggtctttgtagataagtgctggcggtcaggacagagctctcttaggtgtgaaggagattgaggcgatatggcaaggttgggctggtgacaatgtgcccaatgagatttgacgataggcacttacaaaagctgtgactgaaaaggt

SEQ ID NO: 10377 - DNA, 399 bp, Glycine max
  Coding DNA Sequence Number=SeqID_598
attcactcccactcattacaatgtggaagctgtggacgttactggcggccatcgctgtggcttcagggcagtacgcaccccctgtggcgacctatgcacctccaccacctccggcggtagagtatgggccgcccccaccccctcctgtagtttatggtccaccaccacctccaccacccgtagagtacggacctccaccgccgccaccgccgccgccgccgccaccaccaccaccaccagtagtctatggcccccctccaccacccccagtggtatatggtcctccaccaccaccaccaccagtagtctatggtccaccgcctccaccttccggtggtctatggcccccctccaccacccccagtggtatatggtcctccaccaccagtagtatatgca

SEQ ID NO: 10378 - DNA, 376 bp, Glycine max
  misc_feature (310)..(310): n is a, c, g, or t
  misc_feature (335)..(335): n is a, c, g, or t
  Coding DNA Sequence Number=SeqID_599
cgctccggcgcatcgaggaagtcgagcgcgttcgatgtcggcggggtgtcgagcacgacgagatcgaaacgcgggtcgtccttgacggcgacgagcttctcgaccgccatgtactcctgcgtaccggccagtgacgtggagacgtattgatacagcttgttcgagagcagtttgtcggcgcgctctttggtggacgagtacttgcgcacgagcgcgtcgaacgtcgtcttcgtgtcgagcatcatcacggtgagcgagcccttgagttccacgccggcttcttgaagtgcgcgttgtcgacgatcgcctnttcggtgttgatcatgtcgagcccnagcgcctgcgcagccgcttcgccggatcgatggtgaggaaa

SEQ ID NO: 10379 - DNA, 574 bp, Glycine max
  Coding DNA Sequence Number=SeqID_600
gcaggcttcaaggtattatttcaacaacagtttgcctcttttttagatagaggttggtatattctgggagatgaagtaaatgcctttgagcaagtatttgcggcgcataatgatactaatttttgtatcggtgttgccaatggattagatgcattagtgctatccttacaagtactgaacttaccaaaagggtctgaaataattgttcctgccaatacctatattgcctctattatttctatcattcatgccgggcatattcctgttttagtagagcctgatatacagacttacaatatcgatccctataaaatagaagaagccatcacgtcaaaaacaaaagccattatggtggttcacctgtatggtaaatgttgcgaaatggatcggataggggagatagcgagtaaatatggattaccgattattgaagattgcgcgcaggcccatgatgccacttataggggtcgaaaagcagggacttttggtgtattgggtgctttcagtttttaccccagtaaaaacctgggtgctttgggcgatgccggtgctattataaccaatgatgcccagt

SEQ ID NO: 10380 - DNA, 467 bp, Glycine max
  misc_feature (358)..(358): n is a, c, g, or t
  Coding DNA Sequence Number=SeqID_601
agccgctgtgtgtggcgtatagccttgggacgggccctggcgcccgctggagatgcgtgaagcaggtgtcatactctagtagaactcgtacgtctactgccgagcttcgcgatgagctaggctactgcagcgtgagggagtcgagtgcggtgtgtctgcgtgatgctagatgtttcgagtgatacagtagcgttagcggcgggatatctggtgttgtttcagcacgggagcccccgaacctcctcagctgtgatatgagacagcgtcagacgcggtctgctctatggatcttttcgactatatctctggtatatgtcgtcaccaatgctctacggtctatacgctcgcgttgactagngccagacagcacacgagaatacgagtgagggtgggatgctgaatactaaccactcgcccctcactgctggggtggagagccaccttctatcctccctatttgttggtga

SEQ ID NO: 10381 - DNA, 354 bp, Glycine max
  Coding DNA Sequence Number=SeqID_602
cttcaattcagttgtgacgttagttagagagagagagagagagtgtatgtgtttgtgttgtactttgtttttcttccttcaacttgggaacaaaggttgagactttcaatcttcttctttgcaaattctgtgaaaagccatcatggttatgctattattgcccagtgttgttgtcatgggactaatgagggtcaatggaatgaagctatagcagagtggagagaaggataagaagaaacccacatggtgtttgggttgcatatgattctaatctattgaggaaacaatgtagaacaaggttattgcaacattggacgaaaaagaactatggcttgaactatggtttcattttga

SEQ ID NO: 10382 - DNA, 484 bp, Glycine max
  Coding DNA Sequence Number=SeqID_603
cagggcagcccttccggaagtcgaagccgccctcctagccgatacaagtgctcatcccgcagttcgccggggcaaacactatagaattccgcggcaagtaatctttgacctcgcccgtcttcatctttacatatccgctaacaatgtcttgccttttgggaatacccctgatatccccattattgctcagacgggtgacaaatccaacttggtagcgaaggatttagtgaaagacctgagcccagtggctatgatgaagtcatgttatgtgcaacaatgatccggacttgagaatgagaagttataaaatcgtttctctttcaatagcctgttttgttttcgtatgttgagtcaataaaaagatagagactatgtttgctcggcgttagtgtgtgtatatatatgcttcattatgatatcatatatcatacttagtcttggacgacgataatcaaacttgaggctgaccgtgtatcatgatcca

SEQ ID NO: 10383 - DNA, 369 bp, Glycine max
  Coding DNA Sequence Number=SeqID_604
gattctcaggttatcctgtgcgctaactcgaaatgaaagaggtatttccacaacaggttgaagccatcaaagctcacctggactgcagtgtacagaaagcaacacaggaaggacattgatcaagaagctgctaggaaaagatgacgtgctggcagaaagccttactgcaggtacattgacggtgccacttgggaagttatccagaaaaagagagctgagaaaccagaagtaccagatgcaaagtgggaagctgcccttcgtgaaattaaggataggaacaagaaaacaaatgatgagaataaggctagagaagcagaatgtgccaaggcccaagaatcacataggaaaggatatgttactaagggtgcc

SEQ ID NO: 10384 - DNA, 410 bp, Glycine max
  misc_feature (41)..(41): n is a, c, g, or t
  Coding DNA Sequence Number=SeqID_605
agcttggaaggttctcctccaattggcaccatcatagagancactaaagcagaaggaatattatttactgatgatgcagaggacccagttatttgttggagattataagtctatttggcgcaccatttggaatggagatgaccccattttcgggtgggccaaatctgcatttaccttgggactggaaattattcatggcaacattcttggaaaattgggcatggcccatcaaacctggggccaatgtccccccgggggaagggaattggggaacttcaaaaatcttaaaccggcggccgggggtaaaaggcgcttcccccaaaaaaattgggggggaaaaaccccccccgaaaaatggtccctaaatttgttttaaggggtaaaaaacactctttgggacactgggaggg

SEQ ID NO: 10385 - DNA, 596 bp, Glycine max
  misc_feature (93)..(93): n is a, c, g, or t
  misc_feature (126)..(126): n is a, c, g, or t
  misc_feature (156)..(156): n is a, c, g, or t
  misc_feature (199)..(199): n is a, c, g, or t
  misc_feature (221)..(221): n is a, c, g, or t
  misc_feature (403)..(403): n is a, c, g, or t
  misc_feature (466)..(466): n is a, c, g, or t
  misc_feature (529)..(529): n is a, c, g, or t
  misc_feature (548)..(548): n is a, c, g, or t
  misc_feature (560)..(560): n is a, c, g, or t
  Coding DNA Sequence Number=SeqID_606
aatccagactcaactctaaagacatacacagaccgacgtacgacatacaggcagaataaatatgaagagtactatatatgacgaagactaatncgctaatccgataccgcagcaacacgtgtaagnaccaacacacccttaacacatacgaaggcntctagcatataatcgataactatcacacgcgacgtccaattantcactctgagcatatacctacncaaatctagcgcgaaactgcgctgaccgacgatataacgatatagtgcagcgcaacaggaacgacgtgacaagagatgagtcaaacttatatacggatgatagatatcatactcacatatacaatgcagcgagcaagacatatatcgcaatacgagtaagcgtatatacccctatagcgcgncacatcgctcgctaggctgacgaaatgatagcacatatctctatacatatatattcaaaagangacattcatactctcgatatgtacaagagcgtgtatatctctctcactgttagagccgcgacnacctagcccacacaccacnatacgcccaacnacctaacagccaatcccacgcaacgtgacacgcagt

SEQ ID NO: 10386 - DNA, 566 bp, Glycine max
  misc_feature (26)..(26): n is a, c, g, or t
  misc_feature (189)..(189): n is a, c, g, or t
  misc_feature (214)..(214): n is a, c, g, or t
  misc_feature (412)..(412): n is a, c, g, or t
  Coding DNA Sequence Number=SeqID_607
tgcgtaacgatgtgcactggcacctncgtcgtgacgcgactcagtctcactgtcacagcaggctctgattagatgatgaagtcgacactatctccttgcgattcagacgcatattatgttagtatcgtcgatataccattagagcgacacgaccgagccatcacaccctcacgactcaatcaacacggngagagcaccacatatcgatatctcnccagtgcatcgccgtctcggtcattctgtgctctgcgatatgtattcctccgtgattactaccatcaatctcgatatgacatgagtgattatagagtcgacgttgagcgcggtggcgtataatgcgaagagcataccacgaaccgcgtcgcacgacgccgcgtgatagactctaccagacacagcagacaccacacanacacctacgataggtagacaggcagcgagcgcctcgtagtagacagcatcacactcggcgctcataacacgtccctaccgcggcgaagcacgaccgcctacacgcacaccgacaatctcagtacgcaccagaaacttcgctcatgctgggtcga

SEQ ID NO: 10387 - DNA, 575 bp, Glycine max
  misc_feature (340)..(340): n is a, c, g, or t
  misc_feature (463)..(463): n is a, c, g, or t
  misc_feature (549)..(549): n is a, c, g, or t
  Coding DNA Sequence Number=SeqID_608
gcctgcgcgcatatacgcctagaaggagcgcgctcgctattcccgcctgtccctatatcgccaggcgacgcccacgcaggagcggattggcgctccagcaccgaacaccacgagagtagtgtggtgccacccgcacgcagcgcttcgatactgtgtgtaggtgtctcggcggccgagtcctagcactcgcattaccacgacgagacacgcgtccgcgcggcaaccgccacaccgcagaagtcaccactccgcgccgagtggttgagctgatcatcagccgccgtaccgcatctcgcgctgtaaccgcccgtcattttgctcgcgcgctcacgcggcctgntgcgctcgacgcttctatctggcccgcgcggtgagatgtgacctgaacagtgcccgcggaatgtccgcgacccgccatcgtatgttatcacacatctgcatttgacgacccacgcgagtattnatccccccgcgccgtgaagacagccgcgccgtgtacagatgctccgcgcgccctacgtattgtgcctctccgcgcccatgaatatnctgctctccgcgctagtcgagtgacg

SEQ ID NO: 10388 - DNA, 393 bp, Glycine max
  misc_feature (286)..(286): n is a, c, g, or t
  misc_feature (348)..(348): n is a, c, g, or t
  misc_feature (355)..(355): n is a, c, g, or t
  misc_feature (360)..(360): n is a, c, g, or t
  misc_feature (366)..(366): n is a, c, g, or t
  Coding DNA Sequence Number=SeqID_609
tcagtgtatgatcaggttgtactcgtaatttttttccttgatattttaaggtatggcggtatggccaacattttgccttttattattatcattgtacatcaaaattgaaataccgtattcacaatgtgagacaagtaggctattgacatgattctccatgacttttctttaatttctcatggaaattatttcaacatctctttgaaaatattatatcctgcctcggttagggtggtagggaagtgttttttgggtgctaatgacctgacctggggatcatatcagnctaatctggtatcatgctgatgggatggtcgatatgctccttaaaagctggaccattacgtngtccttnaattnccaagnaatcccaatcggaattccttctttccg

SEQ ID NO: 10389 - DNA, 488 bp, Glycine max
  misc_feature (440)..(440): n is a, c, g, or t
  Coding DNA Sequence Number=SeqID_610
acatatttgtttcttaggagctagaatataactcatctactaacaccactctctcgtgtgggtgtggggcgcggggtgagaagaaaagaaaaatactgtatgtatatgatctctgataatatattcaacagagagtatctataatcgtgcgatagggcggctacgatgacttgtgtgatgcgttcgtttcacatggtgttgtcatgtctgtaaaacaatatagataaataaacaatgagcgggggacggatgcagcggagcgggccgcagcaacaatgaagactggtctgtgcaactcaaccacacccacaaaacaccgccaacacccatctgtccggctctgtttccaccttttacaacatgtacaatgcacaaaaagtagagggagaaaataggcgagtggcacacacaaagagaggagagagtgggaaattcaaagncaacgaaagaatgaaattagaataagtgtgtcatcactattctcactc

SEQ ID NO: 10390 - DNA, 583 bp, Glycine max
  misc_feature (283)..(283): n is a, c, g, or t
  misc_feature (489)..(491): n is a, c, g, or t
  misc_feature (505)..(505): n is a, c, g, or t
  misc_feature (528)..(528): n is a, c, g, or t
  misc_feature (531)..(531): n is a, c, g, or t
  misc_feature (551)..(551): n is a, c, g, or t
  Coding DNA Sequence Number=SeqID_611
tcgcttctcaccatacagagtgacgtgtacactcacaggcacaaccacatgtggatcgcgagtatgaatcaagagggttcgtcttcaactcctacacatcacgagggttgtatacatctccacgtattcatacctagtctcgcagccgtatgggacgatgtaggaagagaggtatggtgacatcagcggctcttgcgtcacacagacctctctctctatcaatacaccacgcccctctatctacatcacactatgagtgtcaccgtgagtgaggacgtgactncccctaacaccacaaccggttgtgcggacaagccggtcgtgcggatcgccagtactttctgcgttctgatcatatgtccatgcctacaagaatctatctgaggtgcgggagcggtgcgcctcgctcctcgctcagcacacatactacagacgaaggggaggccgcaccgctcagcgctcattatattgcgggacatactagtgttnnntggcggccacccanaatactaatattatctcacacanctncttctgctactctcgcaagncctgtgcggagctctaccgatgtcgcaaccag

SEQ ID NO: 10391 - DNA, 453 bp, Glycine max
  Coding DNA Sequence Number=SeqID_612
aagtgtccgcggctgctagctcctcctccctctgtggtacgatcatcctcctctgctacgttgaccaagatggccgcgcgccttgcgcttgtggcgacgctcctgtgcgccggagccgcggccgccgcggcgcagcaggcgagcaacgtccgcgcgacctaccactactaccgcccggccgagaacggctgggacctgggcgcccctgccgtgagcgcctactgctccacctgggacgccggcaagccgtactcgtggcggtccaagtacggctggacggccttctgcggccccgccggcccccgcggccaggcgtcgtgcgggaggtgcatccgggtgaccaacacggggacgggggcgcagatcacggccaggatcgtggaccagtgcgccaacggcgggctggacctcgactgggacaccgtgttcgtcaagatcgataccgatggcatg

SEQ ID NO: 10392 - DNA, 404 bp, Glycine max
  Coding DNA Sequence Number=SeqID_613
gaaacagagctttgtgtctcacaacaccaatgctctctgtttctctatatccaacccaaagttcaatcctttaagcccaccaaagaagccaaatcgtctcgcgtcgtgcgctctcaatgtcggactccaagatgtaaccgaagtcatccacaacaaggtacttatagctgctgggttctccggagcgattgggcagctcttaaagcccttcacttctgtggttttctacaagaaaaaacttgactttagaaccgctttacaagctggaggcttcccttcaacacattcctcttctgttgtggctgcagcaactgcaattgcttttgaaaggggatttgatgactccatttttggtttgactgtggtttatgctgctctgatcatgtatgatgcccagggtgtga

SEQ ID NO: 10393 - DNA, 191 bp, Glycine max
  Coding DNA Sequence Number=SeqID_614
cccaactaagagaaggttatggatgaattaaccttccagagtgagctccatggattagctgctttgcagtggtcaatttgtcaagactccctcagtaggtattgtcagaaacttcatggcatatctaaagttctcaaggaaactaccagattgtgttctacacagaattgacgacacatcctaatactaag

SEQ ID NO: 10394 - DNA, 561 bp, Glycine max
  Coding DNA Sequence Number=SeqID_615
gatcgtatatacaatctccctgaagtcgttataaccaagcatgtagcttgtatcgtgccattgataaatagctaaatatagaggagttcaggaagtatatcgagaagtaagaactagtaagtatgtgcaaagcatagctgagatatctttttcgcctgtagtcactcttctcaggcatctcactcttgaagcacaaatatgttgctatatttatttgttctggtgcataagggtacgggtatttcatcaatttgtttgcaccttctcaggaacacgtaagattaagaacatggcatcaagtcataggtgcctcagcagtgaagcagtcacaaaaagtcctgagagaaatttgtgaggcggtttccattggtgatgcagcaggtggtagataccacaatggatgggatctcttttcacggaagtatgatcacgcgcctccaaaagcttcaaaaatctcagcctgagacgcccagccaaccctttgggtagaggatgtaccaaatcaacatgatttgacggtagcaagtctgcccatagcacagtgtcacagtcctagaaaaa

SEQ ID NO: 10395 - DNA, 577 bp, Glycine max
  misc_feature (95)..(95): n is a, c, g, or t
  misc_feature (126)..(126): n is a, c, g, or t
  misc_feature (187)..(187): n is a, c, g, or t
  misc_feature (201)..(201): n is a, c, g, or t
  misc_feature (256)..(256): n is a, c, g, or t
  misc_feature (274)..(274): n is a, c, g, or t
  misc_feature (293)..(293): n is a, c, g, or t
  misc_feature (334)..(334): n is a, c, g, or t
  misc_feature (355)..(355): n is a, c, g, or t
  misc_feature (357)..(357): n is a, c, g, or t
  misc_feature (379)..(379): n is a, c, g, or t
  misc_feature (475)..(475): n is a, c, g, or t
  misc_feature (496)..(496): n is a, c, g, or t
  misc_feature (507)..(507): n is a, c, g, or t
  Coding DNA Sequence Number=SeqID_616
gcaccccactctatcagaatgaacgttcgcgacgagtgtatagatgatgtgatgatgctagtgctcgcgctctctccaccaccacgacacatagncgcgatatcatctaccagcaggactacgggnagtgcactcacatagccaactccactactatatatatctcgctgaatgagatctaatctantatcacacatcgantctctcatctgtataatgagcagctagacactagcggagcacactactccagtgncgcatgacctcataatantgacaacttgatgcacaancatacgtaacatcaatgatgagatatatagacgatagaganctagtacatacactactacananagatagtaatatatataatatncgcgatgcgcgctagatcctattacatcagctgatactgtatgtggataagtgacgacactgacatagcacacatagactaaaagacgatatatgntagaacactctctgaacgaanctgcgcgaccngagcacgaaactagcagtgtccgactcttcgtactaaggctgactgacacgcgtagtcggctatatcact

SEQ ID NO: 10396 - DNA, 494 bp, Glycine max
  Coding DNA Sequence Number=SeqID_617
gtttgtcgaaattgacgtttccaggaagaccatctttagcaatatttgtgttgagagtaacactcacttgtccaaaatagatgacttggtgcaccctaatacttagaaagaacgacttggatgaaggacctacacttcatcaggttacattggtgccacgggaacgagaaccagtgagtagttaagtaatagcggttggacagccaattaatgaattgatccgtattttgtggttctagacaactgagcaacgcagctatatgtgattgagagtgttttaaaatgaaagagaagcacagccgttgtgcatatgtggaggagatgagaaaatcccgtattgataactatgtttgaactgtggtattatgagagtttttttgtgtgctatttgttgcactgctgattgttaagattttctaatttaagttttgatgataggttgtcttttgtaatgtgggcatataaattcaccatcgtgttatactcttttttcg

SEQ ID NO: 10397 - DNA, 546 bp, Glycine max
  Coding DNA Sequence Number=SeqID_618
agttgtataacttggagcaggcattggaagattcacagatgaattggccaagaaagctgaccagctacttgctgaggattgtcattgagagtgctatacagaagaatgaaagcattactggacaccacaagaatgtcaagatcatgtgtgctgatgccacttctccgaacttgtatatctctgaaggatcggttgatctgatattctcagatcggttactcatgtatctttcagatgaagaggttgagaatttacctgcaaggatgatcatgtggtcaatagccggggcatatggattcttcacagaaacatgcctccaccaatctgaagattccacgagagaatacaacccactcgctatagggaaaactacagtttactgtaaggtagttagagagcgtcatatgagtgtggtcaccacgtattcctttgagctttcacttgcaggatgtagaagcatagtggcttatgctcgagatagcacgatctgatgacgatgttgtcgagatgcgaactagttagatcacgagaagcacgcattacagg

SEQ ID NO: 10398 - DNA, 549 bp, Glycine max
  misc_feature (280)..(280): n is a, c, g, or t
  misc_feature (332)..(332): n is a, c, g, or t
  misc_feature (341)..(341): n is a, c, g, or t
  misc_feature (435)..(435): n is a, c, g, or t
  misc_feature (480)..(480): n is a, c, g, or t
  Coding DNA Sequence Number=SeqID_619
caatgtccgcttatggtagtcgtgctgtatggtcacgccaccgtctgcgatctatgttcgagtggacctgtccatgattacagttcgacacaatatactatagccttggacgtgaacgttagaagaataggtgtaagaataatgtcatctatatatcttctcatcggcagtagattagcagcgatgccgtatacgtaagtactacactgacactgagagaaccatatgctgtccagtagtcgatgacacgtatacgcgaagtctagctacacaccatcancttcatggtgaccgacgagctcgacagatattgtgctacagttgctatcgancctcgctgncgaagtactgccagtatgtctacacctcgatatactatgatatgttagtgcacgaaagcggtgatgcaagatctgtacgcatgttgtgcaagtncgtctcatatctatgatgtcgaattgcagcacaagtgctatatcnattgtagttagttcttatggcacgagatgagcacatacttcactgtgagcaatgactccgattatctat

SEQ ID NO: 10399 - DNA, 117 bp, Glycine max
  Coding DNA Sequence Number=SeqID_620
gcctggtgcaaaaagaaatatcctttggcagagaatcgtcaaagagcttagtcatgctatctgagttctgctccccttaagccaagcaatgttatggcgtggcagttagtgaaagct

SEQ ID NO: 10400 - DNA, 556 bp, Glycine max
  Coding DNA Sequence Number=SeqID_621
atcgataacctcttaacatccgtatattaatactatggctttgtaacgaataccacacacacgacttacgcactgggcattggtccgcatccacacacaggatagcagcacaacattactgcgctataagacatttatcggtatatatatctccgcccgcagaaatacggcatacgcctcttttctcactgtccacttcacgggtgagtatcaatatcaatgaactaactcgcaaatactaagactattctctcttacttctctactcagaggcgatttactgcgttctctcatacaactgcggggagctcacaacgagttatccaccccacgtccttgcaccactttctcctcacttaggacacccatcacacactcacgtgataagagagagcacacactccttatatagagaatatttcgctcattactataatatagagggaacgctctctgcgttcggataagaggtcatcctcatacgcgcgctctcagcggcgtatagtaatcttgttctctaccaggctcttccatagctaatctgacgccgtactga

SEQ ID NO: 10401 - DNA, 561 bp, Glycine max
  Coding DNA Sequence Number=SeqID_622
tattccccgccgcattttcagcttttacgacaatgttttagattttaactacacgcacgagtgattaggtagtgatggagctgtttctgcaatcaaagcaaggtgtgagatggaagtggaccggatagagaaacagtttgacgattgcattgctttcttactaagggttttatcattcaaactaaacgtggggcacttccctcatttggctgatttggtgaccagaatcaactacaactatttctacatgtctgctaatggaaatttgatgactgcctccagttctggaagtgttacttcaaggttggggaaggcccctgggtagaattgtttgatctaaaggtggattgttacaactataatctgaatatgagaatagttctgcacctgctttcatgttgtaaaatattttgagaatatcctccatttgcttaatctttgggctttgtgaaggggggaaattaaaggctgttgctacccgtgttgtctgtaactgcagggccacttgcctggcagcttccatgagtgcatagcaagatataaaattgtatcgctgttgtt

SEQ ID NO: 10402 - DNA, 336 bp, Glycine max
  Coding DNA Sequence Number=SeqID_623
gaaaaccaagcaaacactcaacgaaaatgaaattcttgttggctctcgctttcctggccatggtcaccgtctcgctggcccagtacttggtcccgggccagactgtgctgaccggcgtcggcgagatcgctctggacggccacagcaagatcgcttaccagggctaccaaaaccctgcgctcaacccctatattgtcaatggcattcccaacacctggcaatggaatcccctctggagaagacgatagaggaatggactgaacgacggcttcgaatggaaacaacggaatgactgatcgatcgattgctaactcattttacccttttgtcaatcac

SEQ ID NO: 10403 - DNA, 386 bp, Glycine max
  Coding DNA Sequence Number=SeqID_624
agatgctggcgctaacactcatactacgtcgaaggggcgcttcttgggacaccattccttgaggaagcggctgtaattcaagacgaaaatggtgtctggagttctgcagacgaactacatctcgactgcctggatagataccggacggatcactaccgggcctccgactacgatacaatttccatcccgaactggtttgtaaaatctggcctctactatcagaatgaccccgtatggggctgccgctactgtcctaagaacaacctgacagagctggggtttaacttggcttattgcaatgccttgaaattagtaatgaactccatagtgacttcgaatcacaaagggattttttacggacattcccacctgctcatttcgaaaat

SEQ ID NO: 10404 - DNA, 523 bp, Glycine max
  misc_feature (34)..(34): n is a, c, g, or t
  misc_feature (149)..(149): n is a, c, g, or t
  misc_feature (396)..(396): n is a, c, g, or t
  misc_feature (487)..(487): n is a, c, g, or t
  Coding DNA Sequence Number=SeqID_625
atgctcctgatctcgaacgtgatagccacgcttnatgtgtcgtactctccgtctccctactcgcgtggtagtcgggttctctaacatatatacatagacagaaaccatctctatctgcgccctcggatattaagagtcggtattacttncttatctcttatcacgaccgccgacgtgcgtgcgtcgcttatgtgcatctacttgcttgcttctgatatgctatacaatcatccgcagtcctgagctccgagttatcactccgcactgctcgaccctcaagcacccgcgcgcgcgactcgactctgaatcagaataaacaactgttgtggatgtcttactcagctctccaccatccacctgtatatgtctcgagtctcgcgatacaatctcgctcangaagacgcgcgatgaatacacatcataaacaagtctctttacctaactctgtaccatatctctagtcgttcacatcctctgtaatttatcnctatatatctctgtacaatactgtcacctacactca

SEQ ID NO: 10405 - DNA, 557 bp, Glycine max
  misc_feature (163)..(163): n is a, c, g, or t
  misc_feature (185)..(185): n is a, c, g, or t
  misc_feature (289)..(289): n is a, c, g, or t
  misc_feature (297)..(297): n is a, c, g, or t
  misc_feature (446)..(446): n is a, c, g, or t
  misc_feature (464)..(464): n is a, c, g, or t
  misc_feature (517)..(517): n is a, c, g, or t
  misc_feature (529)..(529): n is a, c, g, or t
  Coding DNA Sequence Number=SeqID_626
gacgccatatctcgtgggatgcaactcctctcccaccaccactccacccacaccgcagctggcgagaggttgtggtgatattctatatattatattgtgttaatttatagatttagacagctatcctcgtcgtgatatggtcgtatgtgatcactcacgttgnatcgtgcgatgtgtggcgggcntcgtacaaccgcgacgggggcgagagatatgacgctgactcctacatacgtagatgatgggactgctagcgcagcagacgtactgacgtgtggtgatgtgtcanctatgttngctcgacacacattgaaactaacaagatgtgtgatgttgtatctgcatcgctcacgatgtgatatatctatcctcacgtttagtactctgtgcatactcgccggctcgtatattcatatataatgaggctactgtcgagaagacctcgngctctgtacgcgatgacngtcggcgtacgcgcggccactcggtgtgtgcgtgtctattctgtgtgctatcnttcccgtgtcgncctgactgcgcgtggatgttcgttatgt

SEQ ID NO: 10406 - DNA, 526 bp, Glycine max
  Coding DNA Sequence Number=SeqID_627
cttggttctgagatgtggcgtgtccgattgtggccatcacgttgggtaccggcgggtgtgcatggttatattagtgtaacttttgtagttggtgatatcttaggggctgtcgcgggggtcgtgcagtcctcgagttctgcactgaggatcatgtgctgttgacatcactacccttagttactgtatacgagcgacccatatccgtcttcccgctactcactctagagtatgattgtgggtggagttatggttctgacacggggatgacgggaggggtacatgtagagagttagtaggggtgctgagaccactcatacaaactagggcctctagctattatcgtgttacattttctcaacactaggtgtggaactccgcgcgcctccctcggctacgtatagctgcgtgagtatcactaacgatctgtctttctctcttcgtagttatttgtcgctacttaattggatcttactcccggcggactctccctccacccgccgggaggattcctcttcatctgtagagg

SEQ ID NO: 10407 - DNA, 422 bp, Glycine max
  misc_feature (125)..(125): n is a, c, g, or t
  misc_feature (206)..(206): n is a, c, g, or t
  misc_feature (363)..(363): n is a, c, g, or t
  Coding DNA Sequence Number=SeqID_628
gaatcactacaccatactagacattcatatacatacaatgtgcattgacgttagtctgctatgcatagagtattgctgctcaataagatgagacagtacaccacccacacaccaggcgacactantccatcatacatcccatctatccctactcatacgagttgatatgattgtaactgagtgtgtgtcctcgtatacagtatagngatgataatgcttagagtggagcggagacgtgatgcgagatacgttagagcgtaccgacagacacgcgcagatgaatgggcatcactactagacacgcgcgcctgcatacatagcgctgcaccatatacaatcagcccatctaacaccgctcatggngcgacaccacgcacacgcgtcatcgtatctgccttcggtctctcatagtctgtatgcac

SEQ ID NO: 10408 - DNA, 433 bp, Glycine max
  misc_feature (102)..(102): n is a, c, g, or t
  misc_feature (117)..(117): n is a, c, g, or t
  misc_feature (139)..(139): n is a, c, g, or t
  misc_feature (144)..(144): n is a, c, g, or t
  misc_feature (149)..(149): n is a, c, g, or t
  misc_feature (167)..(167): n is a, c, g, or t
  misc_feature (176)..(176): n is a, c, g, or t
  misc_feature (178)..(178): n is a, c, g, or t
  misc_feature (186)..(186): n is a, c, g, or t
  misc_feature (200)..(200): n is a, c, g, or t
  misc_feature (206)..(206): n is a, c, g, or t
  misc_feature (210)..(210): n is a, c, g, or t
  misc_feature (214)..(214): n is a, c, g, or t
  misc_feature (219)..(219): n is a, c, g, or t
  misc_feature (228)..(229): n is a, c, g, or t
  misc_feature (231)..(231): n is a, c, g, or t
  misc_feature (254)..(254): n is a, c, g, or t
  misc_feature (257)..(257): n is a, c, g, or t
  misc_feature (264)..(264): n is a, c, g, or t
  misc_feature (270)..(270): n is a, c, g, or t
  misc_feature (276)..(276): n is a, c, g, or t
  misc_feature (322)..(322): n is a, c, g, or t
  misc_feature (342)..(342): n is a, c, g, or t
  misc_feature (378)..(378): n is a, c, g, or t
  misc_feature (387)..(387): n is a, c, g, or t
  misc_feature (391)..(393): n is a, c, g, or t
  misc_feature (395)..(395): n is a, c, g, or t
  misc_feature (398)..(399): n is a, c, g, or t
  misc_feature (404)..(407): n is a, c, g, or t
  Coding DNA Sequence Number=SeqID_629
tatataatcgcgtagatgaggatcaagaagacgtagatacatacaagagaaacactcatagagagatagagacagacaagaatgagacaccactgtggctcnggccagcggactgcncatcccagtattactccacggncgcangcagncaccagctacgcgccgancgtctcatncntgagcacnccctctgccatagnatcagncatnaatnagacnaagaaaaannanaaaaaacatagaatataaaagangcnaaatgtnacacanatgagnagaggagaatagtgtactagcagataggcgtgtgccgcctcgcttntatcgccttctccgtgggcncgcaggtacagcgcggtcgacgtcgctgtccgttangtgtagttntgtnnncnggnngagcnnnnagataatagaacatagccacatatat

SEQ ID NO: 10409 - DNA, 576 bp, Glycine max
  misc_feature (227)..(227): n is a, c, g, or t
  misc_feature (234)..(234): n is a, c, g, or t
  misc_feature (246)..(246): n is a, c, g, or t
  misc_feature (282)..(282): n is a, c, g, or t
  misc_feature (297)..(297): n is a, c, g, or t
  misc_feature (347)..(347): n is a, c, g, or t
  misc_feature (387)..(387): n is a, c, g, or t
  misc_feature (537)..(537): n is a, c, g, or t
  Coding DNA Sequence Number=SeqID_630
gcagccagatcgagagattagcgatagagaagtagagagagaagaagaaatagagaaggaaggagacagcggctccgcagcggcggcgacgaagaggaatcacacgaagaacaaacaaagaagagacacccagcagccgaaacaacagcagcacccagacaacaacaacaaccagaaagaaaaagcaaaaggaagaaacaacagagcggcaaggacacaacacacanacggagnacacgcggaagngaaacctaaccgacacaaaaggctgctaacagaganaagagggaacgcgangcatgcagagagaagagagaccagacaccagacacagagagagcacgcgngaacgaaccgcacgccaagaccggaggagacggaagaggntaccggaccacctacacacacagacacaccgcaaccgagacaagcacacagcacgctggcggaggaccgcgagcgagcgctcaccagcacgacaagaggaacaacggaaggcgtgaagatgaagatagatggagagggccgtccgcggtntggagggaaaagaagagacaacagaacgcacgagaccca

SEQ ID NO: 10410 - DNA, 541 bp, Glycine max
  misc_feature (26)..(26): n is a, c, g, or t
  misc_feature (118)..(118): n is a, c, g, or t
  misc_feature (142)..(142): n is a, c, g, or t
  misc_feature (146)..(146): n is a, c, g, or t
  misc_feature (162)..(162): n is a, c, g, or t
  misc_feature (171)..(171): n is a, c, g, or t
  misc_feature (215)..(215): n is a, c, g, or t
  misc_feature (235)..(235): n is a, c, g, or t
  misc_feature (263)..(263): n is a, c, g, or t
  misc_feature (270)..(270): n is a, c, g, or t
  misc_feature (282)..(282): n is a, c, g, or t
  misc_feature (292)..(292): n is a, c, g, or t
  misc_feature (327)..(327): n is a, c, g, or t
  misc_feature (390)..(390): n is a, c, g, or t
  misc_feature (395)..(395): n is a, c, g, or t
  misc_feature (409)..(409): n is a, c, g, or t
  misc_feature (414)..(414): n is a, c, g, or t
  misc_feature (485)..(485): n is a, c, g, or t
  misc_feature (487)..(487): n is a, c, g, or t
  Coding DNA Sequence Number=SeqID_631
ggctctatgtagtgatacgagataantacgagtatattatacgacgaagagtgcagacgcacgcgtgacacgtcactcgtagtatgtacagcggacgtcgatagacgctatgtcactncttgctctatgcatacggtgtgantcanctctacgtcggttgantcgagctgntgctatatgacgtcaagtttacgtgcacgttacctatatatctntatagcatatactgtacgantcagctatgatgacgagtcgatagctangcagatngctgtatgtgtngtcatatatncgtttcaatatcagtcgagtagcatatctctcaanatgatgacatcagacaagagagggaagcgatgtagtaacatgtagtggtgacatgattaggantagtntacttactactacncaagnattatttattatatgagatacatatgtacgacgctgttgatatatcatcgatatacatagttataacatgntnacagaatagtatatgataggcatgtatgacgatgtcgcgtctacgtgattggaa

SEQ ID NO: 10411 - DNA, 543 bp, Glycine max
  Coding DNA Sequence Number=SeqID_632
tcgagcgtctcgatgagttatatccccgaatcggacatccgggtgaaaattaatgaccattcgactttctcgagagcttccgctggtcaatttcgagcgtcttgatatattatgtcccctaatcgaacatccgtgtgaaaagttatgaccattcgaatttctcgagagctttcattgatcaatttcgagcgcctacatgagttatgtccccgaatcgaacatccgtgtgaaaagtcatgaccgttcgaattttcgggagctcccgctgttcaatttcgagcgtcctgatatattatgtccccgaatcggagatccatgtgaaaagttatgaccattcgaatttctcgagagcatccgttgatcagtttcgagcgtcttgatatataatgtccccgaatcgaacattcgtgtgaaaagctatgaccgttcaaatttatcgagaaatcccattgttcaatttcgagcgtctcgatatattatttccccgaatcggacatccatgttaaaagttatgacaattccaatttgtcaagtgcttccgtt

SEQ ID NO: 10412 - DNA, 575 bp, Glycine max
  misc_feature (31)..(31): n is a, c, g, or t
  misc_feature (33)..(33): n is a, c, g, or t
  misc_feature (54)..(54): n is a, c, g, or t
  misc_feature (126)..(126): n is a, c, g, or t
  misc_feature (432)..(432): n is a, c, g, or t
  Coding DNA Sequence Number=SeqID_633
aggtgtcagcgtacagccggacgccgcgaangncgctggcgtgggcgagcacgntgctgtgtgtagtgatgtgtgagagtgtgtcgcgcgccagattgcgccatgttgtagagtagagtagtcggnatatatatataactgtggctgtagatatatgttgcagagatatctgtgaccaacacagtgatgacgctacgcatgctcgtatactgcggtgagaatactattagaatacacatgcgcagagagacggctgtaaacaatctcagtgtatgcagtggagtagaaagtatatggagcaaatgaaaatcgaaattacagtgattcgcgacagcactacagtaatcatcacgtgaggtggtagagatacgtcgagagaatatgatacgccacatgacacatgtagtaagaacgctaatcagagagggaganaatgtacaatgcacgaacagagagacagtcgagcgtgtacacgaggatctcacgacaccatacatagtggctatcacaaaatcaacacgcgctataaggatgtcgataaaccatatgcgtgtatataatcacatctacgcgct

SEQ ID NO: 10413 - DNA, 403 bp, Glycine max
  Coding DNA Sequence Number=SeqID_634
agtgccacacagacacacgtacgcatggtacgttcgagcggcatgaagggaggacggcggtccaacaggaggctcctcaggtcgttcctgggcgcgtgcaggaagctcagcgccgagctgcagctgctcggcccgacggcgagcgcgtgggtgcaactcgaggccggcgacgaggccatcccggtggacgtgccgaggggccacacggtggtgtacgtcggggaggagctgcggcggtacgtcgtccgcgtgtcctccctcgaccacccgctgttccgggagctgctcgaccgcgcgcgggaggagtacgagttcgccgccgacgccaagctgtgcctgccctgcgacgaggacatcttcctcgccgtgctctgccacgtcgactccaagcacgactactgga

SEQ ID NO: 10414 - DNA, 588 bp, Glycine max
  Coding DNA Sequence Number=SeqID_635
tcgggtggttatttctgctcttgaagtgggttatgcttggtctttcttgaggcggctgtttctcattgtttttatcattggtaagtccacgtggttagacctttgttcttgtttgagttgacttcagttggtgaagctccggggtgtggaagttgtgcagtcccttggtttgaaaccaacgggttttccggatttcctggtaaggggctgtggagcattagctcaattgcgtgcagtctttgggtagttcattgcctaccatcgacttctttggctgctcggtttgaagatatgtttctcttgtggcttcttgttgatgaagcagttttatgtgtggtgttggagcgtttccctctggtgattatgctcgtggagatcatatttcaaactcaaataattagacgtgcatcgctttcattttcatctcttcttccggctcggtttagcttctcctttcctgcagtttatcgtgtatctccaccatgctcttcctcaacttttacttctttctttagtctggtttatgggtgtagtgtatgtgtatgtgtaaaactttgtctccggatggtgcctatcactttgccggct

SEQ ID NO: 10415 - DNA, 524 bp, Glycine max
  Coding DNA Sequence Number=SeqID_636
gaggaggttccggattttgttgcttttgatcctgccaagaagaacaagaagaagaatattacaattgttgatcctgctgatgaacctgtggaaaaattggctgagaagactgagaactcgtcattttccagaggggttgagactgcgtttactggtttgaaaaggaagatgagcaggcgtgttgaagtgggtaacttgaatgatgagagtggagatgcgattgaagatttggatgatcagcctgagtatgatgaaggagaaatggttgttccccaggctcgttatccttgggaacggagtgatcgtaactatgaatatgaggagctgcttggcgtggtagggaacatactacgtagtgacaatcccgaccttgctggagatgagctaatgacaggtatgatggctctcctggttcttcgatgcgtgccctagattgctgtccgttatactatgatggatctatgcactacgatgcatagtcgactcgactaggtcgtgagcttctagcttgcagcttagttcag

SEQ ID NO: 10416 - DNA, 181 bp, Glycine max
  Coding DNA Sequence Number=SeqID_637
tcgacgaccccaatgcattaggctttgactgaatcgcaccgtgctttaaatgacggaaatcgctgctcgagttcgtaatatttgatgtgaaatgttgtagaattgattgcgatgatttcctgttcatctagctgttttagttcgaagattacgattcaatgtgagaatgttgtgactgaat

SEQ ID NO: 10417 - DNA, 497 bp, Glycine max
  misc_feature (44)..(44): n is a, c, g, or t
  misc_feature (169)..(169): n is a, c, g, or t
  misc_feature (260)..(260): n is a, c, g, or t
  misc_feature (270)..(270): n is a, c, g, or t
  misc_feature (284)..(284): n is a, c, g, or t
  misc_feature (291)..(291): n is a, c, g, or t
  misc_feature (302)..(302): n is a, c, g, or t
  misc_feature (314)..(314): n is a, c, g, or t
  misc_feature (317)..(317): n is a, c, g, or t
  misc_feature (356)..(356): n is a, c, g, or t
  misc_feature (362)..(362): n is a, c, g, or t
  misc_feature (383)..(383): n is a, c, g, or t
  misc_feature (413)..(414): n is a, c, g, or t
  misc_feature (430)..(430): n is a, c, g, or t
  misc_feature (444)..(444): n is a, c, g, or t
  misc_feature (452)..(452): n is a, c, g, or t
  Coding DNA Sequence Number=SeqID_638
cgtatgcaatgactaagacaatattgcgcatactgtcagtgagnggtaggtgatgcagatgtatgagcattaagaattatatagcgatgtgagatgtggagagctatcgagccaccagagtggcgatacattctcgcgctacgtgtaagggtgaccgacgagcatgatntatctatagtctatcgtgtactcgacatcagtctgccgagaggtgcgtgcgtgagagagagtgtgcatagcatcaggttgcatatctagangacagagggngtaatagtcactancagcatngacgatcgatntagagccacacntcnatcacctataactatcttatacatacgatgaccagtagnagtatntacgaaatcattacacatatngtgtgtacattaactacgcacgacagaganncagtggacatatcatncacacatacatganagtgtaanccacacagacctagcatcgggagcggcgagaacggacactcacta

SEQ ID NO: 10418 - DNA, 580 bp, Glycine max
  misc_feature (157)..(157): n is a, c, g, or t
  misc_feature (206)..(206): n is a, c, g, or t
  misc_feature (448)..(448): n is a, c, g, or t
  misc_feature (460)..(460): n is a, c, g, or t
  misc_feature (474)..(474): n is a, c, g, or t
  misc_feature (516)..(516): n is a, c, g, or t
  Coding DNA Sequence Number=SeqID_639
atagatacataaccacccaactcgaccgtacatccagcgtgggtgcggcccactcgcacagatcttcacgattcctcttcctacttacttcgttgctcaactcctcactacaacagtaatgtgtgtggacaccacaacataacaatcgggatagtantatccgtcactaccaacgcatcttcaggagccacaactcatcgctctantcttcttctctatatcctctcactcatacattcctatacatactgctgacaacatcaaacaaccaccacaccacaatcagcaccgctgtgtgtgtgcgttgctctatcgtactatactatctgttgtagtgtaaatcttatctgcgctctcacacaagccacgtgtgtgctgtctacacacataccatatgcgtggtgatgggccatacatacacaccacgcgatcgcgtggacacattctntgttgctcagcngtatctccacaatncattagagagtgactaccataactacatcagctctacgaaangacacacactacgcagacagctgtaacacaaacataatatactgtgacacatctacgcactacg

SEQ ID NO: 10419 - DNA, 372 bp, Glycine max
  Coding DNA Sequence Number=SeqID_640
ttgaaaagtgcggtgttcttttgggggggggtttttgttctcctattcccccaaaagggggccccccccgccacaggtgggggttgacgatgcctttttggggtctccccggggtgggtttttggctgggacccccttttcgttgagaggcgcgcctggttattgcggctttgcgccaatggtggtttccgggcaaggttagggtggggtgggggcggaacctttaaacctttccccggtcgttgggcattgggggcatgtgatgcattcctttccgttttgctagtggtgccatcggggtcctgctgatcaaggtgctgtgggttccggcctgcctgtgttcgtttggctttttcgtgtatgtgctatcat

SEQ ID NO: 10420 - DNA, 470 bp, Glycine max
  Coding DNA Sequence Number=SeqID_641
gaactaagaatgacagttaaccttaataataaaaaacaaaagcaactcccaaaaaatcccaaaaacttgtggcttaaggtttgtctctaagctcgaccgctaattttgggttaaattagttttttttttctttactttattattttagttcaatttaatcctttaatttttcatatttaactaggttctctaatttttaaaaagaatttgatttgatctttgtcatccattttgtctaactaagttaagtttatatccgtttaagtgaaggaaacatcaacaactacctagactctaccgtttaacaattttgatagaatggacgacaaagatcaaattaaacccatagaacctaattaaatcggtaaaactaaaagatcaaattgaaccaaaataataaattaaatgacaaataaactaatttaacccttgttttattttgaaaaaaattagctcaccttcaaatgcac

SEQ ID NO: 10421 - DNA, 534 bp, Glycine max
  misc_feature (145)..(145): n is a, c, g, or t
  misc_feature (185)..(185): n is a, c, g, or t
  misc_feature (188)..(188): n is a, c, g, or t
  misc_feature (222)..(222): n is a, c, g, or t
  misc_feature (268)..(268): n is a, c, g, or t
  misc_feature (481)..(481): n is a, c, g, or t
  misc_feature (496)..(496): n is a, c, g, or t
  Coding DNA Sequence Number=SeqID_642
ttgcaagagtttcatctcgcacgcgctgacataagatgatactcgactccgccgcgctccctcactcgtgcatccgtcacacgcgacacacatgaccaacacatcacatagcacatcacgactcatatatgtctcacttcattanatgtgtgcatcatatctgctctgagtactgatctacagancanatcagtgtaacctacacataacacgaatagatantctgatcatgtctaatcctatgcagatatccgctctacgttgttcngatgcgagaagatagctaaacatctcatgatgcactgctcatcgtttctatggctgcgtgtgtctatatatcatatcctgctcactatacatctgagcatatgtatgctattatatgtatctcaatcacgcgcgatatgaatatctcacttatatctacatgatgatactatcgtgtatccatctcacataatccgcagtatatacacataantcatatacatgcgtngttactgaccatacacgcagcatctctgctagtattac

SEQ ID NO: 10422 - DNA, 417 bp, Glycine max
  Coding DNA Sequence Number=SeqID_643
cacacacctgtgattttcaactcgtatcactgcctgataaagatacccgtgaggcatttttgattgttgcagcgttgttgatgacagtgtcatttacagctgcttttactgtaccaggaggtgtatatagctctgatgacccaaaccctaaaattagaggaactgcagttttttctggtaaaccaacattctggatattcaccatcgtcaatatcataactatgtatagctctgcattggcatgtggacttctgtctatgggaatatttcgtcagtctgaattatctcgtacaatttcttttccgctcttgtgtatgatgcttgcctttctcatagcaccagtggcctttacgtctgctgtagttctagttgtggccaataacactttactcaaacgtgctgcatggctcattggag

SEQ ID NO: 10423 - DNA, 188 bp, Glycine max
  misc_feature (119)..(119): n is a, c, g, or t
  Coding DNA Sequence Number=SeqID_644
aagaaagctctttcaaactgataacacacttactttcaattatagccctagaactcacaatataataaccgtaaacaaagctaaatataatagctacaagactccaagaagagccaaantatataagtcagaaacaaatcagatcagacttaccaaaggacagaactacttcatctacaattatatta

SEQ ID NO: 10424 - DNA, 527 bp, Glycine max
  Coding DNA Sequence Number=SeqID_645
atgcgttactctgtacagccagcgctagcatgatgaaagaactgtcttttatagagaagaagctgacggaatgtatactgccttaccctatgcattagcacaagttatggctgagataccattatatcttccctcaagctgagacatacggatcaattgcttatgccatgatcggatgtgacctggactgcttcagaaattctcttaggcatctattgttcagctccttctaattgcctgactttactatctacggcatgatggctgagggagtgacgccaaaccaccatgttgctgccattgaggctgctgcattttatgcagtatggaatctcttctaaggatttatcggctgaagagctagaatgcacgtgtgacggacatggtactattgggcatgtccatgggctgggaccttgtaaggatcgattgctgctcactgtggagacataactgagagaatgccgcttgacgatagcttgatggtgaaagagttatagaagacatcttggcctaaaacatgactc

SEQ ID NO: 10425 - DNA, 365 bp, Glycine max
  Coding DNA Sequence Number=SeqID_646
gcgggcataatcagaggctagcaactcaagcctcaacaattggacgtctaaataaccctatcgagaaagtgaagggtccagctcaagtttatatagcgggtggcgtaggcacttttatcttgttaagcagacaaaaaggaagatgatccttttcgcaaacccacaccagggatgttgcatattatggagcaacacttcaactctggcatcgccattgatatggatcaatccttttatgctggtgatgcagccggaagagaatcatatcacaacgacgctgttattaaatctgcaaaggccattggcttaaaatctcatgtccctgaatagtacttcacctgagcatctaatttagtccttgggtc

SEQ ID NO: 10426 - DNA, 500 bp, Glycine max
  misc_feature (277)..(277): n is a, c, g, or t
  misc_feature (367)..(367): n is a, c, g, or t
  misc_feature (469)..(469): n is a, c, g, or t
  Coding DNA Sequence Number=SeqID_647
cttctcttaatttcctctatactcaagataaacacaagcgctgggtgtgtgcggtgagggattacgactattagtagttggtatatacaagattggctcgtatagtggtgtaatatattgccttcaggcaccctcctcatttctgccttattagagttgttgtgaatcatttctcttgacatatatacaaactctacacccccgattcatgagaccaacttaaaagagaagaatctatacatagttaataaactaacaagagaaagaataagagacnaaaggaatagttataagcaaaggcgacgtcccgacagaggacgttgacgggtcgcagcgacgcgtcacagtgagagatgcgagcgagctnagagatgaagagggagggttatttgtgttagagtgttgatgttgtcacacctccacacttacacctcatgacgacttacgcccaatgtcctcgtcgcgcagntgtcgcgcggcgcgcagttggcgcaataaca

SEQ ID NO: 10427 - DNA, 377 bp, Glycine max
  Coding DNA Sequence Number=SeqID_648
aaaaccaaggaatctcctccactatgctctctctatactcctcctctaccatcaaagcctcttttcattcttcctttcctcctctccgatcatcaccaccaccactctccgttggatctcatatccggctcgttaagcgagatcactccgtagccgctgcttctggtggtgtctcgatgtcaacgaacagagattctcacggatcgtcctcgcaggtcgctgaaccgtttttcagaagcgttttaggacagatggaaacggtttacctaaaccggaacccgacgcctagatcagtcttggagcttgtcagatccgttgatgacgagcagctttgctatgatcatctcgctttcaggacctttgggattggcggttat

SEQ ID NO: 10428 - DNA, 317 bp, Glycine max
  Coding DNA Sequence Number=SeqID_649
tctcgcatctcttttacagcccttgcttcagcggagagcagcagcaaccagtagccatggctgaacagactgagaaggcttttcttaagcaacccaaggttttcctaagctcgaagaaatctgggaaaggaaagagacctggcaaaggtggaaaccgtttctggaagaacattggcttgagtttcaagactcctcgtgacgccattgacggaacttacattgataggaaatgtccattcactggaaccgtttctataaggggacgtatcttagctggtacttgccactctgccaagatgcagcgaaccatcattgtt

SEQ ID NO: 10429 - DNA, 174 bp, Glycine max
  Coding DNA Sequence Number=SeqID_650
atgcctgcagattatactttaatcccatagaatatggcagtgactctaccacccctttgccagttgtaatagacaaggtgtatgagtctgatccaatggactcaaggagatcattatacatgaatgcagcgtagtgtggaggatcaaccatgttctaggatactcacaggaggt

SEQ ID NO: 10430 - DNA, 228 bp, Glycine max
  Coding DNA Sequence Number=SeqID_651
cttctcttgtcctttcgcgaagaatggaaccctctccctcacctcatgcctgaaaacctaccacgtcggcgactctgtcgacttcaagggtgacggtgccggtcacaagggaatgccccgcaaattctaccatggcctgaccggacgcgtctggaatgctaccaaacttgctgatggcgtgtacctcaactagcacgttggcaacacaattctcaggaataggattcc

SEQ ID NO: 10431 - DNA, 365 bp, Glycine max
  Coding DNA Sequence Number=SeqID_652
atccaatcccgattgaggctgtggggagcgagatcgcatcgactctccatccactcttgaaccctaatccaatccctatggaggctaaggggagcgatactgcatcgactccactccggaatcgagccacagagaggagcggccggttccatccagtgaagacggccggtgtgcgtccgtccacctgagttgagggatgggatcgagtccatccggtcgatcccagcaaccggaggagcgggatccgggtagagccgatccacgaacggcgctgctgctgctcgaggaccccgctctcgagccccctccacccctccctccacagctgccacagcgtgcgccttgcaatgttggcgtgtaggcca

SEQ ID NO: 10432 - DNA, 300 bp, Glycine max
  Coding DNA Sequence Number=SeqID_653
ttttccccaacctagcgctagctgaaggctctggcggcggcgagcgattcttggtccggcggcggcggccggctctcctgcctctccctcggtccctcccctcccctccatccggccatctcactcccctgccctcggcctccggcgcccagccctctcctccgcggctcccccaggcgccaggccaccagtccgcctccggcctcccgagcgcggcggcagcaacatccagcagtccggcctccgttcctcaacagccacaatacccggacgccggttggccccgccaaaacgcagctc

SEQ ID NO: 10433 - DNA, 161 bp, Glycine max
  misc_feature (75)..(75): n is a, c, g, or t
  Coding DNA Sequence Number=SeqID_654
ccacagacgtactggagcttccgttgaggccaaccccaaccaacgtcaataacggtgatgctgccatcgtcaagntcgttccctccaagcccatgtgcgttgagaccttcactgagtacccccctctcggtcgtttcgccgtccgtgatatgagacaaacc

SEQ ID NO: 10434 - DNA, 436 bp, Glycine max
  misc_feature (36)..(36): n is a, c, g, or t
  misc_feature (101)..(101): n is a, c, g, or t
  misc_feature (116)..(116): n is a, c, g, or t
  misc_feature (136)..(136): n is a, c, g, or t
  misc_feature (168)..(168): n is a, c, g, or t
  misc_feature (322)..(322): n is a, c, g, or t
  misc_feature (387)..(387): n is a, c, g, or t
  Coding DNA Sequence Number=SeqID_655
gatgatgatgccaagccggagctatacgtgcttgcnacgtgcttgtgggaggttagagagggtggatcggtaagacgcggatcgacgatggtcgtgagagnaggcatcatgcgacnacagtgtgtaagtgcggaantgagctgcctatcggacgtcgacacgccactnagaccgtgagccgtgcgcgctgagagtcggagagagtacgagaggagagtgatatggtgtagcgtgtatatagaagagagacgaggctcgcgtcgtgacgaggcgcggatgtgtcgtacgggtctgagtctatgcgggcgtatgaaatcgagtncgaagcgacgccgcgccgcggttaggctcgctgtacgtagtaacctcaccagacgtggagagatnaacagcgcgtagccgctcgctgattgtatgagaacaacgcgacgcgcga

SEQ ID NO: 10435 - DNA, 576 bp, Glycine max
  misc_feature (32)..(32): n is a, c, g, or t
  misc_feature (34)..(34): n is a, c, g, or t
  misc_feature (53)..(53): n is a, c, g, or t
  misc_feature (105)..(105): n is a, c, g, or t
  misc_feature (271)..(271): n is a, c, g, or t
  misc_feature (277)..(277): n is a, c, g, or t
  misc_feature (283)..(283): n is a, c, g, or t
  misc_feature (302)..(302): n is a, c, g, or t
  misc_feature (304)..(304): n is a, c, g, or t
  misc_feature (341)..(341): n is a, c, g, or t
  misc_feature (392)..(392): n is a, c, g, or t
  misc_feature (397)..(397): n is a, c, g, or t
  misc_feature (487)..(487): n is a, c, g, or t
  misc_feature (489)..(489): n is a, c, g, or t
  misc_feature (513)..(513): n is a, c, g, or t
  misc_feature (550)..(550): n is a, c, g, or t
  Coding DNA Sequence Number=SeqID_656
agttactctgacttgtctctcatatactctcntntaacgcactgtggtagtanatacgccggtggctacatcgacagaatatggctgaacgccacatccacattnataaactcactacaatatcatgacttacgcacacgtgagtgacacgtagtaagcagagagataagacaagagatcgaccgtagaggttgaggtctctattgctttcatcctagatacacgagagtatacatacacacctgcatatctatataatatactctttctnaacctnactctngataacatatcgtcgctgnangctcaacactctttcatatagttatatatatatatangataagatgtgttatatatcactctcataccttcagcctcgcgaaggagcngagtncgcagcgtagacagcgaccagcatattatgcgtatgtcgccgcgagccctagctagcggggtattataatataaagaataaacgaccggntnacagagggtgggggggggggtagncaggatctagataatactcgtgctatcgcgtcctcgntctatagctctgtgtaggaagtgata

SEQ ID NO: 10436 - DNA, 576 bp, Glycine max
  Coding DNA Sequence Number=SeqID_657
tatctctgagagacgcaatggctctcccagactcttctttccgtcgcaactccctgatcccctacttcatctactcctcttcctgcaaaacgctccctgtccaccacatgctcaacaccggctccgctgacgacgacgccgctccctacccgacgacggccaatctcgacgccggatcgcgtggcctcatgactccctctcccagcgagtcacgcaagatcgagttgtactgccccgccttctacgccggctgcaccgacggtggaatcctccactgtggcctcactgtcatgaccgacgctcctcccgacctagtcaagtggaatatgcacatcgaccctgctaagtacaagagcatctcggccggccctgggggtttgcttaaggagcagggattcaagggctattttcgaggctgggtgcctaccttgcttggttataacgctcagggtgctagcttatttgcatccatactacgtactttatgatagacatattctgatgttggttgccaacagaatctgatcgagaaccttaccttgatatactgtgctgattaaatttatggtccggcca

SEQ ID NO: 10437 - DNA, 573 bp, Glycine max
  misc_feature (124)..(124): n is a, c, g, or t
  misc_feature (306)..(306): n is a, c, g, or t
  misc_feature (478)..(478): n is a, c, g, or t
  Coding DNA Sequence Number=SeqID_658
gagtgcgcggcaaacgataacaatacacacactaaactcgcacccaccaccgcgcacgccacccgtacaattccatctctcatcatacctctagtcttttcacgagaacaacagagatacttgnagagggactggtggtcccggtctcgctctatagctataattaatgaagtgcataataggggggaagaagatccggtgagggcgcggtagaagtatagcagtaattacatccacataccatacataatatatatatataataaaattaccagaactagtatataataataatagttgttaatntgtcttatattgtttgcggagtggtgtgggagtttttttgtatttatttctttgtccccctattcttcgtcctccgcaacttgctggcacgcatactgtaacaatatttttatatgaagatggtggaggagcgcaacaaaacgcaaacacgcacagacaagcggggcgcctnccactctccctttcctttttcctccctctccttcataaaaacataatattattaatatccacatcatacctatactatcttctcaacctcctcag

SEQ ID NO: 10438 - DNA, 549 bp, Glycine max
  misc_feature (57)..(57): n is a, c, g, or t
  Coding DNA Sequence Number=SeqID_659
tcgaccgtgtgtgattgatgttgacgcggaatagtagaaagttcacgctctggaagntgaacgctatttgtagcgccgtcaatgagccgtcacgtgttttcgacgcgtcaagagcgtgttttgggtggaaccggcggtggaaccacttaagccgcttcgaggggctggtccttgtctaacgcggctggagctcccaggtaccttgcagcgcgtaaatgggccttgcagagacatggggacgccagccgtatccctgctcaggtaccgcactggctcacgaccagccaccagcattccaacatcttcgccctgtcagacggctcaagacgcgttcaacatgggagtcgcgtcgagatggtaccccgctgacttggaccaagctcacagcttggaacaggggccaatttgccaacctggaaaaagcccggtcaccaagtgggttgtccgaacgtcattctcccttatcaatcagtaaacatgatcatcagcgcgtcttcccagtggagatcttacgaggcacagacgagaattgctccagctcggtcgttc

SEQ ID NO: 10439 - DNA, 461 bp, Glycine max
  Coding DNA Sequence Number=SeqID_660
gccgtcgtctctttgattgatctttgtgggaattggaaatggcggaatcaaaggttgtagttccggagtcagtcctgaagaagaggaagagagaggaggagtgggctctcgcgaagaagcagagcgctgaagctgcgaagaagacgaacgccgccaacaggaagcttatctacaaaagggccgagcagtacgccaaggagtatgccgagaaggagaaggagttgatctcattgaaacgtgaggctaagttgaagggaggtttctatgttgaccctgaagctaagctcttgttcatcattcgtatccgtggtatcaatgccattgacccaaagactaagaagattcttcagctcttgcgtttgagacagatattcaacggtgtgtttctcaaagtcaacaaggctacaatgaacatgcttcgtcgtgttgagccctatgtgacttacgggttccccaatttg

SEQ ID NO: 10440 - DNA, 323 bp, Glycine max
  Coding DNA Sequence Number=SeqID_661
cagaagggggccttccatttggaagggttcctcaaatcgggccaaggggtttttggtttttggagtttccgcctttgtaagggtccccttaggggtttttactgacattgggggattttttaaattttaaactgctgggggatcattccttgggggttttttttgcccccattttttttttgggccatgagggggggtatgtagggtttttttagatttgttgaaagttcaatttataggggggggcccttgtagtggggaaatgtatgctccccgggggggcttgtctgtttttgttgctgtacatcaaggaaacatttttt

SEQ ID NO: 10441 - DNA, 547 bp, Glycine max
  misc_feature (30)..(30): n is a, c, g, or t
  misc_feature (56)..(56): n is a, c, g, or t
  misc_feature (83)..(83): n is a, c, g, or t
  misc_feature (118)..(118): n is a, c, g, or t
  misc_feature (177)..(177): n is a, c, g, or t
  misc_feature (204)..(204): n is a, c, g, or t
  misc_feature (301)..(301): n is a, c, g, or t
  misc_feature (366)..(366): n is a, c, g, or t
  misc_feature (425)..(425): n is a, c, g, or t
  misc_feature (448)..(448): n is a, c, g, or t
  misc_feature (488)..(488): n is a, c, g, or t
  misc_feature (512)..(513): n is a, c, g, or t
  Coding DNA Sequence Number=SeqID_662
gagtggcgcgctgaacctgctccttcctcncctccatagaggataggcagaaggtngattaactcttccctcaacatctctantaactgagtcttataagcgaggacgagaattaagnttataatgtttttgaagtcttgccagcggcatgagaggtacaattgcgtggctgttctnttgtgtgtatgttttgttgtagtgctnggtttatattcaactactcgcggcgtggagaagacacgagcgtacacctatctcgtcgttggatcgtcttactcggcatttgctgtgctcgacgagngcgactggctccagtggcactgagccacacagagtagcacgagcgcccagcaggagccactactnaccttctctccgcgtgagcgggtgaacgtatgataggatgtgagagagtctcttttttntcgtgatgagataagactcgttnccgttacatataggaaggagaggagccacccaccaacacntctactctagcgccgagaaccccnncgcagcacgacacgcagagggacgggaccacgca

SEQ ID NO: 10442 - DNA, 342 bp, Glycine max
  misc_feature (96)..(96): n is a, c, g, or t
  Coding DNA Sequence Number=SeqID_663
caactcatggaaccgcagctttataatcttcgacgaggaacatagttaccggaactagataggtgaaccctgaacttttctggaaaccttagattncacatgtgtgctcgctgttgtgtttcttgaacagaccagatgcacctggcgttgatttggaaggggcgaaaggcccattttggcatcaaccacgggaatggagatcacctgctgcgtcttttgtgtgttgatcgttagttctgacctgtcgcgtcgtataacatattctattagtccagtggtcgtttgcaggtacaaactgtaggtgtgtagatgttggtggtgtttttggagcacagaacctta

SEQ ID NO: 10443 - DNA, 570 bp, Glycine max
  Coding DNA Sequence Number=SeqID_664
gagagactccactgagggcgtgatatatctggaaacctcacgtcttaggtcagctattggagggaggagcgcgtgggcgagagctataccctccgaacataactactgaaagacactgccgtaggctgtacaataatgcgatttgtatttatctaccttctaattctgattatacctctctcacaacacccgcgccacacgatgccataaaatgatagtttggtaacgcttattagcttgataacacatttcttatctgatgtctgtttatcgtgttagtattagcatcgttagctctcgaaagcaagaggatagtaatcacgagctgatgcgagcccgctcgtcactctactacaccagagaatagccagcgaccagcgcagaccttacgctctcagatgcagtcgttccctttccatctcatcctgtctaccatattacatcctcctttgtttcgtagtgacgacgcgtagcgatgcactatttcgctcgcaacgcaatacaggcatgtgccacacctgtggcctgatgaagagccaggatgcgagttggaatgctacgcgcccatat

SEQ ID NO: 10444 - DNA, 580 bp, Glycine max
  Coding DNA Sequence Number=SeqID_665
gtgcgcgcgactctgtgatgataataataggagaaagacggacgcggcgcgacatcgtgcgtcactatcctttattagctcaatatcgtggagcgcggcagtattataaagcgtgtcatcatcacggggcgctggccgcgcgtgctctcccccatacaaaactcctctctccctcgccgcgtataccatggtgctggattactaatttaacattctcgagcatcgcacagacgcaccggccgcgcctgccggcatataacgcacctccgccatccctcacactcttctaattgagtagggcataacaggcgggaggcggtttgtggggattatgacagatatacaaacagcgtgcgggttgtgtttcagagcgttgctttttgtaaccatcgacaccaatacaacgtggatgaattggttaagagaccaactccgccgtcctttctcgcactcccccggcgcgtgcggggcatacaacccctccaatgatcggcagcactcgtccgcgacacaaaacgagagggagcagagagacaatgttagtccgaaaacacggatggcacgccattaaccgaagagc

SEQ ID NO: 10445 - DNA, 424 bp, Glycine max
  misc_feature (354)..(354): n is a, c, g, or t
  Coding DNA Sequence Number=SeqID_666
gcgattagggtttccccgctgccaccgcctccagccgccggcggccccgcctcaagccaccgtccgctggccgcgcctcaagccgccgcccgctggccgtgcctcaagccgccgctgccagacccgcctcaagccaccgccacagacccctttgtcaagcaggacggctgcccgcttccggcgccgtggacgtcggcttccgagctcgactggatggacgccgacccccttctccgctgatatcgacggcggctgctcctccccgatgccccactccgccccactctccttccatggctgagacgcccctggttcgtcgccgtcgtcgtcaacgcactgccctgacgcccggcncctgcacttctctggacgccatggccacccactgctagttctctgattgtccatcgagtagcagatgctt

SEQ ID NO: 10446 - DNA, 336 bp, Glycine max
  Coding DNA Sequence Number=SeqID_667
ggataagtcgatttgatagcgaactagaaagcgagagatcgaagcaagtgatgccaggaggtgtgcccaagctcccaaagatccaaccggcggatatccaagccgccataggatggggtgtcgccgccgcagccggcgccatctgggtcgtccaaccatttgattggatcaagaagacgttcattgacaaaccagcaactgaagagaactgatgggtcgtcaccaagatgtagacttttctttgccatgggactgaataaagttttggttctttttctggggatttttgttgtttcatgacttcagtgtaaacttttttgccttctcaaatgttat

SEQ ID NO: 10447 - DNA, 599 bp, Glycine max
  Coding DNA Sequence Number=SeqID_668
tatacccgtggttaagatactagaattaaataatggcaccgagatagtggaggaagaaataacttaaattgcggatttcaataataataatatctctttattctttatcgttttctctcttttcttttccttcttcttctcctctctctttgcctccaaaacttttacttagtttttatacccccctccttcttcccttccccttcttctttgaacactgtcaacagttgtggtgtggagtttattgttggattactttttgttatcttcaaaaatggaattcagctatttctcttttctctccttctcttcttttagagagctagagtttaagcgttgatggacttttgggcagtctcctttctttttttttgtttgtattttttgaagagaaaaaaaataatgcatggaatagaagataataaccaacacaaaaattaaagggcgtcctataataataataatcaacttggcttactgctagaaacaacaacagaactttctttcgaggttatgttgttgtattatcataactgtacaggtagaaatttatgtataaataaataattgtatacggttaaccgaatgctcttgtttct

SEQ ID NO: 10448 - DNA, 458 bp, Glycine max
  Coding DNA Sequence Number=SeqID_669
gtagaacgcagtcgccgcccgacaccacttcacacactgtttttccccgcaaaaactcgctccccacccactggtatacgcgcttcttcccccccgaacgcggcccatcccctatcctcacaaacggctcgcccccagagctcaaccctcctcctcgcacactccctatcacacccgggcccactccgcccgcccccgccccccttcttgtcaatgcctgcgcaccctccgcccaaattcgccaccccccgtcgcgtctcctcgcgccctccctctgccgacagaaggccgccctcaatctaccccagtcccgtatcttgcctactcctctcccgatcacatgcgccgcgcccttcacatcacgctcgtgtcctctatgcctccgtcccgctcactcttctccgtgcactccctcgggctccttccccactcgtacactgtacctcatccccgtacta

SEQ ID NO: 10449 - DNA, 524 bp, Glycine max
  misc_feature (274)..(274): n is a, c, g, or t
  misc_feature (439)..(439): n is a, c, g, or t
  misc_feature (445)..(445): n is a, c, g, or t
  misc_feature (448)..(448): n is a, c, g, or t
  misc_feature (456)..(456): n is a, c, g, or t
  misc_feature (459)..(459): n is a, c, g, or t
  Coding DNA Sequence Number=SeqID_670
gtgcccgccaacattaatagaccgatggatggccgacgatgaccacgcgacactaggtatatgaattaactcacttccaccattccctcaccaacctccgagcgccactctgaggtgagtctcggcacactcagaatttagacctgtcatacttacaccacaccaacatatcagataagtactatctcgtatcacagcgaacaacatgcgtagatcagaaataataatacaacctacacacatcgaagacagatacacgggcgtcgtccgcaanctgtcgacggtattgcttgcgttattgtatgcgcgggaaccgccgagcaccaccgcgagtctctgagtggtctactcgaacatggctcgaccgctgccgctagtggactgtccactcacgctctactcgcatatccattcgtacgacaactgtacgtgacggaancacgangangagagctncgnggaagcggtggcgcgcgtcgtaattgacacgtaggcgtagatgctcatgcgctcgatgcagtata

SEQ ID NO: 10450 - DNA, 375 bp, Glycine max
  Coding DNA Sequence Number=SeqID_671
tctctgcacagttcattctcaaattccaattttttaattccatcccgtggcttatttaaaggccgtttgtttccctcatgtggaaaaaaaaaattaccatcgaattgtgacggaaccgatatggcatcgccgaacaggatcgaacgctcccaccatatgtaccgcgactgacgttacgaagaggcgttagggttctacacggatgcaatcgccatggccaaaaccaaccctcagaacatcactttgcatatcaaccaatccacgtgctatctcaagcttcacgatttcaaaaaggcagcataagagtgtacttcattgcttgaacttgatcacaagcacagttgtgcattgatgctgcatgcttaaacgctattc

SEQ ID NO: 10451 - DNA, 407 bp, Glycine max
  misc_feature (37)..(37): n is a, c, g, or t
  misc_feature (44)..(44): n is a, c, g, or t
  misc_feature (120)..(120): n is a, c, g, or t
  misc_feature (123)..(124): n is a, c, g, or t
  misc_feature (126)..(127): n is a, c, g, or t
  misc_feature (137)..(137): n is a, c, g, or t
  misc_feature (289)..(289): n is a, c, g, or t
  Coding DNA Sequence Number=SeqID_672
tcgacagattttgagccattggtggagatggcatccntatctantcagccacagttccgttacactcagccggccggcaagggtgtttcattcccccgacttgggggggggggggggccnaannannaaccttattnaactttggaaaccccttttgaaaagttgttaaccccaagggggggggtggggggaaaaacaaaatccaggtttttttggaatttgggaaattagaatccgcgcccttgccatggaatacatactagtgcccccacccgcgaaggctgggtangatacaaaggagaaaccggaatcccaccaaatttcccaagggggggggagaatgggggggtgtacacgccggcgcggaagggctcctcggggaaatgtatttcggtttagacagaggg

SEQ ID NO: 10452 - DNA, 198 bp, Glycine max
  Coding DNA Sequence Number=SeqID_673
ctagattaattcgttacaccaaagtaaaagaagataagataactataatagtctaaaccataaccaataacattataatatataaagtccctactctaaaagtaactaccctaaagttcactaaaactaccataactagaattaaaaaaactaataacaaatacctcacctttaatcaactaactcttagagctccac

SEQ ID NO: 10453 - DNA, 509 bp, Glycine max
  misc_feature (115)..(115): n is a, c, g, or t
  misc_feature (361)..(361): n is a, c, g, or t
  misc_feature (475)..(475): n is a, c, g, or t
  Coding DNA Sequence Number=SeqID_674
cactccctccttatgagtctatatgtaatacatctctcactgaatacactctgtaatatatcatcatctatatatatttcactaacagttgttatatacatccttatctacttgnttgctgcagacgacactgcttacactgcacacataacacaactaatctctcacttctctaccggatctatatctctccgctctagtcgctagctacctagcatcccccgcacatcagtccggcacgctgctgtcctactcgtgaacgcctctactcgcatcacacctgtcgttatgtcacttctctcactctagaccagctatctatctctctcttccttatacatcatcgtatctagtatcacantctcatatatcactacgctcgcatcttacctgcttctactcacccttcacattacgctcaccacatgctactaaacctcgcttatatccgacacatacacctctgagctatctnttcatcctaatattatgagtatccgtctctgata

SEQ ID NO: 10454 - DNA, 418 bp, Glycine max
  misc_feature (382)..(382): n is a, c, g, or t
  Coding DNA Sequence Number=SeqID_675
tcccaggcttgtagtgcccatagatgtaaagaagcagccatgggagcaggaggttcctctccacaaccgctggcacccggatatccctccggtcgccgatgtgactcaaggggaattattccgtgttgagatggtcgattgcaccggtgggcaggttagagatgatgactcggcggacgatatcaaatctctggattttgcatcgcctcactatctcagtggcccccttagagtagtcgatgccgaaggggttccagcttcacctggtgatcttcttgcggtggagatctgcaacctcggcccgcttcctggtgacgagtggggttatactggaacatttgaaagggaacacggaggcgggttcttaactgaccacttcccngagtgcaagaaaagccatttggtatttcgaaggaat

SEQ ID NO: 10455 - DNA, 128 bp, Glycine max
  Coding DNA Sequence Number=SeqID_676
ggagcaaatgggtccgatcggtcctgggagtttgattctgattgcgattgtagcgctcattatttttgggccgaaaaagcttcctgaattaggaagagcagcaggagatacattacgtgaattcaaaa

SEQ ID NO: 10456 - DNA, 475 bp, Glycine max
  misc_feature (178)..(178): n is a, c, g, or t
  misc_feature (249)..(249): n is a, c, g, or t
  misc_feature (331)..(331): n is a, c, g, or t
  misc_feature (391)..(391): n is a, c, g, or t
  misc_feature (396)..(396): n is a, c, g, or t
  misc_feature (420)..(420): n is a, c, g, or t
  Coding DNA Sequence Number=SeqID_677
tccgtctgctagagcgctatatctgacatattttaattcctgatcgtggtatgtgtagcttatatgtgatataagtgctaatgcgcctagtcttatttatgttggtatatttatttgtatatgcagtattcgagtcgtctctagctgctcggtctctattcagctcgcgcccacgggnccctcctgtcctgtgtgttctgtcttgctctgtctccacgggactctccatcttgtctcctacgtattctncctccgtgtatcgctgtcgtcgcatctcgccctgccgctcgtttgtagtgtgcgcgtcgtcgcgagggttgagggggggagngagaagtgctcgcggcggctcggctgcgtcgctcggcgtcgatacctgtcgctcgtgccnccggncgtaatatgcgtttcatatcaatntcctctcgtcatcgctcagcgtctatctgttcacgtgtgcgctcagggattatac

SEQ ID NO: 10457 - DNA, 541 bp, Glycine max
  misc_feature (64)..(64): n is a, c, g, or t
  misc_feature (96)..(96): n is a, c, g, or t
  misc_feature (106)..(106): n is a, c, g, or t
  misc_feature (342)..(342): n is a, c, g, or t
  Coding DNA Sequence Number=SeqID_678
aagcacggcagtcgagcgtctctcgctcgatggccgggactaccgacgagggagtagtaccganttatatcggataccctgcggtacgctcatatnagatgcgatntcgtctactaataacattctatacctgttcgtacaatcatacgtatcttaggaggcgaggcggtcaaggggatacatcctacgtgagttcgtcgcggaacggcctctagagtggatagaccagacagagagtgatagcgggtgacgtaaccactgtgtgaactctactgactttctgcactatacttctagtgttctggctgcgccggccataataaaggctataatatcgtagcngagagaatatccactacacaggcctcgagagagagggtataagaagggtatatgttgtggatactggcctgcctcggacacggcgcgcggaggtagtatagtttgccaagaatgctggcccagcaccgacgggcagctggaagaggcctatacttctagacataaccgagagagaaggtgcattcaaactgacagtggc

SEQ ID NO: 10458 - DNA, 563 bp, Glycine max
  Coding DNA Sequence Number=SeqID_679
gaaggccacaaagtcgatatagtcaagtacatcgattacgtcagtgcccctcaagccggcgccatagccacattctctggcactacgagagacatgttcgaaggcaaagcagtcttggagctaaggtacgaagcgtacgtaccaatggccacgcgaaccctcacctccatctgcacatccgctagatcaaactgggacatccacaagatcgctgtcgctcaccgtctagggccagttcccgttggagaaaccagcgtgttcattgcggtttcatctgttcaccgtggggatggtttagacgcttgtaagttcttgatcgatgagctaaaggcaacggttccgatttggaagaaggaggtgtacactaatggagagatctggaaggagaatagtgagtttctggagaagagagacggtctagtgaagaaagaacataaaagaagttgctgtggaagtaaagttagagtacaagaagatgaagaagagcataaagataacagttcttgattacttatagcaaagagcaatgtttttttttttttttctactctcgataagcaaat

SEQ ID NO: 10459 - DNA, 550 bp, Glycine max
  misc_feature (189)..(189): n is a, c, g, or t
  misc_feature (327)..(327): n is a, c, g, or t
  misc_feature (379)..(379): n is a, c, g, or t
  misc_feature (473)..(473): n is a, c, g, or t
  Coding DNA Sequence Number=SeqID_680
ttgagatccgtacatatctccgcacatgcggatcactgccgatctgcgtcgctgctagcgcgtaagagtagtgagcacccgtttagttaattatgacgactcgcgtcgctcgaactatattatcattctacaggttaacgcgcatctgtagatatgaacagagagaaagactctgcctactgaccgcgntaacgtcgcactctactgaccctcgtacatgccgcgcgatcggtgcatgtgtccaatcactgcactccgtactatcgatagacgtctctcactacgtctgaccaccaatcgatagaacgctatccgtagctcagacanactagcacgggcggtcgcatgtacgctcgacatggatcgagctgtcacgcgntactgatgtatgatatcatacagatgtgtcacacgtgactgcgtattagcgagtcacaccgcaaaacactgcatcgacatctgtccggtatcgncacttgagatacattgctcatctatattacactattggacatccactatctgtcgctctcaacgctgatgctatgtt

SEQ ID NO: 10460 - DNA, 588 bp, Glycine max
  misc_feature (97)..(97): n is a, c, g, or t
  misc_feature (159)..(159): n is a, c, g, or t
  misc_feature (183)..(183): n is a, c, g, or t
  misc_feature (189)..(189): n is a, c, g, or t
  misc_feature (232)..(232): n is a, c, g, or t
  misc_feature (285)..(285): n is a, c, g, or t
  misc_feature (334)..(334): n is a, c, g, or t
  misc_feature (348)..(348): n is a, c, g, or t
  misc_feature (402)..(402): n is a, c, g, or t
  misc_feature (406)..(406): n is a, c, g, or t
  misc_feature (422)..(422): n is a, c, g, or t
  Coding DNA Sequence Number=SeqID_681
cgcgccacacatattcctatattacagtacgtcgtgttcgagctgcggctcgttcgtccgacgagtaatccaatatctcacccacatgtatctaatnccaccgagtatcatcgacagagcgccaccgctccacgcacgtaccgctctgcgacaatcatnactgtcacgtacatatagagacanttatcncacgcgggtgataacacacagatatatatgcagcgcgtcgatntactgagataggagctcggcgaatcaccgcagctatgtctatcacaccacgcnactaccgtcgccacaccattgcgtcccaagcgagtgagcggcgattatnttcacacagtcgcnaccgatccgcaaaccagcacacaataacaagcggcagcgcaccgccgagatggngagnagagcgagagatcatnaaatcgagaatatcctcgcatcgggagggtgagtcgaagacgtagtatatgttcatgcacacgacacacgctgttcatatcgcatatatatcctccccgtcttctctcgccgagctggccgacgtatttggagggtcgctcgaccgcaccaccagatatgacacta

SEQ ID NO: 10461 - DNA, 535 bp, Glycine max
  misc_feature (484)..(484): n is a, c, g, or t
  Coding DNA Sequence Number=SeqID_682
ttacttaaaatgtcttatggtgccaaggtgttagaaattatagctgattttgcaaagcctactgcaccacttcctggtgtttcaaaaaaagttcacatgtatttacgtgtctccttttttaaattatttaaaattgatttataaaaatatgttaaattattaaaaattgatttataaaaatatgttaaattattaaaaattgatttattaaatttatcatattgttaactaaaattaacactttaattattctttatagaaaaatattaataaatgtcctaatgacactaattaaattattaaaaattaaaagtaattttttttattaaaagatgcaaaattacatttcatataaaatttttatttctcgtattatgatttacgtattaattctttcaaaaaataatttacatataaaaaatttctttcaattttttttcttttttcgtttttttattacaagacaaatattttggtatagcanagattttatactctattcaggattgggaggatgtcctgatctgcatagaag

SEQ ID NO: 10462 - DNA, 305 bp, Glycine max
  Coding DNA Sequence Number=SeqID_683
tcccgattctgcttctgcactaaaaaggctcccgcctcatagaaaacctccaggggatctggccgagacaccgacagacccctttggtatccggtcgaccgagcgcccgaatacctacatagcagtcttgtcggagatgaccggttcaatccgttcgtgctatggacacacacggagtgcctgcatttcgagctgaactgttctgaaccagaccctgcgcgatcaacgaggttggtgactatcattgtaaccaagaccgatctcgcggacgtgaatgtctaagcgtgattcagcccttcagtgat

SEQ ID NO: 10463 - DNA, 434 bp, Glycine max
  Coding DNA Sequence Number=SeqID_684
tatttattcatttgtctgccctctctctctctctcctcgtatctctcatctccttgcatccatgccctaatacccttttctgcataccctctttcccccttttccattcctctcatgcaatccctctccctgcttctatttgatccatagcccacgctgcaggattggtgcaggctattgattctacgtttctaactttccataatacaaggatgcatatatgaacaatgaaagaaaacaaatcatcagcacctaaaatgcttaacaggaactgggttttaaagcgtaagcggagaaaacttcctttaggactagatcagtcatctggtaaagagcaatccaatggtaaagaagaaaattcactaacatctgaatcttctagaaatgcttcagctaaacgtgtgctaaagaccgaagtagctactgatcaaatt

SEQ ID NO: 10464 - DNA, 564 bp, Glycine max
  misc_feature (60)..(62): n is a, c, g, or t
  misc_feature (64)..(64): n is a, c, g, or t
  Coding DNA Sequence Number=SeqID_685
gtctcgcaactgtagctgatgttcgtatgctctaatcctattttacaaaaccccctgtgnnntntttatctatatcataataagaaataattaatcatcacaatgtgctggagataaaaagagggcaccgacgtagatgtgtagaagtagtgaagctgcagtgcgagcattgtctctgtccagtagtcgtagctgcgagtggttgtagtgaaagagtacacatacctccatcacctttaagatcagataacctccaccaaccaccacacacacaggcccaagcacaataataattgatcataaattcacgttgctcggacactccgcacagtattgctcaattgtagcaggcagcacacgcgagatgagtgagagcgcagtgtcggctacggcgctaacgcgtgctgtagatcgcgctcctgtaccgctctattcttcccctaggttcctgtaccacattctcacttctaggtacgtccttcgtgcggtgcgtcaatcagcgtcgctagagcgcctctgactagcccacgcgacgcgaagtgtgttctccattcaactactata

SEQ ID NO: 10465 - DNA, 571 bp, Glycine max
  misc_feature (415)..(415): n is a, c, g, or t
  Coding DNA Sequence Number=SeqID_686
acaagaggaccaagggcgtcgcgcccaagtccgacgatgtctacctcaggctcctcgtcaagctctaccgtttcctgggtgaggaggaccaagaggaagtttcaccgccggtcatcctcaagagggctctttctgaacaaaaattaaccgccccgcggttctccatggcgccgcctcttccaacttcatggaggggaaagggagggaaaaaaaactttttgctgggggttggttgggaaccattccacagttggccttgggggattcccaagagggccccccagcaaagtgaagggttacccgctttctcgaggtgttcacaagaaacacggggggggggcaaaggaattttgtccaaatggcttgggggggcgaagtgcccctccctttttttgaaccaggttttggcaccctncgtggccctccaatgtgggggaaaaaaacccttttctttggtttgggggggaaacccccaacaaagggcctcggtgggagggggtttaacctcctctttccgaccaaaaggcccctgtgggtgtggcccgcaaaagtctcttagccaagtgtcctt

SEQ ID NO: 10466 - DNA, 522 bp, Glycine max
  misc_feature (429)..(429): n is a, c, g, or t
  Coding DNA Sequence Number=SeqID_687
cacccactcgctaatttatcactaaatactgtctccccatttgtcgtttgttgatcggagaacgccacattactatcgtgtgctcctctaatcacccggactgcactcctacaccctctacgctggttttgtcacataaaaaaacgcaacagtcacacctatacacttcttcatccacattcatcctccgatgacgtcaggtaatgaatgtatcttccagtgtcgactcctctcttaaccgctagttctcgttcctctatgctcctcgatacgcttgcgcgcaccagtccttctcaccacctaagcgatcactgctcctttcttgaaaccgacccacccccacaatcgcacaggcccagaatatttctcactcttctttcagttgtcaaatgccgatagctccacgacaagaacccctaacaacccttntctcctccgttcaattcattactataattctgactaagcgggatactacacatacaccatgagtccgctgatccggtagcactccatctgtga

SEQ ID NO: 10467 - DNA, 554 bp, Glycine max
  Coding DNA Sequence Number=SeqID_688
ataccgacctgatgcctattcttgggatgactttccacctctcaaggacatccttgatgctatttgcgtagcgtttcctggaagcagattcaacagcttgcttttgaataggtacaacggcgccaacgactacgttggttggcatgctgatgatgaaaagctttacggccccactcctgaaattgcttccctctcttttggatgcaaacgtgactttgtgctcaagaaaaagaaacttcaagactcttcccgtgagaaaagaggagagggtggaccagcgaagaagaggttgaagaaaagcagcagcggagaggaggatcagcatagtttcgcattgaagcatggatcgttgctggtgatgaggggatacactcaaagggactggattcattctgtgccaaagcgtgcaaaggcggagggcactcgtatcaacctcaccttcaggcttgttttgtaaaccatgcatcattcatcattcatcatcatcatcaacaagcttagcttgatctcaagtcacattgattgactaggcttttctcatcttagttcttcga

SEQ ID NO: 10468 - DNA, 542 bp, Glycine max
  misc_feature (195)..(195): n is a, c, g, or t
  misc_feature (199)..(199): n is a, c, g, or t
  misc_feature (245)..(245): n is a, c, g, or t
  misc_feature (294)..(294): n is a, c, g, or t
  misc_feature (304)..(304): n is a, c, g, or t
  misc_feature (345)..(345): n is a, c, g, or t
  misc_feature (457)..(457): n is a, c, g, or t
  misc_feature (462)..(462): n is a, c, g, or t
  Coding DNA Sequence Number=SeqID_689
aagcgtccactctccggagtaggatgacgtctcgcactcgcgataagtctagcacgctcgagttatcgtaagtatcgcgcgagcactggatatattacgtatgtatgatgattatgattctcctcttatcattatagtgtcactagtctacctgcgtgtctaacgtcgtccaacaacctctattctacgaagaantcancgcaattatagtatcacccacacccaatcaaaccccaatcatcacnatatcaagagaggaagaccggcagaaagtatgtaatatacatcatctanatagaagaanagaaagtacgataacacacactcaacacaacacaattaatncaagataccaattcaattccatcagtaggcagacagagtctattcgttagtattagtgtgtgcttctccgactcccgccatgttccgtctctacacatccgctctgctactntcttncttattatacatagaagctccgtctcggtccctcaccttcgttcggattcgtcacaatctatttgtatctcttcttcctc

SEQ ID NO: 10469 - DNA, 345 bp, Glycine max
  Coding DNA Sequence Number=SeqID_690
tgatcaaccggcgtggaagccaggaactgattctgaatcgccttataggatggccctaaactctaatggagatggccttacttgggcaacggaaacgcccatgggttggacagggtttgactgggatccaaacaagagctcggaaatccaaagctgagtctgaaggtgacagagaaagggctcctcccggttggagggagccggccagcaattaacattggcacccaacaaagaagggacctgcacaacctgctgggtggggaggagggcaatcaaaggggcttcagggggccaaacaagggaaatattctcacaaaaacaaaggcccatcctcttggaaaggct

SEQ ID NO: 10470 - DNA, 419 bp, Glycine max
  misc_feature (143)..(143): n is a, c, g, or t
  misc_feature (242)..(242): n is a, c, g, or t
  misc_feature (264)..(264): n is a, c, g, or t
  misc_feature (381)..(381): n is a, c, g, or t
  Coding DNA Sequence Number=SeqID_691
ataatacacctatattgcgtcttggtgtgtcgtcgattgcttgtgtgcgttttttttatttctcgcgtgtgttagatagaccgacagttggtggggtggtgaacagaagaagaaagtcaaagtagaggttgtcccaccgcccnctcgtagtgtcgggttttctccatggccggcgcgccctgcacacgggcggcaccggccacagcgagcagaaatggagggatacgcccgacgaaagcganacacagatatagcacaacgcgngagactaacgagtagtcatgtcccagagtgtatttcactcctctcatagagtccgatttggatcacttaattcaattttatatctcgcgccgcagatttagaatcgcccagctcatntacaacccagattatcgtcaacctaagtgcacaccaat

SEQ ID NO: 10471 - DNA, 542 bp, Glycine max
  misc_feature (169)..(169): n is a, c, g, or t
  misc_feature (318)..(318): n is a, c, g, or t
  misc_feature (351)..(351): n is a, c, g, or t
  misc_feature (483)..(483): n is a, c, g, or t
  misc_feature (510)..(510): n is a, c, g, or t
  Coding DNA Sequence Number=SeqID_692
cgcgcaccgcagatatcacatggagcgtgtaggtcagacctcgcgcgtgcgagtgcagagtgacgtacgagacggcacgcctcgacgttgaaagagagatagggtggagcgagcaatatctagtagagaggatgtaacaagacgtcgtcatgcgcgtagaagagttgtnatggactataacgttaagacaaacgagtgcaacactcaagaataacgagagaagagatgagaccacgcgcaccttattgacctcagaacgcctactgcgctactgcttcatgccaccatatacggtcaacaatatacgatactggacanatacatccagtagaagagcgcagtgagctgaangcgcaattgatgaatagtgtgcgatcatgtctgtggttatgataatatcaagactcgatacttggtaagactgccgcacgtatatcagcacaatcacgacacaatatgaacaagataggtggataggaatgncgtagcacataattacatatatttatntaactgtatgatgattgcagcatactcacaca

SEQ ID NO: 10472 - DNA, 380 bp, Glycine max
  Coding DNA Sequence Number=SeqID_693
gtgaatctcgtaatctttatcttctctcaatctcaatctcctaatctttttcttctctcaatctcaatcgcttaaacaccgttgaataatcatgtctagttcttctcaatctcgttttgccactcggatactgttgggttctccacaatctcgttctctcttgcgagcattgtttgattctcccaaaacagttggcgttaaggttcgtgaaataacacatcctggtgtcaaagtgtccaggtttgtgttagaattttccaacctgccggaagaagaatcggatcgacggaaaagactactgaatattctatcgacaaagttgagaggcggtgctagaacaaatgcagatactcaggaacaccccgagtgccaaggagata

SEQ ID NO: 10473 - DNA, 475 bp, Glycine max
  misc_feature (296)..(296): n is a, c, g, or t
  misc_feature (301)..(301): n is a, c, g, or t
  misc_feature (426)..(426): n is a, c, g, or t
  Coding DNA Sequence Number=SeqID_694
ttcagtcaaaattcaggaaagttagggaagaaatgagtcgatgggatgagcttcaatcttgcttaatttcacagtttaggaatgcttctcatattgttgataggttgcaggtgcttcaaaattccaacaattatggtgttctaaattgtgccagtggcctgaaagatgctcttttggtaaagcagattgaatctttggaggaacatcttggtttccatgagaaagacattggaagaatttcattgtattgtcttatctctttgacaaaattcaccggggatagtagacaacaaggngaaangggggttcttgtcacctggaacatggaaacaattgcagcaacaaattggcatcaaacctagtcttatttattgcttggataagcctgatgtttatacccgagatatacaactctggggtatttanttaaaggcatcagtggatctcacccctatcagaaatggccttaaggccc

SEQ ID NO: 10474 - DNA, 534 bp, Glycine max
  misc_feature (295)..(295): n is a, c, g, or t
  misc_feature (297)..(297): n is a, c, g, or t
  misc_feature (299)..(299): n is a, c, g, or t
  misc_feature (307)..(307): n is a, c, g, or t
  misc_feature (427)..(427): n is a, c, g, or t
  misc_feature (498)..(498): n is a, c, g, or t
  Coding DNA Sequence Number=SeqID_695
ttgtagagatacagcccatcgtggcaccagcctatttgatcgagccgtggagtgctgtgtcgccacacatacattatatccgcttcatgctgtataccactgtctagcccgtgtgtactcactataggtggttggtgtcgctgactatactgtgtcagaccgacacgtcagctgtggtggcgcgacacctgctcctcctaaacgaaatattttcttcctcgcaacatatcgaggcgagtgtccgcgaggcggctccattgttgtgcgccgcgcgcttgatttatcccatactacnanantgaatatnatcgatgtctggccggatcggcgatgatgtggtagcgtgtatactgctacgcgcgagtcttcgctgtgagcgagaatcttatatacgatgttcgcgatacgagccgtcgcatggcagcgncagtccttcagacgaaatctgagatctgatgtacatagttagatctgtagtgtgtaagtactgactcctgncctgtgtcattgtaggcatccaatgtacactggtat

SEQ ID NO: 10475 - DNA, 528 bp, Glycine max
  misc_feature (162)..(162): n is a, c, g, or t
  misc_feature (183)..(183): n is a, c, g, or t
  misc_feature (231)..(231): n is a, c, g, or t
  misc_feature (359)..(359): n is a, c, g, or t
  misc_feature (363)..(363): n is a, c, g, or t
  misc_feature (404)..(404): n is a, c, g, or t
  misc_feature (434)..(434): n is a, c, g, or t
  Coding DNA Sequence Number=SeqID_696
gcagacttcacacagcagcgagcgtgagacgcgtgcacgtagtatgatctccgagatcatacctacactaacttacgacgccgtcgtgtgatgacgtatatatgtcaagtgatctgcggcgagtagctgcgtatgcgtcatcttagtatatgtacatgtgcntccatgcagcgatcgtcactngtaggtttagataatgacgttccatacactactatcacatctgtacanagtgctatgagatagcgacgcagcagagagtgaggagagctatatataaagtcgatagcgactcaatcatattgctcatacgcggcgcgcgacagcattaatatatatcatgatctgagtgaagttgngagnagctacttgcttacgaagtatccgtgtgctgcgtcgcatanactcatgatctgcacgtctgtagcagtcgnctcgacgaccatcctcagcctcgtgatagtatagtatacacggatgccacgcgagacagcagcgatgagtagacctgcgtgacgtatgcgtgtt

SEQ ID NO: 10476 - DNA, 511 bp, Glycine max
  misc_feature (212)..(212): n is a, c, g, or t
  misc_feature (256)..(256): n is a, c, g, or t
  misc_feature (343)..(343): n is a, c, g, or t
  misc_feature (388)..(388): n is a, c, g, or t
  misc_feature (402)..(402): n is a, c, g, or t
  Coding DNA Sequence Number=SeqID_697
attcttatggtatccacccatctttattgttctcacaccctatttatattatatttatatctatcatatattctgttatcaataccacaaaaacatacgacatccgacgcaccgcaacgaaacataatatacagaccacccccctgatatatctatagggtgtattcacgaccgattttattctctattattatattcaccaatataatatncctcaggtgcacaagtgttggtcgtttggctgtgtcttatcacntctctgcgtttagtttagaattattcttattattcacgcgcgcacacgggcgcgggtgttttactcggaggagcggtggataagagnttataggagatgaagtagggatattgtagtaagcgtggtgcctgntcttgccataattntatggatgcgtgttttctctgctgaggagtctggttgacgccgacggttcgttgttttcgtttacaaccgcgatattttctaatctctattttaaatctcctttgttct

SEQ ID NO: 10477 - DNA, 341 bp, Glycine max
  Coding DNA Sequence Number=SeqID_698
aatccgctttacattcagagctttacggaagctgaagatgcgctaaagctccaccacatcgtccactgctccctcgatgtcatagatgagcgagtgaacaatccgagcaagtcaggaacgacaatgaacgaggcatttctaggtctgctatacccagcactcaactacaaagtgtatggttacttgactaacacaaaagtgaagttcatcatggtcacttctgatttggatgtccgagacaccgatgtccgaagtttcttcaggaagttccatgccgcatacgtcgatgccgtctcaaaccctttccatgttcctggcaaaaagatcacttcccgaacctt

SEQ ID NO: 10478 - DNA, 347 bp, Glycine max
  misc_feature (41)..(41): n is a, c, g, or t
  Coding DNA Sequence Number=SeqID_699
caaaaagagagagcccaaaaccgaggacgagcagaagggcnacgacgcagccaacacgggcaaagaggcaacggagacgagcaccgcggcacagggggcaagcagggaccgaggaaaacgagcacaccaatttttttttttgttaatgcggctgacattgtcacaccacttttcttctgtggcataattgatcaggctgattctggctgtgctggtaataacttttactcccgagatgcttttcttaatgctttcaattcctataatgactttggtagactcggttcctaggatgactccaagcgctagattgctacttcttttgtccatttcatacttgatactgg

SEQ ID NO: 10479 - DNA, 366 bp, Glycine max
  Coding DNA Sequence Number=SeqID_700
gcccagcagggaagacgaagtacaacccacctcccaccgcatgaagcacgaagaaccgcacggctcaccctccagcctcgtgaggcgcgtcatgagtcaccctcagctcgcctccctccaccgcccttagcacgacgtacaacgtcagatccacgcccatgacgaaggacgacgagtccccggtcgtccccaggaccgacaaggagcgcgagtgaaggggcgtccacgtgtaccgtcgctagtgggcgattcgaatagaaaggagcaggagggagacggcacacgggaccacggtgagcgtccgcctgcagccgtcgaaggtaatgataacgaggctgaggttaggtaagggcagtaggtcgcttt

SEQ ID NO: 10480 - DNA, 564 bp, Glycine max
  misc_feature (232)..(232): n is a, c, g, or t
  misc_feature (244)..(244): n is a, c, g, or t
  misc_feature (375)..(375): n is a, c, g, or t
  misc_feature (478)..(478): n is a, c, g, or t
  misc_feature (519)..(519): n is a, c, g, or t
  misc_feature (523)..(523): n is a, c, g, or t
  misc_feature (538)..(538): n is a, c, g, or t
  Coding DNA Sequence Number=SeqID_701
cgatcgcgatttaggtacacatttagtaggttatcatctcgcccggcggctaacactcattcgccccgccacgacataaattaaccatcactatgtaatgcgctccttcttgtgtgttatcgtcagcttcattacgacgcgttatcattgatctcacagcgatcgtctatatatagctgatccatatgcgcgcgcgctccagctacgtctggtcgcgaatatgaggcgtctnatacgtcttccncgcattggtcagagaccacgcggcttataatgtaatacatattatatccgcgcgcccgtagtgtagatcatattattggtgatacgcatgaatatacattgttcgatccactccagtatagcgtgcgcccntctgttttatatatgttcgcagccgcgaccgtcgagcgccacgactacactaagtatactactgtattggttgggtgtgacacgtgctcacgacgcaacgatncgcagcaaagtactgtatactgaccatctacgctctgcctntgcngcgccgctaagtcgnattgctccgaccgatagacagatata

SEQ ID NO: 10481 - DNA, 461 bp, Glycine max
  misc_feature (39)..(39): n is a, c, g, or t
  misc_feature (197)..(197): n is a, c, g, or t
  misc_feature (246)..(246): n is a, c, g, or t
  misc_feature (262)..(262): n is a, c, g, or t
  Coding DNA Sequence Number=SeqID_702
gattatattagatgtcgcctgcaatagtatagaggaggnggtaggatgtggctctgttgtgagaataatgtcgagacataacgtggtcgtctgcgtcttcgtagtctgtctctctgcggtggtccgcgttggggtgtagatgagtggctatgtgtagtgcactctcctatctgcagtggtttccagcatttgtagtntagagaatgatttatacactacaatattgacatatctatagtcaacganaaccacagatacgatncgtgagagggagacgtcagcgatagatactgttcgtattgacatttgtcgggttgatgtactgtatactttaacaatatatacccagagtccaggagcttcgaagcgagttggatggggtgttatggctttcctcgttcgccgtggtttacgctaggcctatatactctctaccgctatctcgatatattccagttctg

SEQ ID NO: 10482 - DNA, 429 bp, Glycine max
  Coding DNA Sequence Number=SeqID_703
tagctgggggattttgtccgcccgcgcgggaggggccgaggaaggagttgtgggggcgagggggagcggagatatgtgggtgtggatgggaggtttaaggggcctgggggaaaggggattgggacgggggggtggctgaaatatgaggtatagcaccatttggagacgggggggggtgggggttgacctgctccggggggttgtgttacgggggtcggggtcgggggaaatgtcccttttttaaccaatctggttgtggcccccttaagggaggtgcaaacgaacggtgccatgcttggttcctgtaggaggttctccggggtatggcaattctagagacacttgtgtgttgggggttcttttttgcgcggggagggatggcaaaggaggcgggaactgaagccaggaaagcgagtcccagcaacagta

SEQ ID NO: 10483 - DNA, 493 bp, Glycine max
  Coding DNA Sequence Number=SeqID_704
gaattcctcggttggcaagttcggcggcgagagtagataggagggccagcaagaggccgccgagacttcgcagttctggccggacagggcctacggcgtggcgcagtacggcaaggagtccgccgtcgccggcaaggacaagaccggcagcgtgctccaacaggccggcgagacggtggtgaacgccgtggtgggcgccaaggacgccgtggccaacacgctggggatgggcggagacaacaataccaacaccgccaaggacaccaccaccaagaagatcaccagggatcactagactagatgcatgcgctcgcgcttaatttgctttcctttccttctcttgatacacattttacgttccagtttcatgatttccggacaaacatcttgttgtaaactctgctgctcagtgtcttggcctcttttcggtccgtatggatgtctgacgggagatgtatctttgtgttcgtcagacttctcttttcaagttcta

SEQ ID NO: 10484 - DNA, 516 bp, Glycine max
  misc_feature (120)..(120): n is a, c, g, or t
  misc_feature (405)..(405): n is a, c, g, or t
  Coding DNA Sequence Number=SeqID_705
gtgagcatcatgcactctatcgtgctgcgtgggtgtagcgtgcggcgtcgctcccgtgcgctcagcctcttcgtctacgtcgcgctctctcggaagctcatgcgctggtgtgccgctgtnagttcgtatatattagtgctacattcgcccgctctgctgtatctcctcgtccgtcggatcacacatcagtgctgcaaatcatcatacacacgatagttgagttagtagagagtccgatcgtcactctacgcccacacgcatgtctcgatgtctactcactctacagatgctacgaccaagagagtcgtagcgtgcacgtagcgctgttctgagatgagcgttgtgggtactcttccgcgtggacccagtagttagaggagggatcgccaatacattataagaaanaaagagattcgggttacagtaagatatatggtgagtgtatgtgaattatatatataaagagagatagagtcggacgaagcgaggtagaagtaccaagtcgacaaaccataa

SEQ ID NO: 10485 - DNA, 376 bp, Glycine max
  misc_feature (35)..(35): n is a, c, g, or t
  Coding DNA Sequence Number=SeqID_706
ttgagcaatgcatcattatcgttcgtgtaaagcanacacaacactaactcggttcagtgggagggccacaagctcacgagcaacatccttgaactcgagaactcctccttctttgcattttgatagcaaacgtgccgcttcttaccacgaaaattcatgctactcaatgatccaatattgttttgttttctccaaatgcatcctgagtttacgtaacttctcatcattggtctaatcttgaattatgaaatgttataagtccgcgaactgttccatttttctcactcagttggcttttgatagtgaaaacagtttttgcatcgctcaaattcgtactatgaataacacatttgcacttatcgtaatttcagcccca

SEQ ID NO: 10486 - DNA, 411 bp, Glycine max
  Coding DNA Sequence Number=SeqID_707
tggaattgacactttgagggagttaggttaagactgagagttagtgtcatgattgcagtgtttgaatagagtcattgctcaaattactttttcgttcaaattatagttgttacgttttaagttactttacagttaatttcattgttgctaaaaattatgaatcttgtgttaaactagtttctccagacaagcacaaataggccacatatttgtatctcaaacttaatttaataatcaagatgacgagcattacactgggtatcagactttctttgtacgatttccagagagtcaaaattgaaaatgtggatctgcacactaaagttgagaatttcaaggtggaagtttccaaaaaagctaatttgccaaaggaaagtttagaattagtgtactgtggcaatatacttgatg

SEQ ID NO: 10487 - DNA, 492 bp, Glycine max
  misc_feature (68)..(68): n is a, c, g, or t
  Coding DNA Sequence Number=SeqID_708
atgcctgagtattgacatcgccaccagcacctactacacctcctaccctccactactcacaatcacantctcagatccacatttcccttgacttcctatgtgtgtctcagcctcttcgtctgtgtctatccttcgttcttctctcttcggctgatatcgtgtgtcattgtcgccgccgcagcgtctgtagagatggcgcatgcactggtcgcacaataactcttccgcgcggtgtgtgtgtcttgtgcgacatcattggtctgtgagattcaactctcactctgactcgctgtgtaggtgtagtgcgtctgtgcactgatgacacgtcgcttgtgtgtgagtcgactatcatcctgcctacctctcttctgtcatacttctgtgttgtgtctctcgtcatccagcgccgacaactacaaccctcacacacacaaacacgcgtgtcgaggtatgacagacgagcggctgaggagctacatgcccgaacaataa

SEQ ID NO: 10488 - DNA, 548 bp, Glycine max
  misc_feature (237)..(237): n is a, c, g, or t
  misc_feature (283)..(283): n is a, c, g, or t
  misc_feature (376)..(376): n is a, c, g, or t
  misc_feature (420)..(420): n is a, c, g, or t
  misc_feature (515)..(515): n is a, c, g, or t
  Coding DNA Sequence Number=SeqID_709
tgagtcatgctcagagacagcgcccccgacccgccctgtactcttcatcgcgtagtaaagtatagatacatatatattacaccagtacgtgctagtgacctgcgaatagaacacagcacgatgccactcccatgacagtcgccgctcgctctactactgcatgctactatgctcgtgtactggacacatcctcgtgctcgtgccatgccagcgactagtgcacacaccccaccaccncactacactgaagtacagccaagcacgcgcatagagtctgggacgnggtcagatgacgacgccacgtatcactatccaacactaatgcagtatacataatatcgcgcacggtgacaacacacactgccagtgactgtgngacctctatcgactacgcgacccattgaccactcgataagtacnatgcgaccaactctcgcaacacacagccttatccgcgccccacctcgcacggaaacattggctacgcgcatctaagacacatcacatagtcatantacaccgcagcccgcataccaatatcatagcac

SEQ ID NO: 10489 - DNA, 536 bp, Glycine max
  Coding DNA Sequence Number=SeqID_710
cccattgacaacgactcctttagaagacagaaaattcttgaagagtgaaatgaccaatgatgcaaatttatcccgagttaagcctttggcatctgaaatccctcacaaagattatgcggatagatttgatagaaaaatctcgcaagtcggagaaatcaagtatcatgaagaaccagatgaggaacttgtcagacattacaagcgtcttccaaatagtatccttacagagcaatctcttaaagatatgctttctgattccctcacttcactgaatctagctaacctcaagtgggtgaaaaacgaacatttgaataagcttggttttgttgctccaaacttagtggagcttaatatttcaggtaccgttgctaatgacaccacccttgaagaaattggcaagacatgcttgaatcttaagtcaattgacatttctcattgtccggagcttactgagaaaggagtccgagcatttttcgagaactgtccccctattcaaaaattctgggcatcaacttgtcccaattctgtaacagatg

SEQ ID NO: 10490 - DNA, 224 bp, Glycine max
  misc_feature (131)..(131): n is a, c, g, or t
  misc_feature (134)..(135): n is a, c, g, or t
  misc_feature (138)..(138): n is a, c, g, or t
  misc_feature (151)..(154): n is a, c, g, or t
  misc_feature (157)..(157): n is a, c, g, or t
  misc_feature (159)..(160): n is a, c, g, or t
  misc_feature (171)..(171): n is a, c, g, or t
  misc_feature (177)..(177): n is a, c, g, or t
  misc_feature (188)..(188): n is a, c, g, or t
  Coding DNA Sequence Number=SeqID_711
gcttttcatcgaccgcgaactcctgaagagccaaaatcgtggatttagcaggaaagttgtctcgtctcgcgccgccccgccgagagagtcccgttccgcgcagttttgctcgtcctctcaccgtcaccggntcnnganggcttgaagaagnnnnccnannggcccacattncctcanctttactgcanaggagaccttcttggcgggtgtgacatatcccttgc

SEQ ID NO: 10491 - DNA, 450 bp, Glycine max
  misc_feature (26)..(27): n is a, c, g, or t
  misc_feature (38)..(38): n is a, c, g, or t
  misc_feature (40)..(40): n is a, c, g, or t
  misc_feature (42)..(43): n is a, c, g, or t
  misc_feature (84)..(85): n is a, c, g, or t
  misc_feature (137)..(137): n is a, c, g, or t
  misc_feature (139)..(139): n is a, c, g, or t
  misc_feature (211)..(211): n is a, c, g, or t
  misc_feature (214)..(214): n is a, c, g, or t
  misc_feature (243)..(243): n is a, c, g, or t
  misc_feature (259)..(259): n is a, c, g, or t
  misc_feature (298)..(298): n is a, c, g, or t
  misc_feature (313)..(313): n is a, c, g, or t
  misc_feature (326)..(326): n is a, c, g, or t
  misc_feature (349)..(349): n is a, c, g, or t
  misc_feature (356)..(356): n is a, c, g, or t
  misc_feature (394)..(394): n is a, c, g, or t
  misc_feature (415)..(415): n is a, c, g, or t
  Coding DNA Sequence Number=SeqID_712
atatgcaccgaggccgcctctagtannccgtgagaccncngnnctcggacgccatactttcttatctccagccgtcgtgtaaannaagagtaaacacactatctgcgactgtaatattcgatcatactattgtagtngnataatgctagggtgacactatttcatacttgtgctgtcacgaaacagtgcacacacaacataatcattcagnagngtttatgacacctaccgaccaccacaatnttagacgtactcccgntgttgtgccatgactcttcgccgcgtatccactcggccnagcccgtgctcgcanccggagacttaancaacctcgtacgacgtgcttctncactctnttctcgtttatctagacattacatctagagtccgctantatagactgctacctataggnctagttaccgcttgcgcacgctagctcgtatctgt

SEQ ID NO: 10492 - DNA, 361 bp, Glycine max
  misc_feature (73)..(73): n is a, c, g, or t
  misc_feature (170)..(170): n is a, c, g, or t
  misc_feature (248)..(248): n is a, c, g, or t
  misc_feature (288)..(289): n is a, c, g, or t
  misc_feature (302)..(302): n is a, c, g, or t
  misc_feature (327)..(328): n is a, c, g, or t
  Coding DNA Sequence Number=SeqID_713
ttgcagctaagacactgaacacgacgcccacgtagtagagcacgtcatacgggtagatgtgacgctgtgcagngagcctaagccgaggggcggtgcgcgtcgctggtgagcgaggcgggagcaagacgagcaagcgcggcttcgcagacgtgagtggcgagcgcatgtgnttgttggtgtgtgggtgtgtgttttttagtaattgtagagtgattacttgtcctctctccacttacactcgtgctccntcctgtgtcttagtcctcgtgtctcttcctcttctctcanncactcttttctantggtgagatatgtgagtggtatgtnnagtagcacgcacacaccatatcttccctaatga

SEQ ID NO: 10493 - DNA, 414 bp, Glycine max
  misc_feature (209)..(209): n is a, c, g, or t
  Coding DNA Sequence Number=SeqID_714
cggcgcagaggaacggcctcagttttggagcttgaaagacaaaatattgattgcagctgagttctaatgagtaacgaatacgattacctggtcaagcttctcctaatcggagactcttccgttggaaaatcctgcttgcttctcagattcgctgatgactcctatgtcgactgctacataaggaccattggagttgatgtcaaaatcanaacggtggagctggaaggtataaccgtcaagctgctgatttgggatacagctgtacgggagcgattcaagactatatcagccccttttatatgagagcacatggaaatactattgtctatgaggtactgaaacgaaaagcttaccatgccccaaccgggttgatgacattgacgaaatggaaatgacctgtattccagcttctgg

SEQ ID NO: 10494 - DNA, 442 bp, Glycine max
  Coding DNA Sequence Number=SeqID_715
taaggcgcctttatattgatgcacgagcctttgagacaaaaaaaaaaaaaaaaaatatcgccaccccccgacctcggggggggggccccggtacaacccggcccgaccctccggggggagagagcgcccccaaaaaaccacaggatgcgccgcgggacgagcgggacagcgcgaaataaggcgcgcgcgggcaaccgggcgcggcgcggattgcagacgcgagggccgacgacccgggaaacagacccggcgccgcgccaatccgacgcgagagccctcgcctctgtgacgcgagtcgccctcgggtggcgcgaggccggggcggaatagacccgcacagtcctgccgcgaccggcgcgcccgctttccacaacagaattgacccggcagcgccatgcgactagagacacaaaccacaccgggtccataatctcgcgggccg

SEQ ID NO: 10495 - DNA, 488 bp, Glycine max
  misc_feature (397)..(397): n is a, c, g, or t
  Coding DNA Sequence Number=SeqID_716
cgatgtcctcggttttgatctgtaattctgtgatatatgcgccacgagggaaactcgaacataactttacaggcgtacgtagcccgtgcgaatgctattgagctctcgatatgttagtgtactgctagaggtagagacaggcatggatcagaagcacagaaagaaacgtgatgcccgtacttgatgcgtccatcgacctcacaccttctgcgtctgtagaagagtgatgggcgaggacgtgcttgctactcacgtgatgtttggatagtctagacaagacagacggatgagcggtcatatcgccaacaggcgggcggcggatgtactgacactaagggcgtaccaaacactgagatacccacgataggcgtgcacgaccgtggttcggagagaagcnggcgctcctggctaggccgaatgaataggaaaggctccaacctgattggacgggcgcaggcggacgagagacgcagataaactacccctcg

SEQ ID NO: 10496 - DNA, 513 bp, Glycine max
  misc_feature (326)..(326): n is a, c, g, or t
  misc_feature (404)..(404): n is a, c, g, or t
  misc_feature (430)..(430): n is a, c, g, or t
  misc_feature (465)..(465): n is a, c, g, or t
  misc_feature (486)..(486): n is a, c, g, or t
  Coding DNA Sequence Number=SeqID_717
tggtgggtgtcctcatgtttaacgctgctacttgatcttacacctccataactcatgtatcgacatacatctattaaatcatagattagttgcttcactatcgcccatatacgctcgtcgccttcctgctagatatgaatatgatatcacatgtgcgatgatcttccggatggtcgctgatattattaatcatttgttgtgacctcaatgacgtctcaatacactgctgcatgacgatctctcagtccgcgcattagcatgctcgatcatgattacgtaaatgtcgcggtactatcaacatctatgtcgctcccgtctgtccgacncatactgcctgcctgacactgtctgactacccaggtgaatatctctgttctctctcctccgtgtctatgtctgtgtcntagtagtgagcgtagcgcgtgcgcgncggacgtctcatactgcgacatgtcttccatcgcncccatctctccggagtcgagngctcgtgcggtatagctcgagcatgat

SEQ ID NO: 10497 - DNA, 432 bp, Glycine max
  Coding DNA Sequence Number=SeqID_718
taacactgcgtgttgcaaggcaaagctgtgctggctcaggagcaccaaatgaagagacagattctgacctggtgcctgaaatgacgtatgacctgcgctgccagtgtgatgctattcgagtgacaaaaaccgttcgcccttatagcatatcatgctgccccatcaatgagaacgtagctgctttgatcatcagcgatggccgtatcatgatttgggaattgaagtccagtgtggccggcaaaagaatgagcagcataagtcccagcttgggtgctttatatgctcccctctcattttgtgggaagccagtcggacccttgcagaaaaagctacccgatctttcattggacagcatgatagctggtcagagcatgcttgctggagacgctctgaactctgggggcccactccaagaagtgcacctcaagtttt

SEQ ID NO: 10498 - DNA, 567 bp, Glycine max
  Coding DNA Sequence Number=SeqID_719
tttatgctatctctgctcttttatcattccccgttcagttcttccctgctattcgtatcatggaaaactccaaaattatgagatatagactctttaatgaaagaggaaaatgcaataataaacccctcagatatggaatgagaatggctgttattggtgtggtctttcttgttgcttataccgcgaccagtttccatcttttcttaaacttgctgggatcttgtgtattcacttttgttggatttatcttgccagtctggatctattctgtccatttcaagggaaagaccggcatcgcgaaaagacttatcaattatacaatgcttactgttgctgtcgtctttggagcagctggttttgttatgtcaatcatggaaatggttaacaaaagctctgaagatgttgcaactctctaaagtaaaattttttcttaactgactcattctatgaaaactctgtacttttttaactgtagtcaaagttgtaaattatatttgtgtaattgattgtatgtctttttaataaaaaacctctccttggatatgtctataatctgatccccgtatc

SEQ ID NO: 10499 - DNA, 561 bp, Glycine max
  misc_feature (129)..(129): n is a, c, g, or t
  misc_feature (260)..(260): n is a, c, g, or t
  misc_feature (501)..(501): n is a, c, g, or t
  Coding DNA Sequence Number=SeqID_720
gaccatcttgtctgtgcgcttgcacgtgtgtctctcgtctgctctccactcccccatccctgtcgtgtctgtgcgccactcactgctctctacacatctcgaccaaatcaccgcccgccgccacctccntctgaccacattcgtactgttcaatatatttggtgtgttattttattttgtgttcgtacgtcacttatctctcactaccctctgctgtgtgccatgtcctgttgcttttgtgctgatgtgcctgtgccacntgtcgcgccatgtgctggttcacactaatacaccacacacacatcactcgccccgcctcaccacgcggccgcacactgcctgtaccacccatacatgcccccttgtgtgacgcatcgccctcctcccgcctgttgccgattcctctggcgctctgtctgtctattcatgtatcattgcctgcccctgcctgagcgcctgtcttctgttcccacacacatccattccgatctaacaacgcgngtgctgcgcctgaggattgtcctcttcgctctcactataacgtaccttgcgaggccacac

SEQ ID NO: 10500 - DNA, 88 bp, Glycine max
  Coding DNA Sequence Number=SeqID_721
ttgttgagcgcgcccccagtgtatggttccaggcacccgtctagttcagccccgaaccattaggatggcggtacataacatgagttat

SEQ ID NO: 10501 - DNA, 463 bp, Glycine max
  Coding DNA Sequence Number=SeqID_722
attagcgcctctgcatcttcggaagctcttactccgttctcgttccttatcattcacttctcccactccgattcaccctcctcctctgtttccccaacaaccttcttcccatttccattcccgaaccctcctcactccttcttcgctcttcataatcagacatttctcatcggaaacccaaacggatcagattgcgcactccctctcctcagagcttctcaaagagccagactcggacgctctctccgtctcgcagcgccttcacctgagctttctccacatcactccaaccccccattttgatctccaaacccctaaactcctcccacgatctgggcgcactggattagggtccatcaatggctcccttccaaccccattttcccaaagggggaaaattttttcctattcgggaaataatttgccgcggaagggattagggcaagttgaagctttctcgggt

SEQ ID NO: 10502 - DNA, 557 bp, Glycine max
  Coding DNA Sequence Number=SeqID_723
cctgcagcatcattctctctgtatacaagcctgggacctgctgactccattgccatgggcatgactgtaggattttcccctatagcaagagatgcaatatgaccgctgaccgagatacctgggggcagccactgcccctactgagggactacgcgctgagcattctgggttgttatcctcacatcttgcatatgcatctggattgaggtgaccctacatgatatgctctctcggatccatggatgctaatggatctgagcctgagggagaggctccttccgactggccttgccctaacgaggccttggaagccaaattactgacacaccacaagacgagcgatgtgaaccataggagcgagtgacttccagctcggggcttgctacaggaaagttacactttgcagaacctattgattaaccgaacagttaaccaacattacatgaattttctcttcaagatgccatgcctagggcatgttcagctgaaggaggatcattatacatctcctgaataggacatgactaccaagaggagggtacgttctcgcaaccgat

SEQ ID NO: 10503 - DNA, 494 bp, Glycine max
  misc_feature (135)..(135): n is a, c, g, or t
  misc_feature (149)..(149): n is a, c, g, or t
  misc_feature (152)..(153): n is a, c, g, or t
  misc_feature (161)..(161): n is a, c, g, or t
  misc_feature (196)..(196): n is a, c, g, or t
  misc_feature (285)..(285): n is a, c, g, or t
  misc_feature (291)..(291): n is a, c, g, or t
  misc_feature (304)..(304): n is a, c, g, or t
  misc_feature (339)..(339): n is a, c, g, or t
  misc_feature (348)..(349): n is a, c, g, or t
  misc_feature (369)..(369): n is a, c, g, or t
  misc_feature (371)..(371): n is a, c, g, or t
  misc_feature (466)..(466): n is a, c, g, or t
  Coding DNA Sequence Number=SeqID_724
tattgctcacagtcacgcgataacaccatccctcctatcatatgttctatgatactctgcgctagacgacacaatgtacgtcgagatatgtacccggtgtaatttgtactactcttactgtctcctctctaccantaaagaattaagtnatnngtgcaagngtcacactcttctctatactcgtgcgtgcagcgcncacaatatacgactcgcccatgggtcccaatatctcatagtgtaccgtagattcatgctagcatgccggcgtcgtacggccacgcacgnccgctntccatctgatccncgctcatacaatcgtactagttatctcggcatctntctcatgtnnatatggagtacagttgttgncnactattttctgtggtatcatcacgtgcacctgactgtctactgattgtcagcattgcttctctctactacaatttcttctcgtgtcggcctccgnattatacctcttgtctttatatgtctga

SEQ ID NO: 10504 - DNA, 532 bp, Glycine max
  misc_feature (280)..(280): n is a, c, g, or t
  misc_feature (311)..(311): n is a, c, g, or t
  misc_feature (326)..(326): n is a, c, g, or t
  misc_feature (464)..(464): n is a, c, g, or t
  misc_feature (475)..(475): n is a, c, g, or t
  misc_feature (493)..(493): n is a, c, g, or t
  misc_feature (507)..(507): n is a, c, g, or t
  Coding DNA Sequence Number=SeqID_725
gtgattgttattcatagtcctctcaatagtcttgcttaggtgatatcgtctctagtatcgctcaccgagcaacgtatactatatagatatatatatatacatataatcttatactctctctcacacactctatctctaagtcatgacaattcgctacgatatatcgtggtgtacgcgcgatatctacactcagtgttatgtcgtctcgtctctattacagatagaccgacactgtccacacatatcgcatacatatcatatactctctaactcgctcgtnacttcatcatgcagcatacataattaacatnccgttactcgtcacnactggttatactaaatatgatcgatgtctgtgatcactcgatcatacgcagcagcacacgacgtgcccgtctgtcgctctgtgacgcatctctcttgtcgtgctctcagtatttctgtacgctgcgtctgcatctgantatcgctgtcncgagcgtctccgtctctncgactttgctctcncactctgtcacttctgactcgatac

SEQ ID NO: 10505 - DNA, 489 bp, Glycine max
  Coding DNA Sequence Number=SeqID_726
aagagcccggccctcgattatgcgctctttccccaaacagactaggcccactcccccgaatgggccacaacaggaaaaactggaacacgcccaccaaaacaaatttgtatataaaaaccaacaccccgcctacaaaattttctttttttaataaaaacccaactccatttttatttttattctgactaaacgcgccccacacaaccctacccaatacgacccgctactttaccaatacacgaagaacaaaaacaacccccgctcacaaccggtctcttgagggtgtggttgtccccccccttcttctcgaaccaccaaaaaaccaccccccacataatacaacaaaaaaccgggagcacctccccacaccctccacaagcacggcggagacaaacctattcttcttctcggagggaggggggcacgtccggacacgggagaaccacctctccaccctaacaccaataatcctttcgtgtgttgggtgcg

SEQ ID NO: 10506 - DNA, 531 bp, Glycine max
  misc_feature (32)..(32): n is a, c, g, or t
  misc_feature (187)..(187): n is a, c, g, or t
  misc_feature (235)..(235): n is a, c, g, or t
  misc_feature (337)..(337): n is a, c, g, or t
  misc_feature (474)..(474): n is a, c, g, or t
  Coding DNA Sequence Number=SeqID_727
atagtgctgcctatactatcggctcctactcncggacatcatgccgacagtgtagaattttctctatgtgtttgtgtaatcttatttgagtcgtgtcgttaagtggtctgtgtaccaggagactcgcgcgcgggcgcatagacttccatagccgaacccccaccagctttcgttgagtaagtgttangagtgtttagtagtggtggtgacccttttctggagtatagaatgtggngtaggagtgagtcccataaaattcagacacaagtatatgatacgcacgtactgcttcctacaaactatataccccgtgcggcatccagtgcgcatgtactancagtatcgttgagcgactctctgataccatctcacacacctgtatacacgggggaggaggggagcgctcctcacctgttaccgcgcttctgcgtaggggggagggagcccccgctacctccgctattactgaaccgncccgtccgtcctgccatttcgttttctcctttgacaatatctcttatttcggccggc

SEQ ID NO: 10507 - DNA, 577 bp, Glycine max
  misc_feature (73)..(73): n is a, c, g, or t
  misc_feature (120)..(120): n is a, c, g, or t
  misc_feature (137)..(137): n is a, c, g, or t
  misc_feature (195)..(195): n is a, c, g, or t
  misc_feature (209)..(209): n is a, c, g, or t
  misc_feature (259)..(259): n is a, c, g, or t
  misc_feature (274)..(274): n is a, c, g, or t
  misc_feature (322)..(322): n is a, c, g, or t
  misc_feature (324)..(324): n is a, c, g, or t
  misc_feature (340)..(340): n is a, c, g, or t
  misc_feature (343)..(343): n is a, c, g, or t
  misc_feature (393)..(393): n is a, c, g, or t
  misc_feature (400)..(400): n is a, c, g, or t
  misc_feature (426)..(426): n is a, c, g, or t
  misc_feature (431)..(431): n is a, c, g, or t
  misc_feature (481)..(481): n is a, c, g, or t
  misc_feature (487)..(487): n is a, c, g, or t
  misc_feature (524)..(524): n is a, c, g, or t
  Coding DNA Sequence Number=SeqID_728
gattagacacgctatgtgtgctcatcgactctctagcgcactgattaataatagagaatatcactatagttcngagatactagcagctgtctgagcgtgtctaacgccatggcgcccgcntgatgtaatagccgcgngttaactatagcgaggctccgagcgcgacatctctgctcggagagttctgttactctntcgagtactgtccnatctctcggatagcttcactcacactcgatcgcctcactactatgtcacnccgctattcttacgngagaatcgagacgacgtcttcctctcacgaacgctgcgtcttctctcncncggcgttcgtcacgcnctnctttgtactgtgtgttgtcagcatatagtatgtacatgggggcgcgtcangatgcgntgctcgacgtcacaatcgcactcgtnggttngtcctaatatacacaccctgccgacatcctatacatctactacactacantacagntcgcgcaacacgctacatactcacagacgtatctcgnacgatactacgtcaatgaggcgcgacgctcgggttccatctatcctcgtgata

SEQ ID NO: 10508 - DNA, 489 bp, Glycine max
  misc_feature (173)..(173): n is a, c, g, or t
  misc_feature (264)..(264): n is a, c, g, or t
  misc_feature (294)..(294): n is a, c, g, or t
  misc_feature (404)..(405): n is a, c, g, or t
  misc_feature (407)..(407): n is a, c, g, or t
  misc_feature (413)..(413): n is a, c, g, or t
  Coding DNA Sequence Number=SeqID_729
gagtgcggctggaacacatcagacagtcataatctctattgacagcgatatagtgtggatgcatgccatcatataatcttcttcattatactcctatctacctccttttatcgtcgtttctcagctcatcctgtagaatatgtatcctagtgattgtagtcacgcctgtgtgntgcgtaactgaatgacatatagattatagatagagcggagctccaccgtggtgtggagtggaaggatgggaagtagtgtagtgacagaagngagagctgagagagatgtacgtagtgaatntattatatgtcgtcagcatatagatacttctctagtcgttcaatatacagtacagcgttcaaagcatatagaagtacaataacacatactctactctaactcgctcgagnnangtatcntctaacgtaggttacatgatgatgtgtaggtgcgctgtcgtctgcgtctacatagatggttggtgcactcccagct

SEQ ID NO: 10509 - DNA, 125 bp, Glycine max
  Coding DNA Sequence Number=SeqID_730
ccatccatcagttcgtaggtattgcacctctgagacacctaatggacccagaaaagttcaacagagcattggggttttcgaccttgatcacgggtctctgccagttctatgaggcgcagcaacag

SEQ ID NO: 10510 - DNA, 595 bp, Glycine max
  misc_feature (53)..(53): n is a, c, g, or t
  misc_feature (152)..(152): n is a, c, g, or t
  misc_feature (170)..(170): n is a, c, g, or t
  misc_feature (216)..(216): n is a, c, g, or t
  misc_feature (279)..(279): n is a, c, g, or t
  misc_feature (281)..(281): n is a, c, g, or t
  misc_feature (283)..(283): n is a, c, g, or t
  misc_feature (285)..(287): n is a, c, g, or t
  misc_feature (402)..(402): n is a, c, g, or t
  misc_feature (404)..(405): n is a, c, g, or t
  misc_feature (439)..(439): n is a, c, g, or t
  misc_feature (441)..(441): n is a, c, g, or t
  misc_feature (460)..(460): n is a, c, g, or t
  misc_feature (468)..(468): n is a, c, g, or t
  Coding DNA Sequence Number=SeqID_731
gtcctctgcatactgacgtgatgagggagcgtacaatagatggcgtgtagtgntatactcgtgtcgggtgtaagctgagacacagacgcgatgttacatcatgcctagagagtgcaggtggcaaagtgacgcaatgcggcgcttaatatctntgcgatctctggtgatcnaccttttacgatggagtggcacgcgtatcacaccacgcctcgcatnattactcttcacgatatacgtatcgcgcggacttgatgctgataggatctcagatgacacgantntntnnnctggcttgtctgacacgcgagccggctgggcgctgatgtccgtgtcgatctggcgcgccctcgactatgtcatcttacgtcgctgtcgaccgtgcactcactcgatcgtcatttncnnctcactatatgacgatatggataagaatgacagnantgagtacaacatgaggcangatctcgntcaggtactctaggagagagttacgaacgtgatagagcgcggtcgtgcgatgcgaggtggccgtctctgttctgtgatgtaacattgtctcacctcacgcgcgcgctacctcatgaaccaactgaga

SEQ ID NO: 10511 - DNA, 560 bp, Glycine max
  misc_feature (175)..(175): n is a, c, g, or t
  misc_feature (453)..(453): n is a, c, g, or t
  Coding DNA Sequence Number=SeqID_732
ggcaagtgccactcacagaggacgtcagcgtgcgtctagacttgtcgttaattaccttttgagattatagagtcggtaagaaagtcgaattgaaggtaaatatagaacaagagcatatgaaaaggtaaatgatgacgatacgccacggctcacgtgcaggcgctctaagcagacnaaacaagtacactaccgtctttcttatcttatcttacgctcgctcgtgtgtcggggcctgcacagtagattaatgtagtacaataccagcaaacggccattacaaaaccataacctcccttgccatttccacgctgtgggtggctatgcggtgtgaagtcggtcgtgtctttctgatatctaatacaaactctccagctctcttcattatttttctcaccctcctcccgtcactactctctaagtgtttacatgatggaatatactcgtgcacactcnatatactcctctctaattacctctctacaccatctaactactactaccttaacttattgataaagtctagaaacgacatcaagaaatttacttgtgtcacgccctct

SEQ ID NO: 10512 - DNA, 595 bp, Glycine max
  misc_feature (29)..(29): n is a, c, g, or t
  misc_feature (46)..(46): n is a, c, g, or t
  misc_feature (128)..(128): n is a, c, g, or t
  misc_feature (201)..(201): n is a, c, g, or t
  misc_feature (256)..(256): n is a, c, g, or t
  misc_feature (341)..(341): n is a, c, g, or t
  misc_feature (368)..(368): n is a, c, g, or t
  misc_feature (372)..(372): n is a, c, g, or t
  misc_feature (409)..(409): n is a, c, g, or t
  misc_feature (430)..(430): n is a, c, g, or t
  misc_feature (436)..(436): n is a, c, g, or t
  misc_feature (438)..(438): n is a, c, g, or t
  misc_feature (440)..(440): n is a, c, g, or t
  misc_feature (444)..(444): n is a, c, g, or t
  misc_feature (449)..(449): n is a, c, g, or t
  misc_feature (451)..(451): n is a, c, g, or t
  misc_feature (453)..(453): n is a, c, g, or t
  misc_feature (455)..(455): n is a, c, g, or t
  misc_feature (462)..(462): n is a, c, g, or t
  misc_feature (510)..(510): n is a, c, g, or t
  misc_feature (517)..(517): n is a, c, g, or t
  misc_feature (522)..(522): n is a, c, g, or t
  misc_feature (526)..(526): n is a, c, g, or t
  misc_feature (555)..(555): n is a, c, g, or t
  Coding DNA Sequence Number=SeqID_733
tcatctattgagtgtcttgttgctagtcntcgactctctcacagcntatttagtatatacatcgtatgtgtgtcccgatatgtagctatgaatcgcaagagacgactcacacgcgtagcagagagagntggaggcgcgatatcgagtggtgctgtctcccacactcctcacactcatcctcacacaacatgcgtcttatgntctatgtgtcaatggatgccgcgtcgtgtgcgtcgcgtctacatctcgtgtactncactcatcacactcgatattatactgatactattacttactgctctatacttgtgtgatccagccttatgtcgttgcgtatgagntacggagatgtgtgtatatagagtganaagngtggttgtagtcactcacaccccactactcctctgcntatgacaattaatatatatanactacnancnacanaaagnancnanagggagngaaggatgaggtgagaatgatatttgtgagtcctatactataacgaangatgagngcctnactnacctcaatgtatcataatcataattgaanaggagatatatataatagatacatgataaccacgctagat

SEQ ID NO: 10513 - DNA, 183 bp, Glycine max
  Coding DNA Sequence Number=SeqID_734
caagcgatcgatttggactaatgtttgtgctcgtgtgttcaagctttgagaccagtatgtcgctatgctcttacgcacataggaattacttctcgagacccctcggtattgtgccttttaggaggaacatgaagccatcctcaaacaacgtgaagatcctaactccggaatcacatggaaaga

SEQ ID NO: 10514 - DNA, 406 bp, Glycine max
  Coding DNA Sequence Number=SeqID_735
taagctccttcgtcgaactcaacatctcccaaaccgtagataacagctataatgccaccactacaatcatcattttcgttatccaagctatactgcaaggcttcatttttgtatggttattctcacttttctggtctacagtcctcttaaaatacggtttggttggcctgcttcttaaaaatttcaagtggtctattatatacattttgatctctattgtactcaatatcttcgaaagacttctccgtttgattattagtgggagcgataaagcagatgttgagaccaagatttggagtaatgtattgtatagaatcatatactacgttcgttatgccaatttgataccgttctacttagctttgttctctgtagcgaaaaggatcacaaagccagaatactacaa

SEQ ID NO: 10515 - DNA, 499 bp, Glycine max
  Coding DNA Sequence Number=SeqID_736
agccggcttcctttcgaagaacagcgaagatgctatcgtacgttgacaggtcgggaacctccttcagccaccacgctggccccaccgacagcggaaggaaatcacatccggtcgcggtccgcatctgagctaccaagagttcaagggatttcccgcgcatcgttaccagatttcttatgtccaccagagtctcagaagatcaaaacatctcacccgcgtgcggaacatgcgacctcgacgctcatggaacacacaggaccttcctcaaatgcagcggcttatacaagggattcacgttccagataccgtatgtccagtgccccaagcagcagacgtactagtcccacagatcctcaatctggatccaatccacaaatgcagttctcgaacttgaagccttcatccgagccggctccgtcactttccctccacgagcgtgcagcttcttattcaacaccaaacgcccaccctggcgtcccaggaccatgtgtagcgcaag

SEQ ID NO: 10516 - DNA, 352 bp, Glycine max
  misc_feature (119)..(119): n is a, c, g, or t
  misc_feature (134)..(134): n is a, c, g, or t
  misc_feature (137)..(138): n is a, c, g, or t
  misc_feature (142)..(143): n is a, c, g, or t
  misc_feature (154)..(154): n is a, c, g, or t
  misc_feature (211)..(211): n is a, c, g, or t
  misc_feature (216)..(217): n is a, c, g, or t
  misc_feature (250)..(251): n is a, c, g, or t
  misc_feature (261)..(261): n is a, c, g, or t
  misc_feature (273)..(273): n is a, c, g, or t
  misc_feature (296)..(296): n is a, c, g, or t
  misc_feature (310)..(310): n is a, c, g, or t
  misc_feature (312)..(312): n is a, c, g, or t
  misc_feature (314)..(314): n is a, c, g, or t
  Coding DNA Sequence Number=SeqID_737
gggcagtatgtctgaagactttttcatagatgtggatggaccaagtaaaaagagaaaattaaatggaatcaaccatcataaaaaagctcaaagactacaaaaggaggagcctgttgcanatgtgattgaagaanaannggannaggatggtganacagcagatgagaagagattgcgtttagcccaagattatttggcacgcttgggagcntgtannggaggaggataggccagacgacgatctcattgnncaacgtttanaccaagatgcanttaaactacgtggaaagcgcttncagtcagttgcatntnanttggttaggtcaagagtttgaaacagccaaaatcacaa

SEQ ID NO: 10517 - DNA, 533 bp, Glycine max
  Coding DNA Sequence Number=SeqID_738
gacagtgatgttcttaatgctttcaaaggtttgatggctacagactggtcagcgctgccttctgctgttgttaacgaggcgaaaaaggcagtctcgaaaaacacagacgacaaggcagggcaagaggccttgacgaatgtgttccgagcagctgaagctgttgaagaatttggtgggattctcaattccctaaagatggaaatcgacgatagcattgggatgagtggagaggatgtgaagagcttaccagaagatataaccaaagcgctgcgtcttgcttatcataggtatgctacctacctagatgcgtttggacctgaagaagtttatttgaagaagaaggttgagacggagttggggacaaagatgatccacttgaagatgagatgcagcgggcttggttcagaatggggaaaggttaccgttcttggaacatcaggactctcggggtcttacgtggagcaaagggcttaaaacggacagagaagaatcttaaataatgtttgttatttgcgttattgtgtcttcaacac

SEQ ID NO: 10518 - DNA, 576 bp, Glycine max
  Coding DNA Sequence Number=SeqID_739
gtaccatttcttgatgtatgcaacacattgctggatcccagtctgcccctcacaattttggattatgaagaatttggaaatcctcaaatacagtcaaattttgattctatttttagttattctccgtatgacaacattcctcacagcagttgctttccttcagttttggtcacggcagcagttaatgattcaagggttggagtttgggaaggtgctaagtgggttgctaaagtacgagatagtacctgccctcattgttctcagactgtaatcatgaaaacaagtatgataggagggcattttggggaaggtggacactatgctcaatgtgacgaaacagcttatgagtatgctttcctcatgaaagcttttggaattttaaatgaataagtttattaagtcagcagctggaaggttattttatattctgtgggaagagtttcatttggggtcaagaaaaaaattcctgtcctccctagtgcactggtcaatacctaaggctcccaaaaacgcagaaaaaggtttgagcattctatttttctaatgtaggcaaaattcgcttgaagctctcccagg

SEQ ID NO: 10519 - DNA, 343 bp, Glycine max
  Coding DNA Sequence Number=SeqID_740
aaatgcagtctatcaagtgtgttgttgtcggagatggtgctgtggggaaaagttgtttgttaatttcttacacaacaaatgcatttcctgcagaatatgtgcccactgtgtttgacaattacagtgccaatgtgatggtagatggtaaacctatcaatttgggcttgtaggatactgctggacaagaagattatgatcggcttcgaccattgtcgtatgcacaaactgatgtttttcttgtttgcttttctattgtttccccttcatcctatgaaaacgtgtcagccaaatggtacccagaaatttcacatcaccaacctaatgttccaattatacttgtggg

SEQ ID NO: 10520 - DNA, 577 bp, Glycine max
  misc_feature (67)..(67): n is a, c, g, or t
  misc_feature (107)..(107): n is a, c, g, or t
  misc_feature (186)..(186): n is a, c, g, or t
  misc_feature (324)..(324): n is a, c, g, or t
  misc_feature (392)..(392): n is a, c, g, or t
  misc_feature (421)..(421): n is a, c, g, or t
  misc_feature (460)..(460): n is a, c, g, or t
  Coding DNA Sequence Number=SeqID_741
agaatggatcgtagcatgcacttaccagatgtgtgtgtatgtagagcgtactctctacacagagtgngatcacacacacgcgacggacatgagtcatagagcataancatactactctctattatcacggcgtacagtgcatactctatgtcgcgtaactgctgcatacacaagatgcacgagctntaaccacaccgagtgtcatctacatactcatgacaagtattatgatatacataagtaacccactcgtgcgaagcgcggctgcaccctcgcatccgcgcatcgcgtggatgatacatatctattagatgtatgtgtgtngtctgtcgtatctctacactgtctgcgatgtctatctcacacgcgcgatacactactgtccatcacancagtccgtccgtgttggtgtgtgcgcgtntcgacagagttcgtcgtgtatcgtatcactacactacgntctactactgctctgtacgtgcactcatgatgtagtagagacgacagacgcgcgcacacgagcgtgatgaacgcagatgtcgtcacactctatttgatgctcgagacactaccaact

SEQ ID NO: 10521 - DNA, 568 bp, Glycine max
  misc_feature (87)..(87): n is a, c, g, or t
  misc_feature (187)..(187): n is a, c, g, or t
  misc_feature (272)..(272): n is a, c, g, or t
  misc_feature (409)..(409): n is a, c, g, or t
  misc_feature (451)..(451): n is a, c, g, or t
  misc_feature (470)..(470): n is a, c, g, or t
  misc_feature (487)..(487): n is a, c, g, or t
  misc_feature (540)..(540): n is a, c, g, or t
  Coding DNA Sequence Number=SeqID_742
gacaatatcgtggtgcgcttcgcgttgcgagtgagacctcgagcacactagtctctctcgtagcgttcgtcgtcggcactatagatncgagcatgatcacactcgcctcttcctgtcagacgtcgctctctatgagtcacgatactcgtcatcatcctcgctactcgtcgatctgctacacttctantctctatcgacgaatctacgatgacgacaccatatactgagatctccacacacgacaccaaccatctatatctcctactacatgntcgtccctatcgctcactcaatgctctgttacatctgtcagatcatcatgtcgcgcactttgctactgaatatagtatgcgtgtgtaggcgcgatgcgtctactatcgtagatatgtagaacatgacataatacgangatcggttcagtgtacgacacgtgaacttatcacactagcanagcactgatatgtacatgntcgcagtcgaatagagncgtgatagtgagatcgacaatatcgaagatgagagagtagacagccatcaaancatacagacactatctcgtatcatgtaa

SEQ ID NO: 10522 - DNA, 502 bp, Glycine max
  Coding DNA Sequence Number=SeqID_743
gttgtgcgaagcgaagccaggctacgcagacaagcaggccgagggcgaaggcggtcgggtgccacagatggaggcgctgggacagggtggtgaggtgaagaggacggggtcgagagcagctacagtgcgtgcatctgtcccctcctttgttttttcaccaagcctacctaaaatctatcaaattattcagggtaagatagccgaatacatctacctctggttaattttattttttttttaacatgcaagtactttattcagctgattgggtcttcttttacttccgttcctcaatggtattcattggctgatcgccatgcatctagaaggtgatgtcctgaagcatctatcaacatggattatagaccgaattatcaacaagtatggtgttagccagtgttaccgtgctctaaaactatgcaatagtgatctcaaagaaccataaatatccaacatagtggtggactttggcattttgtgtttctgttatgactttcctttg

SEQ ID NO: 10523 - DNA, 588 bp, Glycine max
  Coding DNA Sequence Number=SeqID_744
tagaacatctcaacaagggctgcaacatcgcctagaggttttcaagacggcttccaaaggatggggtgttaggacctgggacacgatcctcccgggggctccaatctgtgagtatgttggggtgttgaggaggactgaggaagtggatggtttgctacataacaactacatatttgacattgattgtcttcaaactatgaagggtttagatggacgggagaaaagggcagggtctgatatgaatatgccatcacttcatgctgaaaatgattccgaggcaccaccggcaccagagtactgcatagatgctggctctattggaagtttcgcaaggttcataaaccacagctgtaaccctaacctcttcgtccagtgtgtcctaaccaatcaccacgacgtgaagctagccaaggtgatgctttttgctgctgacacgatacttccacttcaggagctctgctatgactacggctatgtcctgaacagcgtcgtttctgcggatggcgaaattgtcaagctgccatgctactgtggtgccccagactgccgcaagcgactctactagcggagctcttctgttctggattt

SEQ ID NO: 10524 - DNA, 416 bp, Glycine max
  Coding DNA Sequence Number=SeqID_745
taaaagcgaccccaggcagatctggcgtaatcccccaatccccccccaaagccccaccccccgaagtcgcccaccctttttattattattatcccccccccctgttgcaaaatcgacaaaaggggttagtgagcgccccgagatgtcttcaaaggtggtgttttgaaggcaaccccccccacgcaagtgagagtatctatcgaccccagaaagcaagttctcagctttggctcagaggtgaagattgggggggccgccctgcctggaaagtagacgcagaagagagaatggctcaagtgaaatgggctgaattaaagagagggaatgtgaaggaagagagagagagagagaatgagatttgagggagagtgagacacggccaagttgaaagtggagaaagaatcggcccccctaag

SEQ ID NO: 10525 - DNA, 488 bp, Glycine max
  misc_feature (252)..(252): n is a, c, g, or t
  misc_feature (342)..(342): n is a, c, g, or t
  misc_feature (377)..(377): n is a, c, g, or t
  misc_feature (405)..(405): n is a, c, g, or t
  misc_feature (453)..(453): n is a, c, g, or t
  Coding DNA Sequence Number=SeqID_746
gaccgatcgtctctgacgtatcatactgcacacactagtgctgctactcatatgctgtgccatcatcacgttgtatgcgttatcactttctgtgctacacgcgcgacttcagtatatagtgtcaagtatcatatagaagatcacacacgtggctatgcatgccatatgataccgctgtctgtgcacagtgttcactatcactgctctacgcatacttgagcagcatcatctgaactagacgatcacgacgcnggcttgaggacgaccgatctaagactacgtggcgtcaaccgactagatcgtcacagtcctctacttctactcgactcaacgcactctctngtcgatctacgtgttcagacacacctacgcatgcngcactagtgtaacatgaactagaacatncgtatatgtgtacttctatggcatctgatctgctattagttagtatantcccgatcgtacatgaacgcgatcagcacgaccta

SEQ ID NO: 10526 - DNA, 257 bp, Glycine max
  Coding DNA Sequence Number=SeqID_747
gtgatcccagcataggtgtctgcatcagattcagaatggagaatcgaggcgtggcaggtcaacggcatctaagtgctgctctccattggagtagccagtaggaattactccctctagtcaatcgagtaagcggctcagcttgcaacctttgtatggagcattttcctagaaggacagtcgagttctcgcccgtgtccgatgctgtagttggatggacatcatctatttgcgattaagccccggtgttgcgcgggtct

SEQ ID NO: 10527 - DNA, 486 bp, Glycine max
  Coding DNA Sequence Number=SeqID_748
gtttccatgaacttaaaccctacattttttaagaatgtaagcttcatggttaatgagttggatagaagaactaaaaaaaagaaataacttttttgtgctattctacaagcaccactttttatgcacacttttcatgctgaaagaaactctctgcctggaaactactctcatttgacatgcttaagccacaaatctaccaagttccagtatcctataaaagcgccaacaagaataagggccatatattaggagggaaaaaattgtataaatgaatactgtctcctaactcctaacccggaattgatccttgtatattctcatcttctaagaaggaaaagtaagcatcttcctttttatggttatatgataacattttattctgtgctttttccccctatttaataaaattccaaagaaattttttcccatttttagatgtatatatgtctcacgacttgttttttcctgcacagatgccttgggagc

SEQ ID NO: 10528 - DNA, 286 bp, Glycine max
  Coding DNA Sequence Number=SeqID_749
gctatgtttaatggcggcgacgtatcagctgcatctaatctttatcgaaatggtgttggctgtggtgcctgttaccaagtaagatgtagcaatagtgctttatgctcagacaacggcgtgactgtggttataactgactcaggctcaggtcataacactgatttcattcttaagcaacgagcctttggtagaatgggtctcaacactgacgctgctggatctctaatagctcttggggaacttgatatccaatatagacgtgtctcatgcaggtacccgaacaaaa

SEQ ID NO: 10529 - DNA, 551 bp, Glycine max
  misc_feature (82)..(82): n is a, c, g, or t
  misc_feature (225)..(225): n is a, c, g, or t
  misc_feature (293)..(293): n is a, c, g, or t
  misc_feature (364)..(364): n is a, c, g, or t
  misc_feature (405)..(405): n is a, c, g, or t
  misc_feature (488)..(488): n is a, c, g, or t
  misc_feature (492)..(494): n is a, c, g, or t
  misc_feature (496)..(496): n is a, c, g, or t
  misc_feature (500)..(501): n is a, c, g, or t
  Coding DNA Sequence Number=SeqID_750
gactatctttataacacttgccgcagtgcagtgtagcccatcatgttatactcatgagtgttgcgtactgatatatcacagntgtggttaggtcgccagatctgttgtgactatcagtagatgagtgatgagaggcatgatcacacggccactacaaaatatcgcagatagtgaagacgatgagaatgctgtggcggtacatgacacgatagcaggagggtgggntagtgaattagaatatgtgagtcaattacctgagacgtgagatgctgctgctcactgctttcacgtcnataagctaggtcttactaatcttacgtatcaagtgtttaggtataatctgagaattaagactgagagcatntattcatctgacctgtgcctctccctatgaatgtggccctngcgcaggttatctcttagtatgcttacctagggccggcgcgcgttgtccgagaagagtggtatgttatttgtaataggttttnaaannntnaaannaggggggggggggttatcaaatcaacttctggtgagcaaggtggtgtaca

SEQ ID NO: 10530 - DNA, 498 bp, Glycine max
  misc_feature (63)..(63): n is a, c, g, or t
  Coding DNA Sequence Number=SeqID_751
gcgcgtctcgaagtgtctgcatataaagttctacgtcgatgaacttttttaaacgatgtctgntaacgttcttcgagctcatatgtcgaataccgctttattcacgagtagcatagtacattaatctattctaacttcacgtacatgcagagatgcttcaccctgcgcgtcacacctgcgcctccacgctctcgatcgctcttctctccccataatcgctcgaccttaaacgcgatgcgtggagaatggtgtattgagatgagtcccgcgactttgatgtagaagattcgcacgtgagttgggtcctgctgtgatacatcagggtcatatatatatatacacgacttcgtcctctatggggcgaacaaactctatctctctccgacagtcagatattaaacaaaggtaatgggacgaggaaagcacatagagtagggcggaatttccttgcgccccgcgcggggatgtctccctagataaaaggagacggcccgccca

SEQ ID NO: 10531 - DNA, 461 bp, Glycine max
  Coding DNA Sequence Number=SeqID_752
gtgcggttagtctgtttgtgttagtcatgacagggatataggtcggcgtgggatcgaaatttagcgagtggagtaggcaacgtagatgagagtgcggtgttgtcagcattatttgccgtaggtgccacggggtttcagagaggcaaactatctaggagcttgttacgctcttctcgtacgataaggaaacgttttagtatccgtgtgggtcaatcaagtgtaggggcttgagtgcatgccgaggtggatgggtagtctgcactgagaaacgcatatttcgttgttctcgcgctaaagatgcgttcgggcgctaggtgtattttggtgctgctcggagaggagaaatgcgtgtgctaattttaagagattcggggggagattttaactggggtgatatatgtgtgccgcccctgcaaggagggggccctgatttttgtcaaccaagggcgtgttaaacagtt

SEQ ID NO: 10532 - DNA, 513 bp, Glycine max
  misc_feature (46)..(46): n is a, c, g, or t
  Coding DNA Sequence Number=SeqID_753
ctagtcgcttcgtggacattttcgagaatctacacattatatgtancatatcaacgaatagatgtgtgtatgatataggtatagatagtattaatgatgacatgactgcacgtctcatcgccttgacttgcgcctacgcccctagttaactagttatatgcgcccactcgcacctatcttaccgctacggccataccgtgacgtgtgatagagtatgttgaggcatactgtggtacgctcgctgctgtggtgtacttccgagcctactctccatcaagctagctcaccgcaccaattggatgcaaatatcatgagccctacctgtctctcatggcaaatataggaggtgtcttcatttctctgcctctcgagcctacaatagaataaaaaaagaaggaacagcctcctctcgctcggcgcggggggggggccttcttcttttcttgttatgcggggccgcgctccccccgcgggggggggcgcgcgcctattaggtaatgctccggccactcc

SEQ ID NO: 10533 - DNA, 370 bp, Glycine max
  misc_feature (277)..(277): n is a, c, g, or t
  misc_feature (312)..(312): n is a, c, g, or t
  misc_feature (323)..(323): n is a, c, g, or t
  misc_feature (340)..(340): n is a, c, g, or t
  Coding DNA Sequence Number=SeqID_754
gctcaatacttatgtacgtggctttcgtaaagttgcaacaagcagatgggagtttttcaatgacaagttcaagaaaggtgaaagagaacttctacatgagattcggcgaaggaaagcttggagcagcaagcaacaacctaatgcaccaaaccaaggcacaccccaagactctgatgaggatcaaaggtcctcatcaacctcatcatctttggttcactactcttgtggatgaaacaacgactcaagaaggagatgggtgctgactctgagctacaanatgaaaagaagtgcaaggactgctgattggttgcncatttctcacntccaaggagagaaaagntaaaggcatgtgttggatgaaataaggtca

SEQ ID NO: 10534 - DNA, 571 bp, Glycine max
  misc_feature (65)..(65): n is a, c, g, or t
  misc_feature (68)..(68): n is a, c, g, or t
  misc_feature (70)..(70): n is a, c, g, or t
  misc_feature (102)..(102): n is a, c, g, or t
  misc_feature (141)..(141): n is a, c, g, or t
  misc_feature (144)..(144): n is a, c, g, or t
  misc_feature (292)..(292): n is a, c, g, or t
  misc_feature (294)..(294): n is a, c, g, or t
  misc_feature (347)..(347): n is a, c, g, or t
  misc_feature (352)..(352): n is a, c, g, or t
  misc_feature (360)..(360): n is a, c, g, or t
  misc_feature (370)..(370): n is a, c, g, or t
  misc_feature (415)..(415): n is a, c, g, or t
  misc_feature (425)..(425): n is a, c, g, or t
  misc_feature (428)..(428): n is a, c, g, or t
  misc_feature (436)..(436): n is a, c, g, or t
  misc_feature (444)..(444): n is a, c, g, or t
  misc_feature (450)..(450): n is a, c, g, or t
  misc_feature (458)..(458): n is a, c, g, or t
  misc_feature (490)..(490): n is a, c, g, or t
  misc_feature (493)..(493): n is a, c, g, or t
  misc_feature (511)..(511): n is a, c, g, or t
  misc_feature (540)..(540): n is a, c, g, or t
  Coding DNA Sequence Number=SeqID_755
actgtctcgtatagtcgcagcgtacgtcgtgaacagtgttgagatgcgtcgtctctgatagagtngantntggtgtaagttatgatgatgctagccacatgntatgcaatcgcacgtcgcaggcgctgtagttcgtcctcntanactcagaggtatttgtctacgtgatctcatcacgccgttgaggaaaggtatgtagagcgaccctacactccacacttctccgacgtactatgtcgacgtgtaatattgcttatgtgtagtatatagtactcagacagctatatatacnangttactgatttaattcggtcccgatcactgactgatgtgttcacgtatgatgntttgntacatcgncggatatgtncttgctttcgactcactatcgtgtatgcgacagctgcgatataantgatatctgnatnatcagctncgatatgnatcgcngtgtactncttagattactactgcgcgcagtaggctcgtnatnacgtccggcgtgtgtgcncgacgaccgacgcgcgtagtactcatcantcgactgctatactaaatactaccgtcgtct

SEQ ID NO: 10535 - DNA, 479 bp, Glycine max
  misc_feature (73)..(75): n is a, c, g, or t
  Coding DNA Sequence Number=SeqID_756
atatccagtttattgcttcctattggctttctatttctctttcatgctaacatgaattactgaacactggttnnntaggcacttggtgttctagttgataggtttgtacagacggctgattcaatttccctacgctttctcttccttttcctatttgcctacagtttagtatcttcttggcatttgaagttttactttaattttatctatcttattgaagaaagttaacagaggactaattttacttcagttttatctatcttcttaaagaaaatgaaaggtaaaacttaagaattttatttttaattcatatctagtaagggcatccctggctccattcctttccagttttgatcgataatgaagcgtgttattgtattttgttgtgtttagccattcatgttatattctttaatttacctgtaaataacatttatgtagtctacgttgtaaataatctttatgcacaattttcggaa

SEQ ID NO: 10536 - DNA, 184 bp, Glycine max
  Coding DNA Sequence Number=SeqID_757
ggctgagtacgaccgagcagtcaccgtatgctcccacgacggtcacctcttccaggtcgagtatgccctttaagccgtgccaaggtgcaacgccgatcgcggcgtccgcggcaccgacaacgtcagcctaggcgttgagaagaaatgcaccgtcaagctccaatactgctggtcggtgatgaag

SEQ ID NO: 10537 - DNA, 482 bp, Glycine max
  Coding DNA Sequence Number=SeqID_758
gttgttctttttcaagtccttcttgataaagtctttgtatagttttagcttctgatcgtacagattcatcgtcatcatcatcatcgatttgctcttctgtttccttggtctcttcactttcctttatcaaatcatgatttgctctgatcatctcccttctactcgatgtttcttccatctcttctgttgataccggtgtcacattatttagtgaagaccaaggagcttgatgttgcttcatgagatttttattttctatacgtcttggaaggtcatactggttaaggacagtggaaacagcgccgacacctcctttggcataggagtttttatacttgagagctgatttctggtcaagtgagctattcatatctcgctggtcgatattatacagattcacaatctttttagcactatttctatgtggattccctctttctaatgtctgatcaatctcataatgagcttgatgtccgtgacca

SEQ ID NO: 10538 - DNA, 483 bp, Glycine max
  misc_feature (447)..(447): n is a, c, g, or t
  Coding DNA Sequence Number=SeqID_759
ggcgaggtcgcagctataattctctcctttcactagcacgacacaccagcgccatatacagcacccacccccacaaccgcaggtgcggtcctgccagcggtccacagccacagagggaacaaagccggagagaaatacacccctccacaccccgcgccggatgagtaagattaacacgttgttcgcgctttgtctactcaatttcctcctctttattttttatatatgttcacaattttatcgttattacgatcatgtatctaccttccccgtgaccgacaaaatcatatcgctcccatcagtatcaagtctcgactgagcacgggtgctcgtacacccaacacacctaccgactctagtacaagcactctctacaccttcgttccctctatcctctcatcactctcctcatgtgttcctctctctctagctgacacttactcaaanggtagtttaagagggccacgtagagttggttagcaa

SEQ ID NO: 10539 - DNA, 528 bp, Glycine max
  misc_feature (52)..(52): n is a, c, g, or t
  misc_feature (80)..(80): n is a, c, g, or t
  misc_feature (106)..(107): n is a, c, g, or t
  misc_feature (158)..(158): n is a, c, g, or t
  misc_feature (187)..(187): n is a, c, g, or t
  misc_feature (201)..(201): n is a, c, g, or t
  misc_feature (212)..(212): n is a, c, g, or t
  misc_feature (249)..(249): n is a, c, g, or t
  misc_feature (258)..(258): n is a, c, g, or t
  misc_feature (261)..(261): n is a, c, g, or t
  misc_feature (284)..(284): n is a, c, g, or t
  misc_feature (314)..(314): n is a, c, g, or t
  misc_feature (356)..(356): n is a, c, g, or t
  misc_feature (361)..(361): n is a, c, g, or t
  misc_feature (371)..(371): n is a, c, g, or t
  misc_feature (383)..(383): n is a, c, g, or t
  misc_feature (419)..(419): n is a, c, g, or t
  misc_feature (423)..(423): n is a, c, g, or t
  misc_feature (444)..(444): n is a, c, g, or t
  misc_feature (459)..(459): n is a, c, g, or t
  misc_feature (465)..(466): n is a, c, g, or t
  misc_feature (482)..(482): n is a, c, g, or t
  misc_feature (503)..(503): n is a, c, g, or t
  Coding DNA Sequence Number=SeqID_760
gtgctgggtatgtatagataatatcactactatataataatacattcctctngtataccttgtatgacgtagcgacaccnctattataatgtatgcgttagtcgtnngcgccgtgcgcgccgcattagtgactagagagctagccctcgtgtacacgnagcgtagttccagacacacatataattgngcgccgccagcgtnaacagcggagncgtagtgatgccgagtgatagagacagagcacgtgtntaataaaantantgcgcgctcgcaggtatatagcngcacgagcgcgaagcgctaataatcatganttatagcagactacaggcgcccgcatgcagctcgcagcaagncaganctaacaactngcagcgtcaagntgtgattaagagaatgacgatcactcatgccggtgnaagnagagataacgcaggagtattngttacgtctagtaangagtgnngtggatcagcagagtntgcgctctagcagttgcagcnattgatcgcggcgtcagcgctgagt

SEQ ID NO: 10540 - DNA, 357 bp, Glycine max
  Coding DNA Sequence Number=SeqID_761
atccttgggcacgagcttaagccctccaaaaactctctctctctctctaaacccttttaagcatgtccgtacactcaaaactgaagcaccaccccatgaaccttgcaaccccaagttcccattttgacaacgacccaccatgcaaaaccaagaccaaaacccaaaggaggctccttcggatcatagtcaccgaccatgacgccaccgattcagactccgacgaagaagaagaagaacaacaacaaacagcaagagtgaagagagaaatcacccaaatcaacatgcaacttcctctctcatacaatagatcctttccctcttcatcttcttattactcttcggcttcagcttgcactt

SEQ ID NO: 10541 - DNA, 253 bp, Glycine max
  Coding DNA Sequence Number=SeqID_762
tccccgtgcccaactgggttttgtggtttcaaaggaccaagggggcccgcgtttccacctaccccggttgccaccaaactcgggtttcaacgaagttcggtttcaagctacatcccctttccgatcagttttccctgtgccttacgttctcaggcactttcaggcaatgattccatgtgatcgcaacataggactgtcatctggaacgtttaaatctgtcagatgatctcatctccagttctttggactcggg

SEQ ID NO: 10542 - DNA, 165 bp, Glycine max
  Coding DNA Sequence Number=SeqID_763
aaaacctctgtatcctgttacttcttcctctcctcaatttgtcaaaaaattctactttactaactttttcttatgatgtctacaggcaagcttgagggagaactctcctgttattagggctaaggctttaaaagcagttagtatcattgtagaggcagatccaga

SEQ ID NO: 10543 - DNA, 400 bp, Glycine max
  Coding DNA Sequence Number=SeqID_764
gagagatcttcgtttgatcaccggcgcaatcgcaacaatggcggagaaggcagtcacgatccgaacccgtaaattcatgaccaacagacttctctcaaggaagcagttcgttattgatgttcttcaccctggaagagccaatgtttcaaaggctgagctgaaggagaagctagcaaggatgtacgaggtcaaggacccaaacgccatctttgttttcaaattcagaacccattttggaggtggtaaatcttcagggtttggtttgatctacgacaatgtcgagagcgctaagaagttcgaacccaagtacagacttatcaggaatggtcttgacaccaagatcgagaaatcgaggaaacaaattaaggaaaggaagaaccgcgccaagaagatccgtggt

SEQ ID NO: 10544 - DNA, 500 bp, Glycine max
  misc_feature (42)..(42): n is a, c, g, or t
  misc_feature (56)..(56): n is a, c, g, or t
  misc_feature (72)..(72): n is a, c, g, or t
  misc_feature (117)..(117): n is a, c, g, or t
  misc_feature (168)..(168): n is a, c, g, or t
  misc_feature (173)..(173): n is a, c, g, or t
  misc_feature (408)..(408): n is a, c, g, or t
  misc_feature (450)..(450): n is a, c, g, or t
  Coding DNA Sequence Number=SeqID_765
gctctctctgctcactatcgtcaagctcagacactctatcanactctcactctctnctactctcattctctnactactttcactctgccagcggctgtgttctctactagcacctancagatcgctcctctactctcggtactgcgcagaccatctgtcatacatgtncacangctgagcggactctcctctgccgctctgtcgtcaccgcgtccctagcggacactatacgactctctagcttcattatctcgctcacactcactcacgccacttcataactctctcatctctacgtacatctgcacctcgatcacacacggcacgtacgctcgctacgcactcccagtgcactatctactctccacgaatactcattctcacgatagtcacgctgatcttcactcngctgatctacgtacagctcctcgtcactctgtgacacgtgcntgtatggtatgcaggtgcaatataaactgagatgcagtatagacacgata

SEQ ID NO: 10545 - DNA, 590 bp, Glycine max
  misc_feature (74)..(74): n is a, c, g, or t
  misc_feature (102)..(102): n is a, c, g, or t
  misc_feature (508)..(508): n is a, c, g, or t
  Coding DNA Sequence Number=SeqID_766
actccatacgagtaggctgtcaatggatcgcctatatactcctatatccgtccgtcacactgctcgatataacnttcctaataaaagcgtctgacactaatntcattctctgctcagcggtctacggcatcgctctactacactcctggagtgcgactacacgcgctcttgacacagcccacgcaaacactacggcctcttccctgcgcacatactagtcacacctataacacgctgatagcctctcgcccgcacaccaataacatatcttaccaatccgggcgacgccggcgcaatgatgtgctcataatccatctttctacgtgctggagatcgatcatacacagactcacctctctggtctctcactatcaccaccttcttgtatcaacacatacccacatccagagtacaactacccgcgcgcactctgcgcactacggacacgacactgcgcacacatactcatacattccacgacactacacggcggtcgtctctgtgcgtnccataatccatcgcacttcgctgtcacttcttaattcaccgtcagtgaagctctcaaggcaccatggcgcaatctatattac

SEQ ID NO: 10546 - DNA, 571 bp, Glycine max
  Coding DNA Sequence Number=SeqID_767
ggaaattccctatcaatatctcaaccaattaaacatgatttgtcattgtgaaaagtgtatggaagatgtattagcaatttcactgaatcaagtgaaaccacaatatataacagatatcgataaaatatcttacagtaaatctgagatggtggataaacagaagaatactgctatgctggtcattctgacagaagcagcttccaaagtctccgcatttccaagatgtgaaaatcgcctgctgctgaacaaggaaaccaattgatttgcccgatttgcgatggacattttgtgcatgcttttacatggaaatcattacttctattaaatgatgagcgtctttgtgtagcatgtaagaatcaattagtaaagattgagcgtcctatttgtccaacctgcggaagagcgcagtcaaatgatcaaatgtgccaagactgtgatagatggaatgaacgcattgattctactaaagtccttataaaaaataggtcagtttatatctacaacgagttgatgaaagatgtctttgcccgctttaaatttcggggtgatacggctttagttgagctgttta

SEQ ID NO: 10547 - DNA, 584 bp, Glycine max
  misc_feature (286)..(286): n is a, c, g, or t
  Coding DNA Sequence Number=SeqID_768
ttagggtaggcttctctgccatcatcctcgactggatgttgtcgtaatctgccctaatataatgataaagtgtgtataactatcggtcgggctaaatataaacatcggtccaggcacttgaacgtttctaatatctatacggtcagagcgaggcgatctgtgcgctcgtgatctcacggcctcttattctaatcgcgcaatctaattcaacacaccgccgagagcgacaacgagcaagacgtgtggggacagccgaacgagtgaaagaaagaaggaaaatgataanaaaacagtctagttctacattatttagtattaacatactccactctcacctgctagtcacttctacacaacgtagactagctgccaccaaaataacaagcacaacacaaactgctaataaaaaaaccgacgcccttcttcgtccgcctcatacgtctgctctctgtcctcttgctcgtagcgcaatgagtactatggatggcacgcttcctcgtgactccgcggtctgtcgcgcttgtgacgtctgctacgcccactcctcacccgtcgtcgcgagcgcactaggtagtcacgtactc

SEQ ID NO: 10548 - DNA, 528 bp, Glycine max
  Coding DNA Sequence Number=SeqID_769
ttaattcgccgttgcaggcacattcccccctttcctcccagcctggcgcgttatcagcggaagggaggcccgcccgcccgcaaccgatccctccccaaaaaaatatagccgccgcctctggaagggggcggaactggaaccacgttaccaccccggcccccataggcgttccgttcgcaaattttcaccctgctgaaactttctctctggctaccacctacacggttccccttccgttcctttcttcaacaagcggacgcccgaagaatttgtgccgaaacaccgccccctttgtgttactccccgccgcgggccgggcccctgccccccaccgcacgcctaagagcgcaatacgccccctcgggcgtcccggggctgccgagtgttgccccgcctccactacaatctccttcctactctccttctctcttcccgtccgggctatgcggcgcgcccccctctctaccgtctgccctccgccttttcttcgttagacggtagcgacgagtgtatcagactccgattcgc

SEQ ID NO: 10549 - DNA, 350 bp, Glycine max
  Coding DNA Sequence Number=SeqID_770
gcaatgccactgacactggttcaagcagcttcagtgtcctacttgagatcccactcaacggttcctactctcttcaagccttcctctggtttacttcttaaaaagtcaatctttcctgattccaagttaacaactttccaacggatctttcgttccacgaagaaagcctcaaatgggtctgctcgtgcttccttgctcgagacccctgtcttgtgggctggtcgagtttgtgtcttttacgcgcttgtcaaagctggtttagctggatccaagtctaaccccatcgtttctgggttggaaagtggtggtgtttatgttgaagatgatggtgcggatcttggtttctctaa

SEQ ID NO: 10550 - DNA, 587 bp, Glycine max
  misc_feature (201)..(202): n is a, c, g, or t
  misc_feature (256)..(257): n is a, c, g, or t
  misc_feature (547)..(548): n is a, c, g, or t
  misc_feature (550)..(552): n is a, c, g, or t
  Coding DNA Sequence Number=SeqID_771
ttggtccgctttggcccgtggtcacaccaattgaacaagccaggtgcaccaaacttaggagcccgcatctaccacgagaagcaccattagacaccgcatttgccagggacagggcaaccaagagctgcccaagaaccattcagggtcaggggaccaataatcttgccccccttgatcttcaaactccaaccgaattcgacnnctactacttcaagaatcttgttcaaaagaagggtctcctccactctgatcagcnnctgttcaatggtgggtccaccgactccattgtgcgtggctacagcaccaacccgagctccttctcctctgacttcgccgccgccatgatcaagatgggagacattagtcctctcactggctccaacggagaaatcaggaagaattgtagaaggattaactaattactaattgagtctccaatattaagggtcctactacacatacgcaagcaatttaattgtgtttaataagttgttaaaacatgttttggttgtgttttggattccgtggtgggttaatttcctagtgnngnnncatgtaatcaatgccgtaaacgtaagtgtgtgaaa

SEQ ID NO: 10551 - DNA, 552 bp, Glycine max
  misc_feature (463)..(463): n is a, c, g, or t
  misc_feature (517)..(517): n is a, c, g, or t
  Coding DNA Sequence Number=SeqID_772
gaggttgcaaatgcacccggacttggccttttccggcgagtcgaccacgaacgagacttttgtcttcggcgtcgccccgccgatgaagaaccagtacaaggtttctggagagggtgtccctgcagaacgatgcatgcaaagtgggggatctgacctgcaggagggatcccttgcaccctgtaaatgaaatcaccccgccaacctttcttaaggcaggcagaagataaatcagcaattttaattaatatttacgccaacccctaaaggaagggcctcagggctctggttttaaaggaggaaataaacggcctccccccccccttttggggtttttataaatcggaaaaaagggggttatatagtctccgtggttggacggtacaataatcctagccctcctcgccccgccccatcggggtggaagaggtaggagcgcccacgctgcgcaactcaccacttcccnaacgcggaccgcccaaacggcgggaaattcgacttccccgcttaaattgtagtnctccacccactacaattattgtaccctcttatttc

SEQ ID NO: 10552 - DNA, 473 bp, Glycine max
  misc_feature (88)..(88): n is a, c, g, or t
  misc_feature (150)..(150): n is a, c, g, or t
  misc_feature (156)..(156): n is a, c, g, or t
  misc_feature (252)..(252): n is a, c, g, or t
  misc_feature (367)..(367): n is a, c, g, or t
  misc_feature (373)..(373): n is a, c, g, or t
  misc_feature (382)..(382): n is a, c, g, or t
  misc_feature (389)..(389): n is a, c, g, or t
  misc_feature (393)..(393): n is a, c, g, or t
  misc_feature (439)..(440): n is a, c, g, or t
  Coding DNA Sequence Number=SeqID_773
ggatagctcaatatcagcacatagtttgtcttgatgatacgtgttttttctatgtagaatagcgtgtatatgtgagatatgttatatnggacttctatccttgtcacgaggtgtcaattccaagagtatacaaattattgataggtagtnggaaancccgatatatttataaaatctatagcagtgcgcgaaggagagcgaggacaggagcagacattgagacaatatagcgatgtcaatggtgttaggatncatttatatagagagtaatatatactgtagaggtggtgcgtgtgtgggtgtatattatgtgttttttctctagtatatcacaacctaaggattaaaggtcctcttcttatgtaantaattntatgcggcntcacggngtcncccatctcggtgtgtgtggatgaggtaacttccctgtaggtggagnntctctcccccgcacgagtgagtagagtgccgcc

SEQ ID NO: 10553 - DNA, 374 bp, Glycine max
  misc_feature (175)..(175): n is a, c, g, or t
  misc_feature (211)..(211): n is a, c, g, or t
  misc_feature (277)..(277): n is a, c, g, or t
  misc_feature (306)..(306): n is a, c, g, or t
  Coding DNA Sequence Number=SeqID_774
tagggctcaattgtgccgcaatcagcgcagagcaactatatactactgacagcgtgacgcggagagcgcagttactaagagcaacataacctatgcgccacacaatatattaagagagagcgcacagtgaacactctcgtgttgttctattttttgatacgtgaatatgatttgntatcagatatggtagaggagtgcgagagtagacagnacaacagagagacaaagaatagaggtggtagaagtgtgtagtgctctcagcgcatattttagttangtgtggtggggtctgggtgcatacaatcnctatatatgttgaaaatatagcaatatcatagacaatgtaatataaacacaaacagaggagcgagccc

SEQ ID NO: 10554 - DNA, 503 bp, Glycine max
  misc_feature (84)..(84): n is a, c, g, or t
  misc_feature (92)..(92): n is a, c, g, or t
  misc_feature (120)..(120): n is a, c, g, or t
  misc_feature (163)..(163): n is a, c, g, or t
  misc_feature (221)..(221): n is a, c, g, or t
  misc_feature (231)..(231): n is a, c, g, or t
  misc_feature (318)..(318): n is a, c, g, or t
  misc_feature (340)..(340): n is a, c, g, or t
  misc_feature (360)..(360): n is a, c, g, or t
  misc_feature (364)..(364): n is a, c, g, or t
  misc_feature (467)..(467): n is a, c, g, or t
  Coding DNA Sequence Number=SeqID_775
atctctcctgccatatgtgctacttgtccgcgacatttcactctcatgacgctaccacgcatcctcacaccgtacatcactccncacctccnacacacatcactccgaccttatgctcantgtttcatcaagccacagtcacgcactaccaccaacatatttntatctatttaccatctcatacacacgtactccccaccaactccggatcgctcgtctangttctctctncattgccatcccacactccatttccaccacacaagctccatccagagacacacacgcacagaggacacaaatatgcgaatatatccntcaagtataaaataataatgtnggacacacacaacacaccanccanacatgcactcaactcaccacacattatcgagattaatactccacacatatgaccgcatctatctcccccgctccagcactttctccactccactcgacacacnctgtatacattacgctctcacagaagcttttcatcg

SEQ ID NO: 10555 - DNA, 347 bp, Glycine max
  Coding DNA Sequence Number=SeqID_776
gatttacgattcaaccctctaactttggtacagtggcttccaacgtatcgccttctgccctggataaagaacagatagattgaatggccgaaatggacaagaagtatcgcgagaaatttttcaacaagaggacccagaactgttataaaaagtgtgttgaaaataggtgcaaggagtgctggcttaatatgtgtgaaaatagttgtattcatgtctgtgatctaattggctggcatgtgggtaatctaagtggtccaactgcttggttctttaagtcttcctttgtaatcctataatgtaatgtctcctttttacgatttgctacatgtttgccacatctacgatat

SEQ ID NO: 10556 - DNA, 406 bp, Glycine max
  Coding DNA Sequence Number=SeqID_777
tgcccctgtcgctgttcttgttgttgaggatactggcgggctaccactcacactgacctgtttgactgtgcaatgctgatcgtcgtcgaactctgagtcctcactctgcatgaggtatgagtgctagtgtacttggaaagcatactgctcgatcgtcgtggggagaccgttcgtatactcttctgtacagagactgggagacctgccagctactatgacaagagtcgaaaaaacttatctaagggactgcacacgctttgctagatacatagttgtgtgaaggaccccacactacaatctctgtgcagaggacgagaagcttatgaaccacccagatatgtgacaataaacacaggcattgagcagctcttggagattgagcaagctcgtgaagaacctgcatata

SEQ ID NO: 10557 - DNA, 551 bp, Glycine max
  Coding DNA Sequence Number=SeqID_778
atcctcctctactatcatatatcttccttttcatctcccccttttctcctcacttctctctgtcttgcctcctcgctcgatactactcgtctctgtctttcgcatcctcgcattctcatatttcgcatttctccctctctcccccttctcttcctccccacccttctcttcgccctccggttccccccgcacaccctctcgcgctgttctgttttgtcttttctatctcttttcttctccccctctctctacttctcattctctctctctacctcttagctggcattctaattcaacacctttctttttttttggggggctaaaatactccagcgtcttcttcttcactcctcccgcgccccccactctcctttatttctccttttcgcatcccctctcttctcggaggggaaacttcccttcctccccctctcttacccctccctttttttgtggaaaatattttctcttctcttctcttctttctttcttccccttccccatttcttcgaaacctctctcacacccgcacctcattcttcagatattat

SEQ ID NO: 10558 - DNA, 441 bp, Glycine max
  Coding DNA Sequence Number=SeqID_779
gtcgagttccaatggcatctcttcactccctcgccgccgtttctgtaatcgctactaaaggaacagcagttacttcgtcttgttcctcaactctacgccctctttcatctctacgatttaaaccacgcgagctctctatattcccaaaccatcgcaaaggcaaagggggagcaataaaggcgcagtcgaaagaagcaagtcttcctcctcctactgtgggagagggagatgcattaactagtatgaagcatcttctcctgcctgtgattgatcgcaatccttatctctctgaaggcacccgacaggctgctgctacaacaactagtttggcaaccaagtatggagctgatatcactgttgtagtcatagacgaagaaaaaagagagtcatcttcggagcacgagactcaagtatccaacatccggtggcatctagcagaag

SEQ ID NO: 10559 - DNA, 555 bp, Glycine max
  misc_feature (37)..(37): n is a, c, g, or t
  misc_feature (40)..(40): n is a, c, g, or t
  misc_feature (104)..(104): n is a, c, g, or t
  misc_feature (108)..(108): n is a, c, g, or t
  misc_feature (152)..(152): n is a, c, g, or t
  misc_feature (163)..(163): n is a, c, g, or t
  misc_feature (189)..(189): n is a, c, g, or t
  misc_feature (214)..(214): n is a, c, g, or t
  misc_feature (217)..(217): n is a, c, g, or t
  misc_feature (232)..(232): n is a, c, g, or t
  misc_feature (235)..(235): n is a, c, g, or t
  misc_feature (335)..(335): n is a, c, g, or t
  misc_feature (337)..(337): n is a, c, g, or t
  misc_feature (360)..(360): n is a, c, g, or t
  misc_feature (515)..(515): n is a, c, g, or t
  misc_feature (524)..(524): n is a, c, g, or t
  Coding DNA Sequence Number=SeqID_780
tgacgtgtgtcgatcgagttcgcactgtagtcacgancgncgtcgtcgctcactcatattatcacactacgacactcgctgtgcgcatgcgtcgtaggtctaantgangtctaactatatgtggttactatgttatgttagtagtttgtcgntactagcacgnctagatacgtggctcgatgcgtgtanaacgtgctcatcatactgcctcgcnctncgactgtgtggctanctngagctcgcgtgtggcgcgcatcgcgcacgatgcggcatgtatgagagtatagtatcgatgctcgtactaccacacgatgcacgcatatacatattacatnangcgacaggtagttgcgacacgcntctatgctgcacagattgagagcagcagcgtcgtagcagcgtcatgcactgcgctgaccgtacagcgtatcacgatgagtcatcgtacggcatgatgcacctgtcgtcgcgcgcactgcggctcggcgctcgctcctctccaccgctcacgccgntgactgcgngccgaagttgcgtatgcagagctcagcacgt

SEQ ID NO: 10560 - DNA, 536 bp, Glycine max
  misc_feature (65)..(65): n is a, c, g, or t
  Coding DNA Sequence Number=SeqID_781
gccgcggcggtatcttataatcaaccgcgtcgcgcgcatcgtcgaaatcgtgccgtatcctaacnaccagggtgtatgcgctaactatacagagatgataatagcggggacgtggagatgtggtgtatattatattaatatgtttgtcagaggcggtatatactacaaagcgcgtagatcatgcgcgtgatacaaccgattataagaatattaagaggtcgcaacatatcaaatattgggcggcggggatgaggatactgttcgagatatgagtacttcatcggtcgtgcaaacacgagtgcctcatatgctagtgatgtgtggcagcgccactggagacaccaccatgttgagtctcacaaatctacactttatgcgcgcgcggagcgtgcagagagcgtaacaaaataaatcgccgtacaaccgctacgacgcggtagggtgcgacgcagaacaccacaacaacgacaaaaagacgcgcagcgcagtgttgatactcgcgctgcgtaacataataggccagatcgcccgcaata

SEQ ID NO: 10561 - DNA, 545 bp, Glycine max
  misc_feature (161)..(161): n is a, c, g, or t
  misc_feature (165)..(165): n is a, c, g, or t
  misc_feature (500)..(500): n is a, c, g, or t
  misc_feature (519)..(519): n is a, c, g, or t
  Coding DNA Sequence Number=SeqID_782
tctcccctaatctttcggttgcttagtggtgttgatctaactctaccgcgtccgtagtgtgtcgctcgtgttccggtgaggtctccatcattatgatctcactaatattcactatatacgtactacatattatctaccatacattataatcgctcggaggnggancgtcagatagctatgtctctcgagtaacactcgcgtcgcgctgttgcatactgcagtgcgatacaacagacgactaacacactgctcgcaagatgctgcgtgttaactggtatcgtcaccgtcatcccgtctcgtgagccacgttaccgtgcttcgttctgcgtttcacgcgtaccgcatctgtccctctcctagttatagcggaagcggggcctcgcgtgcttctctcctcggtccgcgcacccgccactgctcgtagacaaccctcctagtgtgtgttgcatgtgtagaagagttgcgttcgagccaggctgggcgatgcatgatctgctganttcgtttatgcttgttcgntgctgctagtgtgtaggcttcgatta

SEQ ID NO: 10562 - DNA, 384 bp, Glycine max
  misc_feature (117)..(117): n is a, c, g, or t
  misc_feature (198)..(198): n is a, c, g, or t
  Coding DNA Sequence Number=SeqID_783
tcctatggttcccattgcatgaaaccaccaatcatctatagtgatgtgagccacccaaagccaatgaccatcttctgatcatctctagctcagagctttaccaagcacccaataaangaaatacttaccaatcctattaccattctcaactagtcctttattagaaataaccaacctagatctaagaccacctaccanattactttatctatcaaagacgaagtaaaagaccttaaaaaagctaacatcactattatccaaattaataaagctactgtaagagaagatcttccactgagaaaatcagaacaagctcactacttagactaaactatccataccttcagaatcaccaatattaatatccatgataccacccagatc

SEQ ID NO: 10563 - DNA, 273 bp, Glycine max
  Coding DNA Sequence Number=SeqID_784
ccacttgacagtgatgtcgttgctattcctcctggttataatgtcccccagcaggttcatataacgcaaggtgacctagtggggaaagcagtgatcgtgtcatgggtgactgtggatgacccgcggtcgagcgcagcgcgccactggagtgagacaagagaccacaacgcgatagttgaaggaacccttggcacgtcccggctcttccatcactcctctggttttattaatcacaccaccatcacacctttcgaccacacaccaaaccactac

SEQ ID NO: 10564 - DNA, 410 bp, Glycine max
  Coding DNA Sequence Number=SeqID_785
cgtggtgttgaagtcggtgttatacggaaatccgaaggtgaaacacacgggggaagtgcctagtcctgacatgtagtggcaagatgccgccttgggtgggttacaaaacaaggcggcgcaaaaaggatccgccaaagacatggagggggacgtgatacagttttgtgatgacaacattcggcattatatggttgccataacggcggagttcaatgacgagctttccccaatgtcctctgggaagatccggatgattgtgctaatacatttcgcaaacaacatggtttccttcaaacagagttgaatttgaacactgtgatggttatgttttttgttgctttacaaaaaagttgatcattttcaactttttattgaattttccttttttcactttatcagcaatcaccata

SEQ ID NO: 10565 - DNA, 546 bp, Glycine max
  misc_feature (31)..(31): n is a, c, g, or t
  misc_feature (199)..(199): n is a, c, g, or t
  misc_feature (403)..(403): n is a, c, g, or t
  Coding DNA Sequence Number=SeqID_786
gccgtcccacaaaattcctataattcccaanattaaaaagagcgtgcggacaactatagaaggtgagaatttcttgcaatacaaggtttattaacagccaagttatcatatacacttgtggggcggcggaaaaatatgtagaataaatcctgcctgtgcattgttcaccctgatctgtggttatttttgcggggagggnagggcgccgcgcgcgggcatctatcaaccgggcgcttagaccacttaaatattatggtgcgactgatctaattgaaagacgggggcgcgaaatagagtatatataattcgctctgcggaggtacctagtgatacatacgtatactataatcttgataatcgcgctgcggcccatgaagtggggcgcgttaaatctgggccaatnactgctaaggtctacgaagagtgaaggtgggtggtgggcgggtactgacgtgcagcatctcataatactaccatgctagtccgcgaggggaattcctactagtaaactagtagacgccgcgcgcaacgcgtcggagaaacgta

SEQ ID NO: 10566 - DNA, 391 bp, Glycine max
  Coding DNA Sequence Number=SeqID_787
atgctaacactattaccactttggatcaatacgctttcagacaatatgccaaggcctttgaaatcttccccagaatcctcgctgaaaatgccggccaaaatgctgatcttatcttgactaaattgtactccagtcttagtaacaacatcatccccggtatcgatgtcgacagtggtgccgttaaagctgttgatgaattagacatcattgataacttacaaaccaagatctgggctatcagacttgctagtgatgccgctttgactgtcttgagagttgatcaaattattattgccaagcctgctggtggacctaagcccaagcaacaaaccaactgggacgaagatccttaaacaggaagatgaaagttaattcatttcagtcgtttgga

SEQ ID NO: 10567 - DNA, 563 bp, Glycine max
  misc_feature (64)..(64): n is a, c, g, or t
  misc_feature (96)..(96): n is a, c, g, or t
  misc_feature (324)..(324): n is a, c, g, or t
  misc_feature (421)..(421): n is a, c, g, or t
  misc_feature (454)..(454): n is a, c, g, or t
  misc_feature (516)..(516): n is a, c, g, or t
  Coding DNA Sequence Number=SeqID_788
gccggctcaagtgtacagcagcgaagcgcgaaatacacagcccagcgccgcgccacctacaacncgcgcgcgatatctgcgatgcaacataacatnacgcgatccactcaccacagatacacctctctcacttacatcgccctatcagccgtcgagtaatagctgcgggcagacgccacaaaaccacgaactattcactatcctaagagggagagagatcataagcctgcgccctaccaaccaccacctctgatcggaggagtgagaggcagatccaggaggaccagggtgtggggtcattcagcacctaacttctatcctacncatcaccttcctttcgtcgcactctgagggagcgcgcgctcaaggatatatcccatcctcaatagagaaaacatctcttccgcagcaccctgcgggncacacccacaccacactggcatgaagaaccganagctctatattagaaagggtgggcataggcgctcgcactggggagcgggggcggaagaatanaaaaaaaaatgtctataattgagagtgagcgcgtaaccggctatata

SEQ ID NO: 10568 - DNA, 159 bp, Glycine max
  Coding DNA Sequence Number=SeqID_789
gcgctgattacagaaggccgtgagaggcgaagaagagctcagagctcatcgctgagaagagagcgctcctctatggtccgttggccaagctatggggctaatggaccgagaaaacgtgctctgcttgggggtcacactattggaaggtgggcccccaag

SEQ ID NO: 10569 - DNA, 476 bp, Glycine max
  misc_feature (417)..(417): n is a, c, g, or t
  misc_feature (421)..(421): n is a, c, g, or t
  Coding DNA Sequence Number=SeqID_790
cctgcgtttactcggtgatcattaacaacatctccatatctaaatccttgctctcacacctactcttaacccatataactcctcctcccccttattgactgtacctgttacaactccaatcaccgccctcctgtcctcacttcactacgtctcaccccttactacctctgcttctcctctccactttggtctccagaacctctctcatctttatagcatcttatcgtcactccaccgggacaacctatctaaactcatttcttcccaccatacgattctctactccgctcgacctataatcttcagcatgcatgatttactctaatctttatacttcttgtacatatgcacatcatacttcgtgatacagattaagtatattattcacggtcccgctaacaacgcctctagcaattncagnacaatacgtctgacttcgccaaccccgctcgcacacgcacggtaactcacataat

SEQ ID NO: 10570 - DNA, 583 bp, Glycine max
  misc_feature (91)..(91): n is a, c, g, or t
  misc_feature (211)..(211): n is a, c, g, or t
  Coding DNA Sequence Number=SeqID_791
tagcgtcggtggtgagcagcaattctcttcctatcctatacaacatccaccgtcggcctctcttacttattgtgtatacgtgcctcacaancgcggtgtcgcgtttcatcataatattgtgtacgggcgctaagtgattctagagtcacatactttgtgtttgtatgttactagcgagcgacttctgtgttcaaacagccagctggccccntcacaggtgggcgcgtgcatcgccgcgtgttagaggagtaaggtggatgagagataatatcggcttgcttagtcgctcgtagtttgcggtggcagcccgccggcatctgcggtggcggacagtgcagtgagcgtgacgcacccgcttgatgtgtgtggtgtactcgccgccacttctattcatcagcccatctagtttcgtcgcgcttctcacccaccgcgccttatcgcgtctctgccgactcatacagccaacaatgtctactgtaatacagccgctgcaactcaatgtgtcttctcctcaccacctcaccctatcgtagtatacaaaacccgctattctatatctgttttgataacactacgccgcccg

SEQ ID NO: 10571 - DNA, 421 bp, Glycine max
  Coding DNA Sequence Number=SeqID_792
atgcttccagtttttccgctttccacattctagtcatgaattatgctctcttttgctttaacttgaaacaattcattactcttccaattcacagataagagattatggactttcaaatattcccacctgcttctcttataaatacaaaatgctttgttcagtttataatgtgcgctcctgaccaccatatgttccttcttaacaaccctaggtggaagtcaaaagctctctctaagtatggtacaaatgacttgttgcagattcataggcatctcattactctttctccaaataagtgttatgtgtgaatctggttcagaaacaatgggttacttgtttttgctttgtagggaagctacacttctttagatctcgatctctttttgtgtttcttataagcaccgagtgtgtctcttcaatg

SEQ ID NO: 10572 - DNA, 470 bp, Glycine max
  Coding DNA Sequence Number=SeqID_793
tgatcatgatcacggcgtatggcgatgccgacaccatccgcagggcgctggagagtggtgcgtcggggctgctcaccaagccgatcgatttcaaggtgttgcgcgaggagattgacaccaggttggcgcaggtggaatagtccggtgccggctgtcaggggtagaccggacctaacttaaaccgggcaaaaccgtcgcgattgacccggagccgacctttgccgttcttgttcagcgctgggtcggctgtttaatcccattcaacgggtggtactgtccgtattcgacccgggtgtcctaagttgatcagccgctgttccaatttgatttttggcacgaactgcataggctttcggccttaatccatgttgatttttggcatgggcagggaactactgtttcgggtagttgctttcgcggccggggcggtcacagtcgccgccgcagcgaccctcttgtttggattttga

SEQ ID NO: 10573 - DNA, 590 bp, Glycine max
  misc_feature (63)..(63): n is a, c, g, or t
  misc_feature (71)..(71): n is a, c, g, or t
  misc_feature (246)..(246): n is a, c, g, or t
  misc_feature (271)..(271): n is a, c, g, or t
  misc_feature (291)..(291): n is a, c, g, or t
  misc_feature (339)..(339): n is a, c, g, or t
  misc_feature (341)..(341): n is a, c, g, or t
  misc_feature (351)..(351): n is a, c, g, or t
  misc_feature (356)..(356): n is a, c, g, or t
  misc_feature (375)..(375): n is a, c, g, or t
  misc_feature (518)..(518): n is a, c, g, or t
  Coding DNA Sequence Number=SeqID_794
agatgtgtgtcgttcgttcatactctccactatcgtcagtgtcgtgtctgatgttacatctgngcgtcgcntgcgctatgcgctcacaggcgcatggcgtcgcgcgccctcgcagtagtcgcggcgatatagatacgtaacgtgtcagatactacgattgacacgatgtgcgctgcgtctcgtgtcctgatgctctgtgtctctatcatccttctattacagcgacgctgggcgtggatacacacncatctttcactacacatccgtgcgngaggcgtgcgacgatcgctngccgttatataccctctctctacgcactacacataccagaatgagcgnantcgcatatancacanaacttgagagcattcatanacagcgtgcggtatgccgcgcgtgctgcgacgcgcgcgcgcaatataagaacaatcgtcgatcgtatagtctgtagcctctgccgtctcctctttatatcacttctctttctctctcgacattctcgtgtcacaacgctcggncacccaccgcgactacgcgaccgtctaaacatcgataacaccgacgatatgcgcagagctgaccactcacta

SEQ ID NO: 10574 - DNA, 564 bp, Glycine max
  misc_feature (70)..(70): n is a, c, g, or t
  misc_feature (159)..(159): n is a, c, g, or t
  misc_feature (219)..(219): n is a, c, g, or t
  misc_feature (291)..(291): n is a, c, g, or t
  misc_feature (336)..(336): n is a, c, g, or t
  misc_feature (342)..(342): n is a, c, g, or t
  misc_feature (392)..(392): n is a, c, g, or t
  misc_feature (501)..(501): n is a, c, g, or t
  misc_feature (507)..(507): n is a, c, g, or t
  misc_feature (521)..(521): n is a, c, g, or t
  Coding DNA Sequence Number=SeqID_795
gtcgtatctacgattcagtcggtgacgtagttaacacgtcactattcaatcgtgcatcataggtgtagcncgctgtcgaagtttgtatgcagctatgtcgttctctccggcttctctctctgttgactattcagctcatatgataccgctgcagatatngatcagaatatgtagagtcacgtgtctgttgtggtcgtggaagacgagatgtagacgtgngatgaggaggagtgagagacggacagcgttacttcgagttcattaatgatacgcgagtcggatacaatggangatgtcgcgcgcgcgatgacgtatacagagagactcagaactatnacatcncgatgtgtgatgttattacatgagtagtgacgcgcacaccagacgtggcngcccttcacacgcaggcgcggtagtgggtgggcgcgagaatacagcggcacgtaccgtacaatacgacatcaactatagcagactgtccgccgcgccgaggggcagggngccctnactctgctgtctcnttattatgatgtcagtctcatatagatctagggatgcggcgcg

SEQ ID NO: 10575 - DNA, 446 bp, Glycine max
  Coding DNA Sequence Number=SeqID_796
tactactacaacttgctgctttctgctccggcttgcactgtttttggaaccaaacggggttgttggattgggatccctgaaccccgacccatccccggcgcctagttcgatttgagacctccctgtccagcgtgccttctgcatcaatcacccgagcttctttggttgggttctcgtcaaatccgtacccaacggaagttttggatttggattgttgtgctctaaaccataatctctgcttcttctactttcttgttccttcttcggcttggattttttgtgaaacaaaaaagggttattgttgagaaaccctaaacctatcctaaaccatggcgcataggttgctgagagaccacgaagcagacggttgggagcgctccgatttccccatcatctgcgaatcctgcctcggctcaattccaaagatagctcctacgttcgaatga

SEQ ID NO: 10576 - DNA, 424 bp, Glycine max
  Coding DNA Sequence Number=SeqID_797
aatccatcctataacctcatatctgctcttacacagaagttatcatcctcgaccaaatggccactgctagcaaggtcgctgtcatggcggccgccctgtgcgcgctgctcgtcctggccacggcggggcagagggaggcctgctatagcacatgcaggcaggaaggcgatggctgcgacagcgagtgcgctgccaggccgtggcgtttctgcgccgaggaatgcaaggctcaaaggcagagctgcgaggactggtgctcccagcagcgtttccccgatgtgcaggccgctcgctaaaccgacgagctagctgagctgccatgtctcccagaaggccagacccacaaacgagccttcctttgcttgttgtaccagactgctccgtactggttttgtggtttgttggcgagtttaacgtgcgtgat

SEQ ID NO: 10577 - DNA, 474 bp, Glycine max
  misc_feature (149)..(149): n is a, c, g, or t
  misc_feature (184)..(184): n is a, c, g, or t
  misc_feature (262)..(262): n is a, c, g, or t
  misc_feature (348)..(348): n is a, c, g, or t
  Coding DNA Sequence Number=SeqID_798
gcgcgtgtcaatgatactataaaggataggagtagatgtgcgaaatatagatacagtcaatttataatgtctagacttctatacactactcacacactaatattatattgtctaatcataggacacgctctatagtatgccctcagcantctgaatcttcatgttttcaggatataatacttantctcttctcactcccaggcccacatacatacagatgcacagagacgagaataatcataatccatacagacaattgaantataacactatatatagcatgtcagtatactaatgcacaacacccatctctctctacagacacatgatatatgaatcagagcactngaattaatgtcaatatagtgagattataaacatatctgaatacattatatacacaatctacatataatgacttgacatattatatataataatatatctatgatactgatatcataacgagaacat

SEQ ID NO: 10578 - DNA, 550 bp, Glycine max
  misc_feature (46)..(46): n is a, c, g, or t
  misc_feature (59)..(59): n is a, c, g, or t
  misc_feature (66)..(67): n is a, c, g, or t
  misc_feature (112)..(112): n is a, c, g, or t
  misc_feature (123)..(123): n is a, c, g, or t
  misc_feature (192)..(193): n is a, c, g, or t
  misc_feature (205)..(205): n is a, c, g, or t
  misc_feature (233)..(233): n is a, c, g, or t
  misc_feature (237)..(237): n is a, c, g, or t
  misc_feature (240)..(240): n is a, c, g, or t
  misc_feature (243)..(243): n is a, c, g, or t
  misc_feature (252)..(252): n is a, c, g, or t
  misc_feature (260)..(260): n is a, c, g, or t
  misc_feature (271)..(271): n is a, c, g, or t
  misc_feature (283)..(283): n is a, c, g, or t
  misc_feature (297)..(297): n is a, c, g, or t
  misc_feature (311)..(311): n is a, c, g, or t
  misc_feature (331)..(331): n is a, c, g, or t
  misc_feature (338)..(338): n is a, c, g, or t
  misc_feature (341)..(341): n is a, c, g, or t
  misc_feature (344)..(344): n is a, c, g, or t
  misc_feature (389)..(389): n is a, c, g, or t
  misc_feature (395)..(395): n is a, c, g, or t
  misc_feature (403)..(403): n is a, c, g, or t
  misc_feature (413)..(413): n is a, c, g, or t
  misc_feature (453)..(453): n is a, c, g, or t
  misc_feature (463)..(463): n is a, c, g, or t
  misc_feature (468)..(468): n is a, c, g, or t
  misc_feature (496)..(497): n is a, c, g, or t
  misc_feature (500)..(500): n is a, c, g, or t
  misc_feature (508)..(509): n is a, c, g, or t
  misc_feature (511)..(512): n is a, c, g, or t
  Coding DNA Sequence Number=SeqID_799
atcattcatcgattttcgtcgctcacttcactctgtcatcttcacntcagcactatgantcgcggnnacactgcgatgacgaatggatatagtaatttgatgctagatatgntagtcccgcancacatgtccatctcgtcaattcattcatcgctgctgctaatgcatcactgcgattgtagagcaatcagnntatcgtgctgcnctaatacttgcggtgatgtctttgtgantacngcntgnacgatgacntggcggcnggtcgcggatnggctgagtcganctcgtgatcgtgancgattggcgatcgncgatgtgagctgcagcctgntgaagcntangangtgataactatgaaaataaatcgatggtacgaccgcacgacgtcntgttgngacgggtncgcttaatantactggacctcaatcgtttgtccgtttgtggactagtgcnagtcatggcntgtancgaatgtcgggcagtagctgatcgacgnntancggttgcnngnntactatagagtaggacgtcatgtagagtcttgagcacg

SEQ ID NO: 10579 - DNA, 253 bp, Glycine max
  misc_feature (204)..(204): n is a, c, g, or t
  misc_feature (216)..(216): n is a, c, g, or t
  Coding DNA Sequence Number=SeqID_800
aatatattgagcatagacagcctactttcacgatgaagggacacctcgttgggtatgacaagaacgaagaccgctatagccatcccgcatgttttgagtgtcaacgctcagctcatgggctgcttccatcaatataagggagaagcgcgagcaaagatgtcagaaaaccgaggaagttcgcgcacggtacctctgttaaaaggnttggaggctganggttatacgacgtcttacttgttggaggtgcttggaa

SEQ ID NO: 10580 - DNA, 541 bp, Glycine max
  misc_feature (27)..(27): n is a, c, g, or t
  misc_feature (285)..(285): n is a, c, g, or t
  misc_feature (300)..(300): n is a, c, g, or t
  misc_feature (326)..(326): n is a, c, g, or t
  misc_feature (366)..(366): n is a, c, g, or t
  misc_feature (406)..(406): n is a, c, g, or t
  Coding DNA Sequence Number=SeqID_801
gaagagacgacacgagtgcactagtgnactcgcagactgttaagctatagtatgctaattgtggtctctgcgtactgagtagtgaccgagacggcgtcacaagcatgtaatagtagatgaagagacaagagaagagaacgcagcacgctagctaactgttactaccgagctctcacaccaagccctgccacctcatatgtattaggtttctatgtgttaacagagatacattaaactagtccgatggtgtggaataaacaaacaacacataaactcactgctagncgacctctcgcgcgncggactcgcagcaaatcgtctctgtnacacgttctcgcctattccgcccctcctccgagacgccantgacattgtatgatttcactctcgacgcctgcgcattctnacctgtctcacatatattaaatcaattgagaacactcgcatatatcactcgtgttctgtctgctctcgacactcattttgatcacagctatagcatatgaaactcaagactacgaggacttagctatgacgagac

SEQ ID NO: 10581 - DNA, 534 bp, Glycine max
  misc_feature (29)..(29): n is a, c, g, or t
  misc_feature (66)..(66): n is a, c, g, or t
  misc_feature (84)..(84): n is a, c, g, or t
  misc_feature (100)..(100): n is a, c, g, or t
  misc_feature (163)..(163): n is a, c, g, or t
  misc_feature (175)..(175): n is a, c, g, or t
  misc_feature (184)..(184): n is a, c, g, or t
  misc_feature (188)..(188): n is a, c, g, or t
  misc_feature (253)..(253): n is a, c, g, or t
  misc_feature (272)..(272): n is a, c, g, or t
  misc_feature (282)..(282): n is a, c, g, or t
  misc_feature (298)..(298): n is a, c, g, or t
  misc_feature (322)..(322): n is a, c, g, or t
  misc_feature (361)..(361): n is a, c, g, or t
  misc_feature (374)..(374): n is a, c, g, or t
  misc_feature (412)..(412): n is a, c, g, or t
  misc_feature (423)..(423): n is a, c, g, or t
  misc_feature (435)..(435): n is a, c, g, or t
  misc_feature (440)..(440): n is a, c, g, or t
  misc_feature (506)..(506): n is a, c, g, or t
  misc_feature (509)..(509): n is a, c, g, or t
  Coding DNA Sequence Number=SeqID_802
tcgtcctcgacgtggtaggtgctgttggnggggcggctgtctaggcgagctgcggtgccgtgcgtnttctcaccgccagcgcgncacacaccgcaggcanctagtcacacatcgcacactcgcagagagacgcgactcttagttcgctctgtctactcctcgnttcgtctgtcanagtgagaanattnattgtttaatagaggtgtcggagtgtgttctcctcgacaagttcgctatagatggtccgcacgantatgtgtcgtttgtggcgntgcgtgtggngactaatataattatncacgctcctctcccactcgatgancaatcacaactatcaggggaaggataagtatattgtatnctctctacccccncctagtctgagaccctccttctacctaccacatcttangcagtgagtgntagtgactctanacttntgcctcgcaccgcgttgttctctcgcggcctcggcttcctccgtcttcgccacgctctctctcctncgntagttatatcgcagtttcccacctc

SEQ ID NO: 10582 - DNA, 553 bp, Glycine max
  misc_feature (206)..(206): n is a, c, g, or t
  misc_feature (477)..(477): n is a, c, g, or t
  Coding DNA Sequence Number=SeqID_803
ggccggacgtcttatggttgtcactggtcacggaagattgttatatcgtcgtgaagtagcgccacgcaccggttccgataatattatattggatcggtatgtgtagttgtagttcatggctggatgagcacatatatatgttatgaccaagatcgagactgccactaacgggcacacatggaggagtggatggacaccgacgtacnactgcgcactcacagatcctgtatgtcgttacgccgtagtacatgttgcgatgtagaattggtgtacatcgatagaacactataatatgtatactgtgtaggccgccgcatcagctgcacgatgttacttgactatgagagtgtgtaaattataattactatggcattgtaggtgtctatgcgtatgaggagacctctgtgagtaatgcacgacgcacataatctctctaacacgtcagatggagtgtgatgaacgaactcgttatagcgnagtctagatcattgctttacataactgatcatctgggcaattaacgtggacttcaccttctttgctgagctcgcat

SEQ ID NO: 10583 - DNA, 489 bp, Glycine max
  misc_feature (102)..(102): n is a, c, g, or t
  misc_feature (268)..(268): n is a, c, g, or t
  misc_feature (296)..(296): n is a, c, g, or t
  Coding DNA Sequence Number=SeqID_804
tctctctcactgaattgtctcttctcttcgtctcttcatatctccgcgaatttacacatacccattcacctcgtatattcgctctcacacctccatctctcncttctatctacgtccacgcccattattatattatgtataatgattgtcgtactcgattatcacatactaagactccataacaacgatgaacaactctctatattactaatggattgtcgcattgtgtaaatatcacagtgagttcagacaagaacctttcattccntcctactgaccgaatgcatcacattgtngcgcagtctcctctcttctctacaatatataatacacttacctctatatcacctacaccgattgctgcgtgacacaatattcgcgagctgtgttcctctcttactttccacttcctcacatacacaaaatgaccatgtattgctagagtgtccttctcgtgctgctattatctcattttcgtgtgcgtcgctg

SEQ ID NO: 10584 - DNA, 599 bp, Glycine max
  misc_feature (516)..(516): n is a, c, g, or t
  misc_feature (532)..(532): n is a, c, g, or t
  Coding DNA Sequence Number=SeqID_805
cgactattaccattcttacgctcaccttggcatccaccaagagatgatcaaggatcgtgtgcgtacggaaacttacagggatgcaatcatgcagcatcagagttccattgcaggcaaagcaaatgaagtcgtgaaagcaaataacttgtctgatgtcgttgttgtattgcatgggcgagttgaggatgttgaaattgatgaagaggtggatgttataatttcagaatggatgagctatatgcttctatatgagagcatgcttggaagtgttattaatgctagagatcgttggctcaaacttggtggtcttattcttccttcaagtgcaaccgagtacatggctcctgtcacacataccggcagatacagtgacagtgtggacttctggcgcaatgtttatggaattgatagccgaagttgaacagatgagagggcagacacatgcaaaaattgtgaagagcatagctatgggaaggcaagagcataaggaaaacgtgcagcatcgtgagctagatnagttcgagagctagangtactgcggctgaaacgtagtaattccccatccagaccgtggcgctgtgcagtgcataggatatgct

SEQ ID NO: 10585 - DNA, 502 bp, Glycine max
  misc_feature (60)..(60): n is a, c, g, or t
  misc_feature (74)..(74): n is a, c, g, or t
  misc_feature (115)..(115): n is a, c, g, or t
  misc_feature (125)..(125): n is a, c, g, or t
  misc_feature (144)..(144): n is a, c, g, or t
  misc_feature (151)..(151): n is a, c, g, or t
  misc_feature (159)..(159): n is a, c, g, or t
  misc_feature (183)..(183): n is a, c, g, or t
  misc_feature (211)..(211): n is a, c, g, or t
  misc_feature (216)..(216): n is a, c, g, or t
  misc_feature (263)..(263): n is a, c, g, or t
  misc_feature (352)..(352): n is a, c, g, or t
  misc_feature (378)..(378): n is a, c, g, or t
  misc_feature (386)..(386): n is a, c, g, or t
  misc_feature (389)..(389): n is a, c, g, or t
  misc_feature (399)..(399): n is a, c, g, or t
  misc_feature (403)..(403): n is a, c, g, or t
  misc_feature (407)..(407): n is a, c, g, or t
  Coding DNA Sequence Number=SeqID_806
agtagcgtgctgaccatgttgtcactgctgtccatcataccctcaactaagacgtaccgngagctagatgtgcncacatgacgtggtgacgtttgatctgctagacttgtagtanataataactnagataatatatacacgacntacaaancaccacantaccaatgtcacattactccctcntcatggatgtagcacatctactacgtcnacgtntgcctatgactcctgtatgtcattactgcctagtgtgttcgtattcncgtgtgatacctaggtccactcatctacatgagcactatcgtgatcatgatggactatggtgccgaatgtcgcatcgatcgcgctcgtncagatgatgctgatacgtacgtctgngctctagnacntatatagcangtcncgcnacagtgtctcgcactgacctgtatctgctgttgttcatgtgttttcaacgacatccgagtgcactgactcattacatctcactacacgctgtcgt

SEQ ID NO: 10586 - DNA, 567 bp, Glycine max
  misc_feature (458)..(458): n is a, c, g, or t
  misc_feature (506)..(506): n is a, c, g, or t
  misc_feature (542)..(542): n is a, c, g, or t
  Coding DNA Sequence Number=SeqID_807
aactttaaccattgagcactcgacttttgcttttgtttccactatgatatatagcttgttcttccatcaacttggtgacttccttacgtaaattctcgacgaagcaaccctgaccataaccacactctctcaagtcccaagaaagaaccctctcacctaattatctagcgaattacctatggataattctcttctctccctcactcatgctcaaagattccctgaatccccctcccctttaccttatagccattctttccgacatgacccctcctcatacccccctattctacatcttcatcttccgttgtttgctcccagctcaactgcccgccgtgtttccgcctactaaaacactgcttcatcccctcctaaacgtcactggtcaactcatgcgtgcttcaccaactacaacaacttccaccggtccagtgctctacccgacaccgtctacggtncttcttacagcgatcttgacagactctcccaaaagactcaaggtcgcngctgcaccatcgccgtgggaacaccccgaatcaggnaccgtcctgttttggcctcctgagg

SEQ ID NO: 10587 - DNA, 586 bp, Glycine max
  Coding DNA Sequence Number=SeqID_808
atatttgaaaaatctcccatggcgcaacccccttttttccgcggtttttggtaattccttaaacacagcggcctgccagttttttcctcagtaaaagcggcaccttaaccgcaccccatttaatgtgatttagcccccccccttggcccccccagtttttacttttttgtttttcgcttgctattttgggggaaattggaaggggaaaaaaatttcccccgggaacaagtttttgcctttgtttccccaacttggaatttaaccccccttaaagggaaaaaaatcggggcttcccccccgggggggccccttttaaaatttggggttcccccggggcccaggaatttttttttttttttttttttccttttttcaattttttttttttttttttttttttttatttttttttttttttttttttttttttttacttgagagtttttgtagttttttcattcaaaaactcattgtatatgtaatattttaacaattcaattcatatttgttgaaaatctaccatctccaaaccatgtacctccttcatcagtcatcactgaagaaaggaagaccacatgaaattttt

SEQ ID NO: 10588 - DNA, 558 bp, Glycine max
  Coding DNA Sequence Number=SeqID_809
aatgtgatcttcgtgttctacggtgtgtttggtcctgtgtaggagtggagggtgacagcacgcccataaggatacaataacaggcagtaagagactatatttagtgaccggtggcatatatgtgtaagaagttttgggagggttctgcatattctgtggtgtgagccgacggtatccccgatgatcttatgctacagaccgaacgtggcctgcatgccgagtagtagaactttcttcactgcggatggtctataggaagatcaataatataagactgctgattaatctatgtgtcgcggatagcactgtgccgctatagttctccggctcacgccagtgtggcacactccatagctgagacgtcacgcgacaatgctggtttagtgactattattataggaggagagacttcatctatctcggtagacatgagtagggtgtatctcgcatccttcaaactactatttaagagaagataatagaggtttaggtgggagaaaccttctacccccctctcaaccgcggaggggggcgggcccgcaccgactgcaaatggag

SEQ ID NO: 10589 - DNA, 518 bp, Glycine max
  misc_feature (33)..(33): n is a, c, g, or t
  misc_feature (35)..(35): n is a, c, g, or t
  misc_feature (57)..(57): n is a, c, g, or t
  misc_feature (66)..(66): n is a, c, g, or t
  misc_feature (81)..(81): n is a, c, g, or t
  misc_feature (125)..(126): n is a, c, g, or t
  misc_feature (142)..(142): n is a, c, g, or t
  misc_feature (144)..(144): n is a, c, g, or t
  misc_feature (152)..(152): n is a, c, g, or t
  misc_feature (161)..(161): n is a, c, g, or t
  misc_feature (170)..(170): n is a, c, g, or t
  misc_feature (253)..(253): n is a, c, g, or t
  misc_feature (273)..(273): n is a, c, g, or t
  misc_feature (304)..(304): n is a, c, g, or t
  misc_feature (382)..(382): n is a, c, g, or t
  misc_feature (450)..(450): n is a, c, g, or t
  Coding DNA Sequence Number=SeqID_810
atgcgcgcgcacatcagtgtggatgtcgatctncngtgtgctgttgatgtgatgtgnatgatcgcncgctgcgtagcaaancagagcctctcatcgcaaccagacagaccataatacatgagcanngagactataagcatananatagcacngtatctaanagacaagtnactattatgtactgtgtagtgagcgcactgatatagctctgatcatacgctcgcgcgctgacgcgatcaaagtatctgagtgnggtcgctggtggtactatgnctcatagtttcgtagcatgtgtcgtcagtgntgctgcgcgcttgatacagggagatcgggtgcatactaagacgggacgagaaccgtacgagaaagtcactgatgtganatgaggcgcgcgcatcgctggtgcggaatgacgtacctgctgtcgatgtataacatctagacatacantctggacgctactctagatacactattatatgatattagctgtgatgcgtcgctacatatgtgaatat

SEQ ID NO: 10590 - DNA, 580 bp, Glycine max
  misc_feature (47)..(47): n is a, c, g, or t
  misc_feature (53)..(53): n is a, c, g, or t
  Coding DNA Sequence Number=SeqID_811
gatgagtatcacatgtctgacagataaaatcactgtctgtctagagnaagagnaagaaaggtcatcagtccatatatctatggtggacaacatagtcatcatatggagtaagcgtattgataagtgcattagtagagcaactcgtagaagtgataaccccctcctatgccaactggtttctcctttgcagagaggcttcccatgtgctttgaagatcagcactgaatccctgttctatcttgcctggagctttcttccatcgccagcttagttcaaccggtataaggcgcccatcgcctgtaatttcatactcataaagggcctcaaaaaggttcaaaggtgagggtcagtaataggattttcagctccaaattcgttcatcctgcttttagactcgtgctccacgccgctataatcggcaggcctctcttctgtttccttcaaagctttaggttatcaaagaatagcctcctatagtctcccttagaccatatatcaaagacttgcatcaaaggaatgtttaatcataatattcactgtcacatttcacgtctaatatcagaatccgtagcatccttta

SEQ ID NO: 10591 - DNA, 512 bp, Glycine max
  misc_feature (26)..(26): n is a, c, g, or t
  misc_feature (70)..(70): n is a, c, g, or t
  misc_feature (99)..(99): n is a, c, g, or t
  misc_feature (104)..(104): n is a, c, g, or t
  misc_feature (117)..(117): n is a, c, g, or t
  misc_feature (124)..(124): n is a, c, g, or t
  misc_feature (263)..(263): n is a, c, g, or t
  misc_feature (308)..(308): n is a, c, g, or t
  misc_feature (313)..(313): n is a, c, g, or t
  misc_feature (329)..(329): n is a, c, g, or t
  misc_feature (332)..(332): n is a, c, g, or t
  misc_feature (355)..(355): n is a, c, g, or t
  misc_feature (392)..(392): n is a, c, g, or t
  misc_feature (407)..(407): n is a, c, g, or t
  misc_feature (410)..(410): n is a, c, g, or t
  misc_feature (415)..(415): n is a, c, g, or t
  misc_feature (446)..(446): n is a, c, g, or t
  misc_feature (448)..(448): n is a, c, g, or t
  misc_feature (461)..(461): n is a, c, g, or t
  misc_feature (463)..(463): n is a, c, g, or t
  misc_feature (487)..(487): n is a, c, g, or t
  Coding DNA Sequence Number=SeqID_812
gtccagtggcgcgatcgtactgttancgtagtgagaatgctgtaggctagtgctgcgtgtgacgctatgntgacgtgctgcggccacgctccggccacnctcanagcacacagagancaatcanattgtcgcctttttatacttatcatgcggaacttgatattgtagtgtattgctctctcgtctgtgtaattatgtacatatatgaatatgtatgagatatcgatatagacagatggccatagagtcgtaacgacatactncacacagcgatgcatcgctcactcatcgactaactcttacgcccnaagtntagcgcaccggctgcntcntgcgcgtgcatcgctctcgcgtnaccggcgactaaatgcgcgctatctatttgtacacgncgccactgtgaatgncanctgcntacaatgttctatatgctgcatatgactcgntnactgtatatcagncngcgtcacatgctgacgctcatacntgtcattgactacgctcactactcg

SEQ ID NO: 10592 - DNA, 252 bp, Glycine max
  Coding DNA Sequence Number=SeqID_813
ttcaacttcaaaagggcctgcgtccgagtgacccggagctccttgccgctgtcgacactgtcattggtgaccaaactcttttctttgaaagcttccaggcgtctttctttgaaatcggcgccgctgcagtgcttacgggggcccgcggtggagtccgatcgcgatctgatgctgtgattcgaactccttgtaattttgtgaacggaaattcttctgctcttaccaccgaaggatcttctcaagatggcatgg

SEQ ID NO: 10593 - DNA, 422 bp, Glycine max
  Coding DNA Sequence Number=SeqID_814
tgaatatggacggttcgggttgaactgggggaaggggcaccgtgagaagaaagaagaatgctgtccacaagacaacaaccacatatgacatatggcttcagagcaccctgaagagaataggggtgaatgccatcccggctattgaggaggtcaatatctttaatgatgacgtagttatccagtctgtatatgcgatagttcaagcatccattgctgctaatacttgggttgtcaggggttctccacaaacaaagaagatgcgtgatatactccttagcgttatccaccaattaggacctgataactgggactagctgtagaagctggccgtgcaattgcacatgcaagctcctgaatgagccactggatcgaccaccgtccaagatgagaatgatgatgacgatgtacgagagctagttgca

SEQ ID NO: 10594 - DNA, 515 bp, Glycine max
  misc_feature (145)..(145): n is a, c, g, or t
  misc_feature (242)..(242): n is a, c, g, or t
  misc_feature (264)..(264): n is a, c, g, or t
  misc_feature (292)..(292): n is a, c, g, or t
  misc_feature (308)..(308): n is a, c, g, or t
  misc_feature (382)..(382): n is a, c, g, or t
  misc_feature (425)..(425): n is a, c, g, or t
  misc_feature (473)..(473): n is a, c, g, or t
  misc_feature (479)..(479): n is a, c, g, or t
  Coding DNA Sequence Number=SeqID_815
tctctctctgctgagtacactaactcagtgcgccgacgccgtccactcgcgcggtgcgctcgcgtgctgtgatgagatggaatggatatatggagagtcacgcgagcatatgctgggtgcgccctcggtacgcatgtaagagccnggcgtgactcactcaccaccacccaccactatgctgaggtcggaccagtcagagaatagagcgagaagtgcgttgaactatatatacacaccggcgncagaagcccactcgacaagaancaactgtgcgctaccacactcatcccanacacagaaaatacatntgagaatgacacaatagcatcgacgataacaacagacagagttacgcgcgcgcaccatctgtcacactgtggangcgtggcgcagatatcacgctgcacgcgtacatactcatcatntgagtatatgacacatctcgcacgcctgccactgcacatcgcacccancatgtngctatgtgtgctagacacacagaccaaacacacact

SEQ ID NO: 10595 - DNA, 433 bp, Glycine max
  misc_feature (33)..(33): n is a, c, g, or t
  misc_feature (334)..(334): n is a, c, g, or t
  misc_feature (336)..(337): n is a, c, g, or t
  Coding DNA Sequence Number=SeqID_816
aatataataaactggtgtgggtctaatagtgtntttatcttattaataaaaaataaacataaaaaaaatgcagtttatttattattttttttttattttgtttcactcaagcataggtatctactatattctattttgggtggggggggggggggggataaataacacaacaacggaaaaaaataaattatggggtagaggtgggtgggtgaccaaaacacaccgagcaggggggtggggtggggaagacaccaaacaacacctccgaaggctgggggggggggctacacaaataggccaccgtggggtttttttcttgtaatatgttattttntnnttatttaataaacccacattttaatttaataaatgtgggggtttatttgataaccatactacctaataagttatacactttataacattaattcgt

SEQ ID NO: 10596 - DNA, 566 bp, Glycine max
  misc_feature (254)..(254): n is a, c, g, or t
  misc_feature (421)..(421): n is a, c, g, or t
  misc_feature (447)..(447): n is a, c, g, or t
  misc_feature (503)..(503): n is a, c, g, or t
  Coding DNA Sequence Number=SeqID_817
tctgtaagtacgatgcggcggagctgttgtgtgatgcattgattgctctatctgcctctgcatcgcaatccaccatcttactgccgtcctgacgctgcgacgaatagcctcacgccctacctccgcgtaatgctgacctacgcgtgtacttcgtatatatatctctgtatctgcgcgtcgatcgtggtgtgtttagtattgtattttgtctatcttgatgtccgcatatattatgttcagtatagtctatcgantagatctgagcacgatacgtatattatcgaatatagtacagtgtcgcatagcgatgagtgtgatgtgatgatatctgatctactattctattgctacgtggtaactaacagaccactctggctgcgacggtatctatatgtgtctttgtaagtgcttgctgtcgcgntggcgagtcgatgaaggatgtcatgncgtgggcgctaaggagtgagaggattcatatgtagtatgacgatagtacaagatancacgtaataaactcagtagacgatgcgcactttgtgttagcacgatacgttacttcatagtta

SEQ ID NO: 10597 - DNA, 245 bp, Glycine max
  Coding DNA Sequence Number=SeqID_818
ataaacgagcgtgtaacctctagggggggggcccggtacacgaactatatactaccaatttcaaccctatagtgggaacgtattacaagcggccacagagacgacgttattcaacgtcagtgactgggagaatcgctgtggttacccagcttagtcgctttgaggaattccccctttcccccagctgcgttaatagcgaaagggccgcagcaatcgcctttcctaaagttgacgaacctgatggg

SEQ ID NO: 10598 - DNA, 557 bp, Glycine max
  misc_feature (482)..(482): n is a, c, g, or t
  misc_feature (492)..(492): n is a, c, g, or t
  misc_feature (512)..(512): n is a, c, g, or t
  Coding DNA Sequence Number=SeqID_819
gtgcgcgggtcgtatctaggactccagcgcgctagcgggacggtgacgagagtggtagattcattgtatacacaagcagagaaatgatataatagaggtgagggagaggccgaagagaaagtgggggtccgaagaattagacgatcgtattgggggtcgaacaaacagaatcaccgctctcactgtttctgatcatatttattgatgtgtgttttattattattattgtcgccctagtttcgagtcgtggaccagctacaaaagatgagcacgagcaagaacaaacagagaccaacataccagccccataacccacacacgagacgggcgcggcggcgatgtgaacaggttcttaaaccaaaacctccctgacagatacactctcccgcgggcaaccccacaacaaaccaacccccgggggcgtgtcgtcggtgcacaagggcgcggcccggtacagccgacgagacctgcggggggtggangggagggcanaaaatcatgggtttttctcngcagcgcaaacagcccgccttagtgtcgacaagctgccggaccct

SEQ ID NO: 10599 - DNA, 577 bp, Glycine max
  misc_feature (108)..(108): n is a, c, g, or t
  misc_feature (114)..(114): n is a, c, g, or t
  misc_feature (147)..(147): n is a, c, g, or t
  misc_feature (154)..(154): n is a, c, g, or t
  misc_feature (161)..(161): n is a, c, g, or t
  misc_feature (165)..(165): n is a, c, g, or t
  misc_feature (172)..(172): n is a, c, g, or t
  misc_feature (269)..(269): n is a, c, g, or t
  misc_feature (345)..(345): n is a, c, g, or t
  misc_feature (350)..(350): n is a, c, g, or t
  misc_feature (384)..(387): n is a, c, g, or t
  misc_feature (389)..(389): n is a, c, g, or t
  misc_feature (440)..(440): n is a, c, g, or t
  misc_feature (507)..(507): n is a, c, g, or t
  Coding DNA Sequence Number=SeqID_820
tatccctatactcttctcatctcttctcttcttcgttctcctctttctcctcctccctctcaccctcctatccccttctcttctttctctcttctttacacctcatancaaaanaactcattccaccgcacaccataccatcgacanacgcacncccttcnctgngattcanacttcacagacccatctctctccatattctctattctcctctctttttcccactcacatcctccccatactctcatctatacatccctatattattnctagcggagacaacacacaaccttcttttcttctctcccacattcccacacccatctactccctctccctctcctnctccnctctccacctattctttatatcaatgagcaaatnnnntngtctatcacctccactcactacttctctgtatatagaataaacctttctcnctcctcacattaccccacatacatactctctttcctattctctttaatattcttaacactaactatncaacaatcttcacttgttccctctctctctcccctcccctccctcctattacttcacctatatctctctt

SEQ ID NO: 10600 - DNA, 471 bp, Glycine max
  Coding DNA Sequence Number=SeqID_821
atattatgtggatccggtcccacgagttccatgatgtcagtattggcattcgtatgattactcgtcccttgcgacgatgctaatacctctacatgtactggcagctgtccctcggctccctagttctcgacatgcgtgtacaagaacacacgcgcgtttgccatcgtatcctcctcacctacggcgttgacctcgtcctcaacgacgtcaatacgttgctttcctacacgcagtccgaaatcataatactggagattagatccgagttctgacactatgaccctcccgaattctacatgtacctgtaggaacagctgggggagcatctgatccatcatgacgacgccgtgtttggtaataccgtggcggagttgttgtcaaagagagttatctgcgtttggaagccccagaaatcgttccagcccaaaccctggagtcctctctggagtgccggcctttctgaggattatt

SEQ ID NO: 10601 - DNA, 429 bp, Glycine max
  Coding DNA Sequence Number=SeqID_822
gttggtcgaagaactccgttcacaatctatggcctgtgctggatcctacaacacctatccgtctctatcctgatccatacgcattaacggttacatactcatggatggtctatcatgctaggttgttgaagtttgtacttccaagattgttaatcacgtgtatgcctagggtcactttgctgggatggatattattactgtgatgaatcttgagtatattgtgtcctcttgtctcatctgtgatgttactcatgtgaatcgtactgattaccagttgattgacattgctgaggatggatatgttagcttgcttactgaaaatgggaacaccaaggatgacctgaagcttcctactgatgatagttggcttactctgataaaggatgggtttgctgatggtaatgaccttgttaggtcggttgtgtctgc

SEQ ID NO: 10602 - DNA, 366 bp, Glycine max
  Coding DNA Sequence Number=SeqID_823
gcaatggcaaagtctctagctgggttggcgcttctggccgctcttgttatagcggttgatgcgtttaggccttctggtttaaccaatggccacgccacattctatggagggagtgacgcttctggaacaatgggcggagcttgtgggtacggagatctctactcggcggggtacggtacaatgacggcggcgctaagcacggctttgtttaacaacggagcttcttgcggcgaatgctataggataacgtgcgactacgcggcggactcacggtggtgcaaggaaggagcttcggtggtgataacagcaacaaacttctgcccaccgaacttcgctctccccaacaacgacggtggctggtgcaac

SEQ ID NO: 10603 - DNA, 163 bp, Glycine max
  Coding DNA Sequence Number=SeqID_824
tttcttcaaaccttatctttcctcaaaaacacacacagacgatggcgtcgctgctaatcggagctcctccgcgagtcaccgtcgcatcatcttcgaggctatcatcatctcactcggaaaccgtcggcgtctctctcccttgcttcactcagcagctgtctct

SEQ ID NO: 10604 - DNA, 337 bp, Glycine max
  Coding DNA Sequence Number=SeqID_825
acaaatgtcaatggctacatctaaaagaaaatgaaaaaacaaaataaatttgtcgttgttatgccccaagaatccctgaaacttttggtgtgcatttgataactagccacttctttggtggtggacatatgtgtcataacatctagtgactacaaatatttatttcctagtcttactgaaatcccatgaacacttcaaacgtcttgtccctttaaccttgggctcttcaaccctctccataacccaatatcaaatatcatcaataccaaggataattttcaggttgttctccaaagccaaataaactttagctactatttgtgcctcaaccctcaac

SEQ ID NO: 10605 - DNA, 394 bp, Glycine max
  misc_feature (185)..(186): n is a, c, g, or t
  misc_feature (190)..(191): n is a, c, g, or t
  Coding DNA Sequence Number=SeqID_826
taacgagattttcgcttcacagctaaggtcaatgggcccagggaatgtggcccccccgctcgcaatcgatttggacccagccactccacggtcattcgacaatgtttagttcaagaatcttcagcaagggaagggcctcttctcgtcagaccaagttctcttcacgggctcaagatccaaggccnncgcnnaggcccagctagtagcagcaagatctttcaggccaacgtcgctgccgccaggaccaaagtgggccgaggaaaagctcaatttgatcccaacagaatattgtcacctggacaggggattttcaattaaatgtaaaataatctatgattcaattttccatctttaattttatagtatactacgtctaatttgttgtacaggtgct

SEQ ID NO: 10606 - DNA, 325 bp, Glycine max
  Coding DNA Sequence Number=SeqID_827
caggatggctaatctggttgagcaaatccgtggtccactttcaagtatttaaaccttaagtaaaatcctatctacagagacaaagaggactcagatttcatatgacattgttgaagacctcttggtgcaaggtgatcgtctgagggatgttctccatcaactacaggataccgtttatttgacaaaggggatgtctctgcaaataaaatgaaaaaatctagtgagtcactttctctaagtgctgctgccaggatatagagatccctgccccttggccctgctccatgcacatgggaatcagacatgcatgttctcagtatggaaa

SEQ ID NO: 10607 - DNA, 567 bp, Glycine max
  misc_feature (184)..(184): n is a, c, g, or t
  misc_feature (242)..(242): n is a, c, g, or t
  misc_feature (471)..(471): n is a, c, g, or t
  misc_feature (477)..(477): n is a, c, g, or t
  misc_feature (479)..(481): n is a, c, g, or t
  Coding DNA Sequence Number=SeqID_828
tctactgtaaatccattctagcgatagttgtgtcaccttggggagggatagagcgtggtgggagggcacggccgccaccacgcacgttggtccagcggccgaatacgcgcccgcccccagcctacaacttagatatcacataacatcagacggcaagggtgtatgggttgtgtgctccactcangttcttagagagtatgaaagatgtatgagtgaggacgccatacctccaaggactacanttttcctaattgctgatgttggtgttctgttgtttttggaacaattggatgtcttatatgactacaaattcacaccatagtcaaagagaataggggagcatcacccacctatatatgtgtaactactttgatgttgtatattgatacacctcacgacacaagcaagaaagcatagaaaacgacacattcccaccccccacacgtcgagtggggtgtctagtctatgtgnggaagnannnggccggccacccacccggacggaagcacgcgacgacagtatgtcgtggtggtatgatggttgaatacctacgagtaatatccacaa

SEQ ID NO: 10608 - DNA, 448 bp, Glycine max
  Coding DNA Sequence Number=SeqID_829
ggagtgattggccttcattggtccaagtgtttttagcaaacagcaacagtccagagcatttttatgcttgtaagtggacaaaatcggagccacattcctgggaattgttcttcccaatagagggatgtggtcctaataatggttttgaaatgtggagttttgagtgggcaaatccaatttcagggcagttgagtttcttttttggcaatccccaacagtgcacagtttttgtatatttttttgggaatttctcaagattttgaaattggggggaacactcttaggccagctttttttgttccccaggattctgccagatttttttaaaaggcggaatcctccgcatggtctgggatttgcgttttttttagtttgttcgtctgtttaattcaaaaaaggaaattaggcatggccctccctgttgagtacggtctgtctatttaaaaat

SEQ ID NO: 10609 - DNA, 573 bp, Glycine max
  Coding DNA Sequence Number=SeqID_830
cgaagtgtttatgttgcgaatgtattacttcaaaggatgaatcatttttggatcttagtattgatgtggagcaaaatagttcattaacaaattgtttgtctaattttagctctattgaaactttgtctcgtggagacaagttcttttgtgataaatgctgttctttgcaagaggctcaaaaaaggatgaaaataaagaaacttcctaaaatattagtggtacatttgaagagatttaatttcatcgagcagttgaatcaatacaaaaaattaagttacagagtcgtattcccactcgaaatcattytccagaatacttytcatgatgccgtgcaaccagaaaatagatataatttatttgctgtagtcgttcatgtgggaagtggtcccaatcatggacattatgtcagtatgatcaagagtgcaaatacgtggctgctatttgatgatgacaacattgatgtaattcaagagtcagagttgactgcttgctttgggtcatcacaggatgtggttgccaatacagattgtggatatttgttgttttatcaagcagcgagtgaagaggccaaat

SEQ ID NO: 10610 - DNA, 573 bp, Glycine max
  Coding DNA Sequence Number=SeqID_831
tactgctggaggtcgcgccactgccctcctcgtcgtcaccaccggcgcgggcgcgcggcggtcgcaaccccatggaggagttgagcgggcgcgtgaaggcgctgttggtgggattcagctcgtggatggtgaagcggcccatccatgtcgaggcggcagtgaccccaacgatkgggccggggcgctcgggttccccatgggstcgctcmctgccaawggcgggtysccgtttgtcgtgtcmccggccatggsatytttcaagcaggsgcagttggtacatytcccmcctgattgatgcggacmccmctgtcctcgagctgaacagggtgagtarattttgagctgtttaaggtgtggactgttgtgagttgttkaaggtatggactgttgtgtggttccagtaaaattataaccgtacggatgtttytgtgtgcatgaaatttgcgttgtaccatgtccctgatatcatgcatttcatcgatacagtacactactagarctgctatctyttggtgttcattggttytgattgaacttgtatyttaataaccattaagtaattgctttttccat

SEQ ID NO: 10611 - DNA, 379 bp, Glycine max
  misc_feature (40)..(40): n is a, c, g, or t
  misc_feature (106)..(106): n is a, c, g, or t
  misc_feature (111)..(111): n is a, c, g, or t
  misc_feature (172)..(172): n is a, c, g, or t
  misc_feature (185)..(186): n is a, c, g, or t
  misc_feature (198)..(199): n is a, c, g, or t
  misc_feature (208)..(209): n is a, c, g, or t
  misc_feature (211)..(211): n is a, c, g, or t
  misc_feature (296)..(296): n is a, c, g, or t
  misc_feature (302)..(303): n is a, c, g, or t
  misc_feature (313)..(313): n is a, c, g, or t
  misc_feature (353)..(353): n is a, c, g, or t
  Coding DNA Sequence Number=SeqID_832
gctagactgatgacgtgatgctgatgtaactgattttgtngtattatacgtgtgtttcgccgcgtcgggtgtttcttcgcctacctcgttcgtcggctcgagatcnaaganacaactcgtcacaacacagagcgcggcatggccggcgtcactcctattcactctcgcatgncaccaccacgtgnnaggggtgatatnngacatgtcnntntcgcggggagggactgagcgcaccacgcgacgcgtatctctggtcgccttcgtcgtcgtctcggtagtactagtatcctggctangagacnnaccacatccntacacacacacactacacgacaacatatcgagacgacganagtgaaagcgatattacatcgaaact

SEQ ID NO: 10612 - DNA, 557 bp, Glycine max
  Coding DNA Sequence Number=SeqID_833
caaatccgaaccctttttgctggctcaaccccaggtggctttgagaaccattatcaaagaagtgtgacttggaacaatgaagcaactaccactgatcatgtgaacaggttggggttcatactcaactcacagccatttataggccaaggttctacttcagcttatgctcaaagtggggggacccttcagtccagtttttcatttccaatgacttctccctctgagcttcacaggccccagccagtgaaccaaccttccatctttgacagcaggtttgtgtctgatggattagctgatttctgcattccagatagaattcaaggtgtggaagagaaccatggagttgcttccaataggccatcttcttcccctagttctatccactgatcccaaactaagcaatgcttaagtcttcctatcaggagtgttctctatcagattggcaaccgagtgaagattcaataggcatattgttatgatctacaaagatttcctttcaatttggctttccttttttcggtttttaattttaaagtgagttgcccttgattcaaccc

SEQ ID NO: 10613 - DNA, 493 bp, Glycine max
  misc_feature (64)..(64): n is a, c, g, or t
  misc_feature (122)..(122): n is a, c, g, or t
  misc_feature (252)..(253): n is a, c, g, or t
  misc_feature (258)..(259): n is a, c, g, or t
  misc_feature (319)..(319): n is a, c, g, or t
  misc_feature (377)..(377): n is a, c, g, or t
  misc_feature (466)..(466): n is a, c, g, or t
  Coding DNA Sequence Number=SeqID_834
acagacgaagcgggctcacgacgtcgagtagaagggacgcttgtgcgcacgacgcttctgtcgntcgcatgcggtacatgcgcgccaccacatctcgcacgtctgcgcgcgcgcggatagcncgcgactgccgcgctcgcagcgtcagcacgagcagctaccagttatttcttatttctacttctgttcactcttctgacatatacgaccacgtcgtgcggacggtggtcagtagcgaggagggacgaggtnnttggnntgtggtgatgtttttgataggtgtagatatatactatatattaatatatatactaaccanaagtaagaggaccgcgcagtgcaataggtaggagataatagaaggagcatgatagatntacacaatactcttcaccatctacctgagacatcctccatcacccacacccgtgcggctgggtgtgagcggaggctgccgtggagcgtnctgagagagccgcgagccggtcagtga

SEQ ID NO: 10614 - DNA, 386 bp, Glycine max
  misc_feature (183)..(183): n is a, c, g, or t
  misc_feature (240)..(240): n is a, c, g, or t
  misc_feature (286)..(286): n is a, c, g, or t
  misc_feature (332)..(332): n is a, c, g, or t
  misc_feature (352)..(352): n is a, c, g, or t
  Coding DNA Sequence Number=SeqID_835
aaaacactcactatggaaacctactgccataaccatcaagaagaaatcgaactgtctgcaactactcaggctgtgaacatcccttcctctgccttctctgcttccaagaccactccaaaaactgtcctgctgactacagatctgacataagaaaaatccgagtcctcgctgaagacacccaanggattcaagctaaccaaaccaaaagggagaccatcatggcccaaatagaagaaattngccaacaaaagagagaaatccacgctgagaaccagaagcttattancgataaattcagccaaataatgaacatttttgaggttaaatactgngtatggagcgaaggcttatngggtatggttgactcatccagctgttcggagaat

SEQ ID NO: 10615 - DNA, 534 bp, Glycine max
  misc_feature (38)..(38): n is a, c, g, or t
  misc_feature (40)..(40): n is a, c, g, or t
  misc_feature (72)..(72): n is a, c, g, or t
  misc_feature (115)..(115): n is a, c, g, or t
  misc_feature (125)..(125): n is a, c, g, or t
  misc_feature (198)..(198): n is a, c, g, or t
  misc_feature (295)..(295): n is a, c, g, or t
  misc_feature (307)..(307): n is a, c, g, or t
  misc_feature (328)..(328): n is a, c, g, or t
  misc_feature (401)..(401): n is a, c, g, or t
  misc_feature (498)..(498): n is a, c, g, or t
  Coding DNA Sequence Number=SeqID_836
gcagcaacctgatcgtactgtctgatcgagcgtagtantngtcggtcagtctatcgcacgtccgcgtgcgancagtaacgacaatagacacgcactgcgtgacgcatacataatntactctatanttcagttctcccgcgcgcacatacgtcacggcgtctcatgtatatgtgtgctatatgcgtgtatacgtgaganattactatcatctgcgcgtatctccgcgctaggtcgcgacgatgcggtctcgtttagatatatgatatctgcgcgcatgcgcgcgacacgactcgancgcgtatacacntaataacatcactatagcatntcgatgatgcgatagctatgacagtctcagatacgcggcatcacgccgagatccgaacgacaatacatatatnctacgtgtgcctcgtcagcatatgctcgatcacggcgacgcgtctcacgatatatcctgcgaacgcgactaataaaatagacgatatgaatatgaantgagtcccgactatcatcatgagtccagcgaacaca

SEQ ID NO: 10616 - DNA, 545 bp, Glycine max
  misc_feature (78)..(78): n is a, c, g, or t
  misc_feature (400)..(400): n is a, c, g, or t
  Coding DNA Sequence Number=SeqID_837
atactatgtttatcgtccggacctttatctccgcacaacccgcgcacgggtttctaaatctctgattatttagctccncctctgtacgtactatctgtgctgtacgtgcgtcttaaaaaaagttatgtggttataatggactcataacagagcgtgtgacgttgaggacacctcgaccataacatacccgccgttatcggtggcgccatgatcttaataatattacggcggcggaatattatgcggcgctcgcggcgtaaaaatgtaagttattagcgccgataccacgcccgcccaaaataaaacaaataaaatgggtctaaaacgagggtggacgcggcgtggctagggtgaataatacacggcgacttgtgtctggtatatgcgcacacgacacttncgtcacgcccgcgtgcgttgcttgcgctgtctagtgtcgcacgagcatattctatgcgcgcccgccgtcaataagttatgagtaagagcacgcggtgcgcgtcgctacgcgcattataatttatatactcactttacgcaccgaa

SEQ ID NO: 10617 - DNA, 547 bp, Glycine max
  Coding DNA Sequence Number=SeqID_838
tgtatcggtcagatcgtacgtctctgcatgtgtatgttcggtattattacgaggttagactagaagtatcagtagatccgtcgactacttgttaagagctaggcaggaacgatcccatgcatgatcgagctaagttgagtgcgagcggcacagacggagtagcggaaggccataaattcgtgttgcttaccggatctagcctcatcctcttgttggagaggcatgtgttcatcgtactgagctcactgctgagcttaagcaggattatctctgccggctctcttctgacttcttccgtttaccgggtaagatcgggatgtagtcgtaggcttgcccctcctatgcgatagaccgagaatccctttagcttgaggaccgagcgtctgtcgtcgttttgatgctctcattgaaatatacaacacacacaaccataactacctatatacatgggaacacgggaggcggcggtgggggtgcgcctccccctccgccctgtataataggggtactgaagaaaccttttggtacttactgtgcgcttactcca

SEQ ID NO: 10618 - DNA, 223 bp, Glycine max
  misc_feature (83)..(83): n is a, c, g, or t
  Coding DNA Sequence Number=SeqID_839
aagacaggtgtttgtcggtcggctcatgtctatggtcggggacacgaccctcgctattgttgtccatcgcgttctccatgatngacccctcccctgagacttccttcttacaccaccccccccatcaccctgtgaatttgtcccccggtggccccacaagccctcagaacacccaccaacgccttccaggacccaccctatgtcgatttcaactccctctcac

SEQ ID NO: 10619 - DNA, 551 bp, Glycine max
  misc_feature (373)..(373): n is a, c, g, or t
  Coding DNA Sequence Number=SeqID_840
atagagcacttcatgcgcaggcgcacgtccaccagcatctatccaatacaagatcattagaacatagatccatgctttactatctcagggagagagatttagtaattcagatactaaaactttatgttgcacacaataactctatcacaggcgaagtctgtaaggtctgggttatccagtgtcgtcaagatacgagtattgttttgatatcatagcataattatttgtggcgcgtatcgcacaccgtttatctgacagtagcattccaagtgcaagcaagcagtaacacatatagatgaataagcttgctccatactgagagctgctttgtccgcgcgtgcgtttcgtgtcacggtaggattagtgaaatatnatgtggcgcggccttctcgcttatttctgtttgtttacgtaaagatattaacaacagatactcttgcctcctgtgctctcggaggggttgtagggtagatacctttatatatttgtgtgggcgtctcgcgggatgggggtggtgaagtgtttaattatattccgcaacgtaacgtggg

SEQ ID NO: 10620 - DNA, 555 bp, Glycine max
  misc_feature (83)..(83): n is a, c, g, or t
  misc_feature (203)..(203): n is a, c, g, or t
  misc_feature (246)..(246): n is a, c, g, or t
  misc_feature (279)..(279): n is a, c, g, or t
  misc_feature (287)..(287): n is a, c, g, or t
  misc_feature (289)..(289): n is a, c, g, or t
  misc_feature (314)..(314): n is a, c, g, or t
  misc_feature (326)..(326): n is a, c, g, or t
  misc_feature (348)..(348): n is a, c, g, or t
  misc_feature (387)..(387): n is a, c, g, or t
  misc_feature (413)..(413): n is a, c, g, or t
  misc_feature (429)..(429): n is a, c, g, or t
  misc_feature (518)..(518): n is a, c, g, or t
  Coding DNA Sequence Number=SeqID_841
ttttttgcttactgtgcctaccgtggcaacatctcgcgtcgacgcagtacagcgcatgtcgccgacagccgacgaccattatncagacacataagacggaagttgtatcaatatacgcacatacaactacacgataagtatacgtcgcgtatatataattgttatatattatccagtccatgtgctgccgcaaaccacgtgancataataaatacctgagatgatgcgagacttacattactcggngtcttctctcattactcgtgcgtcggactagantgcggtgntnggtatatgtactacatgatataagngctacatcacgncgcgtctatcttactccatcgngctcgacgtctgtatgtatatgctatatcgtcgcaagtntatctagaactactacacgtgtcgtngattgagctataacangcgagtgacagatacctacgtatattctgtctcttatatgtgctacctcgacactcgcatatctataacacagcgcgagacgcatctangctcactcttaacaaggtgcatcgatgggagtatact

SEQ ID NO: 10621 - DNA, 471 bp, Glycine max
  Coding DNA Sequence Number=SeqID_842
gacatgagttccacttttgttacaatcaacaaaaatatggatatttttttaaggaaaaaggggcgcgagataaagatttggagcaaattaaaagagaaaaattcgagaaatttggttgagttttttttgttttgttgctatatataattcaagtcctaatttaaattaatccaatcattgaatttttaagaagtaatttgtagaggaatagaggaaccttttcagcctcaacatttcggaagatcacttcgatgctaccattctcaagatcgtagcttctccattcgtaggtcatctcggaactaagatcaacattacgtcttttaattggtgtaatggtagctcgtcgagttcgggtaacttttgtgagcatcttgctgatcatttcagtttcaggtttcatttcagtggtaatttcattaagttctcggttaaggtgtttcttggcctttccaattctgtcaccaatag

SEQ ID NO: 10622 - DNA, 228 bp, Glycine max
  Coding DNA Sequence Number=SeqID_843
ggtgtagtgcttttgcatggtcctaaatgtgtaatggatgaggtcctataccgaacatctagaaagcttcagtagtgttaatgtcgggctttgaaagcattttatatgttttggggattttggcgcaagggatagatgttttcatctcctttttacacatgcagagtcgcttattgagtcagtgattcttgattgttttatggaagtcgtgcagagcggcctccttag

SEQ ID NO: 10623 - DNA, 522 bp, Glycine max
  misc_feature (93)..(93): n is a, c, g, or t
  misc_feature (167)..(167): n is a, c, g, or t
  misc_feature (194)..(194): n is a, c, g, or t
  misc_feature (207)..(207): n is a, c, g, or t
  misc_feature (226)..(226): n is a, c, g, or t
  misc_feature (246)..(246): n is a, c, g, or t
  misc_feature (317)..(317): n is a, c, g, or t
  misc_feature (370)..(370): n is a, c, g, or t
  misc_feature (373)..(373): n is a, c, g, or t
  misc_feature (378)..(378): n is a, c, g, or t
  misc_feature (384)..(384): n is a, c, g, or t
  misc_feature (394)..(394): n is a, c, g, or t
  misc_feature (405)..(405): n is a, c, g, or t
  misc_feature (451)..(451): n is a, c, g, or t
  misc_feature (469)..(469): n is a, c, g, or t
  misc_feature (484)..(484): n is a, c, g, or t
  misc_feature (486)..(486): n is a, c, g, or t
  Coding DNA Sequence Number=SeqID_844
tcacgatctcgctgtctgatcatatatcgggcgtgtcgtgattgtagtatatgacgacatcgctcgtgtgactagtatcactataacgccccntgcgagcatctgtcggtcgtggtgccaatcaactcacacatcacatgtgagatcgcacatccatctcgatcgtntccgtgcgcgcggtgcggtgtagtatnactattcattccncctcgtcagtctgctgaangacgtgttagacgactgctntctgcctctctcactgtgtcgtctgatccgtattgtctatgcggtcgtgtcgctgcgtatcaaacactcantcagcgacgctgcacccgtactatctgatctacgtcagacatctagggaccancanctagncgtgtnacgtcgttcntacgctcactnctatgcgtacactagtgtgcatacacaagttctacgatatatcttnctgctccttgacgtatgngcggatgatacgacncntcactatcatgtgcgactacgtcatatgcatgtatt

SEQ ID NO: 10624 - DNA, 549 bp, Glycine max
  misc_feature (67)..(67): n is a, c, g, or t
  misc_feature (112)..(112): n is a, c, g, or t
  misc_feature (166)..(166): n is a, c, g, or t
  misc_feature (195)..(195): n is a, c, g, or t
  misc_feature (201)..(201): n is a, c, g, or t
  misc_feature (203)..(203): n is a, c, g, or t
  misc_feature (310)..(310): n is a, c, g, or t
  misc_feature (320)..(320): n is a, c, g, or t
  misc_feature (363)..(363): n is a, c, g, or t
  misc_feature (392)..(392): n is a, c, g, or t
  misc_feature (395)..(395): n is a, c, g, or t
  misc_feature (409)..(409): n is a, c, g, or t
  Coding DNA Sequence Number=SeqID_845
gcgcggagaagcatgactgccagaacaggtaaatgcagagcgtcgtgacgtatacgtcgcgacaccncacatatacactcgcatacatctctacgtacaccgtacgagcatngatactatgtcgacgacatgacactgcgcaatgaggatgtacttgattcagccncgcgcgacgacgtcgcactgcgcgacatngcttgntnctagtcgattcgatactagttgctatacgatagcgtagttatcacgtcgagatatatagacgtgcagactccgccggcgtgaacagcatcgtacgttgtcatacacncagtgcgcancgtgccacgcgcggtatatacgttcacgactagccacgcacgncggcgggacgctctcatcatgtcacgatngancgtcgcaacagatncatatagggaccatggattcagagccgactcgacgactgagggatgatattcgtagcgatcaacgggattttcagatacgcacgagaagcacgtaacgaatgataataaaatacagtgtcatcgatgtactatgcacaaa

SEQ ID NO: 10625 - DNA, 365 bp, Glycine max
  misc_feature (122)..(123): n is a, c, g, or t
  misc_feature (128)..(128): n is a, c, g, or t
  misc_feature (279)..(280): n is a, c, g, or t
  misc_feature (287)..(287): n is a, c, g, or t
  misc_feature (299)..(300): n is a, c, g, or t
  misc_feature (332)..(332): n is a, c, g, or t
  Coding DNA Sequence Number=SeqID_846
tggatccccgagttttccagggtcggaactgaggcatgaatgcataattgaagcatcatctggatagtacccccgagagttttcattatgcactcttttctttcgatgaagcaacataggtnncatgnaccatacagggggcagaatggaatttcacttttagtagcttccagaccagaaaatgctttcctgttaaggcactgaatccttgatgcagcagattcagcagacaaagatccgatgaagagaaaggcttcaagctcaacacccttgaaatgnnaacattnagagattcaccnncaaggggggagaagaagaagtgtagacacttnggggcatgggacgagaaaagaggcatttcgcaa

SEQ ID NO: 10626 - DNA, 289 bp, Glycine max
  Coding DNA Sequence Number=SeqID_847
aatctcacaatctcaggattctgctgctcatgagtgcctaataatagacaacaaagagtatttgttcatctttcatgtatgtcattcacatagctccagatatcagtaaaattattcacacacttagatgtcagaccttttacgatgtttctctgtcgtgaatatttaataagctaagtcattaggtcagcacggatcagtttaaaggaaatgacgctcacttagctatttggaagtccatgtctgcagggtaggtcaatagatgcgtgtgcataattcaatactctgg

SEQ ID NO: 10627 - DNA, 427 bp, Glycine max
  Coding DNA Sequence Number=SeqID_848
aagccctagtagactcaaaactcggaggcagagatgacggtagaagcagtgaaccctaaggcgtaccctttagctgattcccagctagcgataacaatcctcgatcttgttcagcaagctacgaattacaagcagctcaagaaaggagctaatgaagctaccaagacactgaaccgtggaatctctgagttcgtggttatggctgctgatgctgagcctctcgagattcttcttcatctccctcttctcgccgaagataagaatgtgccgtatgtgtttgtgccatcgaagcaagcccttggcagagcatgtggagtgacaagacccgtgattgcttgttcggttacctcaaacgaggctagccaattgaaatctcaaattcagcagctcaaggatgccattgagaagcacctcatctaatatttat

SEQ ID NO: 10628 - DNA, 452 bp, Glycine max
  misc_feature (211)..(211): n is a, c, g, or t
  misc_feature (293)..(294): n is a, c, g, or t
  misc_feature (399)..(400): n is a, c, g, or t
  Coding DNA Sequence Number=SeqID_849
atagatagtgtgtccatatggtgttatagaaggcgtgtgtgtgtaagaatcatacagaggatatgtgatatacaaatacaaatatcacagcaacatataacatatacatcaataccataccaggcgagaggcgcagtcattagaaatatatataagatttggtgtagagtataaccgcgatgctcacagcgatcgaagtcgcactttcgancacatcacgatctcatagatgtagagaaaatctatccagcgtaggcacgacaagactcacgcagcgaggaggacgaagtgannactatacgcgaatatacaggacttcagcaggaacgaccagagaaataataaacgcacatgctttctatatcgatcttgtattattttgtgctcttctactcactnntactctatatacttctaagcgctatgcgagtacactacgagcggcgcatagc

SEQ ID NO: 10629 - DNA, 316 bp, Glycine max
  Coding DNA Sequence Number=SeqID_850
accactacttcctaatgctgagtatgcatcacttttcttatctcctcatattatgagaaactcgcagcaccttgaaacggacatcccactcatctctttattgataatagagagttgggcgcctgacgctctaatgtactttgcgggatgatctcctctaaatggttacatggctctcattgttctgagcgtgggcatgtacgttctggacccaactggtaatgtcacgtcccttatctcttgatcttaacaagagacgctggatgcacccattcctgcaaagatcttattatgggatctctatctaacagacttt

SEQ ID NO: 10630 - DNA, 484 bp, Glycine max
  Coding DNA Sequence Number=SeqID_851
gacagagattacctctcccgtgatgactttttgggcgaaggagtagtttctatgtctagccttatgagcaccggcagaaccactaactgggtcgacctcactcacaagggaagatttgccggcaagcttttaatcgaaacggacttcagaggtgaccaaatcaagacaaccacaacaacaaccatgcaacaacctggttatgctatggacaagggtttccctaccatgcaacaacaaggctacatgccacaacaacctggttaccctatggataagggcatccctatgcaacagccttcatatcctatgcaacaacaaaacttccctatgcaacaacaaggcttccccactatgcaacaacaaagcttccctatgcaacaaggaggatacccaatccaacaagggggatacccaatgcaacaaggaggatacccaatgcaacaaggtggttaccaacaaggctatccccaaggcaagttttagt

SEQ ID NO: 10631 - DNA, 566 bp, Glycine max
  Coding DNA Sequence Number=SeqID_852
ttacttttcaccgtcggagctaagttcgcgcgccggtcatcctaaacccatatcagcgatcagccggccaggaactcgccgtagtgccgtggcgtgttctggtagcgtggaaagagtacttctgtcatggaaccaagtcagcccgagctcgaggagttctcagctgccaccgcgggcgaggtgctgaaaccagtggaggccccatccgatggtgaaggatgccccatatgcttgggtcaagaggaggccacggagaccacttggatgaagacagcgtgcggacacatctttcatgggcggtgcgtggagaggtggctcaagatgaagggaagttgccccgtgtgccggcgccagctttcgataccgcatgttggtgcaaaacaagatgttccatttatacatccctttgacttgaggacgatagagtcaatgcggaggtttcctcacatattcccagatccagatggatatttctcaatgtatacgcaggatatgtttgaaggccattgaagatgatgttgccacgtacattatgctttcggtagctctacatataagaccggtgc

SEQ ID NO: 10632 - DNA, 546 bp, Glycine max
  misc_feature (277)..(277): n is a, c, g, or t
  misc_feature (386)..(386): n is a, c, g, or t
  misc_feature (446)..(446): n is a, c, g, or t
  misc_feature (451)..(451): n is a, c, g, or t
  misc_feature (470)..(470): n is a, c, g, or t
  Coding DNA Sequence Number=SeqID_853
tacatacggtcctatcgaccaccaaaccgccgaatgctgtcagctaagtagttcatccgatgtctagtatcatcaaaatattctatatcaactattctccaactaatcttgtgtcagatgaggtatcgtgtatgtattgagctattagtatatgaacatatcataactttgtatgggtgtcttgtctgggaggtagggtgtatggtgtggcgtgtcgtgctgtgacggctccgatatgatgcacgcgcgcctataaccatccactccgtcgctaatnctttgcgtcgtataccacagtcctccagccatctatcgctctacctcgcgcggcacggattaatgcgagttttcttatattgtacattctcattctcacattaatatanaatgtatagatgagagacgtgatgtatatttaatatatactctactcattctgtatctcntgttngtatagtatgtgttatatntgctctgtttgtgtgggcgtttggcgccctccactctcaatacttcctgggtgagtcgacaccacgggtcaacacg

SEQ ID NO: 10633 - DNA, 579 bp, Glycine max
  misc_feature (93)..(93): n is a, c, g, or t
  misc_feature (224)..(224): n is a, c, g, or t
  misc_feature (254)..(254): n is a, c, g, or t
  misc_feature (276)..(276): n is a, c, g, or t
  Coding DNA Sequence Number=SeqID_854
gcggcatagtagtgcacgcgtatagttattactttctcgtgccatatagagagcacgtcacatgtagcacggtatggtgaagtcgcatctaantacacacacatagaatgtatgacggcgtagcaatgcgtacgataaatggccgccatcccaccatccatcgtgctgatactcgtaatggccgcacttcagactatcacaacatcgctcactacgctactctncgcggcagcagtcagagtgcgtcgatcagntgcaacgcatggttacgtatcncctctagtggctcggtgcagacgggcggtccgtaaatcgagtacgtgcagtgatattactcgcgtgcgttatagcggtttatatagttgatgttatatcatagtatctcaaattcagtgtcgagcttatagcgagagcataaatcgaccgtcatactacatccctctgcatctctcagtatgctgatgagacaatgctcctcgcacgtcggacacgtgtgatacacattcttaccgctcaactcgttgtcactaccatcagcgtctttaggcgatatctctgtgcagtgggtgcgtctactac

SEQ ID NO: 10634 - DNA, 89 bp, Glycine max
  Coding DNA Sequence Number=SeqID_855
ataaaagcaaggagtttggaatcaattttctgtgcgatgaattatacagttcttgtccgtgatatacgcgtgccggagaagtctatgtt

SEQ ID NO: 10635 - DNA, 160 bp, Glycine max
  Coding DNA Sequence Number=SeqID_856
gccggtcgccggcttcttggccgagccgcccgcgtcgtcggggagcagctcggccgcgcaggcggagagggagcagggcggatggatttggaatgggaggccggcacggagaccaccacgcggagggcgcggcccggacgaagcgaggacagatgaagga

SEQ ID NO: 10636 - DNA, 569 bp, Glycine max
  Coding DNA Sequence Number=SeqID_857
gatggctatgagacttcctgcgatagcgagagcggctacggaaatggctgcggctccggttggattgagacgtctcttctgctcgaacgctacaaacttttcattcctctctccacaggctaattccgaaactccggctcgtcctcaggcggatcccagcaccaatctcttcgtctccgggcttagtaagcgcaccacttctgaaggtcttaggacagctttcgctcagtttggagaagttgctgatgccaaggttgtcacagacagggtctcgggatattcaaaagggtttggatttgttcgatatgccaccttagaagattctgccaaaggcatagctggaatggatggcaagtttcttgacgggtgggtcatatttgcagagtatgcaagaccaagagaaccatatcgacctcagaacaacatgcctccttctccatatggtaaccgctactgaagcaaagaccgttgctgaaatctttggggacgaatctttatcagtgttgtgcgtcattctattatctactatgattgaactgtcttttagtagcgtcttgtgccttgagaag

SEQ ID NO: 10637 - DNA, 588 bp, Glycine max
  misc_feature (117)..(117): n is a, c, g, or t
  misc_feature (499)..(499): n is a, c, g, or t
  misc_feature (510)..(510): n is a, c, g, or t
  misc_feature (514)..(514): n is a, c, g, or t
  Coding DNA Sequence Number=SeqID_858
tcacatgactattcctgccgaagatagtatgataagagagcggacgtgcacgcgtgaacatagcgacagtccgtgtcgtcttacgatcatcccgaccgctcgcacgctcgcacgcancgcggcgttagccgacaatagactgagtagcatggacgtaacatcgactgttatctcacatctctcatctagccgtatatcagtgcgagcagaggcgacacggagtgcgtgaggcgcgctgcagccacacgccatacactacccggcctccatgcataccacgtatgagcgagacgccgcatcccgtcctcgtgcgatagagcgtcgtgtgcgagcaccgctcttggctcggtgagatagtcgggtgacgatgatctatatgtacaatatgagtgattcttatacatgatcgctgttctgtctttctgctgcttcgctatatgttctcatgcgctccgggtgtatacgagcccatgtatctatgctcggcaacgtcagctgnctctgctcgcngcgntgcgctcgttatacacaccatcgcacagtccacgcaccgcgcgacggccgaacatctcactctcatgacactgc

SEQ ID NO: 10638 - DNA, 375 bp, Glycine max
  Coding DNA Sequence Number=SeqID_859
atttatgccacgtggtaactgtgaaaacccatttgtcatgaaaggctcatatattcaaccactttcttggagctaacatttgaaagtagctcttgatgctgccaaacggctcgcatctctgcacagtgcataagcaaaagtgatatatcgagatattaagactttcaatatcttgctggatacaagatataatgcaacactttctgattttgcgctgtcaaaggatggaccaacagcgtacaaatgtcatgtcttcctcatgtgtatgtaactctatggatactgcccacctgtaattctatccacagtgcatcttcttgtaatagtcatgcctatagttatagtgatgtacttcttgaaatgtattcttgcacg

SEQ ID NO: 10639 - DNA, 494 bp, Glycine max
  misc_feature (234)..(234): n is a, c, g, or t
  misc_feature (413)..(413): n is a, c, g, or t
  Coding DNA Sequence Number=SeqID_860
gtctgtctgctcgtgtgtctttcatcgtgtctgtttgtctcagacggctattgctggctagcatcgcattagtctgagtgcatatcgccacgacgatgtagcgacccacaccacagagtacgggtgacaggacgaggacagcgcgacaacacagataggaagatcgactcgctgtgctaatactgattctcgtctctgttattgcggagctagagcgcaataccactgtcatcnctacccactccctcttgctacgtatgctgtatgctgttgagttggccggcgcgcgcgtgcggtgttgccgcggcggtggtgtcgcgtggtggcctcttggtcgcgcgtacgcttagtgccgtcacacatcgggcgcgcggatggcgggaaaatcacacaaatatattatttgtactgtntgcgccttcgcatctagatggtgtatgtccgtttcgcaatagcaatcaggtaagatatactccgcgtattgggtacttggt

SEQ ID NO: 10640 - DNA, 520 bp, Glycine max
  Coding DNA Sequence Number=SeqID_861
tgaggcacctgcagctgtagctgatgatgatgatgacatggatctgtttggtgacgagaccgaggaggaaaagaaagccgcagaggagagggaggcttctaagaaggacaccaagaagcccaaagagagtggaaagtcatctgtgctcatggaggtcaagccatgggatgacgagactgacatgaagaaacttgaggagtgtgtccgcgctgttgagatgcctggtcttctatggggagcttcaaaactggttccagttggttacgggatcaagaagctcactatcatgctcacaattgttgatgacctcgtgtccccggacaatctcatcgaagactacctcacctgtgagcctaacaacgagtacatccagagtgttgacatcgtcgcattcaacaagatctagagactttaagttgtctccctaccaaaagatacttgatttccttccaagttttgttctttttttttgtgttgttttgcttgagatgtttattttctagtagcaagacctctttca

SEQ ID NO: 10641 - DNA, 378 bp, Glycine max
  Coding DNA Sequence Number=SeqID_862
gaacaaaacgacgtcaattcgctcgtctcttcgctctacgcgctgctcaacctcggcattggaaacgacgcgtcggtttttttttttccttcacttctcttcctcaatttttttttctgttagcgttttattttatttatttgttttttggatgaattattatgtgttgtcattttctattaacattgtttctttcttttttttttttttttggttaggttattcattaatgattgatacgtcgcttcgcctttgatcgtttttttttttaatgtcgtttttgctcgtaatttctttaattgttaaaacgacgggttcattttggtagtttttgattttctgttttgcatttccagtttgcatgcatcgatatttttt

SEQ ID NO: 10642 - DNA, 474 bp, Glycine max
  misc_feature (28)..(28): n is a, c, g, or t
  misc_feature (49)..(49): n is a, c, g, or t
  misc_feature (52)..(52): n is a, c, g, or t
  misc_feature (76)..(76): n is a, c, g, or t
  misc_feature (80)..(80): n is a, c, g, or t
  misc_feature (82)..(82): n is a, c, g, or t
  misc_feature (124)..(124): n is a, c, g, or t
  misc_feature (130)..(131): n is a, c, g, or t
  misc_feature (136)..(136): n is a, c, g, or t
  misc_feature (166)..(166): n is a, c, g, or t
  misc_feature (172)..(173): n is a, c, g, or t
  misc_feature (181)..(181): n is a, c, g, or t
  misc_feature (195)..(195): n is a, c, g, or t
  misc_feature (211)..(211): n is a, c, g, or t
  misc_feature (217)..(217): n is a, c, g, or t
  misc_feature (225)..(225): n is a, c, g, or t
  misc_feature (281)..(282): n is a, c, g, or t
  misc_feature (284)..(285): n is a, c, g, or t
  misc_feature (292)..(292): n is a, c, g, or t
  misc_feature (295)..(295): n is a, c, g, or t
  misc_feature (298)..(298): n is a, c, g, or t
  misc_feature (310)..(311): n is a, c, g, or t
  misc_feature (362)..(362): n is a, c, g, or t
  misc_feature (386)..(386): n is a, c, g, or t
  misc_feature (449)..(449): n is a, c, g, or t
  Coding DNA Sequence Number=SeqID_863
tgacatggtgcttgtcgtcgtccgctcntgacgtgtgtcgagtgcgctnatnaccggctgcttgcgcaacgtaganagtntntgtatacataacacactgcagcggtaaacatctatcgtcgcncaaggnncacantatatacctacgagatactaataaatatanagagtnnggtcacgncaaacacatatagntgtgtgtatattgatntacaantatatatngaattaggtatatgagatatgtctgatataatgataattgatagggagatgacgannanngacgcgngcnacnccaatgtttatnnccacttctcgtgcttctatggacctactcctgcccgccgcagagctttatncttcaatatttaactcgtgactgnctgcttccatcgtagatcatccgtagaagccacacatatcacgtccacagtgtagctgatagntctacactctccatcctcatgttag

SEQ ID NO: 10643 - DNA, 522 bp, Glycine max
  misc_feature (460)..(460): n is a, c, g, or t
  Coding DNA Sequence Number=SeqID_864
tacaccccgttcacggtgcacaagtcaagcgatagcagtggcacactagagtgttttaatcagaactcaaacaggtccgctaggtacaagactaccactgccctttccacaccttactgccccccgctcaccctggacccgctccccgtattccaccgctcccactatttttcccccccatttttttatttcccaccccctccacccatgtcccccccttccccccaccatttcaccccccgttgagcccccttccccccttttatatcccctttctctcccccctgatttttccgccttgtaccacccatgtccctttatcttcacccacaattttcacaccccccttgtattcaccaccctctccacctttaatccccccctttgtttactcccccgtctttctccacccaacccttctcccgatttttttacagcccacttttaacactacccaatntatttttccccccctcatttcctcttctcgcccccacttttccaccacaattaacacccaat

SEQ ID NO: 10644 - DNA, 302 bp, Glycine max
  Coding DNA Sequence Number=SeqID_865
atagttggcggaggtgttcgtcggtggcctttcgggtggggagcatggtgcatcggtcggttatggcttcgggagggttggagagagcgtgttgatcagcggtatgagagagttgtcgtgcttaagaagcagtagagagtgggggcattgtcgagaacggtttgtggtggttaaagacccttccactagcatggtctccatgaggttggtgagattgaaggaggaatgcatcttttgtcccttgtggaatatctacgcattcttcaggttttcattctttcaatagcctgttcaggtgttta

SEQ ID NO: 10645 - DNA, 582 bp, Glycine max
  misc_feature (157)..(157): n is a, c, g, or t
  misc_feature (503)..(503): n is a, c, g, or t
  misc_feature (531)..(531): n is a, c, g, or t
  Coding DNA Sequence Number=SeqID_866
atggcgctccccatgcaggacttgacctactagaatatcgaacagcacctcttcaacgaaagggagctcctcctcaaggccaacccgggcggaagacgaaaggggccccgcacctcattccaaggaagggtcggaacacctagatcccgaaacaccnaaaagcaacttcgcgcccccgtcacactacaaaaataggtcggcgccaccacgcccccgtggaccctccgcccacactccaatcctgttggtcaccccacttaaggatcggtttccgcccgtcctcgcggccctttgtggcgcgctctctacaacctcacatcgagcgacgctctcttaaatctcccaacgggacacttcctgtccctaattctctttacggaaaaatgaacgaggcaattgcattatcccctatatccgtccctacatcccgaagtgggtgatcacccgtgaaatcctcatcttctctgcccgcagcgtcccgagcgattccacaaattgcgctnctcgcccaccacacggcgaccgccctcntacttccaaatcgagatggatacacatgagagaagatatgcccctcggcgc

SEQ ID NO: 10646 - DNA, 181 bp, Glycine max
  Coding DNA Sequence Number=SeqID_867
gacatatttatattacaggaatctataaatttattaatattcttgcaggcatctaaacaaatttgttactctttatttcactgattttatatttttatatctagacaaatttgttgctccttatatcgcgcatgccaaaaccgaagaggaaggcaaacatcgtggccgataccggaagcag

SEQ ID NO: 10647 - DNA, 149 bp, Glycine max
  Coding DNA Sequence Number=SeqID_868
agctcacaatctgactccttttcggctgatttcgttggagctttgatctctccgttgaaatggttgctttccggtttcaccaataccaagtggttgggagagcacttccaacagagaaagatgtgcagcctaagatttaccgtatgaag

SEQ ID NO: 10648 - DNA, 498 bp, Glycine max
  misc_feature (90)..(90): n is a, c, g, or t
  misc_feature (122)..(122): n is a, c, g, or t
  misc_feature (143)..(143): n is a, c, g, or t
  misc_feature (191)..(191): n is a, c, g, or t
  misc_feature (206)..(206): n is a, c, g, or t
  misc_feature (265)..(265): n is a, c, g, or t
  misc_feature (278)..(278): n is a, c, g, or t
  misc_feature (280)..(280): n is a, c, g, or t
  misc_feature (283)..(283): n is a, c, g, or t
  misc_feature (290)..(290): n is a, c, g, or t
  misc_feature (354)..(354): n is a, c, g, or t
  misc_feature (359)..(359): n is a, c, g, or t
  Coding DNA Sequence Number=SeqID_869
taacacggcaacacgacgagtcgcacacacgcgctatacagagaaatacatattgtatactacttacgatatcactcgtctgtcgtgctntgtgcatcgtcggttcgcgctcacatcactcntgcgctctcaacgcacgtctntgcgcacatcagtaatcgggagccacgagtcggcgtgctctacgttgntatgtgtcacagtcntctcgagcgctgaacgtccacagtcctatacactttactgctgtcgagtattctgagantccatccttcatntntcncctactnctacccgtcgccctctcatctactcttcgtgagcatgtagtatatctcggctgtctctatcatnctagnacccgactcactctagacacctcatcccgtctgtgtggtcagaggatgatactgctctgtgacacgatacctgactgatgcgtgatagcatcgatactgcactctatatgtgtgtagtcgtgtcgacgtgtagctagtc

SEQ ID NO: 10649 - DNA, 162 bp, Glycine max
  Coding DNA Sequence Number=SeqID_870
gcagaaaccttttgtatatatttacatcaattcttgtcacattcacagaatgcagaggataataagtatgctgaaggagtgagtccatcacttgaattcatcataacttcaaaggacataacagctactggtgcatcagccacattgctaattttcaacaat

SEQ ID NO: 10650 - DNA, 275 bp, Glycine max
  Coding DNA Sequence Number=SeqID_871
ctaactaccagccggtgatcgggatccctgacccaccccggcgacggtgcctctggccggctcagcaacgccaccggggtttcctacatcgccgcctcctacgttaaaatccgtggaagccgggtggtgctaaaagtatctccccctatccacaatggagtcaccgtgaagaaccttaacaagagcctcgatttgggccaatgaagtgcccctacactggggggggggctggtttcgggcccaaaatttggatacccctgtgaaacatttttaag

SEQ ID NO: 10651 - DNA, 428 bp, Glycine max
  Coding DNA Sequence Number=SeqID_872
attgctttcgaccaagatcgatcgtggagacgtctacctcgtagacctctctctcaacttgaactcccatttcttgttgcggacatcaaatatgcgtctttctcgcttcgttctcctcatttgtctcgttcttgttgcaccagccgtatcggctgatttagctatcttgagaacggattactaccaaaaaacatgccctgattttaacaaaatcgtgcgtgaagccgtttcaacgaagcaagctcaacaaccgacaactgcggccgggacactacgcctctttttccacgactgtttccttgaaggttgcgatgcatcggttttgatagccaccaactcgtttaacaaagcagaacgtgacgatgatctcaacgaatcccttccaggagatggttttgacattgtgaatcgcatcaagacagctctcg

SEQ ID NO: 10652 - DNA, 577 bp, Glycine max
  misc_feature (56)..(56): n is a, c, g, or t
  misc_feature (62)..(62): n is a, c, g, or t
  misc_feature (356)..(356): n is a, c, g, or t
  Coding DNA Sequence Number=SeqID_873
gtagcgaccgtgagatccctgatcacatttactaaccacatgacgcggcggcgcgncgccgntcggcgcaccgcgacacgataatacagacagcagacatatcagtactggaggcggctgaagtctctcatctattaatctaactattatcagccggaggtgatcaaagagaatgtataatcagtctacaggtgtagacacggaggcccaccaatagtagagattcgatgtgagttcgtgcttacatccgcgagtataggagacgcacgatgtgacgtccgaggcgagcgaagccgataaaagattaatatgaagtgatatgacgagtatatcagcggcgcgtacacaacaatcanatcacacacgccgcgatcatatatgatgacagtgcgaggataatatcgcgacgcccataactagcaggaggagaggggagtatataatctcctccttattattgacgtcacagcggtgtggcgacgcggaggttgctggcgggtcagctggcaccacgtatcaacgaaggtggatgaaagtgcaacggctatgtctagctagggctgtgctcgactcatcg

SEQ ID NO: 10653 - DNA, 577 bp, Glycine max
  misc_feature (141)..(141): n is a, c, g, or t
  misc_feature (328)..(328): n is a, c, g, or t
  misc_feature (513)..(513): n is a, c, g, or t
  Coding DNA Sequence Number=SeqID_874
gcgttcgtcgctctatatcactatcgcatcacagccgcagacaacacaggagaggactacgatgactaacaagacgaacacgacagatcatgctggaaacaacacatacgttggactatatcgttatcacgccggacaganacgtacgagtgccgccgccaccgcccccctctcgctcgcgcgcccctcactcatatacatctcacacacaacatagagacacgtctacacgcggggcgactatactcgacgaagccagcaacacaggacaaaccgactgtcatatctaacgctcagcactcaccagaccagtacacacgcactccanactgtaatatctctatagagctataaataggagaaaatatagcaccggctacgcgacgcgaacaccacacccgacaccgcgccctccaccgaaacgactctcctcacgggaaccgtgggcgcgcgccgcgcggcggtcagtgcgggcgcgtgccaaacgacgtcgcctgagtctggagactcgtnagcgcgtggtggactaggggcccatcacagaccagatacggactcatacatcatccgagctcct

SEQ ID NO: 10654 - DNA, 429 bp, Glycine max
  Coding DNA Sequence Number=SeqID_875
tgttataccagcagcaacacctttcgttgcaacatggtcatcatcttcagggcacacatcgccaacaagaagctcaccatatggttggacaaagttgaggcattagcattctaagaggatgtcaggttagcaagttgtgatgttataacacacataaactccttccgccagtacaacaagagctccagccccatgagagccgttttcacagggcaacaattgttgatgttgaacaatgatccagtctcatagttcacccaagccaggaaaactggtgtttatggcatggtatgtgaagctatatttcaggatgaggttcagggtcggggtctttatatccaatggatacaagcccaaggtcaaatgtcgtcctcaaggttcccttcagtaaaaatggcacctttagtctgtttcagaccgccaacatgt

SEQ ID NO: 10655 - DNA, 399 bp, Glycine max
  Coding DNA Sequence Number=SeqID_876
tcggagacgatgacaagggattgctgtggagacttcctaaggttaggatcaaagacgtcggcaaagttggtcccgcctttggactcggattcggttgcggattcggtttcggcgccggtcttatcggaggtgtaggattcggaccaggagttcctggactacagtttggtctcgggtttggagctggttgtggaatcggtgtagggtttggctatggcgtcggaagaggcgcggcttatgatcactctcgctcttattacaacgtcggaaaaccatctctagatgaagttgattctcttatcgatgaactagttgttcacaccaagaaacttgtcaaagctactacaaaagaaatcgacaagtggagaagaacttagccaaacttatcagtgttgcagc

SEQ ID NO: 10656 - DNA, 302 bp, Glycine max
  misc_feature (27)..(27): n is a, c, g, or t
  misc_feature (50)..(50): n is a, c, g, or t
  misc_feature (52)..(53): n is a, c, g, or t
  misc_feature (55)..(55): n is a, c, g, or t
  misc_feature (57)..(57): n is a, c, g, or t
  Coding DNA Sequence Number=SeqID_877
gcaaggttcaagaatcggaatcaacgnattttgggaagaattggccgttngnntngncagagtcgctctgcaagagacgatgtaagctcgttgccgtaacgaccttttcataccaccgataactgacatacatgtttaataaccacgggggtcacggaccctggaaggatcacgaagtccccgttaaggaggaaaaagacccttttcttcggggaaaaaccaattcattgtttttgggaaccgggaaccctgaaaaaaacccctggggggcacacgggagctgaattatttgtgggggcccc

SEQ ID NO: 10657 - DNA, 549 bp, Glycine max
  misc_feature (55)..(55): n is a, c, g, or t
  misc_feature (125)..(127): n is a, c, g, or t
  misc_feature (129)..(131): n is a, c, g, or t
  misc_feature (173)..(173): n is a, c, g, or t
  misc_feature (204)..(205): n is a, c, g, or t
  misc_feature (209)..(209): n is a, c, g, or t
  misc_feature (211)..(211): n is a, c, g, or t
  misc_feature (215)..(215): n is a, c, g, or t
  misc_feature (348)..(348): n is a, c, g, or t
  misc_feature (380)..(380): n is a, c, g, or t
  misc_feature (399)..(399): n is a, c, g, or t
  misc_feature (401)..(401): n is a, c, g, or t
  misc_feature (480)..(480): n is a, c, g, or t
  Coding DNA Sequence Number=SeqID_878
ttcaatgaaaactatctctccggtgtgagcaccgctgccgcgctcgcgtcctcanggcgagcagaatctccatgagaggggtgtacacccacgccacacccgacaaatagtgagcggagggcacnnnannnccggactagccaaaactacacctatcacacaccccagaggcngcgccgacgcagaccgcgatcaccacgtggnngcgncngcgncttacaaataccacgtgtacgtaatacaggaggaggatagcttacccaacgagtcacgacaatatcaatacatagtacgttcttgttcagttgatataggtatggtgtgtacttctactaccccccatctttnttagcaagtccgtgttactattctcctgtgtnactcctcacagagagtagngnagcgtgttgaccgcggcgccggcagccctcggagacgcgcaactctcccgttcagcaacccacttttttccatggcgcncggtggtgtattgagagtagtgctcgtttttgtatggggtgggggccccggtaacccagatttgtggag

SEQ ID NO: 10658 - DNA, 495 bp, Glycine max
  Coding DNA Sequence Number=SeqID_879
tagatatggtcggtatgtgggcactgagtgtttcgtttcagaaataaatacatttttcattctacacgccgcgcgatgcttgcgcgtggagcataaaacaaccggctcgggtatatcaattgtgtgtgtgtgtggtttgagggaggggggtgcgcaccgccactacgcatcggatactccggagcgcgacgacataccgcgtcgcatataagggctcgcgaataatagataaaaaggggggagtaagacggatatatatcacatatttagtggatctttatcagaggtgcgccgcgtctcaaaaattaaaatgtcaagttggcctaaacaattgtgtagcctaaataggttgttggaaacgttgtaggggatggaacgcgttgagtctggggttgtgtggcggtgatcgttacacaataagaactccatataaactagtgtcggagaggtggaattgattcacaacatccgaacaccgcagcacatacgcggaaa

SEQ ID NO: 10659 - DNA, 428 bp, Glycine max
  Coding DNA Sequence Number=SeqID_880
acacaccagcaaaaatattccaacgaagcagaagatcatcgatcgatctccaactccaacaactccggcgccgggctttgatcggaagggaagaaggaggaggaggatgcggatgagctgcaacgggtgccgggtgctccgcaaggggtgcggcgagggctgcaccatccgcccctgcctggagtggatccggagccccgacgcgcaggccaacgccaccgtcttcctcgccaagttctacggccgcgccggcctgctcaacctcctcgccgccgaagacgccgccctccgcccggcgctcttccgctcgctgctctacgaggcctgcggccgcatggtcaaccctgtctacggctccgtcggcctgctctggtccggccagtggggggcctgccaggccgccgtcgaggccgtgctcaagggccgcc

SEQ ID NO: 10660 - DNA, 282 bp, Glycine max
  misc_feature (34)..(34): n is a, c, g, or t
  misc_feature (146)..(146): n is a, c, g, or t
  misc_feature (155)..(155): n is a, c, g, or t
  misc_feature (160)..(160): n is a, c, g, or t
  misc_feature (177)..(177): n is a, c, g, or t
  misc_feature (192)..(192): n is a, c, g, or t
  misc_feature (196)..(196): n is a, c, g, or t
  misc_feature (205)..(205): n is a, c, g, or t
  misc_feature (255)..(255): n is a, c, g, or t
  Coding DNA Sequence Number=SeqID_881
actgccgtcaccgaaactcacgcgcctccgtcancgccgccgtcaccgccaccgccagaacccgaattttcacgaaaaagcaggtcgtcgtcgaaaaagtgcatgaagcgccttccgccggaacggccgcgaaattaccgcaggantcagcgganaaaanaaaggtggacgccgccnggaaactgccgcccngaancagtgcggnggtcggaaaacgaaaaagagggggaatgcttgccggaaatttgttccgcnggaagactcagcaatgaagatttcaac

SEQ ID NO: 10661 - DNA, 532 bp, Glycine max
  misc_feature (491)..(491): n is a, c, g, or t
  Coding DNA Sequence Number=SeqID_882
taatcgcagcgaatgatggagccacactgaggtctacgccgcatctcagcactacaactgagtcgtgcgaccgagtgcagcctagaattaaactgtgtcgcatatactcgattctgacgcatcgcatgtgcgcggccgttctttgtgttgacttattatggcttcttggttagaagtatgatatgatgatgataaaaataaacatgtacatctataacaactacagggaggcggagcgcgctcaacgcagttcgacctatatgacattattgttaacatacagctctcctatcaatatttctctgccgtcgtttctccactcactcggtgaaagttgcagttgtagactaataaatactgagacgatggtggaacgagcgcctacctccctctgtgcgtgtacctatgcatatataataaaccctatacgtaatataaaatagggtcgtgctgcgtgccgcgcgggcgtcgcgtgcggtcggcggtccctnctatctctcctattataagatcgtactagagccgagagcga

SEQ ID NO: 10662 - DNA, 249 bp, Glycine max
  Coding DNA Sequence Number=SeqID_883
cccctttgaatgaaaataccgcgagtctcttgggaagaagcgcagcatatgataataactttggaaaaacttctttgactcttcaagaaaaatatggattggcgcctgaaaacagaactctttcatttggggcaagcaactacagctcagatttgaagaacctgggtcttggaaaagaagagtataaaacctctttgacaactgagaacagatttacctccaaagatgctagtccaagcgcaaatctca

SEQ ID NO: 10663 - DNA, 433 bp, Glycine max
  Coding DNA Sequence Number=SeqID_884
gccgagtaatcaatcatcctaggtttttggtggcaagcagctcgctacaatgacaaagggaacagggagtttcggaaagaggaggaacaagagtcacacgctgtgtgtgagatgtggacgtcgtagcttccacatccaaaagagtcgctgctctgcctgcgcttaccccgccgctcgcaagaggacctacaactggagtgtgaaggcaatcaggaggaagacaaccggaaccggcaggatgagatatctcaaaaatgtcccccgtcgcttcaagaccggtttcagagaaggtactgaagccaagccaaggaacaagggagcagctgcttcatcaacctaaaagaaaccccacttggtgtttaaggcagcaagggactaaaatttagcacttttctctcgctctatctagttttgagatttgctattcctgaat

SEQ ID NO: 10664 - DNA, 353 bp, Glycine max
  misc_feature (124)..(124): n is a, c, g, or t
  misc_feature (139)..(139): n is a, c, g, or t
  misc_feature (145)..(145): n is a, c, g, or t
  misc_feature (166)..(166): n is a, c, g, or t
  misc_feature (194)..(194): n is a, c, g, or t
  misc_feature (226)..(226): n is a, c, g, or t
  misc_feature (259)..(259): n is a, c, g, or t
  misc_feature (284)..(284): n is a, c, g, or t
  misc_feature (290)..(290): n is a, c, g, or t
  Coding DNA Sequence Number=SeqID_885
gtgtacatcttggtggaaacgtgacaaaatgactacgaagcgtcgcaatggtggacgttccaagcacggacggggccatgtgaaccctgtccgttgcaccaactgcgctcgttgcgtccctaangacaaggcgatcaanaagttngtgattcgtaacattgttgangctgctgctgtcagggacatcactgaancttcagtctacagtatgtaccagctccccaanttatacgcgaaacttcattactgtgtgtcatgngccattcactccaaggttgtgcgtnacaganctaaggctgaaaggcgtaacaggaacccacctcagcgcaactttgcacgaggtccacgaccgg

SEQ ID NO: 10665 - DNA, 553 bp, Glycine max
  misc_feature (147)..(147): n is a, c, g, or t
  misc_feature (192)..(192): n is a, c, g, or t
  misc_feature (243)..(243): n is a, c, g, or t
  misc_feature (245)..(245): n is a, c, g, or t
  misc_feature (272)..(272): n is a, c, g, or t
  misc_feature (309)..(309): n is a, c, g, or t
  misc_feature (320)..(320): n is a, c, g, or t
  misc_feature (327)..(327): n is a, c, g, or t
  Coding DNA Sequence Number=SeqID_886
gtatctcggatatacttcttccctcgccatcgcgctccctgctcgagtcacacatctatattatctactgtgtgttcgtcagctcgctagcgcatgacactctacgcctactgatgcctgcggacagatgttctgtactgttggtgngtcatcggccgcgctcgcttctctcttctctctcacctactcgancagcgccctctcacactgtcagacagctgtcatgactgacacacatatgcntnttcgactctacgcacgctcatgctgantgactgatctggcgcgatggctgttgtcttctgaccnccaccacgcanctactcnctccgcagccactaccaggtcgctacgcacatatctacacaacgttccctcactccatatcacgtatgcacgacgtggtcgcgcggccgctctcctcaccgtctctgtcgatacctcctgccctcgcgcgtgcgatctctgcgtgcctctggcatatagctctgtatagtactgcttcttctcttagtcgtgtcacgatcatccacttgagctgtctatcacattc

SEQ ID NO: 10666 - DNA, 481 bp, Glycine max
  misc_feature (31)..(31): n is a, c, g, or t
  misc_feature (42)..(42): n is a, c, g, or t
  misc_feature (107)..(107): n is a, c, g, or t
  misc_feature (117)..(117): n is a, c, g, or t
  misc_feature (165)..(165): n is a, c, g, or t
  misc_feature (167)..(167): n is a, c, g, or t
  misc_feature (201)..(201): n is a, c, g, or t
  misc_feature (216)..(216): n is a, c, g, or t
  misc_feature (245)..(245): n is a, c, g, or t
  misc_feature (257)..(257): n is a, c, g, or t
  misc_feature (317)..(317): n is a, c, g, or t
  Coding DNA Sequence Number=SeqID_887
aagatagactatctgctgcagtgacgtagtngtcatcgagcnatatgtacgtcatgtctcagactcgcgtatgatgaggttgattcgtctccaccaacatcctctcntcactatggntgcgacccatatacgctctgtgagtattgacgtagatgatgatcatcntncttggcatgaagtgagttctgctcactgtgatcntagtgcgctctcctncatgtgggttatgtacgatggcgcacacngcctcacgtccnctgtcgcgaacgacctctcacgcgcgcgtacgcgacagctctagccactcatggcgacgntgcacgcggcgtgtatgtaatgatcacgtcaagcccgatgtgacagaggacgccatgacagtggtgtcatgtgcatcgtggtactctgagcatgccgggctcgatcgcgtatgtcgctagatacactctgcggcagcgcgacctatgataccacgttccaatgt

SEQ ID NO: 10667 - DNA, 365 bp, Glycine max
  misc_feature (38)..(38): n is a, c, g, or t
  misc_feature (119)..(119): n is a, c, g, or t
  misc_feature (147)..(147): n is a, c, g, or t
  misc_feature (277)..(277): n is a, c, g, or t
  Coding DNA Sequence Number=SeqID_888
gcttcgttttgctgggtggctttgtgctgtgttgggtngcgtcggtgctgctttctttgggtctttccctccccttcttgcttgtgtttttggtcttgtggtgccggctttctgtgggnttggtggcgctcgtccccttggtcgggnggtggtccggtggtgcttgttcgttggctgcgtgggtgttgtcgctttggttgccggctttttgcggcctttctgctttggttttgtgggcgcgtctctggcggccggcgttcggcgcgtggtgttctcngccctgctccgcccttgggtggggggggttcctttgttggctttccgccccccccccctgtccttgcgtttggccggtggtgctaaaa

SEQ ID NO: 10668 - DNA, 582 bp, Glycine max
  misc_feature (28)..(28): n is a, c, g, or t
  misc_feature (299)..(299): n is a, c, g, or t
  misc_feature (303)..(303): n is a, c, g, or t
  misc_feature (313)..(313): n is a, c, g, or t
  misc_feature (348)..(348): n is a, c, g, or t
  misc_feature (401)..(401): n is a, c, g, or t
  misc_feature (419)..(419): n is a, c, g, or t
  misc_feature (456)..(456): n is a, c, g, or t
  misc_feature (496)..(496): n is a, c, g, or t
  Coding DNA Sequence Number=SeqID_889
gtctccgtcacatccgcgtagaagaccnatcgcatttctctcacaattcagtacgtaatctattgtgtactagagtagtccttcacgccgtctgccataatgacctccgtcgcaacgagactcgtgctcaaataacgttctgcgtcataatgtggtatgtatagatcacgacctaagcgcacacgacgtttgtctcgcgtatctatatataccttcactgccgctatatatatacacattcgaaatatagcgtctcaaacgggaatgcatatcatagagagtgatatacacgtatcgtncganatgttaatancacaaacacactgatagggtatgacacacatctcncactcatgcgtctatgatagacacacaaccgtgtgcgaattataacacgacgntctagacgtcgagatgcngtgtagcacggtgtactatagttcggagaagtcgccntagctactacgtattatactcgtcatcacatgcgtcgcgntatagtcagtcgaagcacgagcctactcacgtccgcgcgagtatagaagtgagcgcgcgtcatctgtacacacaccagccgtagcg

SEQ ID NO: 10669 - DNA, 406 bp, Glycine max
  Coding DNA Sequence Number=SeqID_890
ttattgtttgacactcatctccacccaattaactttcaatgaccaggagctagtcatccatggtggcaacggcatcggtaagatctcaccttgcttttttacttggatttatagcctgggtttgttggtgaagtaatgatcgaaggagatattaaattgttgtctgtgatagcaaatggcttgcctacaacagaggactttgagcatgtcactgatttggaaatattgaaggttccacctatccccatggataaattcatttatctttttattgggttaatctctacagcaaataattttaaacatagaatagtggttcatagaactggggtatcatgcgtgggtagtgactaccttattgaagatccttcttcctgttttgattgcattttcgttcactatgtac

SEQ ID NO: 10670 - DNA, 344 bp, Glycine max
  Coding DNA Sequence Number=SeqID_891
ttactttggtggttctcttccggcggactcttcaccggtcctagagattggtctcccgtaaaagtggtttcgttgacgtttttacttggacttttgactccggtgactctctatcttggaatttgacagccggcttttgactctggcgaagtcgacttgttctccggtggcgtcggacggcttgttccggagtttttttctttgatcctcgtctctgttttactcttcaagtcttagccctcttttgatttggatccgattgtttaatccttcccttggttagggtttgttcatcttcagactaatctttatcatcaaagaaggttgtttcagatgcaggataa

SEQ ID NO: 10671 - DNA, 81 bp, Glycine max
  Coding DNA Sequence Number=SeqID_892
tcatcagaacagttgacataacatgaggcctataactgggagcaatgagtgttacgccctgacagtcattaaagccaagct

SEQ ID NO: 10672 - DNA, 515 bp, Glycine max
  misc_feature (163)..(163): n is a, c, g, or t
  Coding DNA Sequence Number=SeqID_893
gtaatggcacgcgagcagatacaagactcaagaaagtagcaactatagcacttacaacaatacattctatcgctcatactacagatcactattgagctgctgataggtagagagagtacgtcgtgcaggagtagtattatagatataagacacacggcgactnagagtctcgctcaagtctagatcctacatacacatctacccgctatgtagatacgctctactgtgcacatcgttgattgatgtagtcgacgcgtgagcatgagcgatgtgtatacagatatgaattacattatagtttagtatggtgtgtcattgagtgattccagaaaacaagaaacactatgcacacatcgtcctgaaatatagtgcattgtacgtagcgacgtagtagcttggctcgtgcgtgtggagtggttgacgtgagtacagagcgtacaagagtggtcactagtctattagtatattacgtatatactccagctacgaatgcagagcactcacataccgataag

SEQ ID NO: 10673 - DNA, 565 bp, Glycine max
  Coding DNA Sequence Number=SeqID_894
taaactagggccatgtcctttacatccttccagcaccgcaagacacttgcacccttcacagatacaccgcaccctcattgctcatattagatcattgatggggacaactatgacgccagtcaatggttcgaacactaacattaacccactctatcaagaggagctaagaccgtgcccatcatctgcacttgcatcggatatgtgcaaaactgatcgcaccgactgggacaatttccaagtaaccaattatagtcggggaactacaaccaactcctctactccagaggcaaacactgctgatgtgcgtgaaggacaaagctgaagatgaagatgctgaggtgattgacagcattgactacgcctgggaccaaggtatagattgcgggccaattcagccaggaggctcttgttttgagcctaacacaatagcatcccatgcggcatttgccatgaatctctactaccaaacttctggcataaatcaatggaactgtgatttctctcaatcagcaacactcacatcccaaaatccaagttacaaagttttctaaatgtcactctctat

SEQ ID NO: 10674 - DNA, 459 bp, Glycine max
  Coding DNA Sequence Number=SeqID_895
ttcaccaggcttaccgaagacgaagtcactgtcttctcttctgtttcgcacggcgtattaggtcgctggaatgtcaggggctctccgacacttgcgggcgcctaccctgtgcatggtcagtctgaggttgtcctgaagtctggcgtcgctagcgctgtacggtccgctgtcctgtactccaacggacagtgggcactcctgcgaaacgatgaaatcgcctggacccggcccgagtttttgtcgggcactgtctctgcaatctgggccggccttcctgaggaggaggccttggcacaagcacttgccgatgagagccatcgtaacctcgtctccgcttacatccaccgtgtgcagaggcatattgaagatctgaagtacttcccagaatgggcgcagaatattccccagcgcattttgggtagtgtggttggcaagcccaaggaaaccacagtcgacgat

SEQ ID NO: 10675 - DNA, 487 bp, Glycine max
  misc_feature (40)..(40): n is a, c, g, or t
  misc_feature (45)..(45): n is a, c, g, or t
  misc_feature (58)..(58): n is a, c, g, or t
  misc_feature (87)..(87): n is a, c, g, or t
  misc_feature (260)..(260): n is a, c, g, or t
  Coding DNA Sequence Number=SeqID_896
ggttagtggcgctagtgacatagatagattatgtgttagntatcntatctcctgtcgnctactatgtgcggatcgcaactagagcgngttgacgatagacgtacgcgagacctctcgcagagcgcacgtcgctacgtcgcgaagatgatgagacagatagaacaccagacacgcatagaagataggcgtactattcacgtcgtcggtctccacgtcgagacgacagtcgcttgcacacgcagcgcgatagtgcatggcgnccgtcaccaacgcccacatattctcattatgttaacactaggttgcgtcaggagcatgagtcgcggcgaccacatacgtcagaagcgccgaggatgagtaaggatcacgagagtgcacaacggagcgctgaatgaaagactgctcgcctgtgcgtatagaactcacgagaaagaagaactactatatcatatagagtaagataggtgcagctcgactactgagacat

SEQ ID NO: 10676 - DNA, 408 bp, Glycine max
  Coding DNA Sequence Number=SeqID_897
gggctttgtggtattggaacttgtatagtcaaagatattgggactacacagcagcacttagcactggcctggtcaacaatggtttgaggtgtgggtcatgctaccaaatcaatgtggcaatggaccacaatgggggctccccggggacccttgtaacacctgccacctaatttcttgcccccttgggggatggggtggaccctccccacaaccatttttgacttttttcaaaccgtggttttaccaaaattccccaaaaagaagttgggattttggcccttggttttaaaaaaagatcccccggcattataaaaaaggggaaaaaggtccccaacaagggggcctcctaattccacttttacccccgtgacaatagatgaaagaggtcgtgaatatccattttttggg

SEQ ID NO: 10677 - DNA, 577 bp, Glycine max
  misc_feature (48)..(48): n is a, c, g, or t
  misc_feature (53)..(53): n is a, c, g, or t
  misc_feature (69)..(69): n is a, c, g, or t
  misc_feature (89)..(90): n is a, c, g, or t
  misc_feature (155)..(155): n is a, c, g, or t
  misc_feature (197)..(197): n is a, c, g, or t
  misc_feature (539)..(539): n is a, c, g, or t
  Coding DNA Sequence Number=SeqID_898
gtatagtgtatcatgcgagcgtcgagatgatggtagtatctctgtgangattncgtgatgagcatgtangtacgagttgttagcaactnnctatgtcactcacgtatggatatggtgttgattatgcggaagtgtatgtggtcgacgcctctgcnagctctgtagtgtctgctccgacactctcctatgattatgangtgtggcctctcgcgcgtgcgcacgcgtcagctatgttgtaattgtcgtgtgatcgtgggtgccgtcagcgctgtcgcgtgtcaccagcagtgagcacgatatattacgtcacgtattgacaactcatataagaggaagagatcgagatgatgtggtcgggttcagtgtcggctaattcgtgagtcattgtgctgaccgatatggcatatagtatgaatgagacagacaggagatggcgtgctgacacgcgaagacacgagcaatatcagaacaccaccacaatatataacatcttaagcatacacatacaaaaacatgagcacacaatcatcaatatgatngtgttcacacaccacactgtgcgcgcagtggtagattt

SEQ ID NO: 10678 - DNA, 426 bp, Glycine max
  Coding DNA Sequence Number=SeqID_899
aacaagccttcgactccaagcgtttctctacaatcctcatgaaacgtccattacttacgattactacgacatccaaaggctcatctacaaacaaaagcatcaagatcaacaaaattccgtcttcattgactacaaaccccgctctctccctcaattccaagaactcaagcaaaagatctcctcttctggtgccaagatcggctctattctccttgagtttgtccgaaaagaagtcaccaagcctggtgattctaagaaatctaagctttctcatgtgaactccttcgatcctcaagatattgacctgttgttttaccttacaggccaagaagccagtgtagtccaaggctttagtgatattggtgatgattctaatgagtttgacttcatcacattgaccggaaaattatcatcaggagctcctta

SEQ ID NO: 10679 - DNA, 594 bp, Glycine max
  misc_feature (227)..(227): n is a, c, g, or t
  misc_feature (326)..(326): n is a, c, g, or t
  misc_feature (392)..(392): n is a, c, g, or t
  misc_feature (407)..(407): n is a, c, g, or t
  misc_feature (472)..(472): n is a, c, g, or t
  misc_feature (529)..(529): n is a, c, g, or t
  Coding DNA Sequence Number=SeqID_900
tatcactctcagctcagtgtcagagcatcatgcgtctgcatcacgacacgactagtcatgctcacagcagtcaggatcgcactatcatattaacgtctgtgatactacacatagtactgaatttaccgacaatatacgtagacagacagatctttgtcacacagataggtgccgtgaagagatgaggacacaacaggattgatagacctcactagacgcaacatagnccactcgcactgatctcgcttcgttctcggcgaacggtccgatgtctaatcatacgatagctagtagttaatctaacgcagatgaaccatacgctacantaaatagaccacagacgatgatatatagatcgtaacacaggcctagtgcgttcatctctctgccgngcacaactcgcgacnaccgctgatattaggtattacatgaccgatattgcacgagcagatcgcggtcgacatgtagtgcnactcgtatgtgtgtatatagcagcctgtcagtacacagactccaactctctactaantagacacgctctacgacatactagcaatatgacactacgcagctctatgtaacccgactctagac

SEQ ID NO: 10680 - DNA, 323 bp, Glycine max
  Coding DNA Sequence Number=SeqID_901
ttccaccttttgtttcggacatctctgccgccaaggccgaccgggagcagttgaaagtgcctgcgttcacaaaagccgagatagagcccgtgagcatgacggccaagtgagatcccaggcatggcaagtacatggctcgctgcatgaagtaccgaggtgatgtcgcccctaaggacgtgaatgctgcagtggcccccaccaatactaagaggactgttcagattgttgattggtgtccaacaggattcaagtgtggtataaactaccagcctccacttgatgtacctggaggggaccttgccaaggagcagcagtctgaatac

SEQ ID NO: 10681 - DNA, 252 bp, Glycine max
  Coding DNA Sequence Number=SeqID_902
cacagcattcataatttatcataacaacataatctttcacagcaaacggttcatcacagacactacatcattttgcaccaaagataatgcagacaaatgtatccatcttttggtgtcatggtcatctagtattgagaacctgggagaaatttattcatccagcttgtttattgttgcttcttttggtgcatgcgaaccaccggggagaaagccagtatgctggaggagtaacaccggtgtcgaggcgtcggg

SEQ ID NO: 10682 - DNA, 326 bp, Glycine max
  misc_feature (93)..(93): n is a, c, g, or t
  misc_feature (95)..(95): n is a, c, g, or t
  misc_feature (110)..(110): n is a, c, g, or t
  misc_feature (124)..(124): n is a, c, g, or t
  misc_feature (130)..(130): n is a, c, g, or t
  misc_feature (147)..(147): n is a, c, g, or t
  misc_feature (172)..(172): n is a, c, g, or t
  misc_feature (231)..(231): n is a, c, g, or t
  misc_feature (238)..(238): n is a, c, g, or t
  misc_feature (250)..(250): n is a, c, g, or t
  misc_feature (254)..(254): n is a, c, g, or t
  misc_feature (257)..(257): n is a, c, g, or t
  misc_feature (271)..(271): n is a, c, g, or t
  misc_feature (276)..(276): n is a, c, g, or t
  misc_feature (286)..(286): n is a, c, g, or t
  misc_feature (300)..(300): n is a, c, g, or t
  Coding DNA Sequence Number=SeqID_903
tatactacagaactactatgcagctgatcgcgacttgatctatcataacacttcgatgtacagactgcgctgacgtgcctcagacgactcccntncgcttcgcgctcccntattgagtcaagtntactgngcatcttaacgcatgcntcgtcgcgtccgacagagatacagntagcgatatcattgcgtcgttcatccgcgacgtgcagtcgggcgtggcagctgcgccgncgagcangacgcaatgcancctngcntcgcgagcggttcntgtgngtgcgacganctcgcgtgtgtatnctctgctcactcgtggccatacacac

SEQ ID NO: 10683 - DNA, 439 bp, Glycine max
  misc_feature (70)..(70): n is a, c, g, or t
  misc_feature (98)..(98): n is a, c, g, or t
  misc_feature (120)..(120): n is a, c, g, or t
  misc_feature (181)..(181): n is a, c, g, or t
  misc_feature (242)..(242): n is a, c, g, or t
  misc_feature (303)..(303): n is a, c, g, or t
  misc_feature (328)..(328): n is a, c, g, or t
  misc_feature (362)..(362): n is a, c, g, or t
  Coding DNA Sequence Number=SeqID_904
atgccacagcacacgatcattgcgatatgataagattgatacatgaagtaagtgtgtgcgagagtattangtctacttgtgtggtgtatatgtctgtntagatcgtcatcgtgtattatnttaacatctactagtatagcattcgtgtagaaggtgatacagagcgcgagtgaggtgtgantatcgatatgatactagtgtcgaagtatctgagataagggtgtctgccggtgacgcgcgantgtgagatagaagagcatagtagggtgtggcgacggcgaacaatcatcaactacgtgtgcnccacaatatataatatgatcaattnataatgtgcattactaatagtgaccgagagtcgngacgtacacacatccgtcacagagacacaacacatacactgcatcgcatatagagagtcgattgctaaagagaagat

SEQ ID NO: 10684 - DNA, 260 bp, Glycine max
  Coding DNA Sequence Number=SeqID_905
tttcaaacacaatgagcgatttcgaaaaaactcaacaagctactcccgaagacatcaaatatagtgctgaaaaagccgctcaaggtgaactcaaccaaggcttcagaggcagccaattccatcaagaaggccaacaaggctcaactagacaaggaggtcaaactcaaggaggtcgtcttccagtgaaactcagtgataataacgattatgttggtcaagctcctgaaactggtcattcaaccatgtcttaagggaacaat

SEQ ID NO: 10685 - DNA, 554 bp, Glycine max
  misc_feature (447)..(447): n is a, c, g, or t
  Coding DNA Sequence Number=SeqID_906
gtttctccgcagtttgtttttctatcttttcattggtagtcgaggtagaagaggcatacacgcgcgacgaggtcgttccgctcgaggaagccgaggcgcgagctgacgagataagactttcatgtgtcgcccgcgcggctgtatcatatttattattctgagaccaccccccatctcctgggtctaatctcctggccttagtctccctctttctcaacctcccattatttgagggtcggcccggtgtggtttcgagggcacggagatagatatactattcacctaaatatatgtattatcttactatcatgtagacgtcgaaggcgtgaaccccgcagtattgcgactccgcgatgcgagaagagcgtggatgagagggtgagaaatattagaaacgtcaatatcccatataaaataataataatgagggggaaaagagatggtagngctggcgtgttgctggacgtggggtggggttctacagttgtgatagagtgtgtggttacccacaactctccctctggactgcttcccttacgagtggttgtcatgtg

SEQ ID NO: 10686 - DNA, 513 bp, Glycine max
  misc_feature (75)..(75): n is a, c, g, or t
  misc_feature (82)..(82): n is a, c, g, or t
  misc_feature (84)..(84): n is a, c, g, or t
  misc_feature (124)..(124): n is a, c, g, or t
  misc_feature (165)..(165): n is a, c, g, or t
  misc_feature (199)..(199): n is a, c, g, or t
  misc_feature (215)..(215): n is a, c, g, or t
  misc_feature (246)..(246): n is a, c, g, or t
  misc_feature (328)..(328): n is a, c, g, or t
  misc_feature (330)..(330): n is a, c, g, or t
  misc_feature (377)..(377): n is a, c, g, or t
  misc_feature (385)..(385): n is a, c, g, or t
  misc_feature (411)..(411): n is a, c, g, or t
  misc_feature (459)..(459): n is a, c, g, or t
  misc_feature (488)..(488): n is a, c, g, or t
  Coding DNA Sequence Number=SeqID_907
atgataatattcctcgctagactgagcgcaaggtgctcaatgtctgcgtgcagagtctagccacagcgtagctgngacgcgnangacacagacaagtaacagcgtacacatgcactgtatgctncgtctacgctatgcgcacacgagcgcgcgtgagagatatcntatctatatattacacttctcactgctcccgacncactctcgaccgagcnatcactcgctacatctatgacgtcgctgcantcgcgctggtatactgctcgcttatcataagcatgcatcgatcgcagcatctgtctagctgtcctctacactgctgcgatgnantgtcagctcactgtcgtcgtctgtccatcaatctatcgctgctgtgnctgcgcgncctcgactcaccgtgcactcagctgntgatacgtatctgccactcgtcgtcctttattcttcatagtattgagnagcaggggagcgagagtcgtagtgtgatngagctctacactgcgtgtgttaagt

SEQ ID NO: 10687 - DNA, 582 bp, Glycine max
  misc_feature (79)..(79): n is a, c, g, or t
  misc_feature (100)..(100): n is a, c, g, or t
  misc_feature (185)..(185): n is a, c, g, or t
  misc_feature (198)..(198): n is a, c, g, or t
  misc_feature (219)..(219): n is a, c, g, or t
  misc_feature (278)..(278): n is a, c, g, or t
  misc_feature (283)..(283): n is a, c, g, or t
  misc_feature (321)..(321): n is a, c, g, or t
  misc_feature (326)..(326): n is a, c, g, or t
  misc_feature (377)..(377): n is a, c, g, or t
  misc_feature (379)..(382): n is a, c, g, or t
  misc_feature (394)..(398): n is a, c, g, or t
  misc_feature (402)..(402): n is a, c, g, or t
  misc_feature (404)..(404): n is a, c, g, or t
  misc_feature (407)..(407): n is a, c, g, or t
  misc_feature (418)..(427): n is a, c, g, or t
  misc_feature (437)..(439): n is a, c, g, or t
  misc_feature (457)..(457): n is a, c, g, or t
  misc_feature (463)..(463): n is a, c, g, or t
  misc_feature (469)..(469): n is a, c, g, or t
  misc_feature (471)..(471): n is a, c, g, or t
  misc_feature (482)..(482): n is a, c, g, or t
  misc_feature (484)..(486): n is a, c, g, or t
  misc_feature (497)..(499): n is a, c, g, or t
  misc_feature (521)..(521): n is a, c, g, or t
  misc_feature (525)..(527): n is a, c, g, or t
  misc_feature (529)..(530): n is a, c, g, or t
  Coding DNA Sequence Number=SeqID_908
tattctatgctgttccaaacatatatatagtgggcgtcgcgcgaatcggcgcttgtgcgcgcaacgaacaacgcacganctcacgaccatatatatacangacttcactcgatcaccactatatagctatgaactagactcgctgtacacacatatatctgtggcgatttgtgatgataattgtncatactctatagncatatctggcgatccgatgtntatactacatatatcacgtgacatcgagatgagctgagtgtcgtttgcaagtcgagagnagtgnatagagatagtgggcgctgtacgcctcgctgatgacantgatnataataattcgtgtgtggctgcgtttctctcggcgtcggcggggcggcagntnnnntgtgcgtctctnnnnntttntntcntctctccttcnnnnnnnnnncaatcccccnnnttaggggccctctctagngttgcncccccncnctatagatctntnnntattatataannnataatcagagcgggtgtcgagngagnnnanncagacatgacgctcgaggcgcggaggagagagtctaagctagctgattgttg

SEQ ID NO: 10688 - DNA, 566 bp, Glycine max
  misc_feature (506)..(506): n is a, c, g, or t
  Coding DNA Sequence Number=SeqID_909
aggaataactcgtttctgcgcgggccggccaggcgatatgcgaccctccgcccccgccaccatcatgatacgctggggtcgcgcgcggcgttgctctccgtacctatatccgctcaattatagcgtctcgtgctccagagaccggtcgctcttcttggtcctcacgtctctgtagcgcaacatacgtcatacgttggggtcggtggtgcgtgatatgaccggtccgggtggagcaggcgcacgatccacgccgctttgtattcgctcgcgccccccgtgtcgaccaccggtcgctgcgaaaggcgcggttgagtaatccagtcccaccgtctagtaataattaaaataatatatcgcgggagccggcgagcatcgcgtgcgccggagggctcattctggccatacccgcggcgcgcacaggcgtgcgtaatcggttagtgatttacgtatgggtcgtgcggatatttagtaatatatagtttatctggcgcgtctgtgtgcgggtngagggtaatatggtgtggtcgcggcgagcggatatgagcgttttatacgccctctattct

SEQ ID NO: 10689 - DNA, 377 bp, Glycine max
  Coding DNA Sequence Number=SeqID_910
gagctgctggatgtggcgcacggaatggtggtggtctaagaggtggaagatagctttcgcagtagtgagtggatagcgagtgctcgacttcgtgtcactctacgcctgctggcaacttggcttgatatcaagtgggctaaaatggtttttcttgagacaatacttgctagttctgcaatgtctttcattaaagagcaagaggcaagtaaagaagaaactcattcaaaataagacaagcgggctaaatggaagaggggtggtatcattggtgctgctgccttaactgggggaactttgatggctgttactggtggaataacttccccagcaattgcttgcaggcttgttgcttttgcttccaccctgggtactctgat

SEQ ID NO: 10690 - DNA, 496 bp, Glycine max
  Coding DNA Sequence Number=SeqID_911
tgtggttctcacaccgattctgaagcacagctatttgtctcattctcacctactcttttctaatgaccgcgttaatctcgatatatatgttttgacgcttcgtttttctgaaatattacaattgttcttttttttaattaatattctctaactatatatctttcattgtcttataacgtgtttcaaaacagatattatccataaatataatttatatatacattgtcttataccatgcatttcctctttctgattaagatatatttttctctcttttctttctattttaatactctatgccattccatttctatttcgcatgttttttttctctttctctacccccgcctctctttcaggtgggctaaaaaaatcttcattaatttcttctccactcttttactcactctctgcctcgtctatcgctgcatcaccttatgtctttctcgggatattgttatttttgtgacagcgcccgcgcttttattttcgagaa

SEQ ID NO: 10691 - DNA, 246 bp, Glycine max
  misc_feature (44)..(44): n is a, c, g, or t
  misc_feature (77)..(77): n is a, c, g, or t
  misc_feature (102)..(102): n is a, c, g, or t
  misc_feature (176)..(176): n is a, c, g, or t
  misc_feature (188)..(188): n is a, c, g, or t
  misc_feature (218)..(218): n is a, c, g, or t
  misc_feature (221)..(221): n is a, c, g, or t
  Coding DNA Sequence Number=SeqID_912
agagaaatggctagcttcaccgcctccgcttccaccctctcggncgctcgtcctgctctccttctcaagcccaccgncgccgtctctgctcctgttcttggnttgcctccaatgagtaagaggaagggaggagtgaagtgctcgatggagaccaagcaaggaaacgtctcagccgngggagctggagnatctgcggagtttacagcagctttgacagntgngatgagcagcccggctatggttttg

SEQ ID NO: 10692 - DNA, 511 bp, Glycine max
  misc_feature (94)..(94): n is a, c, g, or t
  Coding DNA Sequence Number=SeqID_913
agcgtcacaccgatccatggatgagtgaagagatatacagtggtggcacgcgtaaagtgtgtatctcgcatcttcctcttcgaacgactaagangactaatgtagacagaggattagtcgccgattgtggcgccttagagtgattcttacacgtcctattaatcacactattctgatcgtcatctatatatataggacagataacatagcgacactacgactcaagacctctcagatttatacgcgtatccgaggtcgccctattgattcaacataagggtcgcgaggtctaggcgcacgtctccgcaaggatgcacacatcgagtagagcggaaaccacgtggtgagtgtaaagtacgtgatcttgctggtagttacttgccgcgttcgaccctacggcatcgctattcttgtatcttacgtcgattgtctcggacttcatggctagtggaggtggaggcagctgctggggactgtagatgagcatttcgcactagtacaattcctctct

SEQ ID NO: 10693 - DNA, 353 bp, Glycine max
  misc_feature (63)..(63): n is a, c, g, or t
  misc_feature (107)..(107): n is a, c, g, or t
  Coding DNA Sequence Number=SeqID_914
gcggcgggcatcattttccgtcaccgccaccgaaggcgcgaattattcctccgcccccgccgncgcgaaaaccctaagcgcgccgatcccatgggcacggctccagncaggggagactcctcctccagaaagaggtccagatctcgcggagaccccggccgatggtttttcagccgggttcgcgagaaaagaacatctttctagagggaggtaacactctttgggccggcgagacctatatgatggggggggattttaaagtgaaatagtggagttcccacaaatttatccgaacagccttcaacagtcagattcctttccgggatgtggcattctaatgttataccggaggg

SEQ ID NO: 10694 - DNA, 549 bp, Glycine max
  misc_feature (466)..(466): n is a, c, g, or t
  Coding DNA Sequence Number=SeqID_915
gtaaactctaacctaaccatcaaatgtttgtattgtggagttattctaggtccaatcaggctccaacatgagtgcctctaatagaggatacctatggcctagacaaataaataaataaataaataaaactctagcattagttacttatctatatccatgatgagtgtctctgacagaggatacctatggccaagacaaataaataaataaattaaactctagcattagttacttatctatatcttatactttttttttttcagttcatagatggagggaccatggtgtcacctacagtgtatgcaagacgctgcttatcttatttaatgaatgacatggcacaagaagcccttggggatgcaatgcaagcccaagtggtatctccagagtggcctacttctttgtatcttcaagcagcttgtcttttcagcctcggaatggaaaatgatgcacaagagactctcanagacgggactaacatggaagccagaaaaaaccaaaactgaaaaagttgtatagattgttgctttttcttgtgtggtcttaaag

SEQ ID NO: 10695 - DNA, 551 bp, Glycine max
  misc_feature (34)..(34): n is a, c, g, or t
  misc_feature (135)..(135): n is a, c, g, or t
  misc_feature (143)..(143): n is a, c, g, or t
  misc_feature (182)..(182): n is a, c, g, or t
  misc_feature (404)..(404): n is a, c, g, or t
  misc_feature (450)..(450): n is a, c, g, or t
  Coding DNA Sequence Number=SeqID_916
tgtgtgtcatattgcggcgccgtccactcgcgcncgcgcgccggcggcgtcgcaccggatgtacgcagcaaacgcagtccgtgcgacagcacgcaatataggaatattggatgtgcagacgtgtgcgcgtatttntcgcatcnagtaacctcatatccactcgaatatatttaatacatgcnatagtaagacaccgacgtaggtcatatcacgaacggagtctcgcgtgtcaccatcgcgcttataataatacatacatacggcggtcggtaacatgtacatacatgcgcgctatgtagtcacgatagagagcgagtaacgccagataatctttgcgtggtgcaacttgatatggtgtatagttcatgttatttggtgcgttctagtcaacgtcggttgcttgntaaagaaaatatataactcgcagagaatcgatagatgcgtgatggnagtgatcatgttgatataaacacgcccgccgccgcacgcgagcgagcgtcggacacgcatcctacccgccatatatagtaaaatacatccgttcctcacgc

SEQ ID NO: 10696 - DNA, 370 bp, Glycine max
  Coding DNA Sequence Number=SeqID_917
gtcgtggcggcggatttattacccaaggtgggaagaaagggcaggatgccgtgccagatggggttcctcttcggtgcccggcccggaatccccctcgtcaaggacctcaccgggagcaagaaccttcgcaccctcacgagcctcatgctggcgccccgggaaccccggaggatcctacttttttgattaagaaggctgtggccaattgggaagaatcggaagaggaacgggaggaacaggaatttcagttcagggtcatccttgtggagagcaggagccaccgcctcgctcgctactacaagcgcaccaagaagctcccgcccccctggaagtacgagtctaccgacgccagcactgtggtggctttggt

SEQ ID NO: 10697 - DNA, 529 bp, Glycine max
  misc_feature (76)..(76): n is a, c, g, or t
  misc_feature (92)..(92): n is a, c, g, or t
  misc_feature (97)..(97): n is a, c, g, or t
  Coding DNA Sequence Number=SeqID_918
gtaccgctgcttatgatagtcgacgcgaggatctggagtacgtctatacagctatgctagtctcgacttctggagngctccgcgccatactnttgcngcgccttgcccgtcgcgcagagctctacggaccaccgtctaatcgatgtgccgcagcgtcagacgacgacacacgctcctactcagctacttctagcccacgcgcacgccccctctgtaatgatgtgtatcacactcgactccctagccggagtgtaagtgtcggcgctgtatctatggcctcgacgcaatccgcacacgtcctgtgcacctgtactccgttttgaacgaggatacaagatgcagtatcatcacttcttactatgcatgcataactctcatcttctttctcggcgcgatgctcatgtgctgcgcgacggtcgttcgcggagacgaacgtcctgtgtttctgcgcgtgatcgaccctatgacattgccatacccgcctacagaacgcgtggacgattagactcgtcacgacatatgtgggtct

SEQ ID NO: 10698 - DNA, 257 bp, Glycine max
  misc_feature (197)..(197): n is a, c, g, or t
  Coding DNA Sequence Number=SeqID_919
aggaaccttataccctgtgcatatatggccaaaggcagcatccagggcagtatggagtaccataagaattaggatgacccagaattcactttccgtcaagaacacctcttatgtgaagatgaggcttgcctggccaagaaatttgttgtttttcaatctgaagcagagatgaagaggcataatgctattgaacatgngagggcggatgtcacggtctaagcgtaatgctgctcttcaagcaagtataatgacattct

SEQ ID NO: 10699 - DNA, 498 bp, Glycine max
  misc_feature (107)..(107): n is a, c, g, or t
  misc_feature (109)..(109): n is a, c, g, or t
  misc_feature (111)..(111): n is a, c, g, or t
  misc_feature (135)..(135): n is a, c, g, or t
  misc_feature (213)..(213): n is a, c, g, or t
  misc_feature (278)..(278): n is a, c, g, or t
  misc_feature (280)..(280): n is a, c, g, or t
  misc_feature (283)..(283): n is a, c, g, or t
  misc_feature (345)..(345): n is a, c, g, or t
  misc_feature (349)..(349): n is a, c, g, or t
  misc_feature (352)..(352): n is a, c, g, or t
  misc_feature (448)..(448): n is a, c, g, or t
  Coding DNA Sequence Number=SeqID_920
acgcacgtgcgatagccttgggatacacgcgtctcgctgacggagaaatacgttcgagccttatcttacctccgatagggcagatgtgagacaccctctcaatacantnanagctattgcttgtagacgttaganactagtgtgatagtgttcttagctctctcacagtgcactctgctcactagaacctgactcagctcacccgatcaagangatgcacgcaggtacgagacaatatacatgctgtgtaacgctatggctgcgcaatatacacgatngnagntactgtagtgaagatgctaaacatgcatacactcgagctgctgattgtgaaccgcacacagncagntcnacgctgacatatacgtcgatcagcatagccactgacacacacggcgctaactacttagaatacattctactatagcgatcgactacccactactanacgtactcatacgctagcactgcgtatgacatatcatgcgcacgtgctgt

SEQ ID NO: 10700 - DNA, 484 bp, Glycine max
  misc_feature (398)..(398): n is a, c, g, or t
  Coding DNA Sequence Number=SeqID_921
ctgcgttgcagacctccaatgtgtatcaccatccaccttttgttagtccccgcttcgttttgtcacaccatgtatgtgtagccacatgttagtaaccaccgtgtattgtttgtgtaccccaccagaattgtcgagccgccaaagtgtgtttacccagtgctagttgacacacacgttgtatcagtcccccagaggatgagacaggagtgagaaacacgatgtgttgccccatgtagcgtgagcgctatatgtaacctgtggaaatgtgtttgtgtgaggtatagaacgatcgatgatagaataggagagactatttttgtgtacgtattgatatttcatcccctaaccgcccctgcctccggaggtggggcggcggtggagagcggggaggtgaaagncagaactccgaaggattaataaagcgcggacagaccacaaaactgagacaacacaacacggagtaagagaaggtgcgcacccgcgc

SEQ ID NO: 10701 - DNA, 550 bp, Glycine max
  Coding DNA Sequence Number=SeqID_922
gcatacagatgaccacgagcacattaaagaaagagagttacctagcccaccaccagaggcacaggagcatccaaaggtccgctccatcagaaagcagtggcaggcaggaaagccgacgccgacgaggagcccacccagcctgcctgcgtgaggaagaaaccaagcgcatgcatgagagggaaggtaagtgagagggggaagagcaaactgaagcaaatatgggtaccaaccttgaccttgaggaggaacatcgctggcagttggagcggatcagagcagcggcctccatagcaagcagaagcatgcgtcactcgatttggaagcagtcgagcaggagcagatgtggattcgtctcccggcgcgcgagcatctcttgacggatgcacgacgacgacgaagccgaggatggatcgacctcctcactcctcctaccaagtccggaggagcaacgaccatgccgcagacagctcggcatcctcaccatctccgcggcccgcgctcagtcaagagcatgttccttttcttgtcccagcccagacaatttgatcta

SEQ ID NO: 10702 - DNA, 551 bp, Glycine max
  misc_feature (397)..(397): n is a, c, g, or t
  misc_feature (449)..(449): n is a, c, g, or t
  Coding DNA Sequence Number=SeqID_923
gacaatacaagtacgtcgcacacttataagaaagcttagcacgacagcgtacacatacaacacatcacatgacacgatgtaaattgtagcacacacgatcactattcttatatatataatttatattatacctactactcaacaacgtctctagtctcactacgaacaaacctctgataactttcattactaactatgatatctatgaattacacatgctattactcttcgtctatctaatatctatatattatctatctagtacacagagacacctgcacatcaactacgcactattcgctgagaaagagcgacagcataataatatacatgagtatatatatcacaacgttaattatctaatatcactattctacaaatgtaatcaatataacanatatatctacgtctatataaatattaataaatctatatatatttattatatnttgaagattattatacatagagcatatcatatataatttatataatatacatatatatttactaagctcccgcaccatacacgtccattagctctcgaatat

SEQ ID NO: 10703 - DNA, 363 bp, Glycine max
  Coding DNA Sequence Number=SeqID_924
atcaatggcacagcgtaaatcctaccaaagctattggctagttaaaaaactaaaaagctggtgatagcttcgagcctcaaagcccggttgtgttccggcggtcagcggcatagctgatggtccgacatactcaagataactttagtttggtctgcaaagaaaagttacgcctgtactattctttgtaatttgcggaaataaggaaggtacggcgttagatttattcatgaaaatataatatatggtgttgaatagatgtaaaggtaagcaggcgtaaggaggagactccttgtttattttattccgcatataaagttttgctaataacatcttgttatttattgaaatgcttcttcttctaaa

SEQ ID NO: 10704 - DNA, 325 bp, Glycine max
  Coding DNA Sequence Number=SeqID_925
tggaagctgttttatctatcggcctcagaacatcccatgaaagagctcgcagggtgttatcaactcgacactccaagtgcccctgtttctactcctgaggttggagaagaagatgaagagatagatccacgttttcctcctcccacaaaagacagaaccggccttctcacccactatttgttagatgcagcaagtgtaattacagctcgagcattaggagctcgatcaggacataaagtgttagatttgtgtgctgctcctgggggcaaaagtttggttattgcttatgatatgttttcaaaaggacaaccaaacgctattgatg

SEQ ID NO: 10705 - DNA, 388 bp, Glycine max
  misc_feature (139)..(140): n is a, c, g, or t
  misc_feature (146)..(146): n is a, c, g, or t
  misc_feature (149)..(149): n is a, c, g, or t
  misc_feature (155)..(155): n is a, c, g, or t
  misc_feature (161)..(162): n is a, c, g, or t
  misc_feature (195)..(196): n is a, c, g, or t
  misc_feature (209)..(209): n is a, c, g, or t
  misc_feature (218)..(218): n is a, c, g, or t
  misc_feature (220)..(221): n is a, c, g, or t
  misc_feature (260)..(261): n is a, c, g, or t
  misc_feature (268)..(268): n is a, c, g, or t
  misc_feature (271)..(271): n is a, c, g, or t
  misc_feature (277)..(277): n is a, c, g, or t
  misc_feature (308)..(309): n is a, c, g, or t
  Coding DNA Sequence Number=SeqID_926
actcctcagcgaagatgcggcgattttccaaagtggcagtaaaccgctaccacacctttggttttcagcttttgcgactggaatgcttttcaatcatgaaccctccaaaatgtgcctgacttggcttggggaattggtnnggaggngcncaaaanaccgtnntgtgggaattggaatgtgccaaatggcttcttnntgtggcaaaacanacccgttgngnngggttaattcaatttgtattgccaccaatgcccattagnngaaccgntgngcccanaaaaaaattaagaatttgttgaccatttatnntgactaagaaaaaaatccccacacttggtgtcattgttaaaatgtcgaacagtggcccttaataccaactgttctctag

SEQ ID NO: 10706 - DNA, 577 bp, Glycine max
  Coding DNA Sequence Number=SeqID_927
agcagtaccgcgagaagcgccgcatgtcgcagggcgggtccgctccttccagccccatcgaagagcgtgccaacggtgggcgccgcccgagcgctgctcgcaagggctccatcagcctcaagatcagcaacacccgccgcgagagcatcatcaagcgcgccaatytccgcctcggcggcctgsgcgtcttgacctcctccggcgtgctgtccggcattgacggcgccttgtacctcgtcggcgctctcgtcagcgaggagagtgccgaggaagtctccaggatcatgtgccacaaatggagcaagggtgtcgtcgtcgacggcactgacgtytagattgcttgcatatatatcatgcacaacaagacmcgaggaagagagaagaagaagcagttacatgtcagaatgcatgctgtctttcttttgaatgtgtaagctaagccggatcagcgaacaaggaacgctgtttttaaggcgagaaatgggatatgactacgagatgccmcctcgaagaaaagcgtacgaaaggaatgcgaatgccaaatgctgggaagggacaattcagctcttccaataaa

SEQ ID NO: 10707 - DNA, 571 bp, Glycine max
  misc_feature (26)..(26): n is a, c, g, or t
  misc_feature (192)..(192): n is a, c, g, or t
  misc_feature (203)..(203): n is a, c, g, or t
  misc_feature (225)..(225): n is a, c, g, or t
  misc_feature (276)..(276): n is a, c, g, or t
  misc_feature (292)..(292): n is a, c, g, or t
  misc_feature (395)..(395): n is a, c, g, or t
  misc_feature (416)..(416): n is a, c, g, or t
  misc_feature (441)..(441): n is a, c, g, or t
  misc_feature (450)..(450): n is a, c, g, or t
  misc_feature (452)..(452): n is a, c, g, or t
  misc_feature (467)..(467): n is a, c, g, or t
  misc_feature (511)..(511): n is a, c, g, or t
  misc_feature (527)..(527): n is a, c, g, or t
  misc_feature (534)..(534): n is a, c, g, or t
  Coding DNA Sequence Number=SeqID_928
ggctatgcaccgctggcatgctgcancgcccgcgccgcccgcgagctcactgttcactctcgtggtggggtctcgcttgtcttcacgcagcacgacatccgtgttctcctgttggtggggcgggctgatttaccgtccatcgtcatgcgcgcctatagttgtggtcgtctctctatctctcgctcgcacgcntctcctctcgncacaggtgggcgagtgtgggtnctctcttactcctgctgagagacggggagaagatacatactggcgttcgancccttcgcatcatccngaccagctactctgtaggtttgtcttttgcgctctcgtcggcacttatcatcttctaccctctctgcggtgctgccgtggcttgctactcatctatcctgctnttgtgcgtggtgtagagtctngtgcggtcggcggggatgcgagtantatgagggnanattgtgttcttcttnttcttctctcttttctctatgtcgctctagtgttcttccctcangatattcctgcgtgtngtctatntcgtgtagtctccgtcgcgcatctgcgttcgttggtt

SEQ ID NO: 10708 - DNA, 502 bp, Glycine max
  misc_feature (57)..(57): n is a, c, g, or t
  misc_feature (294)..(294): n is a, c, g, or t
  Coding DNA Sequence Number=SeqID_929
tatattaatatacacggcccatcgtctaatacaaatgctattctctctctgcaatancattcatctacgctactatctcctcctcattctatgccacgggtaccgccatgaaacgaactagcctatgtcgtgagtaatgtacaccacacacgtacacgcagcaccatacacaattaagccacaacatctatccgcacgagcagacgagggcgaggatagaatgaagcacaccaccgaaccgcacctccaatgaaccatctcaacaacgcgaccttcacatatatctaaatctanccatatctcctccctcccacaacagaaatggtcacagtctacctctctcggcgtgcccatcagcactccaatgccataatcaccacgacagcccactacattatctggatcacaatcacaactacctccgacgtaccgcgagagctctgtcatcatctcttccttgttctcccgcccctgcacattctgatctatgcactacacgtaa

SEQ ID NO: 10709 - DNA, 555 bp, Glycine max
  misc_feature (179)..(179): n is a, c, g, or t
  misc_feature (289)..(289): n is a, c, g, or t
  misc_feature (314)..(314): n is a, c, g, or t
  misc_feature (332)..(332): n is a, c, g, or t
  misc_feature (365)..(365): n is a, c, g, or t
  misc_feature (479)..(479): n is a, c, g, or t
  Coding DNA Sequence Number=SeqID_930
tatttagtcggtacgtgaacatagtagggatactaacattggtacttgtgtgtgtatagtgaatataatttgttggaacgagctaatgaacattattaacacttctgtagatctagaagagtatttgctgtcgatcgctgtgtgagggagacatccctccctcttacactatgtgcgcnaagtcgtataaagaacaaatcaaccactagagatagagataggaagagatgcatgatatcagatcattatcgtaggtgcacgcgagtatatatctatgtcatagactttntatgtgttaccagccggctgaccgnacaggaataactctcctnctgagtgagcactgtggagtatacatgagtaanccagtactatctccgaattatcctgtcagcagacagcgtcgctaagtattcttgtgtaagtcgcgcgcgacggtagtttcatgatcagttagtagctgatgtccacactctcantatacatgctaatctgcgcatatagagcatgccgctcatcttatattctacagatctgaatcatcgagtctgacag

SEQ ID NO: 10710 - DNA, 593 bp, Glycine max
  misc_feature (438)..(438): n is a, c, g, or t
  Coding DNA Sequence Number=SeqID_931
tggcgatgctcgcagctctatgctagcctatcccacgacttctcaacatgggtgtcttcaggatgtgcaaaaccgcttcttcaaacctacgaccatacaacacgcaatcacagcttaacatcttacctttatcagccttgttcctccaccaatcatcagccctatcacactacttaacctttggctcatttattgtcccaacacataacggcacaacaactacaacaaccttgcgctacaaaaccttgctacctactctcaccatcaccactttcttccattcaaccaaaactggggagttgaactctgcttcttatttgcaacaacaacaactaccattcagccagctacctgctgcctacccccagcaatttcttccattcaaccaactggcagcattgaactctcctgcttatttacagcagcaacaactactanccattcagccagctagctggtgtgagccctgctaccttcttgatacaaccacagttgttgccgttctaccagcacgctgcgcctaacgctggcaccctcttacaactgcaacaattgctgccattcaaccaacttgctttgacaacccagcagcg

SEQ ID NO: 10711 - DNA, 560 bp, Glycine max
  Coding DNA Sequence Number=SeqID_932
gtatatgtggcttttcgtctttctcgcatatatcttggaatatctttaaattactttacttcactttgaaacttcttccttgtcttcctttcccggaatcactcaaaatcttgaattctttatattctttcggtcagactcacatactgtatatcttctcatttgaggcggatagggggtcagcgcggcaggggagttggcgtaatgttggtcttttcagcgtttcggtacgcttttttcgccttttgaaactctctgatttttctcgggacacttttctttcgtatatttatttggtttaggttttgtttagcttttttttggtcaaagatgccactttttaggacactctctccaagcacaattgttaagccacagttcattctcttcttctgtcttcttacggtctttcttggggggctatctcacgattctcccgtcttgaggggtcttcttcatattcctgtatagcatagggctcggctatctgatctccaggatggatcttagtgtgcgctacatgatggtattcacatcattgattggttctttcctgcaca

SEQ ID NO: 10712 - DNA, 467 bp, Glycine max
  misc_feature (147)..(147): n is a, c, g, or t
  misc_feature (187)..(187): n is a, c, g, or t
  misc_feature (283)..(283): n is a, c, g, or t
  misc_feature (298)..(298): n is a, c, g, or t
  misc_feature (301)..(301): n is a, c, g, or t
  misc_feature (306)..(306): n is a, c, g, or t
  misc_feature (319)..(319): n is a, c, g, or t
  misc_feature (322)..(322): n is a, c, g, or t
  misc_feature (328)..(328): n is a, c, g, or t
  misc_feature (346)..(346): n is a, c, g, or t
  misc_feature (354)..(354): n is a, c, g, or t
  misc_feature (372)..(372): n is a, c, g, or t
  misc_feature (374)..(374): n is a, c, g, or t
  Coding DNA Sequence Number=SeqID_933
cgtagtcttacatcatctgcatcgatcaatgttgtctcgatgaatactgtaatcaactatcacatatagcgacactgcacatagttgcacaagctcgattagttgtcgaggtgctagtgtgaatgagacgtctgcgcactgctacgnagtgtgtagtcactgacgtagctactatcacgagctccanctgatcgatatgtgcatgatgtgcacgtgtgtcgtgcattggatgagtagtattatctgcacctaatatatacacgactaacgccagtgcgcttcncgctatgatgatccngantatancagagtgatgganacntgtacntgtgtgtagtgatcgtgncagacgcnactcgctctccaccgtantngagatgctatcgtgagtcgttgactagagcagcgagtttcgcactctctctatcttgctcgacgctacgcgttcacagtcatactcacgatga

SEQ ID NO: 10713 - DNA, 574 bp, Glycine max
  misc_feature (29)..(29): n is a, c, g, or t
  misc_feature (81)..(81): n is a, c, g, or t
  misc_feature (144)..(144): n is a, c, g, or t
  misc_feature (152)..(152): n is a, c, g, or t
  misc_feature (183)..(183): n is a, c, g, or t
  misc_feature (192)..(192): n is a, c, g, or t
  misc_feature (240)..(240): n is a, c, g, or t
  misc_feature (485)..(485): n is a, c, g, or t
  misc_feature (489)..(489): n is a, c, g, or t
  misc_feature (502)..(502): n is a, c, g, or t
  misc_feature (534)..(536): n is a, c, g, or t
  misc_feature (541)..(541): n is a, c, g, or t
  misc_feature (544)..(544): n is a, c, g, or t
  Coding DNA Sequence Number=SeqID_934
tacagcgagcgtccacagtacgtgagagnaccatacatcctagcatcgattattactctatcacgcacgccacagtatacntgatgctcgcgtcctgtatattatctgataatataatatataaagcgggcggagcgaggtganacaataancgcggcccgagctccgacggcgtgatacacncgtcgtgtngtgagaatcgagccgctcgctgcgtccgcggcaccgcgctggaggatnatgatgtgacatatgaataggagctggcgtggtgaatcactcatgccgtcgtgcgcggcagtgtatgcgatagcgtcatgagacagatataacagagctgtcgacggacgcagcgcggcgggataaatgggtaacaacagcacactgataattgacgcatcgccgtgtggagttatgtgcgcacgcgtggcatcatcacacgtgacgcgctgtattgtcacgggcgcgggcgcgggcgcaggganaatngtatatataatancgagcgtacggagcggacgcgcggagaacacnnngaatntantatacgatacctatcttctagtgattcaca

SEQ ID NO: 10714 - DNA, 532 bp, Glycine max
  Coding DNA Sequence Number=SeqID_935
tactgacttaggctatttctccaaagctcaataacaccctgcagatctttcagccgtgcaggcctgacaaggtaattatcaacaccggactcgtatgctgcattacgatctttcccactcacaagcccagtcagtgcgcatatgtacgtcctatcacgcttcaatcgtgcttccatctcacgaatctccctcgctacatcgaagcccgagacctctggcatcgagagatcgaggaagataagatcaaaaggttgcgcagcttcaccgttattcggttccatggtgcttttgaatgcatcaatggcttcctgaccaccacctacagacgttgcaggcgttttgctacatttgcgtgcatacatggtaagcaccttaagattgacagcgttgtcgtcgacaagcaatagtttcggctccgctgcgagtgctttcaatggcgtagtcagattcggctgttctacttgcactatctgtattggtatgttctgttctggtggccgtgcttcgatgggctctctcgatgcttgtactt

SEQ ID NO: 10715 - DNA, 372 bp, Glycine max
  misc_feature (322)..(322): n is a, c, g, or t
  Coding DNA Sequence Number=SeqID_936
acatattgttcttctcggttagtgataaacaacaaaatggcaatgtgcaaatcaattaaaccaatggctcagatgttgctattactactagcgattcattggcatatcttaactgttggttcaacaaccgagacctctgcctcattcgccaaacatagttccgtcaccgtaaataaaccgtcttctgagatcgattttatagtttggcggcgagagctaagaggtggtggaggaggaggtcgtggtggtggaggcggtggaaggagtggtagcggcggtacaagcagcggtaactgcctcaagcactatggtctgtccaaangcctattattcatcggtatattaagctatttgcttggtgtatggtagaaa

SEQ ID NO: 10716 - DNA, 463 bp, Glycine max
  Coding DNA Sequence Number=SeqID_937
agataggtcagcaccggcgcgcgctccaccgcacctcgaagaatgcctcccgtgtcgctcgtttccacttcaccggagacatggatgcgtaacgcgtccagcggaccttccacttccagccagtgggtgaggttgccgtaggcgtcgtcgcaactcctcagtcggacctcgccgtccgcctcaactcgccaccgtacaatgtgttgggaagcattgggccggggcgtcaggcgcagaacctgcaccgcagaccgaatgggagcgtcgtagtgatactcggtggtgtgttcgatttggatgcgcatgagatcagttcagatattgctcagtgatagccgtcgtcagcatcccgtgctctttcaggaatacttcaatgaattcgtgcagaccttggtcgaacacggtggctatatcgagtccgcttaacttggccgatgttgcgcgagctcgcttttgactttca

SEQ ID NO: 10717 - DNA, 506 bp, Glycine max
  misc_feature (68)..(68): n is a, c, g, or t
  misc_feature (88)..(88): n is a, c, g, or t
  misc_feature (201)..(201): n is a, c, g, or t
  misc_feature (206)..(206): n is a, c, g, or t
  misc_feature (209)..(209): n is a, c, g, or t
  misc_feature (218)..(218): n is a, c, g, or t
  misc_feature (240)..(240): n is a, c, g, or t
  misc_feature (279)..(279): n is a, c, g, or t
  misc_feature (282)..(282): n is a, c, g, or t
  misc_feature (284)..(284): n is a, c, g, or t
  misc_feature (374)..(374): n is a, c, g, or t
  Coding DNA Sequence Number=SeqID_938
atgcttacacgcacatcatcgtcgattgctctatgatcaatgctaataatatacgtcatgtggaaagnaggtcgataccgtcgtaatnaataattacacatcgtacagagacatacgaccatgagagctacaagtcattcaatctgagacacgtcgctgctgcgtatgttcttggcacacttccgtcgtgaagcgacaacnagtanaanttcctattnctgctattttgatggtgcggcngttcaatacatcatctcatagtgataacgcactactcanaantnacctctctcgcagtcacagtcggcagatgtcgcggggagatgcgatagtttagttatggaaggcacattagagaggcaccgggcgcgcgngccgcgcttcgctcgtgttcgcgcggacagacgtcactgccagcttcgtcgacgcgccaccatgccgtcgccgctagtcgagtctttcaaagcagatacgcgctctctcatactctctacgtcacgcgggtg

SEQ ID NO: 10718 - DNA, 535 bp, Glycine max
  Coding DNA Sequence Number=SeqID_939
tcctcctcaagagcaagtaaagggaaccttgcgcccgcccgtgttaaaccaggtaaagttgagatggaaaaggctttaaaccgccaatcccatgaaaccaccaccccccatggttgagccccggagatccaatcgcgggatccagcccccatcaagccttttagaaggattgcagagctctttgttcatctcaaagattccttcggtttcccataatcgtaatcccaagagttaaatggaagggggcttccaatgattatgatgcggccccttaaaagcccggcctgttatttaaatgccccccacccctagcataaatgggtatatttataaaaaagaccccccctaggaagggaaattcttgcttcctatgtttcagtagccggccggtcaaatttgattttaggatttatttaaatttgaatgtgattccccccaaaggctgggcggtaatatggatattctcccatgttcccttgtttgtaaaggtttgttcttccaatgataacatgaacccgatgttttactttcctct

SEQ ID NO: 10719 - DNA, 343 bp, Glycine max
  Coding DNA Sequence Number=SeqID_940
aagcatatagatgtagtattcctgatatgctactcgcccctacaaagggaggttctatggattgcggacggacttgatatatgatttactgcgggttttaagctagaaatctgcaccaccgcccgagttggacttctatctgatgacacacgtatcttcatagagaatagcctcacagttacaagggcataattggccacacaacgaagcaaagctgtgaacactttctatgttcgcggcgcttcatgtttccctgttgattgcaataccatataatccatatggcaaacaattggcatcgcaattcttaaagtctacggtatcccctgccagatgaaatctg

SEQ ID NO: 10720 - DNA, 464 bp, Glycine max
  misc_feature (119)..(119): n is a, c, g, or t
  misc_feature (221)..(221): n is a, c, g, or t
  misc_feature (224)..(224): n is a, c, g, or t
  misc_feature (226)..(227): n is a, c, g, or t
  misc_feature (230)..(230): n is a, c, g, or t
  misc_feature (241)..(241): n is a, c, g, or t
  misc_feature (252)..(252): n is a, c, g, or t
  misc_feature (317)..(317): n is a, c, g, or t
  misc_feature (378)..(378): n is a, c, g, or t
  Coding DNA Sequence Number=SeqID_941
gagagtgatacgcacgcaatggtaaagcagagcaaactggcgagttatagagacgagggagggaggacaaggtagatacacaacaccgatatgccacgctcacttcacacagcacgcgncgcgtctgcgctacagcgattcttcttcttgtcgtgtcaatcagattatctagcgtcgataacgacactacacgtgctagtcgttcgtgtcgtgccgcctantcncnntcntccttgcgttnataatgtctanaatcacatcacctactctacagccatataccatcacgacgagttaagcacgcctcgtgtcgcgcnatgcgcagagtagtgctgcgtctgattcgcgtccgcgcgagtaggcaagtcctgggcggcntattaagtagggttttgcgttgcgtctttgtattcttcatctgtatctgtcgtatcctgtcagatgttcgccgtcgtgtatgtaga

SEQ ID NO: 10721 - DNA, 532 bp, Glycine max
  misc_feature (105)..(105): n is a, c, g, or t
  misc_feature (137)..(137): n is a, c, g, or t
  misc_feature (226)..(226): n is a, c, g, or t
  misc_feature (286)..(286): n is a, c, g, or t
  misc_feature (380)..(380): n is a, c, g, or t
  misc_feature (470)..(470): n is a, c, g, or t
  misc_feature (485)..(485): n is a, c, g, or t
  Coding DNA Sequence Number=SeqID_942
gagtacagacgcacatcggagtgtcgaagaatcgcatgacctgatacatgtcgttgccttcatatctcagactagctattaggttcatctcacgacaccttactncgtctctcactctcgacagtagagagcacagnctactcccgtacgactctctacctagtcttttcgtatatcatggagctgtcgctaatggacattacgatccatgcgatgaagagagagntgccacgatatatagataggacagagtaatatggcaggtgaggtacgtaccttcgtaagnacaggagcgcgcagcgtgtgtggatgtaattcatgtctctgtgatccgctctctctccttctttactgaatgacgtctcgtacttgtctaatanatcaatatctagtgccacgagtcgtgctgtgtaggatagggggtagtgaggtagagagccatgtatcatcattagaagacgtagagctgnagtagacgtgagtanaaacaccccaccagccatcgccaatcaacatggcagctcacggtctg

SEQ ID NO: 10722 - DNA, 290 bp, Glycine max
  Coding DNA Sequence Number=SeqID_943
tctacctccgtcctgaagattcatctccccggagcagatccgtgattcgtttctagacgctattacttgatattgtgatccacgcaatggctgctcctcctgctagagctcgcgctgattacgattacctcattaaactactcttgatcggagacagcggtgtgggtaagagttgcctcctcttgcgtttttcagatggctcctttaccaccagtttcattacaaccattggaattgatttcaagatacggactattgagctggatgggaagagaattaagctgcaaatc

SEQ ID NO: 10723 - DNA, 294 bp, Glycine max
  misc_feature (34)..(35): n is a, c, g, or t
  misc_feature (65)..(65): n is a, c, g, or t
  Coding DNA Sequence Number=SeqID_944
ggcgcggaaacagcggagaaactccgaattgacnngcacacttacttcaaaaagaaccgttccgntggccgcatcgacgcttacaccgaggggaatacgctgtgcccaaaaggtctcccggtaattggaacgaactcggggctttggccatctcaagagcatggttgggagagagtataagaagattctcggaagggaaatttggtgggcagcaaatttcgttaggccaccatattgtttggggcttttgatttctactaaaaaaacaaaactcgccagggaatctaaaaattg

SEQ ID NO: 10724 - DNA, 421 bp, Glycine max
  misc_feature (164)..(164): n is a, c, g, or t
  misc_feature (224)..(224): n is a, c, g, or t
  Coding DNA Sequence Number=SeqID_945
tgagtagacattgcacgtcgcgtccacatataacgtgcacagagaaggaatcgtcatagtgcgataggcagagataattgtgtgcgcgtggtgccgccgcgcggtacgcatgtggtgggttgattgtaatgatatctggttttattatcgtggttataaatttnatgcgattcatgaagagtactacagtaaagtaaaatgacagacaagagtaaacacagcanagtgaattcgaacaccgatgtcagtgcccaacctaccactcgcgtgcccacgagaccgagactatcatcatcacccagacgctagagtacgaccatgatgaagactcattatgtgagatgtcacccacatttcgctactctacacatagtcagtgcgcacccacaaagcaccggtgccgcattatacactcatatta

SEQ ID NO: 10725 - DNA, 536 bp, Glycine max
  Coding DNA Sequence Number=SeqID_946
acgcatggctttcgctctctattagcaccattcgatctcatcatcgccattcatcctcctcaaactgattgcggtggatatattgttgagagcttatgggaaattaacgggcgactatgctttgcaagagagagtggatgcccacacaggcataagacttatccttaagtgggatctgggtgggggatttgacctgtttccttctcttttacccactgacggttcctgcatgattgatagaaggatgggcattcacggcctccctgttgagatccaggccttattttactcgggttcacgctgctctcatgagatgctaatagtcaacgacgcccccatgagtctggtggctgccgttggtagtcgctctgagtgcactctgctttcgcatgatagagtttattgggttgctgtgaagaaggttaatgaggtttaccgcgtctcgacagaagattgttctactgttgctgctagcacgtttaacatctatccagagcatccttccttcatggctagtggactggatttgcgagtaa

SEQ ID NO: 10726 - DNA, 580 bp, Glycine max
  Coding DNA Sequence Number=SeqID_947
tatgtatataccacacaaccggccgggtcgtgggtttatcagaccgactttgttttacagcaccgcaaggtgattgtcaggctccccacgctcgtgctactactcgataattgaacacatagtggctgtgttcttatatcctcctctatatttcattagcgccactatcgttttaagttctccttaccccacataactaaacgcggcgagcttagggtgtggcgcgcgattacatctgaaaaataatatccggcgcgcgcataacaaaaggtccgcgtcactcgtcataacacatacaactacatacagcgtcgctactcgccgcccgccgccaatatgatatacatacaagaaggtcgtgtatagaactattaaggcggctagttctccattccgcgatactataacgcggcgcggatggcggcggcgaaagtgaaaacgacaactatatgaacgcccgcgccgatacggcggccgtatattatcacccgacaattgctacgcgcgcggcgacgaaaaattgctgattagtgccgccggcccgcgccgcacacgatttatttcacttgtctttgctcgc

SEQ ID NO: 10727 - DNA, 524 bp, Glycine max
  misc_feature (86)..(86): n is a, c, g, or t
  misc_feature (205)..(206): n is a, c, g, or t
  misc_feature (227)..(227): n is a, c, g, or t
  misc_feature (259)..(259): n is a, c, g, or t
  misc_feature (272)..(272): n is a, c, g, or t
  misc_feature (278)..(278): n is a, c, g, or t
  misc_feature (291)..(291): n is a, c, g, or t
  misc_feature (362)..(362): n is a, c, g, or t
  misc_feature (376)..(376): n is a, c, g, or t
  misc_feature (433)..(433): n is a, c, g, or t
  misc_feature (439)..(439): n is a, c, g, or t
  misc_feature (494)..(494): n is a, c, g, or t
  Coding DNA Sequence Number=SeqID_948
atcaatatacagttggcctccattcatactacatcacgcgaagctacactctacctattgtgaggagagaagcggagagatgttgnctcaatgtatcgagtcgagcgtgggagcgagcatctacacctcgactgactcacaggctccgcctcgatccccgtgtgtctcgccacacgcacgatgtcccgcactccgcgcacgcacnnacccctcatctcccgatcgcngccgcgactggcgccgaaggcaaccaacacangacgtgcacaccnacatcncggtcgcacgcgntaccacgcgcgtgtgtccacatcccgacgacacataacataaataaatcctcattaagtgtgagtaagagnggagaaacagaggngcggcacgtagcgacgaagactatcaattatataaactcctaccctgccgatgtctnatatgnattagttcgtcactaaaaacatttacaatataaagaacgagaacccgcagcgcanacaccttatctctatccacttaccattctt

SEQ ID NO: 10728 - DNA, 596 bp, Glycine max
  misc_feature (35)..(35): n is a, c, g, or t
  misc_feature (110)..(110): n is a, c, g, or t
  misc_feature (173)..(173): n is a, c, g, or t
  misc_feature (286)..(287): n is a, c, g, or t
  misc_feature (347)..(347): n is a, c, g, or t
  misc_feature (356)..(356): n is a, c, g, or t
  misc_feature (400)..(400): n is a, c, g, or t
  misc_feature (428)..(428): n is a, c, g, or t
  misc_feature (440)..(440): n is a, c, g, or t
  misc_feature (484)..(484): n is a, c, g, or t
  misc_feature (501)..(501): n is a, c, g, or t
  misc_feature (509)..(509): n is a, c, g, or t
  misc_feature (529)..(529): n is a, c, g, or t
  misc_feature (543)..(543): n is a, c, g, or t
  Coding DNA Sequence Number=SeqID_949
tgaatgtgtatgtgcgtcatgtgtggtggctgcanctatctcgacccactattctaaatacgccgcgtaacacgaactgtactctctctctaacatttgtgtgaataaantatatatatcgcgcgagacgatatatatatatacagcaccgcgatgggtgctgagaacataangtgaatagactaataatgctgctgcatgtgccgcgcgccgcgcgggataatataatagaacatacatagaatggtgtgcacgaaaaatacatcgagtctacgcgcgcgcgatnntcctagtgcttgtcacatatatatatatcgcgggtcgtcggttgagcgcgcgtgtgaatnattgtgaancatcgagactagcatgtacgtgataaacgacgggtgtggatacntgcgcgcgcgcgactgataattcgttangtcggttgaganattatgcatccacgggacgcggacgtgcgcgagagatatgtatngtcgatatacggctggncggacgantgacgccgtcatggagacanccgaattttatgantcgtatcattgaccgactaacttgatccgacgaccgcatcaaaatcacacgac

SEQ ID NO: 10729 - DNA, 452 bp, Glycine max
  misc_feature (27)..(27): n is a, c, g, or t
  misc_feature (95)..(95): n is a, c, g, or t
  misc_feature (177)..(177): n is a, c, g, or t
  misc_feature (326)..(326): n is a, c, g, or t
  misc_feature (333)..(333): n is a, c, g, or t
  misc_feature (349)..(349): n is a, c, g, or t
  Coding DNA Sequence Number=SeqID_950
gcatgatcatgtgtgcatgtatctctngatgtcgcgctgctctcattacgacgcaaacactaatacatatctgttagaatgatcaacaacactantcacacgtaacagatcgatatgatatcactaagatctagtattatatgtagatcacatagcatctgatataggaaactctantcgccgctgcaatgcgcgtattctcactgcacatgacgtatcgtataacgctgatgtgtatgtgctgatacataccacacgacgcactatcgacgtgtgaatgcacgcgcacgcgtcgacgacatgccgcgcgcacgtcgtcacgacancagagangatgatatgacatgcnctgaatgtgcatgaacgatggacacggtcgtgatgatcagagcgctctcgcacgatcatagcggacacgcacgcgcgcatcatacgatcatacgctcgcgaca

SEQ ID NO: 10730 - DNA, 221 bp, Glycine max
  Coding DNA Sequence Number=SeqID_951
ttttccctccgtccactttgccttgtcgggggcttccccatgctagaagcgccccaaacattctcttcagtccccccccccgcggcggcccacacacctctttgcccgccgccgaggcggcagcagtggaggtggggctcgcgcgggaaggagggggggcgccggggtggggttgccggccccccccggtccggcctgttgtgccccggtcgtgtgacggg

SEQ ID NO: 10731 - DNA, 521 bp, Glycine max
  misc_feature (38)..(38): n is a, c, g, or t
  misc_feature (41)..(41): n is a, c, g, or t
  misc_feature (43)..(43): n is a, c, g, or t
  misc_feature (84)..(84): n is a, c, g, or t
  misc_feature (113)..(113): n is a, c, g, or t
  misc_feature (179)..(179): n is a, c, g, or t
  misc_feature (187)..(187): n is a, c, g, or t
  misc_feature (219)..(219): n is a, c, g, or t
  misc_feature (222)..(222): n is a, c, g, or t
  misc_feature (284)..(284): n is a, c, g, or t
  misc_feature (288)..(288): n is a, c, g, or t
  misc_feature (351)..(351): n is a, c, g, or t
  misc_feature (360)..(360): n is a, c, g, or t
  misc_feature (363)..(363): n is a, c, g, or t
  misc_feature (365)..(365): n is a, c, g, or t
  misc_feature (372)..(373): n is a, c, g, or t
  misc_feature (375)..(375): n is a, c, g, or t
  misc_feature (389)..(389): n is a, c, g, or t
  misc_feature (422)..(422): n is a, c, g, or t
  misc_feature (429)..(429): n is a, c, g, or t
  misc_feature (461)..(461): n is a, c, g, or t
  misc_feature (471)..(471): n is a, c, g, or t
  misc_feature (488)..(488): n is a, c, g, or t
  Coding DNA Sequence Number=SeqID_952
tcagtactttcttcactactctcctgcgtgctgttgtntgntntaacagcacgctcaatgcgcacactcctagctcagagtggnggcgacgagagaaggggcgctgaagggtngtgagaccgaatagacacaccatgtaatagtctgtatacgtatcatcatgtgaatcattgattatntgtgcctngtgctgtgatcgttacagttgtactatatatntcnttagagaagagtcggacgagaggtgtgagcggagtgttctatgatatgtgtgcgagcacagngcangcgcaggcatcgctgatgagtaatggagtgcaggcggttgtagtatgtattgtgtaaggatangtaaggatnatntntctctcnncncacacggcgcacgnccaacgacatactcatccccaatattttgttgnataaagnagagagaggtaagccactctcgcatgtaaaanttttctaccnctcacgcccgtcggtcnctcccctcctctcctcctttcctttgaggaaga

SEQ ID NO: 10732 - DNA, 568 bp, Glycine max
  misc_feature (48)..(48): n is a, c, g, or t
  misc_feature (225)..(225): n is a, c, g, or t
  misc_feature (320)..(320): n is a, c, g, or t
  misc_feature (537)..(537): n is a, c, g, or t
  misc_feature (541)..(541): n is a, c, g, or t
  Coding DNA Sequence Number=SeqID_953
acacccgcccaaacgtaagatgagacactccgacacacccacacccancacctgcgcaccaccgcccaaacaccatacaatgcttgtactcactctcagacgcacacccaccacgataatggcagcgcacgtgcaccccactccatcaaccagcagcttagcaccactgatctgaagacgaatatttactattggatgagcagaccattctccgctctactcatnacactagcgcactcacacacacacatcaccaaccgacacactcacttacctcatatgcatctatactatttcatgtcttgtatactaactctacnacgctgtcgctcaaccacagaccgactcttactgataactaaagtgtgtaagaagtcgaataactacaacatacaacaggtgataaggtatgtaatactacgctctgttttatgttatagcgtctgccttctattcatctctcactctcatgccgtgctatctcctgtggcgaggtacgtactgtatcgggcaccacacctgtacctacctaactgngacnccgttcattccgagatcgcacagcact

SEQ ID NO: 10733 - DNA, 450 bp, Glycine max
  misc_feature (241)..(241): n is a, c, g, or t
  misc_feature (306)..(306): n is a, c, g, or t
  misc_feature (376)..(376): n is a, c, g, or t
  Coding DNA Sequence Number=SeqID_954
gcccaacgatgcgtgtgttgtggacgggagagcgcggaggagtgcggtggagaggagcagcgaaggagtctagagagaggggcgacgacacacaaggatgataagtaggcggcggaagctgaggtcgacgtagtacggccgcgtgacgcgagtgtcgccatggtgcgacgaagagagtaaccaaaagaaataagactaattgaataattagtatggagttatagagtgagagcaaggaaanttgtttggctgtgccagccacagtgtttatgtgtataacaccacaatcaactaccccaccgcagngaagaatttatggacgcactgttgataaacgcacacacatactcggctagcaccccgggatgacttcgtnagaatatagaggagagatgaggtggccgagcacgtgcaaaggcaattatagaacgcagcacaacgccggcggcg

SEQ ID NO: 10734 - DNA, 404 bp, Glycine max
  Coding DNA Sequence Number=SeqID_955
ttcttcttcgtcatcgtcgcagagacttcaatggcggcttcgttctcactctcgagcctcatctccttcatctccccattcaaatcccagaccaaaccaaccccgcctccaaatctcactctccccgctccagcatcctcccacagacggagaaacgatctcgccgtggacgagcctcctccttcgaacgcctcgatttcctcggagctcgcgtccgtgatatgcccgtcgctggcgtacgcgaacacgctcttcttcagcagctcggggtacaacgtgcaggtgttcgtggaggacaacgagtcggaggagaggctggtgaatcggtttaggagggaggtgatgaggacgggggttatacaggagtgcaagaggaggaggtactttgagaataagcaggacga

SEQ ID NO: 10735 - DNA, 117 bp, Glycine max
  Coding DNA Sequence Number=SeqID_956
tcccatgtttgtgagagacccccgtcacttgttttcctcaggtccctctatttttacaattatcattcaaaccaagattattgattgaaaacaaagtctccacagtatcatttagtg

SEQ ID NO: 10736 - DNA, 352 bp, Glycine max
  Coding DNA Sequence Number=SeqID_957
attaacttcaccttcaacagtctcaccgtaatcaatgtttacttgtttggccattccacgcttctttaatagatctctaacaacatcaaccacactagcatcttcaatagtaggagggattttgggttcgtttccattcgagagctctctgagaacgtttctgatgattttaccacttcttgtcttgggaagtttgtcgacgacaaggcaatatctgaagcttgcaacagggccgatttcgtatctaatcttcttgatacattcggcttcgagctccatggggtctctttgtctgccagactttaagacaacaaagccgactgggatttctcccttgagttcatctaaagct

SEQ ID NO: 10737 - DNA, 501 bp, Glycine max
  misc_feature (27)..(27): n is a, c, g, or t
  misc_feature (37)..(38): n is a, c, g, or t
  misc_feature (41)..(41): n is a, c, g, or t
  misc_feature (43)..(43): n is a, c, g, or t
  misc_feature (105)..(105): n is a, c, g, or t
  misc_feature (108)..(108): n is a, c, g, or t
  misc_feature (161)..(161): n is a, c, g, or t
  misc_feature (168)..(168): n is a, c, g, or t
  misc_feature (190)..(191): n is a, c, g, or t
  misc_feature (194)..(194): n is a, c, g, or t
  misc_feature (197)..(197): n is a, c, g, or t
  misc_feature (200)..(202): n is a, c, g, or t
  misc_feature (204)..(205): n is a, c, g, or t
  misc_feature (207)..(211): n is a, c, g, or t
  misc_feature (218)..(218): n is a, c, g, or t
  misc_feature (220)..(221): n is a, c, g, or t
  misc_feature (226)..(227): n is a, c, g, or t
  misc_feature (229)..(230): n is a, c, g, or t
  misc_feature (233)..(233): n is a, c, g, or t
  misc_feature (236)..(236): n is a, c, g, or t
  misc_feature (239)..(240): n is a, c, g, or t
  misc_feature (243)..(244): n is a, c, g, or t
  misc_feature (246)..(246): n is a, c, g, or t
  misc_feature (248)..(248): n is a, c, g, or t
  misc_feature (293)..(293): n is a, c, g, or t
  misc_feature (300)..(300): n is a, c, g, or t
  misc_feature (312)..(312): n is a, c, g, or t
  misc_feature (314)..(314): n is a, c, g, or t
  misc_feature (317)..(317): n is a, c, g, or t
  misc_feature (324)..(324): n is a, c, g, or t
  misc_feature (326)..(326): n is a, c, g, or t
  misc_feature (329)..(348): n is a, c, g, or t
  misc_feature (350)..(354): n is a, c, g, or t
  misc_feature (356)..(359): n is a, c, g, or t
  misc_feature (361)..(383): n is a, c, g, or t
  misc_feature (385)..(386): n is a, c, g, or t
  misc_feature (388)..(395): n is a, c, g, or t
  misc_feature (397)..(399): n is a, c, g, or t
  misc_feature (413)..(413): n is a, c, g, or t
  misc_feature (417)..(418): n is a, c, g, or t
  misc_feature (429)..(429): n is a, c, g, or t
  misc_feature (432)..(432): n is a, c, g, or t
  misc_feature (437)..(437): n is a, c, g, or t
  misc_feature (446)..(447): n is a, c, g, or t
  misc_feature (453)..(453): n is a, c, g, or t
  Coding DNA Sequence Number=SeqID_958
atcgctcacatgtgaacaaatgctttngccagacagnncgncnagtgagatgtgcgagtgatgtcgggtcgctgcgtgtgtctcgcacggagacgaccgtgctanatngagatggatgagatgcgtgacacgtctatgatcgtcaggtcgaagtagtgtangtgatcnatatatgcactacacatctganngangtntgnnncnncnnnnnccccctncnnttttnncnntcntantcnncanntntncgttctataaatactacgacgagacagcgactgtgcttagtggtngctatgnatcagcgatatngnagngggatgngncgnnnnnnnnnnnnnnnnnnnntnnnnncnnnncnnnnnnnnnnnnnnnnnnnnnnntnngnnnnnnnnannncccgctcgtcatgncgtnncgtcgactgtnaantcatncagtaaccnncgcccngcgtccgcgctcgaccagacgcttttgtcgatcatatagtcgtgcgcg

SEQ ID NO: 10738 - DNA, 539 bp, Glycine max
  misc_feature (189)..(189): n is a, c, g, or t
  misc_feature (194)..(194): n is a, c, g, or t
  misc_feature (494)..(494): n is a, c, g, or t
  misc_feature (513)..(514): n is a, c, g, or t
  Coding DNA Sequence Number=SeqID_959
tactcgctgtgtgcgcgttctggcccgctcttgcgcgttctgctcacgtcccacagtagcccacgtctcgcacagacgtactcctcgcccccacagtccgcacgcggccgcccggcacaggtcgacctacgctcgtggatgctgatgcacctacgcggcacgacgttatcaaatgtctctacacacagnaagcnctatgcgttatccagttgttttgattctttcctctgtaagtcttgactcgctcactacccatagttgctatctgattgcgtgctggcgtttgtggtaatgccgggtagcggacagcactacgcccgaccggggcggccgccggcggcgacggacccccaccagtcgcatgcgcgaggagagaggatcggtggtatgagtttaatagtttcctaagctcgcggaggtgccgccggcgcagcccccggcgcagctcccccccactactcgcgacgccggccacgcgcggcgcccgccgacantcgcaccgccccccgccgnntgagggaggagggtccacacacccc

SEQ ID NO: 10739 - DNA, 182 bp, Glycine max
  Coding DNA Sequence Number=SeqID_960
ctttcagagagagagggttcgactcttcagttcgccggatgtgtttctccggcaatcgtctcccgcgtcgtcgggctttgactctggcaagcggtggctacctgagcgccgcttggccggctactgcctctagcgtttgtcatcgatcctcttagatgaaaacggctagcttttcaccggat

SEQ ID NO: 10740 - DNA, 435 bp, Glycine max
  Coding DNA Sequence Number=SeqID_961
catctcggcctaggtatgtgtgcggcaggggggcctacgggtaaacggggcgaggcgggacgggtggaacggccgccagggcgacacggctacgggaccaagccgggaagcggccaaggggcgacggccggaaggggggcaaacgggcctaaggcgcaaagggagaaccgcaccaacccggacggggcgaaaggcaaaacagcgcaaaccgggcacggcggaacgggggccaagggcacgagcgcgccgagggggacaggggccacgccgacgagagggaaacaggcgaacagcgctcgggacggcaaagggcccaaagcgcggggaggcgcaacacggccaatgggccgaaagggggcacagcggaagggcggcgacgagccgacaggggcggaacgggcgacacggcgcaaacgcggcgaacagagggcaaaa

SEQ ID NO: 10741 - DNA, 473 bp, Glycine max
  Coding DNA Sequence Number=SeqID_962
gaaacattcgattcattctcgcgatcctctctgattcgaagctcaagccatggctcgtacgaagcagactgctaggaaatccaccggaggaaaagctcccaggaagcaactcgccaccaaggcggcgaggaaatcagcgccgaccacgggaggagtcaagaagcctcaccgttaccgtcccggaaccgtcgctctccgtgagattcgtaagtaccagaagagcactgagttgttgatccgcaagcttccgtttcagcgtcttgttcgtgaaatcgcccaggatttcaagacggacctgaggttccagagccacgcagtgttggcgcttcaggaagctgcggaggcgtatctggttggtttgtttgaagacacgaatctctgtgccattcacgccaaagagagtcaccatcatgcctaaagatattcaactggctaggcgtattcgtggagagcgtgcttagatgccatctcat

SEQ ID NO: 10742 - DNA, 578 bp, Glycine max
  misc_feature (136)..(136): n is a, c, g, or t
  misc_feature (217)..(217): n is a, c, g, or t
  misc_feature (260)..(260): n is a, c, g, or t
  misc_feature (394)..(394): n is a, c, g, or t
  misc_feature (447)..(447): n is a, c, g, or t
  misc_feature (501)..(501): n is a, c, g, or t
  misc_feature (551)..(551): n is a, c, g, or t
  Coding DNA Sequence Number=SeqID_963
atctcagtgtgtctctcagcaccctacccacctgacgcctactcatcattcacatcacaccacatgcggtcgcaccactcacgtatgatcccgcatgcgtgtctcatagaccgactgcggtcaattcactcgtgcnattcatactctcgctcaccactctcaatactcaccaaccgcacagcctgcactgtactcagacagctcgcactctactggncttcttccctctaccacgcaggacggtggtgagtgcgtcgggntggcgcgcgggagtcgagtgattataatgtctcggccgcgcgcgctgctcgcgcgcccgacaccatgcgtgctcgccttcttgcacgcgcgacctcctcgacacagcgtcgtgtgcagcgtcgcatgaccacangacaggcgtcacgagtgtgtgctggagttctcgcgacctccgctacacacgtnaagtctaacagccggtcacaaacaacacgatcgacgcgccgacttccatctccnctatcatctccgctaccgtcatctgcttctagcacacacgcgctcctatnctatctgagagcagtgcgtggcagtat

SEQ ID NO: 10743 - DNA, 343 bp, Glycine max
  Coding DNA Sequence Number=SeqID_964
tccaacagcgaaacaaaatcttagtaaacacaactcaacaaaatcgccttatcacaaaaaaaaaagagaaaatcaaaacacatgactatgggtctgaagttctttacatgccttgttttgacggtctgcattgccgcatcagtagatgcagcactcacatgtggtacagtgacaagtagcttggctccatgtgccacctacctatcgaaaggtggggcggtggtgccgggtccatgttgtgcgggagtaaaaaaattgaatgatatggctcaaaccacaccggaccgccaacaagcatgcaaatgcctaaaggccgctgcaaaaagcatcaatccaagtctag

SEQ ID NO: 10744 - DNA, 142 bp, Glycine max
  Coding DNA Sequence Number=SeqID_965
aagcggagagagacagctgctgagtgaagcaagggagagagacgccgacggtttccgagtgagatgatgatagcctcgaagatgatgcgacggtgactcgcggaggagctccgattagcagcgacgccatcgtctgtgtgtg

SEQ ID NO: 10745 - DNA, 580 bp, Glycine max
  Coding DNA Sequence Number=SeqID_966
tctgcttctgccaacgcagttgagtttgctctgaagaatgatactgagatgggtgatgctggcaacttggttgaggaggctctggagaatgtcacggcgatggctgatgccgtttctggtgctgataatgcagtcaaggagtctgacatgaacaggggtgatgtagaccaagagaagagtggtgaggacatggctggtgcaggttcagagaagaatgcagagatggctgatactactggaagtggagaggaagagggcaaggagcaggcctgatgctccagctagaaaacggtgaatagagcaagcaggcctaagctgaaggtgggggcttggagatggaagatggacagtggaaaaatgcacaagggtttccttccctggttgtttgttactgtacatacttgcagatgaagccatgcggcgtgtttcggtcttggggactgaaacgtcgcgtgcccgaggcggtggtttgtcggcgtcggtgatgttatatgtttgttgccattttgagttctctatattcggaacctgtagtgttttagcggcctagctaagctgctgctcaaggtggtagtaagat

SEQ ID NO: 10746 - DNA, 545 bp, Glycine max
  misc_feature (189)..(189): n is a, c, g, or t
  misc_feature (221)..(221): n is a, c, g, or t
  misc_feature (254)..(254): n is a, c, g, or t
  misc_feature (256)..(256): n is a, c, g, or t
  misc_feature (277)..(277): n is a, c, g, or t
  misc_feature (344)..(344): n is a, c, g, or t
  misc_feature (370)..(370): n is a, c, g, or t
  misc_feature (402)..(402): n is a, c, g, or t
  misc_feature (408)..(408): n is a, c, g, or t
  misc_feature (433)..(433): n is a, c, g, or t
  misc_feature (450)..(450): n is a, c, g, or t
  misc_feature (454)..(454): n is a, c, g, or t
  Coding DNA Sequence Number=SeqID_967
cgtttatcgcgtcggccatctgatatcggcgatgttatagcgaggtgttggtccttaacgttgacacatatgcgccgtatctcacgctggtcgcgacacacgctacatctactcatcatctatgctctcctacgcatatgtgacactctatatatatactaactgactacatattatgtcgatcactcnagtcgtcgtgaatgcacaaccacgcgcgagcncacgttaatataacgcgctagcatgaagctgcncntgcatctactattgtgtatgncgctcgtgcgcgtatagctttcgtcacttcgctaggcacgctcgcgacaaatacttgtacgcaatangatgggcgccgatatctgagtctccnctgcacgtcgcactccgtccactctgtctcgncgttgnctcggccgcactcggctgagtactngctggtcgtagctgccntagnattagactagtggtggtgggacgtgagtgggctatcatgtcggacgacgtagtgagagcgtgcggtgttgatgatccgtgtagtctgtcta

SEQ ID NO: 10747 - DNA, 300 bp, Glycine max
  Coding DNA Sequence Number=SeqID_968
gtcgttgatgttgcttatgtctatgaactcggtgttggtttcggctgaggaagcagcaccaacggttggacagagggtagacacagccaccaacgacgttaccaacttcttcaatgaacatgccggtcctgccgccgatacggtctcctctacagccaagtcggtctacaactggtttggtgataaagccaaggaatggggcctctaaactatatgttttatgagcgaaggatttgcggacttgggattggaagcattttcatgtattagagtttgatatccgtgtactattttatgtaa

SEQ ID NO: 10748 - DNA, 321 bp, Glycine max
  Coding DNA Sequence Number=SeqID_969
ggagagggaggcaagtcaaaacaaagcaggagtgagaagaagagtcgcaaagccatgttgaagcttgggatgaaacccatcactggtgttagccgtgtcaccatcaaaaagagcaagaacatcatgttcgtcatatcgaaacccgatgtgttcaagagccctgcgtcagacacttatgtgatcttcggagaggcaaagattgaggatttgagctctcagatccagtcccaggccgcagagcagttcaaggctccggatctcagcaacgttgtctcgcaaggtgaatcttcgtccagcgctgcagtggttcaagacgatgat

SEQ ID NO: 10749 - DNA, 338 bp, Glycine max
  Coding DNA Sequence Number=SeqID_970
tgagaccaaggcgatcagcaaaatgaggatatcaaggagcatattggaaaatatgatgaagaactagaggatgtatgacagtgcgtgagttggtgtctggggtaccagattggtgacaggatggcggtgagagtgtttttactagaggatcaatgtgagacgaaaagcaaggacaatgtcaatgacaatgtggttgcatctgtgcaataccgagctgagtatgaaaaagcatctgatgcattctatagggttaccaacacgagggagcacatccaagcatatgtttatgatgacgtcagggacagtgtaacagagagggagccggagtctgactttga

SEQ ID NO: 10750 - DNA, 478 bp, Glycine max
  misc_feature (46)..(46): n is a, c, g, or t
  misc_feature (167)..(167): n is a, c, g, or t
  misc_feature (404)..(404): n is a, c, g, or t
  misc_feature (430)..(430): n is a, c, g, or t
  Coding DNA Sequence Number=SeqID_971
aatgtaatgactacgcacggaccccgacaacgcaattgccagcgcncgcatactacctatcgaattacagcattcgtttatcttatctcacgtaaactatatgattatatatcgcatcacgtacacacacacatccactaggagacgcgagacacatcgcgagcgtnggacagcacggtgccagactggtcttactcactcatataaacgacacaactcgtacgtgagtatggaacatacgaccacaatagacgacacacgtaactcgatacatacagataatatcgcagcatcacgtcgcgcatccactgatgtgttgatagtcgtgctcttgacaccacataggaatgtagcggagagaccgatctcctgagaactgccgaacactacgtagcacgcgaatntgcactcctcaaacactcatatacgnagctacgatgaatacatcaaatagaaacctacggcacggacttgttga

SEQ ID NO: 10751 - DNA, 458 bp, Glycine max
  Coding DNA Sequence Number=SeqID_972
tggatcaattatttacaggagaacctcggtgatttgaccaaagatgaagtgaacaacaattattcttatgttacctttgatgatgtgaaatcagtcaatacccttgccagagaagacgatcagccatttttggtgatcagagcaccaaagggaacagtcctggaagttcctgttgttgataacgagaccgaagaaaacttccctcatagaatgcaacttacaagtcaggatgaagagattctcatttacgttgtatccaatgatcaaaatgctgccccaggtggtgaagtcacaaagttgaacagatgatgataatccaacaatatttattttgactttttattaaaaataaaaatctgaatggaaattcccataactcgaatttttttttatctttcagtctggtaatgtctctaattttaattttgtttaagctataccggtatatatctctctat

SEQ ID NO: 10752 - DNA, 569 bp, Glycine max
  Coding DNA Sequence Number=SeqID_973
atgctcttaagtatccaccatacctcagtcctaatgccagagcccttcttgatggacttttccagaaggaaccttccaagagacttggaagcggtactacaggtgcagaagaaattaaggcccatccatggttccacggagtggattggaatatgatttacaataaggagttcaaggcaccttttactcctgttattaagaatgatgttgatgtgtctaacttcgatgctgaattcactgaagctcctattggttcgctgggatcaattactgatactactgcagatgtagatgcaagctatactggatggagttattgtggaaatgaacttgaacaacaaggacagggattggatagaccttccactatggaaatcgaataagagacagagaaatagattgagggatcagaaactaaaatgtaaataaaagtctgatgatccggttagaagtggaatttactatgattagccactttttttactaagagaaaaatttgctaaaaggtcttataccttgagttatttatttgaaagtaaatatataacgatatttttcaaccctactat

SEQ ID NO: 10753 - DNA, 433 bp, Glycine max
  misc_feature (74)..(74): n is a, c, g, or t
  misc_feature (89)..(89): n is a, c, g, or t
  misc_feature (350)..(350): n is a, c, g, or t
  misc_feature (352)..(352): n is a, c, g, or t
  misc_feature (407)..(407): n is a, c, g, or t
  Coding DNA Sequence Number=SeqID_974
acgcatccagccactctaggaagaaaggacgccactccccgacggacgtgatctcgctaacacgctcacggganggggtggcttccctngctctagaaggacaaggtgcgcagagaactgcctccggttcactaacaaactatatgttcactccgactccacgaggggctctatgctaggctttgactctgacactcatcagacagtgctgacattcgagcagactaagacgagggcactgggtcggccagccacactccattgcgtcatggcacagtgactgcgagcggttcgagatgcgcgctactatcagcatatcatccagtgacatgatatggagctacctcagngngttggatatcctacgctctccatacgtactatatgttatatttaaatgagaaagnagaagagcactagacaaggccattgt

SEQ ID NO: 10754 - DNA, 371 bp, Glycine max
  misc_feature (268)..(268): n is a, c, g, or t
  misc_feature (322)..(322): n is a, c, g, or t
  Coding DNA Sequence Number=SeqID_975
agaaatgtggatccagcatccctccatcctgtaaattgacagaagcttgagggaaatcatcttccaatacttggcttagaggaaaacctttcttgtgtttcgctgcagtaaggttcagtgctctgttcaccatctttaaccaggcgcagaccgcccaatcccagaaaatagccatgtttgagattaggaaccaatgggagttgaattctttaccttcaagtaatcagaataataatgatcgggttgcggaagtttacaagtaatgctnctgcagtagagtccaagcccagagagatggggccaagaaccatttttaaacatncacatactatggagttgttagtggagagtttctaatgggaaagtcacga

SEQ ID NO: 10755 - DNA, 564 bp, Glycine max
  Coding DNA Sequence Number=SeqID_976
tatgtgctcgttcttttatctaaattaagtagtggtgttgtcttctgtttctttcctagtggacacgataacgtgtatatagcggtttgggacataccaagagcagaatccagggttatgagctaaaacgagcggggagtctgggaggataattatctatatagagtcgcacacggtatggtattataatcgcacttaccgttcttgcggctgagaagaactggagtaactagagctgtacgtaggtagactaggagaacgtggacatagagaggatgttctacgatgtcagacgagtgctctgagaggtcgtacgagagaaacaggtacaaaagtactaacactactctaagtacactatctcacatttatatatctttaccggggtgatacacatactacaagctgtgcgttgctctatatagattatgtcacattgtatatacttgactacaccgctccctctcgtgcgggtggatgtgagggttatgttgtttcatcacaaacctctacgtggaaaatgtttgtttgcagcccgcaacaccacacactctgattacttta

SEQ ID NO: 10756 - DNA, 455 bp, Glycine max
  misc_feature (157)..(178): n is a, c, g, or t
  Coding DNA Sequence Number=SeqID_977
gaaatatactctgcagcacatcgtttcaccgttagaaggcaacagcaatctcttttgtgcggagcgcttcgggattcagttcgtgggaatgaacagtttgtgggtgaagcagtcaggattcacaccagccgtgaagcttcaaggatcttggcatgannnnnnnnnnnnnnnnnnnnnnaccgctctccgcaaaatgatccgccccgtcgtcggcgtcagatgtgcgcactccaagcgcatgatacttactctcgcagcatctccgccatagtagcgcattcctccggaaatcactcgtccatcgtcttcctccacggcaacaagatgtcccctgcgcaggtaatccagccggtttctatcggctcttagtggtcagcatcaacagcgcatttagcgtctgcataaggttgattcgtgcaatcaccagcgaaagcaccatctacaggcgaattcgg

SEQ ID NO: 10757 - DNA, 469 bp, Glycine max
  misc_feature (42)..(42): n is a, c, g, or t
  misc_feature (109)..(109): n is a, c, g, or t
  misc_feature (126)..(126): n is a, c, g, or t
  misc_feature (294)..(294): n is a, c, g, or t
  misc_feature (382)..(382): n is a, c, g, or t
  misc_feature (410)..(410): n is a, c, g, or t
  misc_feature (414)..(414): n is a, c, g, or t
  misc_feature (417)..(421): n is a, c, g, or t
  misc_feature (423)..(426): n is a, c, g, or t
  Coding DNA Sequence Number=SeqID_978
aatatgaatacacaccccagacaatatactcacttcattagntctactatcaatgactctgttagtaagacagcagatgaagacaattgaataaaaatgaacacacctnaccactatcccaactcngacactcaggctcaccgtgtgcttcgctaatttctctagctattggtgtgcgtgccacgtccttatcatcattcagcccccgcccgccgcgcggccacgcagtgtagccaagcaaggacagcctatggagtctcatataaccagctactactacatagtgcgagagangagtgagaaaaggacacccagcccgtcatgacataataaacatattatatatttaattatgttagtgtctacgtagttcgagtaatgngggcggagagctgtaagtccaaactaantagnaannnnngnnnncctcttccccccgtctggcttgtgcttatatatcgagaatgac

SEQ ID NO: 10758 - DNA, 369 bp, Glycine max
  Coding DNA Sequence Number=SeqID_979
ttaaatcatgactgacgccccaattaccagaaagcaagaagacttcctcagattgctcggcagcaacgctcacttcggtaccttgaaccttaactacgaaatgggcagatatgttgaccataaaaacgccgaaggtgtccacatcatcaacctcgaaaagacctggcaaaagattaagctcgctgctagagtcatcgccgccgtcgacagacccgaagatgtcatcgttgtctgcgccagaccttatggtcaaagagccgtcatcaagtacgctaagtacactggtgccaccgccaactcttcctccagatggacccccggtaccctcaccaatcaaaacactaaacaattcagagaacccaagctttt

SEQ ID NO: 10759 - DNA, 537 bp, Glycine max
  misc_feature (81)..(81): n is a, c, g, or t
  misc_feature (434)..(434): n is a, c, g, or t
  Coding DNA Sequence Number=SeqID_980
tatacttatcttcacagaccactcgcgctgacacaagctgtattcactagacgtattgttagagatgtttaatatgtggtntattagtattaaacattagattttaattatgcgatctcctatacgatgactgacaagtcctggcatggacgatctcatgtgatgcgaccggttgtgtggtatttggggatatgacacaagtacctgagggaagatctactcgctcgtgcagtgatcaatactccaggccgtagcatctcatgggatcctgttatgaggttgttgattcatagtttcttgtagacgcgcgtttcatacagtctctttcctattgagacggcgtcatctctcatgtgtgagctcttgtgtctataacgatttcggccatggtcgctcgtggtgttagcgcgttgtaagatgaagagacttaggangtgagctagtgaggatgatggcgcacacacactatattgttgtgctagtctatagccgatcggttcactgcgcgacactgtagctagatgcacacaccacact

SEQ ID NO: 10760 - DNA, 397 bp, Glycine max
  Coding DNA Sequence Number=SeqID_981
gttttcgaagtgacatgcgcaacccactctatcttttcggaccgtacaaacatggaacgcatattgggcggcaagtactagctcggacgcaagatctgctgagggtcctgcagagatagctacctcggcacgcagattgactcctcagagatcgaccctgtctggagcgacagtaccggatcaactacatccgcaactgctccacgaggcgaaagtctccactatgcttgaaagaggacgtgggattcctaacatagcatggtcctgaatacatggggatgatcatgtgctcgttattgacttgctagtgcctactcgtgaggatctctgtgtgcatagcggaaggaagtttgcattgcatactgtgttaatgttggctgagcagatgatcactaca

SEQ ID NO: 10761 - DNA, 411 bp, Glycine max
  Coding DNA Sequence Number=SeqID_982
catcctctttataacgacgtctttcactgcacttctttgctgaaaaattagcggccagtaacaatgtgcgtcgacccacgaactgggacaagagcatacagagaaccgtactcgggagagggaatccaacccgaacgttttccgaacgcttgcccccacccacactctacctcgacactctcttgtcgctctagggacgtttcgtcgatcctactcatctcttcctcgtgtccgcctagctcacaagcattcggtttgtcatgcgatcatagaattattggctgaaccaattgttacgtcagtgtttttgtactgcgtacaaaacaaatttatgggtcttttagaggttctgttttttttgtcccgccgcggaaaaatacagtcgccccgccactgatttctagttttaat

SEQ ID NO: 10762 - DNA, 512 bp, Glycine max
  misc_feature (100)..(100): n is a, c, g, or t
  misc_feature (187)..(187): n is a, c, g, or t
  misc_feature (202)..(202): n is a, c, g, or t
  misc_feature (269)..(269): n is a, c, g, or t
  misc_feature (315)..(315): n is a, c, g, or t
  misc_feature (411)..(412): n is a, c, g, or t
  misc_feature (417)..(417): n is a, c, g, or t
  misc_feature (447)..(447): n is a, c, g, or t
  misc_feature (478)..(478): n is a, c, g, or t
  misc_feature (487)..(487): n is a, c, g, or t
  Coding DNA Sequence Number=SeqID_983
aacgagtgatagtgtagcaagcggagcatgatatgagatgacataagaagatgagatagatgtgtgacgccgcgcatatcatagttctagcagctgctcntatgtatgtggtagtagtgatcgctcgacgcacactctctctgctatacatatgattgaaagaagtctggagataagaagagtatcncccgcacgtctctcnctcattattcattacgtcataatcctaacgacgacagggagagaagaccgaaagacagcaactatanttactaacagtaagcaaccatacacctcctcccacacaaccccctnccgcgcgccctcccatctcgtagctccgccggagcggctctctctccctttctcacccaacggcggtagatctgccgctcgccatgtggggggcgnncggcntccgtggggggggggagtatacaaccaaanattacaggtacaggaaacactaccatccatnatgtgagcngcgagcacgcaagtacgcagcacgg

SEQ ID NO: 10763 - DNA, 505 bp, Glycine max
  misc_feature (42)..(42): n is a, c, g, or t
  misc_feature (149)..(149): n is a, c, g, or t
  misc_feature (156)..(156): n is a, c, g, or t
  misc_feature (193)..(193): n is a, c, g, or t
  misc_feature (275)..(275): n is a, c, g, or t
  misc_feature (289)..(289): n is a, c, g, or t
  misc_feature (297)..(297): n is a, c, g, or t
  misc_feature (395)..(395): n is a, c, g, or t
  misc_feature (397)..(397): n is a, c, g, or t
  Coding DNA Sequence Number=SeqID_984
acatactgagatgatcactgtcgatgtgtctatcagagaganatcaatacatccacgacagatcgagacgcatgatcagataatgatattatacgatgctcatggcactctaagagtgtgcgttacgtatctatcaggctagcagctangatactngataatgatgtggtagtgtgatgtgtcgagtgagtgncttgatgatgcgtgactgtacatgagtgtgctctagcagctaggtcctgccattctcgatgctcgtgtgcactagcagtcgngctgcgacgcggangacacganctgcgcgtgtgagaggcgacctcaggccgctcgcgtgacgctgccgccgtcggtcggcctcgcgcgtgctgactccgagacgtcgtctacgcgtcgcngnctcgctgatacgcgcgaggcagcgcactgattcattcgcgcgtagagttacgatggagaagcgtgtaaacgcaggttgcgacgacgacgtatcaccaggtcgagacgt

SEQ ID NO: 10764 - DNA, 587 bp, Glycine max
  misc_feature (95)..(95): n is a, c, g, or t
  misc_feature (122)..(123): n is a, c, g, or t
  misc_feature (125)..(125): n is a, c, g, or t
  misc_feature (138)..(138): n is a, c, g, or t
  misc_feature (203)..(203): n is a, c, g, or t
  misc_feature (292)..(292): n is a, c, g, or t
  misc_feature (309)..(309): n is a, c, g, or t
  misc_feature (327)..(327): n is a, c, g, or t
  misc_feature (372)..(372): n is a, c, g, or t
  misc_feature (478)..(478): n is a, c, g, or t
  misc_feature (523)..(523): n is a, c, g, or t
  misc_feature (540)..(540): n is a, c, g, or t
  Coding DNA Sequence Number=SeqID_985
tatacgtactacgtctgctagctgcctgcactctatccacatatgagctagctactcagacgcgcgactgtaccgatctcagagagagagatgcntacgagatgagaatacacatactgaanntnccatgccacgaanctatctctatacatagtcagcgtacgtattaaacatcaccgctactcgtgtcgagtctctgtatnagcgtgctctcccatcatcacactcgtagcgctcgctctgtctctgtatatgagctatgtgatagagcacgcatgagacgcgatccatngagagatgtacgagtanatacgtggtcgaaaagcnacacacatgagactaactacacgagcggatctaggtcgcgctctnatcttcatgcgcgcgtgtcagctcgcatcctcgaaacagcactgtagagtgatcgcatctacgataacatcgatcctcactgcgtctcagacgagacagtgtgganagtacttctataacatccgcctgtcttatcaaatcagcatcgacngatcagaccatatgcgnttcttcatgcatgactacgacgatatcatgtcctgcgttgacgtcaa

SEQ ID NO: 10765 - DNA, 136 bp, Glycine max
  Coding DNA Sequence Number=SeqID_986
tgggctccccaaggacgcgatggaattgatcaagatagggtgatcgtgcgtaaacactccgaccatcaccatggtcgcgctgctccatacgtgatacaccttgatcatgatcgtgcggagcgcatactggctgtta

SEQ ID NO: 10766 - DNA, 541 bp, Glycine max
  misc_feature (113)..(113): n is a, c, g, or t
  misc_feature (438)..(438): n is a, c, g, or t
  misc_feature (456)..(456): n is a, c, g, or t
  Coding DNA Sequence Number=SeqID_987
taggtcatcatagacgccgacactcgaactatatgaccaacaccacagtcacgatccaccgtcaaccgactgtgcagtagcaagacaccgctcactccacgatcacacagacncacgacgctacaacactcacatccgcagtctcatctctcttgtctattacttgatgaaaacacgacaaatgatgcaaatctatatatactgtctctacggcgattcagtctgtgtcactccttggttgacagcgaacttaatgttagatatcgtatattatactcgttaattctatgccagatagtcatagagatcctcacggcgaagctcatacgatccgcaggcagatcatcctaaataaagcgccccagaccagcatcacgcgcgccatgtcctctctattctcatcatagagatactcctacccaccacaacagtcacgcnagtgggatggcgcttagntgttcagcggcatacggtctagcggtgatcttcgtttactctctataactgcccgcactcaccctattatcatccttacattcac

SEQ ID NO: 10767 - DNA, 501 bp, Glycine max
  misc_feature (47)..(47): n is a, c, g, or t
  misc_feature (116)..(116): n is a, c, g, or t
  misc_feature (144)..(144): n is a, c, g, or t
  misc_feature (174)..(174): n is a, c, g, or t
  misc_feature (181)..(181): n is a, c, g, or t
  misc_feature (210)..(210): n is a, c, g, or t
  misc_feature (225)..(225): n is a, c, g, or t
  misc_feature (229)..(229): n is a, c, g, or t
  misc_feature (232)..(232): n is a, c, g, or t
  misc_feature (240)..(240): n is a, c, g, or t
  misc_feature (245)..(245): n is a, c, g, or t
  misc_feature (261)..(262): n is a, c, g, or t
  misc_feature (267)..(267): n is a, c, g, or t
  misc_feature (272)..(272): n is a, c, g, or t
  misc_feature (277)..(277): n is a, c, g, or t
  misc_feature (302)..(302): n is a, c, g, or t
  misc_feature (305)..(305): n is a, c, g, or t
  misc_feature (312)..(312): n is a, c, g, or t
  misc_feature (317)..(317): n is a, c, g, or t
  misc_feature (329)..(329): n is a, c, g, or t
  misc_feature (334)..(334): n is a, c, g, or t
  misc_feature (346)..(346): n is a, c, g, or t
  misc_feature (351)..(351): n is a, c, g, or t
  misc_feature (372)..(372): n is a, c, g, or t
  misc_feature (374)..(374): n is a, c, g, or t
  misc_feature (453)..(453): n is a, c, g, or t
  Coding DNA Sequence Number=SeqID_988
ccatcagcgcgagagagaggatagtgatacggagtgagacgtactcncacacgcaagtgatataccgctatcgtcatctttttcctgtcttcgtctttcgttcactccttgcgtanttccctgacgttctgcgcctgctctcgngcgccgcgccgacttcgccgaggacgcatnaccagantgcgactgctgatcgtagcgcgacacacncaaacgaaaaacctnctantgnccacatcntccanctctccatactttctnntctangcggngagtngttatgtggcattacgttgttgcgnttnatagagnttagngagttgtgtttnccttncctgctcgtacngcganatactagccgcatcgaccgangncagctgctggcgcgcgcgtcatgctctcctttctttagtgctacacgtaatctatcgtctgcgcgagcagctcccctgnccgcggctgtggctgggagcgccgcgcgccgctggttcattcgcagcg

SEQ ID NO: 10768 - DNA, 574 bp, Glycine max
  misc_feature (26)..(26): n is a, c, g, or t
  misc_feature (213)..(213): n is a, c, g, or t
  misc_feature (432)..(432): n is a, c, g, or t
  misc_feature (511)..(511): n is a, c, g, or t
  Coding DNA Sequence Number=SeqID_989
tgagttgacctaactcaggctgcgcngcgtcgccaacaagcgtggaggcagaagcgactgctgacattcctactcactgtgccgcgatggtccgagcgcgtgggcattcgaagagcgatgcagagacctcttcttttctctatgctatgactatgcgccgccagcgagacgccctgccataactgcaaagcacaggctgcgatctgctgcagngtatgaggtcgtagtatgtctggcgctgcataccgctacatcacgacactgactagctgagattgagagtgctacagatctagtagacgcagtacagagcacgctctgtcagcgcagctatatacattacgcgatgagagggactcgatagtatgtgcaacaggaggaggactcgctcacgagcagcatctaagctcaatcttctgttatagtctacantgcgtcctacgttgtcagaacttacgctagtatgcctccggagtggtgattcccatcataatatgataaggaagacggncacgctcatactcgacgcgcggagccatcacaatctgaatcggcacacaaaacatagtcgctg

SEQ ID NO: 10769 - DNA, 332 bp, Glycine max
  Coding DNA Sequence Number=SeqID_990
taagatagctggtgtaatcgctgatgggttggcttatctacatgatgactgtcatcctcccatagtgctcctggacatcaagccaagcattattcttctagactcctctatggggcctcacatagctgactttggtattgccaaacttttagatcagacttctgcttcaaatacttccatttttgtgccgggtacaattgattatattgcaccaaagaatgcttatacaacaacaaatagtaaggagtctgatgtatacaattacggggtaattttgcttgagctgatcaccagaaagaaagcagcataatcatattcttccttcatggagg

SEQ ID NO: 10770 - DNA, 291 bp, Glycine max
  Coding DNA Sequence Number=SeqID_991
tcatttccccttcttggtttgccatcaatgggtaaggtgggaagagagagttgttccatggaggaaaagcctttttttgttaaggaaatcaacttatacatgtttggggatggggcatctttgatggcaaccggccacgccgcattcatgtcaggctcaatcatggccttggtggatgagagacttatcacttgaggaaccgggctaccctttgggcttatcaacaaccctctcggatggatcctgttccgcgtcttcggactcatctgtgctctctattttgtttacact

SEQ ID NO: 10771 - DNA, 535 bp, Glycine max
  misc_feature (271)..(271): n is a, c, g, or t
  misc_feature (373)..(373): n is a, c, g, or t
  Coding DNA Sequence Number=SeqID_992
gtatggcgacactatcttactatgtggtatgaggagagagcgcggacgtctctctgtgagcacagctcactatgcggtaaatgagcatgccagcagcgttagtgatgccgagctgtcggtggctacgtacgctcggaagcggcgagtcgatcgcatgcgatagatgtatccactacactacacatgtcgcgtcgtgtgctcatgacaacagtagggatgctatctgcgcgctagatcagtgtatgtgttcgatagccatgtggtgcgtgangtgcagacgtgtatgagcggtcggttgatgttgcgaggcgcgcgtgagtgtcggcagcaattgtcctgttatcgatgctagtatatatacgcacgatgtggncgtccaccactaacatgtgtgaatgagtatagtataaagtagagaggcgtaacagcgacatggtacgaggtgacatgtcgcggcatgtgacttgctaactcaatctatatagtggtcgcgtcgcgtgatgactgccttcgatatggcgcgtgtatgcatcat

SEQ ID NO: 10772 - DNA, 497 bp, Glycine max
  misc_feature (396)..(396): n is a, c, g, or t
  Coding DNA Sequence Number=SeqID_993
tcccatatcgatctccgatgtggtttagtgtcgtgtcggactccttgttgcccccgtaagccgtcccgtcaggcctctaacgccaacaacaaagaaaagagcaccagactggtaaaacctattgacgcaaaacaacacaagtcgatataaagcgaaacgtaagacacaacatccataggaaataacactacatctacttcgcaatacttcagtgataggacaagaagcgaaaatacaacatgggaacagataagagaaataattgaaaaatgttaattattattgtccttattgatcttttcatatggatagttttagaatagacaacacgcaacgcacatcttgctctcgctacacccctctcacgcgtcttctttgggataagggcggcgtgtntagtgtgttatgccctgggcgagcaagttagcgcgggggcgtatgactgcggatgttcatcggagttaacaaatgttactatcatctatcaaggaactctt

SEQ ID NO: 10773 - DNA, 573 bp, Glycine max
  misc_feature (131)..(131): n is a, c, g, or t
  misc_feature (159)..(159): n is a, c, g, or t
  misc_feature (203)..(203): n is a, c, g, or t
  misc_feature (252)..(252): n is a, c, g, or t
  misc_feature (315)..(315): n is a, c, g, or t
  misc_feature (412)..(412): n is a, c, g, or t
  misc_feature (420)..(420): n is a, c, g, or t
  misc_feature (458)..(458): n is a, c, g, or t
  misc_feature (477)..(477): n is a, c, g, or t
  misc_feature (508)..(508): n is a, c, g, or t
  Coding DNA Sequence Number=SeqID_994
ggcatcgtgacgacaacactacccatatatcgtgttagatacgatgcatcggatgagacgtaaatccgatacagtgcgactaaccgatctatacagacttcggcatagaatgatggggaacggcgtgcacnagccatccatcgtcatcccacctcgcgntaggcgcctgcgctcttgagaatcggcggatagatggcagcgcntacagcacgtctctataagggacgtcggctggatcgtatgagtcacgtncgtcgagatacgataccgcaagctacatgatcgatatagagacatgacgcagcgtgagtaggnatcacacactgagcgcagatgttctctcgatgatgtctgtgtgacatgcttctctctatggtgtctcttacaccacgcgacatgcatctacgttganctgcatcncgtactctagcgcagcggtaatcgtctaccatcacctncgtcacactacgtgtgagnctcgagagtagagagcgccagagacagtcgntctctcgcatcgctcttcgtagctctagttgtctgctgccacatcgttcatgacttcactctact

SEQ ID NO: 10774 - DNA, 585 bp, Glycine max
  misc_feature (525)..(525): n is a, c, g, or t
  misc_feature (546)..(546): n is a, c, g, or t
  misc_feature (549)..(549): n is a, c, g, or t
  Coding DNA Sequence Number=SeqID_995
gcatggcagcgaaaaccgagtagttatagtgttatagtggatttaattgtacaacaaaagtatgcttcgcaagtcacttataataccttgacgttccagtctcgatataaattatattataagaatggtattcgggatagatgttgacgctcggtatttgtattcagaagaagctgacacaggatagtatagagagagccagcatatctgtgtatttacatatcagatttgtgtagggtgtataatatgtcttgattgatattagcgtatgtacttcatgcctccacatctatgttcctaggaattaagaagacctaggcggccaaagaagaaaaaagtcagaattttgcaactgcggggtagggcgtatgtggtgatagcaatggcgcgagtagctaggtctggaaatagttaagaagtcgttcgtcgcatttccctcgtgtgattcatacactccacgttattatggcgggttcttgatgtctgacatttggcacccaatacaccgcctccgtctctaaggtntagtaagcaaaggtttgagtntgngagatcatctaaatgaagattcattcccctcttcct

SEQ ID NO: 10775 - DNA, 581 bp, Glycine max
  Coding DNA Sequence Number=SeqID_996
ccgtccgaccgagagccaagggagacgtcgccaccggagacccctggcaggctccatctactactagctctccggcatagcggtcaggtctaaggaaaacctgaacgccctccccgctccccgccgcggttaatacaacccccccgttccgcattggctccccacaccgcctacccccggctttaacttgaccgggaaccggggcgcaaacgccaacttccaccgggaaatattgactaggagactccctccagaggcatgacagcggaacgacggactaagtcaagggacgcccaaccccgggtcgagggccacagctcaaaccccggaattctaaacaagggcgaaccttggcaaaaaaggtgtgggactgttacgggaatccctccaacttgcaaaattgctttcccccgagaacaccggaaaaaaaaaaccgtgtccccccccgcgcccacgctccgcttcatcgtccctctcatatgctccaaacgctccttcctaccaccccccattccacttctcacaaacccactcttccctccccccacacacccgctgcacttacccaacacggcgaaact

SEQ ID NO: 10776 - DNA, 340 bp, Glycine max
  misc_feature (186)..(186): n is a, c, g, or t
  Coding DNA Sequence Number=SeqID_997
aagggtgtgctaaatgctcctcctagttggagtcctctcttaatgtgttgtgactttgatcctcgagatctacacgcaattcttaaagaggttatcttattctcgattggattagagtcaacaatactttctctgtatcatccttgattttatgttcaacttaagacccgtaggagggtttttttnagaatttttctttctattttgatagtttgaataggttttatgcatttatcaaaaatatgaatgattcactattcacctggtttctggacatcattatgcaggagagatggccgagtggttcaaggcgtagcattggaactacgtaggctttttg

SEQ ID NO: 10777 - DNA, 329 bp, Glycine max
  misc_feature (29)..(29): n is a, c, g, or t
  misc_feature (31)..(31): n is a, c, g, or t
  misc_feature (74)..(74): n is a, c, g, or t
  misc_feature (90)..(90): n is a, c, g, or t
  misc_feature (125)..(125): n is a, c, g, or t
  misc_feature (127)..(127): n is a, c, g, or t
  misc_feature (172)..(172): n is a, c, g, or t
  misc_feature (180)..(180): n is a, c, g, or t
  misc_feature (183)..(183): n is a, c, g, or t
  misc_feature (188)..(188): n is a, c, g, or t
  misc_feature (211)..(211): n is a, c, g, or t
  misc_feature (219)..(220): n is a, c, g, or t
  misc_feature (222)..(222): n is a, c, g, or t
  misc_feature (225)..(225): n is a, c, g, or t
  misc_feature (233)..(234): n is a, c, g, or t
  misc_feature (236)..(236): n is a, c, g, or t
  misc_feature (240)..(241): n is a, c, g, or t
  misc_feature (244)..(244): n is a, c, g, or t
  misc_feature (248)..(248): n is a, c, g, or t
  misc_feature (258)..(258): n is a, c, g, or t
  misc_feature (266)..(266): n is a, c, g, or t
  misc_feature (269)..(269): n is a, c, g, or t
  misc_feature (288)..(288): n is a, c, g, or t
  misc_feature (294)..(294): n is a, c, g, or t
  misc_feature (296)..(296): n is a, c, g, or t
  misc_feature (301)..(302): n is a, c, g, or t
  Coding DNA Sequence Number=SeqID_998
tcacatcattttcccagtgtatggattgncnacggacagaaactagcgctagctaggctgcatgcagatactgntcttgatcgccgccgncgtggcgttcgtcgctggttacacgacggcgtcgntnacgacgatgatggtgatttacgcgtacaggcgttggtgtcgcgangttgatcncgncgccngactggccattcttcgaccgtcntccactcnngnggntggatccnngngaannggngaancatctctaanccgggagncgntggtagctccaacaacaantcatcnanccagnnccacaatcttcttttggaatctctctt

SEQ ID NO: 10778 - DNA, 560 bp, Glycine max
  Coding DNA Sequence Number=SeqID_999
aaatctctcttccaaattgagtctgactcaagtctcccaatcaccatggcatcaagcgttatggccgcatccctcagtgctatcattgctaatcctcttgatgtattggttgcaagaatgcaaaccatgcatacaagtgctcatagtaaatgcactattcctgccatggccaagaggatttacgccagggaagggcttgctggcttcatgaaaggagttacaggaaccatgtctcattattctatggcagcattgatacttttcccaacgtatcaagcactcaaagatttctacaaccttgattcagatctttaagtctttatatcatccaatgttcttctctctctttttttcattttataacaaaaatctgtctgtataattagagtttttgcaatgtaatataccactttactgtttataactatatataccaaagaggagtgagatactttctcaatgaacatttagcgagtatcatgtttataatatattatattttataatgatacattttttttataaaaggatcttttgttggtttgatcccctttatttca

SEQ ID NO: 10779 - DNA, 445 bp, Glycine max
  misc_feature (120)..(120): n is a, c, g, or t
  misc_feature (180)..(180): n is a, c, g, or t
  misc_feature (215)..(215): n is a, c, g, or t
  misc_feature (268)..(268): n is a, c, g, or t
  misc_feature (278)..(278): n is a, c, g, or t
  misc_feature (331)..(331): n is a, c, g, or t
  misc_feature (355)..(355): n is a, c, g, or t
  Coding DNA Sequence Number=SeqID_1000
gagcacaacaacatacacgaacacgaagtggtagagctccacattatgcgataataagtctattgtgtaggcgcgtcgtgataaggagcggagcgcgcgaatggtggtgttgctggtcanatttcatgccaggcagttcgcccgggcctcctctcagtcgcggtttgtcgttcatagtgncttgctcatttcgtatactactatactccaccgancaatatcacatacatatcgatcgtaagtcatatcgtggtgcgagaaggtgatnacagcacacnagcgagagcatgtttataccgaagctgtggagattctgcgatagagtaaaagnagaccgctccttcagcacttcaantggctccgacccgggggcagacagcgcctccgcgcaccgcgccacgcaggggcatcaggcctgttatgcgtgacatcgtagcgcgtgcgt

SEQ ID NO: 10780 - DNA, 564 bp, Glycine max
  Coding DNA Sequence Number=SeqID_1001
gaagaacttttactatcagactatgatgatgatcccgaaaaccaaaaggtactcaaggacaattcaccattgatagacgcacatattgctgaaactttttgaaaatacaagaagaagactatcgataaataatccttgaagacattgattgaaaacatgaactcgtttatggaagaaatttgctgagaaaaggtacctttggagaagttatgcttggtagatgaacgaaatcaaaacacatgaaatttctcaagactcgaatcaaagaagctaatgtcgaatgaacacggagaatcaagcatgaatcaagagatcaaggcaggtacctactggaaaagttatgcttcgtagttggaagaaatcagttaaactatttgctctatcataaaatatcaagaaggaaaagctccaagaagattttcagaatatatgaagactaattatgatatctctcaagaagatcaatttatcaaggcctgaaatgatatgattgaccaatcaagaatcaaaatcacttatcatattggaacaagtaaaatgcgactatgttacaatttcaggcaa

SEQ ID NO: 10781 - DNA, 456 bp, Glycine max
  misc_feature (58)..(58): n is a, c, g, or t
  misc_feature (246)..(246): n is a, c, g, or t
  Coding DNA Sequence Number=SeqID_1002
gcggttgccgtctgcaatggaaatggtgccaagggggaaatgcttcgcgtcgctcggnggggattacccgccccgagccaccctaaatcttccgtcgccaagcctttaaggaagactacctagttacttcccccccccccccaaattctggccgccccctgagggccccccccttataatttttattcccgttttgggattgtggccccacaaggcggggggggttaaaaaaaaggaaagataccntgtgggcggccacacccccccccccgaaatgaaaaccgtgtgggtgtctcgtttactgaaaagacattcccccgcacgtacggtgggtcaccccgcgcatcaacaccccccccccagccatcgcgcacaattgcacaaaggaagaacacctcgcgtcggggaggagtccccttccccacaccccccgcgataatgttgtgcactctttcc

SEQ ID NO: 10782 - DNA, 229 bp, Glycine max
  Coding DNA Sequence Number=SeqID_1003
gaactgtttgcaggtatgtattagttgtgcagttcttcttttgttttcttctttagaaaaatggtgaagcatatttcaagttgtttaacatttttaaattattaaaattatttatgtaattatgtaaacttcattaacttggatccaaattacttttttaacattcagaaaaaaacgtccgcttaaaatataatataaaaatattaaaagaaacatctcttagaatttt

SEQ ID NO: 10783 - DNA, 569 bp, Glycine max
  misc_feature (523)..(523): n is a, c, g, or t
  Coding DNA Sequence Number=SeqID_1004
atgattcctgttgtttagcgttttatgtcgtgatctaaagctgtgttaagatggtggtggtacattagataacagtttaaatacaactcttgttatgccaccccgatgaaacgcacgggtcgaccgcaagcaacatcgccctctataccgggcggtcaacacaatcataggggtgaggaggggaacgagcgcgagaggagagggcgcagggtggtggtgcttgggagggttatggtgcgtatccattcataccagattagcacagcactaatgacttgtagaatagagagaatgatgaggagatatactgatcgtatgtacgtgacgcatctcagaggattaagatgagattgcatgatgcgatgtgtttggtgcggtgggagttgctaagtattcgttcgctcccgtcgttgactgtctattgtgaggttgtgtggatgatacgcatgtgtatgatggtacgagcagactgtagacaaagatacagagtaagagggagcgcgcggtgggtgaaatgtttacncttctgcgttgtgttgtgagaagtgcgcgcattcgaatattaaagc

SEQ ID NO: 10784 - DNA, 486 bp, Glycine max
  misc_feature (32)..(32): n is a, c, g, or t
  misc_feature (42)..(42): n is a, c, g, or t
  misc_feature (96)..(96): n is a, c, g, or t
  misc_feature (195)..(195): n is a, c, g, or t
  misc_feature (197)..(197): n is a, c, g, or t
  misc_feature (202)..(202): n is a, c, g, or t
  misc_feature (253)..(253): n is a, c, g, or t
  misc_feature (290)..(290): n is a, c, g, or t
  misc_feature (397)..(397): n is a, c, g, or t
  Coding DNA Sequence Number=SeqID_1005
atacaacttcatatatccacacaccacattcnctcttactanatcaatgtccatctctgcccacacaccacccaccatacatctccagaatcattnaacaaccaacactaaagcctctctcgctcaacaccacacctaacccacatcacacctcaaccgtacaaattaacttcgcctccctctcgccccaatgtncnctctnaacacactacaccatccaactctacgcactctttctctccctatacccacncattaatctctccttccattctatactcttaatgacnctccaatattattcacttatatcatctacaatattacctctattagtatattatcatctcatatctaattatgtctctaattattatatttatattattttgtcctnttaatctttataacctttctatctttcgtaccactatatgaatcagtttcctttccttacctttacttatatcttatacttcctatatt

SEQ ID NO: 10785 - DNA, 517 bp, Glycine max
  Coding DNA Sequence Number=SeqID_1006
accttttattgtctgttccatctctctctctttcacatatttcgataaacatggctcgttccctctctagcgttaagttcgtatccgctttcgtctctcaagaactctccaatgcaatcttccgacgtggttttgctgccacgacggcgcaaccgagcggtggaaaaggtggagccgttgtttcggcggtgatgaagaagggaatggaagaatcgaaccagaagctttctgcttggattccagaccccaaaaccggctattacagaccggaaaccggttccaacgagattgatccagctgagctacgagcagctctcttgaacaaaaagcagtgattgattaattgagtaaagaagtctgcttcttctttttttttgattaattattgtaatgttaatttaatgtcttgagacgagatcaggggaagagggttatgatcttgtgcggtgaaccctgttttacgtgcgattctgtaataaaccaatagagaaaccttcttggttgctctattttgtaa

SEQ ID NO: 10786 - DNA, 452 bp, Glycine max
  Coding DNA Sequence Number=SeqID_1007
gaagatgaactcactcgctatccgagtttccaagcttctgagatcctctccgatatctcctcctctaggcaatcaatcccctcttctttcacctaaatcatctgggagtgtagcagtcactgcttggaggtcttggttctcgactggtcccatcgacgaggaagggttggaagaagattttgaagaaaccatctcagaaagacccgccgagcttcagcctcatggtgttgatccccgtaaaggttggggctttcgcggtgtccacagggtaaacttgatctttaatctattattgttttctttgctgaagattgttgttacaatcaaaccttagtcttcaaccctattgaaaaggaaagagtcttgaagaatccaactgtgttctatcaaatcttcattcattcatgacctgagttatcttgttgttgatgtcttttgatttgctcgcacag

SEQ ID NO: 10787 - DNA, 468 bp, Glycine max
  misc_feature (209)..(209): n is a, c, g, or t
  misc_feature (255)..(255): n is a, c, g, or t
  misc_feature (428)..(428): n is a, c, g, or t
  Coding DNA Sequence Number=SeqID_1008
taggtgggcggcttatgactcacaccacacttcgtatactatcgtcacttgtcactcatcctctctctacatccgctcatccacgatcgctatacgccgtgtatcattatggtcatgagcatgatccttagatgacacacaatacacagacaccgtcgaccagacacgatagcggtgcgtgcttctctatcatactctactctatgatngtgttgattatatctcatatataccgatcgcgatgatgctacaatngatgcacgcactcgcacgacatataaatgtccgctcgtgtatatacacgcatattgtggttgagtgaacaacgtgtatgctatgaagaatgagtctctacatatactatcacatattatgtgagtgtcgtctatctcatcacacaagtttctctcggctctatcgtcaaatcnatctctctgagctcagatacacagctcagtgcgacatatt

SEQ ID NO: 10788 - DNA, 275 bp, Glycine max
  misc_feature (43)..(43): n is a, c, g, or t
  misc_feature (67)..(67): n is a, c, g, or t
  misc_feature (93)..(93): n is a, c, g, or t
  misc_feature (97)..(97): n is a, c, g, or t
  misc_feature (118)..(118): n is a, c, g, or t
  misc_feature (223)..(223): n is a, c, g, or t
  Coding DNA Sequence Number=SeqID_1009
ttgtttgtctcctgtttttgtccctgttctttgttgttcggcntgtttgtgttcctttgttgctctnttctgctctccggtgtgggtctgggntggncttcggttgtgtgcttcttcnggttgcctcgttgttgcgctgttttggtccctgttgttggttgtttgtcttgggttctttcctttgttgttcgccccggctgttcggctttgttgcgccggcccncttttttgtgtgggtcccccgcccgccttcgttttgtgcttcttgtttccgg

SEQ ID NO: 10789 - DNA, 522 bp, Glycine max
  misc_feature (145)..(145): n is a, c, g, or t
  misc_feature (225)..(225): n is a, c, g, or t
  misc_feature (460)..(460): n is a, c, g, or t
  Coding DNA Sequence Number=SeqID_1010
tgtcttacctcatctgtctcatatattccatctccctctcatatttcttatcagttacattatctatactatatttaatcaaataaataatcacactccctatctctactcatcttcatatgttcccacactaaacataatctanaaaagaagatacatcttagagagaaatattaattacatgaacactcttctattctacttaactctttataagaatattgntggctacaacccaacaccacaaccaccaacctcctctacatcatacatccacaccaccctccacaccagctatcattaattttcatatatattatactatacaataaataaatacttcttttccatctcttctctcttctttcctcttcatcttctcatacatcctctttatcatatcacaataactactcaattccttatacttctttattttttatattttattttatcttantttatatactaatggggtggggtggtttctcctctcatttccctattattctttatctcttt

SEQ ID NO: 10790 - DNA, 362 bp, Glycine max
  Coding DNA Sequence Number=SeqID_1011
tagagggttgttcttaaactttatggtgaacaaactcttctgagttcgtttgtgaagcattgaatgcacacacaataattagtcagttcctgctgtatttataagtaaggccgaaaattatggttgcatttggacagaaccatgtgctggaaattttacacatatatgaagatctagcacaacattcgaataatcaatcttggaaagtactcctattgatttgacagataaatatttgccccttttggttttgcttcttcctcttacttcttcaggttcagatgtgggttcttcgtctgtaacatgcgattgtccttctactgtatttcagtcaaacggtcttcctacctaagttattgcgt

SEQ ID NO: 10791 - DNA, 396 bp, Glycine max
  misc_feature (238)..(238): n is a, c, g, or t
  misc_feature (293)..(293): n is a, c, g, or t
  Coding DNA Sequence Number=SeqID_1012
gtacaccagatcttgtagcatctccgcgaagcaagaacagcaaagagcaccactacctcgatctgcgtgtatattttttctttttcagtcagtgtatatgcctaattgagtgccgaccatcgagcacggagaacgcgtagaaagcccgccccaagaaataatatgtatgactctcccacgcagcccacgggcgtggcgggcgggcgtgtttgtggtcggtgagcgcgccactgcgggnggtatctggcctaggcgtacgtatagagattgctccacgatacatctctttaccncaatatttgtctacagaagatttatctattaccatcacattatatttatttattattgagtactctcccctcccctccttcttttacggagtgtcgcggccgg

SEQ ID NO: 10792 - DNA, 218 bp, Glycine max
  misc_feature (132)..(132): n is a, c, g, or t
  misc_feature (138)..(138): n is a, c, g, or t
  misc_feature (140)..(140): n is a, c, g, or t
  misc_feature (145)..(145): n is a, c, g, or t
  misc_feature (148)..(148): n is a, c, g, or t
  misc_feature (150)..(150): n is a, c, g, or t
  misc_feature (162)..(162): n is a, c, g, or t
  misc_feature (165)..(165): n is a, c, g, or t
  misc_feature (173)..(173): n is a, c, g, or t
  misc_feature (175)..(175): n is a, c, g, or t
  misc_feature (183)..(183): n is a, c, g, or t
  misc_feature (188)..(188): n is a, c, g, or t
  misc_feature (190)..(190): n is a, c, g, or t
  Coding DNA Sequence Number=SeqID_1013
tctgactgagtgagctatcatgtgcaggtggtgctattatctcctacgttcattccagcgggtcccgccggcaggggcgcatcgctgtgaccgccgacatcctgcggccgaatttgaggaagcggctcttgnattccntnctggnccntnagttctaggcanggntcagagancnctaggatngactngnatatctatgatggaaaggatgattgact

SEQ ID NO: 10793 - DNA, 566 bp, Glycine max
  misc_feature (154)..(154): n is a, c, g, or t
  misc_feature (203)..(203): n is a, c, g, or t
  misc_feature (298)..(298): n is a, c, g, or t
  misc_feature (366)..(366): n is a, c, g, or t
  misc_feature (368)..(368): n is a, c, g, or t
  misc_feature (422)..(422): n is a, c, g, or t
  misc_feature (424)..(424): n is a, c, g, or t
  misc_feature (469)..(469): n is a, c, g, or t
  misc_feature (502)..(502): n is a, c, g, or t
  Coding DNA Sequence Number=SeqID_1014
tcacctcacaccttgttatagtatgcacgctcagcacacgtgacacacgtattgctctcgcactactcatctcaactcgatagaatgctcgcgtcctgccgcgctgtcacacatcatctccacactcgcttcgcgactacacacgacgctatcntgagactcagactacagcgacgtcgtgtgacacggtaatatactgcacntactatctctcatctaatagatatcgcgcgtcctgcgttgtcacgatatttgactgtatacggcaaccgatacgcgactccttcaactatcactncttcctcctctcacatcgacacacacaccgctggcactcgccacgttacccatctgacaccatgtgtnanctcacatctcgtatgcagatgacacacgatatcattactctgcttcacgtatancngagctctcacccagatctacgctaatcgctctctccgtcacgctnactccgctcagactcgtgcgaacgtctcactcntatctcgatctcgtgccgactagccacgctgtccccactgcttataagtatctgctcgtttgtc

SEQ ID NO: 10794 - DNA, 585 bp, Glycine max
  Coding DNA Sequence Number=SeqID_1015
aatgagagctctcgaggctcgacaaacgtatgatcatcctctctcctgtaggaggtccaggtcaacttgtaaccaacgaagccaagaagcgcgagagaaagctggattcttcattgaaaagtgccaattcctatgtccgtctcatttctctgtagatgttttctagctatagctttaagaatgtgcttttatgcttgctttcaatgttgtctcatcttcaagatgattgtctttttcttatcttgaaaagaaagacgggcaaagtcggtacgatcgcgctgagatacggaaagtgagttcgttgacgatctctgttgaaatgaaagaggttttcggcgacatccaactagatgaacatgaaaaaagtagttctagtagcgatgccaccggcaggcaaagcaccacccttctttttcagtctttttaagaatatgagtgtgtttggcaaatcctttccagcctagggggtccaagcatgtcgtatcgacgcgaagcattctattaagagggtagagtaatcgggttgaggtcgatcgtcccggccagaagattgagattcagagctaaagcccattctggtttaga

SEQ ID NO: 10795 - DNA, 463 bp, Glycine max
  Coding DNA Sequence Number=SeqID_1016
gaaaggagggctcacatttttccttttccttttgcttgcgaatctgaatcaaataatcaatcatccatatcttattgctcatgacgtcgctaaagaaaatcacactgaagagtgcggacggtgaggctttcgaggagaaggaagcggagatgctgtagtcgcagacgataaagcacatggtcgaggaccactgtccctacggcgctatccctctgtcgaacgtgactagcaagatccaggcgaacggcatcgagaactgcaagataaacgatgaggacgtgaatccccaagacgaaccctccgaggacgatctcaaggactgggacgttgaattcgccgaggtccatcaggccacgctcttcgatctcatcctggctggctaactactgtgaacatcgagagtctgctgcaccttagatgtgaaactgtacacgacatgatctaggtcaagactccagaggaa

SEQ ID NO: 10796 - DNA, 155 bp, Glycine max
  Coding DNA Sequence Number=SeqID_1017
cccctttgttgttaccgagtgtcatctggcactcgacaaagaaagtcgtcgtcacagcgataaatgatggtgatgaagatttgtcaagtgtgtgctcagtagcactcgacaaagtatattttgccgagtgctcgataaatagctctcggcaaaga

SEQ ID NO: 10797 - DNA, 521 bp, Glycine max
  misc_feature (56)..(56): n is a, c, g, or t
  misc_feature (84)..(84): n is a, c, g, or t
  misc_feature (264)..(264): n is a, c, g, or t
  misc_feature (286)..(286): n is a, c, g, or t
  misc_feature (290)..(290): n is a, c, g, or t
  misc_feature (465)..(465): n is a, c, g, or t
  Coding DNA Sequence Number=SeqID_1018
agtgtgtgcgcacgcgacgtgataagatatgatataagtacgcagcgaagagactngacgatgtcgagacgatgaggagacgancggacgaagatagctgatgtagaggtgagatgcgaagactgtacgcgagagagagtgggtggacggtgtgtgatatggaggaacgacaggacgagagatgtgtgcgatgatatcgtactatgcgatcgcagacgactcgcgagactatcagtagattggatgtgtgatgatatcgcgtgngtagagatctgggacgatcgantaancacggtagataatagcatatgagaacgagatgacacagcacacgactcgctattagacagtagagacaagcaatatagatgcgtgtgctgcgacgatagcgcgagcggatgagaggcgatgacggcgactggtatgtgcgttgtgtgagcgtacacgtatgtagcgcagatagtngcacgtgatgtgtcgagtacacgaccgactcgcgtatcagagctgagctatcaatc

SEQ ID NO: 10798 - DNA, 424 bp, Glycine max
  Coding DNA Sequence Number=SeqID_1019
gacacatacatcaagtaattgcctgtgtttggcttgttgacttgagtctcgcatccgatccttttgatggcatacatgcacgcatgttggtcgatttggcatgtgtgcaacttgagtgctttcatattagatggcccgtccaccagcccacctgccacatatatattagatggggtctgcagactgcagtctctggctagtgttaatttgcatgttctcttccatgtagtggctcttgcttgttggtgttatttggccatttgtaaaccgctagcagtgccaagtccagtaactgatggaatgatgtagtagtagcagtagtggtagtggtggtgctgattaagttgttgtgtttatttggtgaattggatggaacatgtatgtatgaacaccgtgttaatccttgcatggtgtgtacgggtaa

SEQ ID NO: 10799 - DNA, 485 bp, Glycine max
  misc_feature (29)..(30): n is a, c, g, or t
  misc_feature (36)..(36): n is a, c, g, or t
  misc_feature (255)..(255): n is a, c, g, or t
  misc_feature (400)..(400): n is a, c, g, or t
  Coding DNA Sequence Number=SeqID_1020
tcccctcggcatagcgcactatatagatnntctatntctctgcccccactcacccgctagatttctccatctcactatacacaatattctaccactcacggctccgctctgttgcttctatatatgttatacattttcgctgggcgtgaatgacaagtggtatctctgtggtggaatacatagagtaaatctagtctctctctttgtatgtatgtttctctctcttatttgtgtactacctgctcccctgtcttnctcagtgcagacatgacagtagaaccgcgcgctagtgtgtggcgtggcgtgtgggtggaccgactgacatgcagactacaccatcgcctccccctcagcagcgcacacccatggcagccgcctcaaactacatcaatttactaancctgtcatcactccaaatccctctcctcgaacgatacacggcgtagtgatgagctgcttcaacagatagccgtggtcaccatacc

SEQ ID NO: 10800 - DNA, 292 bp, Glycine max
  misc_feature (185)..(185): n is a, c, g, or t
  misc_feature (205)..(205): n is a, c, g, or t
  Coding DNA Sequence Number=SeqID_1021
tagggtacaattttgggccatatccccaatttaggaagccgcgtaataggtttttggcattttcaggaggaagttacatatatatagcttttgttcagaaggaaattttccaagccttggtggtttctgctgtttcagcaggtttttcttccttcttaagcagcagtctcagctggtttttcttnccacttttttctcatcactngtctcgtctgcttgtggttttcctcttccttttttcttcttcaaccactgtctccctctctttgacaacactacttgtttcttcttc

SEQ ID NO: 10801 - DNA, 546 bp, Glycine max
  Coding DNA Sequence Number=SeqID_1022
gcaagatgggagaggttacgatctaggaggtggagaaataagtatgttgtgcgtaggggtggtattcggggtggtggtgtcggtttagtttggtgtgcacgtgggtttagtgaggggagaggggggattggaacgaacaggcggcgcagtgagcggaatgtgagagtgggtacatgggaggagcgggggggggacaaagggggaagcacaaatgtggtgagtggggtggcgtcggccagtgggccctgaatacccgttccaacggggcggctgcggtttggcaaccccgtggcgccagccttcttggccttcggttctcgcgggtgttgaagaagcggggaggaggaggaggagatgaaggtgggggagtgggcggggatgggagtacgagcagaagtgggtagctcgcggcgcgcggcggcgtgtgtgggggaggggtggaggaggaggcggcggtggagggtgtgcagggcgcgccgcgaggaggcgaaggcgaccgccatgatcggcttggggggtcgaatcgagatcgggttcgcagtcggc

SEQ ID NO: 10802 - DNA, 432 bp, Glycine max
  misc_feature (364)..(364): n is a, c, g, or t
  Coding DNA Sequence Number=SeqID_1023
atcggtgttcaagcataagcacaagaacgtaaatatatatacatatactcatacaatatatatacgtttccgtgtttataccacacgcacaatgtcaatcaatctccttatgaccctccacgggacgaccttcctccttctcgttgcctcaagccaagcgttgaagctttctctcggtgacccctgcactgtggcggattatccaaaattatgcagacgcaccattaaaggtcaaacgaatgtgaacgcagcgacggatatggccataaaagagctaatgaagcggaccatgcaagccaaagatatggccaagaaagagccgaaaggcgacggaggagttgcggtttgtttgtccaccttcggnagcgcgtttgacaacttggacaaggcccttaagaatattcaggggaatgatggttttagcctcaacat

SEQ ID NO: 10803 - DNA, 420 bp, Glycine max
  Coding DNA Sequence Number=SeqID_1024
tcctttccaatccacgtccaagtaaaaacagcaaagaaaaaaaaaagatgaacactccaataaaactcacctttctcattctctgcattgccctgaccgcaaccgcattcttagtcccagccaaacgtgccgacgttacaccagaacacgaaaaaaccgtcgcaggaatctgcaacgttgtcgaagacaaaaatctttgtagcataaccttgaaaaccgtcccaagcaatgaccccgccttcttggtccgttacttagccacagccgcagaatcctctgttaaaaagggcttgaacttcctctccgaaatcaaacccaagtacaaaggaaactcattcgccacaaactgcatcactggttgtgagaaacagctaaacaacgccttggaagactttgcagatttctggaaagccgcgggaa

SEQ ID NO: 10804 - DNA, 246 bp, Glycine max
  Coding DNA Sequence Number=SeqID_1025
tatgaccacttgtaactcccttcacccactcagcaacttgtcctaggggagccggacagacccgtgttcccatgaaatgcatcacgtacttgctccattcccagaggcagagggttgtgcttcagaggcaggacgatagcatttcgtgttgaaaagatccctcctccaacaaaaggtgtcccccgtaaagtccgcggcaacggccgttttttggcaagtccaccttcatatttttggtgagagagt

SEQ ID NO: 10805 - DNA, 581 bp, Glycine max
  misc_feature (312)..(312): n is a, c, g, or t
  misc_feature (358)..(358): n is a, c, g, or t
  misc_feature (390)..(390): n is a, c, g, or t
  misc_feature (439)..(439): n is a, c, g, or t
  misc_feature (493)..(493): n is a, c, g, or t
  misc_feature (508)..(508): n is a, c, g, or t
  misc_feature (536)..(536): n is a, c, g, or t
  Coding DNA Sequence Number=SeqID_1026
caagcggcgcagacgaacggaggaaaggagaggaaacaacgggaggacgagaacgcagggaaagaaggaggagagagaacagagcgaaaccagaaacagaccaaaagggacgcacgaaaggcagacaggaaggagaaaagaaacaacggccaaaagagagaaagaggagagaaggcaccaggagcacgagagaaaagagagaggaaaagaaagcgaagaaagaagagagacagaaggacagaagagagcagaaagaaagaggaggacacaggcaggaacagagcgagaagagataaagacagaagaccagcnacggaaagagagagaaagaggagacagagagaagcagacaacgaanagagcacatcgagagcaaaatgagataggagnagaaagtgaaggcagcaacgcacagcgaagcgagacgaagaagaggcgncagaagacagcgaaagcagaggagagaagatctagtgagagacgaaacgatagncaacaggaagcgaangcagagagacaagaagaacagcacagancaacagagagcagagcgagggagactagcgacatgacaagagata

SEQ ID NO: 10806 - DNA, 593 bp, Glycine max
  misc_feature (68)..(68): n is a, c, g, or t
  misc_feature (106)..(106): n is a, c, g, or t
  misc_feature (133)..(133): n is a, c, g, or t
  misc_feature (151)..(152): n is a, c, g, or t
  misc_feature (201)..(201): n is a, c, g, or t
  misc_feature (216)..(216): n is a, c, g, or t
  misc_feature (293)..(293): n is a, c, g, or t
  misc_feature (309)..(309): n is a, c, g, or t
  misc_feature (313)..(313): n is a, c, g, or t
  misc_feature (318)..(318): n is a, c, g, or t
  misc_feature (336)..(336): n is a, c, g, or t
  misc_feature (362)..(362): n is a, c, g, or t
  misc_feature (497)..(497): n is a, c, g, or t
  misc_feature (515)..(515): n is a, c, g, or t
  misc_feature (519)..(519): n is a, c, g, or t
  misc_feature (548)..(548): n is a, c, g, or t
  misc_feature (563)..(564): n is a, c, g, or t
  Coding DNA Sequence Number=SeqID_1027
acgttcgtcgctactatctattacatggacgcgaggatacgatcccgacgagacacgtctacattcanatatatagaagatgcgagcgacacggagaaggacaganagactggctctgacgcatagaagggangagttagtgaggagagannagcatacgcaggatgtgtaggatgatgacacgtccccagcgacacatancaaccaacacgatanaccgtcgtgtacgtctaacaatcagtgctgcagtcactctggtcgaggtctatcgctcgcgtctgcaccgctctcanactacacgcacgatgnctancgtgncagcttcgctaggctatngagcgaggtacatccgagcagtatanatcgatacacagatatcagctctacacgatgactcgtaccatgtatgtagtgtctctgtattacctatctctatcatctactctcactattctctgtagtcaactgtcactactagtctgaacgcgcagcccccnactgcactcgcctcgtcnagcnccgtcgacatgcgcacaccttatcatgantcgacgccagagtgnngagcatacactagtacacatctgcaccta

SEQ ID NO: 10807 - DNA, 528 bp, Glycine max
  misc_feature (128)..(128): n is a, c, g, or t
  misc_feature (285)..(285): n is a, c, g, or t
  misc_feature (308)..(308): n is a, c, g, or t
  Coding DNA Sequence Number=SeqID_1028
agaagcaacgacctcctagcacagttcaccgacccatctacgcaagtcacacttactgcgtccgcctatgcactgtggatactcaagtagtgatcaccactctctcactctactgctcgcacaaggcnatctaatatcggtagagcaggatacaacaaataatactaaataacaggaactgaagaccatgattaactacaagccctgactctatcctaggcgtacagcgcggcgaatgagggaggtggtaagtgataaatgcactcaactagaagacagaggcancgtgtaagaagacaagatcttanccacacactgtagaggacctcggaagaacgcactatattctctagtatgctgttgtcatctactctcacagccactctaagacacactctctctacgcgctgacactgcccctcacgtccccagtgagatcatgacgtcaacagaatgtcactccctcgcctggcgcccgagggggactcctccacctagcttcctagtaccccgtcatatatatcccaa

SEQ ID NO: 10808 - DNA, 437 bp, Glycine max
  Coding DNA Sequence Number=SeqID_1029
ccatcaatcctcaaatccgagctgagaaaagtgagcacttgccgaataacgagccgctcgattcagtcccgtcgacgcccagcctgcaagtcacgaaccgtaagccccaaatcgatcgataagctcgatccagactgatgaatccatcgctctcggtcaagcctcaatcttccaatccgagcccggcgaatcgttcgaaggccgtgcttggactgcccgatgaggcgctatggatcccatcttctttgcaaacgatgatttcgacggagctctagttaccatggcacgacggcgggagcgatgcacagcagacagaagcgagacgacaccggagagatgagctaacaccggaagtgcagttgcagtagcgccattgatgagcccgagcttggcgaagaggatgaagctccacaatggagtcccgacctgaaacggag

SEQ ID NO: 10809 - DNA, 445 bp, Glycine max
  misc_feature (275)..(275): n is a, c, g, or t
  Coding DNA Sequence Number=SeqID_1030
gggtattacacacaacacttcagatatatcatttttataattttattttattttctttgttaaactaggtagtctttatgaattagataataagcataaatgaagctgtctacaaaattcagcttattgacttttgtgaatcaaaatgacctttagcatattttgcttctcgcaatgcattgtattttgttaacaccaactaccagtgccactatgataccctactccctgcggagaggagttaagttacatgtttctgtggaaattgctaagtngaagcctgatatgacaaaaattgaagtaattggtgcatcttttccttcattacagtccatattttctgtttcatgataggtgctgccttctgtgttgctttttgctttccctattttgttgacagatattcaaggccgagttcacatgtccttcgtggttctcttcaagt

SEQ ID NO: 10810 - DNA, 515 bp, Glycine max
  misc_feature (159)..(159): n is a, c, g, or t
  misc_feature (195)..(195): n is a, c, g, or t
  misc_feature (213)..(213): n is a, c, g, or t
  misc_feature (223)..(223): n is a, c, g, or t
  misc_feature (244)..(244): n is a, c, g, or t
  misc_feature (326)..(326): n is a, c, g, or t
  misc_feature (477)..(477): n is a, c, g, or t
  Coding DNA Sequence Number=SeqID_1031
actctctcacacctcatataatatacacacacacacaccacatcctaactcgactgtgtatacacactaacgactccacgacgaccacatcgtgaaccggctctgcacagaacaacgcgtgaatagtgaattaatagatagcgctgaactagctgctcncacagctctcacgatcgcagtcccctctcacagctnctacgactgcgtgtgcgngtgggaacangatcaaagtctaatgtactgngaggataacgactatatatgtgttatagatataatattgagtgcggtcaatatcacatacacacaaagagagtgagcgcgtnaatataacgtgctctctgtctctcattctgaacctatacgactcatatattgataatatgctgcgtcggcgctaactaactaacattaatgtgactctggcgtgtatccgcatgaccaaacgccgctggacgtccgaagacacgaaatctntccgcgtggtagtcggaagtgagaatctaccgagacta

SEQ ID NO: 10811 - DNA, 415 bp, Glycine max
  Coding DNA Sequence Number=SeqID_1032
gcgccgtgcagaagcagctcgatatgctacttcccggcgcgtggctatcggagatcaccgccgagttctaccgggtgccggacgatcgctgacccgctcccgctcaactcaacccaacagtaagcaaagcagagcgaattcgccgatcgcaattcacaaatcaattggtcgccgccattgtgagctctacataatccatccattaattggtcatatagcgtcgggctgatatgaatcccagcattgaactgtagtcgtagcagcaagtgcaagtgatgattgatgactagtcagtgattctctggtagtagcggtggttgtggttcgtatcatcgtcagcggattgggaggacacaatgtggtgtgctcctaagtgcactgtcctccatggtcctctcgggaacatcgttacttt

SEQ ID NO: 10812 - DNA, 116 bp, Glycine max
  Coding DNA Sequence Number=SeqID_1033
atcaggagcagaacgcccaatgccagatattgcacttgtttgtattttcatgacttgtgatttgtgcaacttgataatatttgagcttggaattgtcctacagatatctgcaatac

SEQ ID NO: 10813 - DNA, 526 bp, Glycine max
  misc_feature (114)..(114): n is a, c, g, or t
  misc_feature (293)..(293): n is a, c, g, or t
  misc_feature (485)..(485): n is a, c, g, or t
  misc_feature (489)..(489): n is a, c, g, or t
  Coding DNA Sequence Number=SeqID_1034
ttttataacatctacgagcggcggggcgggctttacagcgcgcgaccgaaacgtactaatatacctcacgacatgtcgtatactatacatcgtgtcagttgttgtgtgtgggtnggccggggcggggtggcgaccgcgccccgccggcgatttgataaagaggggcgcgactatcacacacgatagaacaacattggcgcgtagtgcaaatttataatatgaagagcgcgcgtggatagtgtgataatattaagataatagagcgggatagtacaggggaggaggaagcgcgnagtataatatataaatctatatgggcgctgactcaacacttgcgtggtggtgaaataataggggatacgactgtggtgtggtgcgatatgagaggatagtgtatttctgtgtgtgcgtctgcgtctcgctgtagaggagcgaatataaacttgtctagcgcgtccgggtaacgtatggagggagaaaaatanctgnccggcgcgtcgcgtgcagcgcaacacgaacgcgcaaa

SEQ ID NO: 10814 - DNA, 506 bp, Glycine max
  misc_feature (180)..(183): n is a, c, g, or t
  misc_feature (186)..(186): n is a, c, g, or t
  misc_feature (189)..(190): n is a, c, g, or t
  misc_feature (379)..(379): n is a, c, g, or t
  misc_feature (438)..(438): n is a, c, g, or t
  misc_feature (441)..(441): n is a, c, g, or t
  misc_feature (454)..(454): n is a, c, g, or t
  Coding DNA Sequence Number=SeqID_1035
agaagagatgacacacacctcccttcccctacaatctctacacaacagcaccctcacatcacctttctcccccctcccccggggcgcgcgcaccccacaaccacataaaaagacgaaactatattttgttgggtgcgccgccacatataacagatggggagggagttgcagatcgacgtnnnncgnggnngctccgccgccctcgtcctcctcgtccgctcgcttctcaccgaacaatatacagcgagcacgagacacccttagcgtcaccccgaacacaaccgcaagacagtcgttgcgtcacatccatgtgtgtccgtgcactacataatcccacacccgctctcgcccgcctctctgctctctcagccacatcgcnccaccgctcgagcgccgtgataaaaacacatcaccaccacaaccaacaccggcacacanccnataagactacgcncccatgacgtgatccgcggcgtcgccaatgcgaatctgagcactactgcgcc

SEQ ID NO: 10815 - DNA, 423 bp, Glycine max
  Coding DNA Sequence Number=SeqID_1036
tcggctcgagtcgtcactctcgtgtcgggtcaacgcggtataccatagtcaagatggcatgagagtggtgcgcaaagaggctttatgggaaccacgtcgtcgggcgcgttagggttccggcgacggctgtaccacgagagggttgtggatcactacgacaacccccggaacgttggatcgttagacaagaacgaccctatcgtagggactggtttggtgggggcgcctgcgtgcggccacgtgatgcaacttcatattaatgtgcgcgactgaaccggacatatctttcgttctccgctcaatactgtatgtgtgggctaccccatccgttctttatgttctcttacttattggtggaacggcagctctatggactctcccggggatatgatcattacgtggattgaatatcgtttttgcctt

SEQ ID NO: 10816 - DNA, 507 bp, Glycine max
  misc_feature (101)..(101): n is a, c, g, or t
  misc_feature (137)..(137): n is a, c, g, or t
  misc_feature (349)..(349): n is a, c, g, or t
  misc_feature (391)..(391): n is a, c, g, or t
  Coding DNA Sequence Number=SeqID_1037
aacagacgccgagacgagacgacgccaaggacaggacaaagaagaagaagcgacagagaggaatcgacgaagagagaatacgtacacgagacacgcccgcnccgacggaacagacagaagaaggaggagcaccgagncgacaatacgacgcgcaatcaaagaagcgtacagacacgcacaaagagagcacgatatgaacgagcggagacggacagcacggcagcgtgcaaacaacagcagagacggagcgtaccgtacggagattcacgaggagtcgcgcaccgacgacctgccgaaccacactatcagcaacgacagcgcacggacaagagaggaagaaagcacctgntaatgcgtccgcgcgcagtgaaggggggtatgcgaaaagtanagaggaatacgaccgcacgacgcgaccacgaagaagtcgagaggaatagaagaaacacagagtgcacgagtcgcaccgcacaacgacgcgcaagacggcgacacagagaacgaaca

SEQ ID NO: 10817 - DNA, 263 bp, Glycine max
  misc_feature (38)..(39): n is a, c, g, or t
  misc_feature (41)..(41): n is a, c, g, or t
  misc_feature (43)..(44): n is a, c, g, or t
  misc_feature (46)..(47): n is a, c, g, or t
  misc_feature (50)..(50): n is a, c, g, or t
  misc_feature (52)..(52): n is a, c, g, or t
  Coding DNA Sequence Number=SeqID_1038
atccaaatcgatccgttgaaaagggatatcgagtttgnnancnnanntcnantgctgtggacgcgacggggaacccgatccctacttctgcggtattgactgcgtcggcgaagcacataggtctaagatgtatgccggagaacgttgcgtttctcaaatgcaagaagaacgatccaaaccctgagaaatgtctcgacaagggtcgtgacgtcactcgctgtgtccttggcttgctgaaggatcttcaccagaaatgccaaaag

SEQ ID NO: 10818 - DNA, 446 bp, Glycine max
  misc_feature (280)..(280): n is a, c, g, or t
  Coding DNA Sequence Number=SeqID_1039
attcattctcctaccgaactctcagcctctcacacaactacaacgccgcaaaagagcatcaatcaaaatccagcagatcatcaagaggagcagcaaatccatctccatgggagcagggatgaagcgcgcgagggaggaggagccaaccgtctcgctggcgctgtccctcagcacagactcctcggcgtcgaccacgacgtcggacgactcgggcaccggtgcgcctacgccggcggcgcccgggaagaggacaaggcggaggagagtagtggcgacgtcnggggaaggggacttcgtctgcaagacttgcggccgggccttcgagacgttccaggcgctgggcggccaccggaccagccacctccgcggccgccacgggctggagctcggcgtcggcgttgccagggccatcaaggagcggcaaaggcgcgaggacaggcagcagc

SEQ ID NO: 10819 - DNA, 417 bp, Glycine max
  misc_feature (137)..(137): n is a, c, g, or t
  misc_feature (141)..(141): n is a, c, g, or t
  misc_feature (207)..(207): n is a, c, g, or t
  misc_feature (229)..(230): n is a, c, g, or t
  misc_feature (257)..(257): n is a, c, g, or t
  misc_feature (259)..(260): n is a, c, g, or t
  misc_feature (263)..(263): n is a, c, g, or t
  misc_feature (268)..(268): n is a, c, g, or t
  misc_feature (272)..(272): n is a, c, g, or t
  misc_feature (287)..(288): n is a, c, g, or t
  misc_feature (321)..(325): n is a, c, g, or t
  misc_feature (341)..(341): n is a, c, g, or t
  misc_feature (346)..(346): n is a, c, g, or t
  misc_feature (351)..(351): n is a, c, g, or t
  misc_feature (368)..(369): n is a, c, g, or t
  Coding DNA Sequence Number=SeqID_1040
gttgtagcgacatacacaccctctcttgtgattcaccagatagcgacgctgattataatgataaggatattgtaattgtgaagtgatacatatatcacatatattttatcatcgtccgctgcatttgctctctgttngtgnttgtgtgactttgtagtctctcgtgcgttatatgctgcattttaggtaagtgatagattgagtagnttatcccgacatgatcgatgtnntcttattgttatgtttcattatccctntnntgnctggnttgntggtattatgcgcgnntggtgtccagtatatgtgagatctccgcatacnnnnntcctatgtatgagtgnctagnggttngtggttaaatatatagnnatatcaagacacacgcattcgctgtgttcttcctagcttccccgggtg

SEQ ID NO: 10820 - DNA, 487 bp, Glycine max
  misc_feature (45)..(45): n is a, c, g, or t
  misc_feature (49)..(49): n is a, c, g, or t
  misc_feature (87)..(87): n is a, c, g, or t
  misc_feature (156)..(156): n is a, c, g, or t
  misc_feature (191)..(191): n is a, c, g, or t
  misc_feature (208)..(209): n is a, c, g, or t
  misc_feature (215)..(215): n is a, c, g, or t
  misc_feature (238)..(238): n is a, c, g, or t
  misc_feature (277)..(277): n is a, c, g, or t
  misc_feature (289)..(289): n is a, c, g, or t
  misc_feature (293)..(293): n is a, c, g, or t
  misc_feature (326)..(326): n is a, c, g, or t
  misc_feature (346)..(346): n is a, c, g, or t
  misc_feature (368)..(368): n is a, c, g, or t
  misc_feature (379)..(379): n is a, c, g, or t
  misc_feature (411)..(411): n is a, c, g, or t
  misc_feature (413)..(413): n is a, c, g, or t
  misc_feature (462)..(462): n is a, c, g, or t
  Coding DNA Sequence Number=SeqID_1041
gcgtactcttagtgcggtgctgatagcctaagaatacatcgcggntgtngtatacaacatatatagtcgtggtcatagctctgttgnttatattcgtgatttttgacaatgatggagcggtgtaatagacgcactgaacgagattctatctatagncattccccctctgacatcccgtccgggtgatacgncgtccgctagctatacnnccgagncgagatgaagtcatattattatntgagaacacggtacgcgtatacgtagtagtaacgatatnatgagcgccggnggcngggcgcggaaatgtagccggtatagtttaatanatagtgagcgcggttatttnctagcaacaagggacgacgccngagacgcgagncggatgacgccggcgcatcgacgtcggctatnantacgctcggacattactaacatctacaccagacaccaacgtatatattntatagtcctacgctgatccgcacta

SEQ ID NO: 10821 - DNA, 190 bp, Glycine max
  Coding DNA Sequence Number=SeqID_1042
ggaagcactaggtatcatgtaaccaatttacaccaagatactaaacatgttctgggtattctctctcaggagaggatgtttcttgaaaccaaatatcccaacctgtgggaattcttcatactatatattgtggtgagggggtatacttggaaacatggaacctaagctttcaaactcttaccatattttt

SEQ ID NO: 10822 - DNA, 589 bp, Glycine max
  misc_feature (26)..(26): n is a, c, g, or t
  misc_feature (29)..(29): n is a, c, g, or t
  misc_feature (37)..(37): n is a, c, g, or t
  misc_feature (169)..(169): n is a, c, g, or t
  misc_feature (193)..(193): n is a, c, g, or t
  misc_feature (269)..(269): n is a, c, g, or t
  misc_feature (284)..(284): n is a, c, g, or t
  misc_feature (300)..(300): n is a, c, g, or t
  misc_feature (372)..(374): n is a, c, g, or t
  misc_feature (377)..(377): n is a, c, g, or t
  misc_feature (379)..(380): n is a, c, g, or t
  misc_feature (382)..(382): n is a, c, g, or t
  misc_feature (393)..(393): n is a, c, g, or t
  misc_feature (409)..(409): n is a, c, g, or t
  misc_feature (420)..(420): n is a, c, g, or t
  misc_feature (448)..(449): n is a, c, g, or t
  misc_feature (453)..(453): n is a, c, g, or t
  misc_feature (455)..(455): n is a, c, g, or t
  misc_feature (457)..(457): n is a, c, g, or t
  misc_feature (500)..(501): n is a, c, g, or t
  misc_feature (503)..(504): n is a, c, g, or t
  misc_feature (508)..(510): n is a, c, g, or t
  misc_feature (523)..(523): n is a, c, g, or t
  misc_feature (525)..(525): n is a, c, g, or t
  misc_feature (549)..(550): n is a, c, g, or t
  misc_feature (553)..(553): n is a, c, g, or t
  Coding DNA Sequence Number=SeqID_1043
aaacacacccacactacgcgataatntanaccaaccncgacgcgggccgcaggcgatgtacagattattgcggcgtgaggaggcacatgacacatatacatagcctacgcacaatcatgactcagctgttcgagacgtctaacttcgtgccaactagactcgccgcgcnccgtctgcccccccgcccacctcntccgtcacgcacaccccacggcggcccgacgcacaccgtggacctcgcggcaccgcgtccagctgtatagccacanttctcccactcgctngagagagcacacctcngccgaacacagcctctcgcaccactaccctcaccatcacctcccgcgtccgcgcacgcgcacgctcgaatcnnnacncnnanggaggagagtnagaagaagaataccgnccacacgcgangcgccgtcgcgcgttaacaacatcccannaacncngngtctaaggcgccacgcaccaacaccgcacacatcgcaaaaaannannacannnactcacgtaacgnantagtacttataatcccattataannatncacattaaacaccatattataataagggcgcacggc

SEQ ID NO: 10823 - DNA, 394 bp, Glycine max
  Coding DNA Sequence Number=SeqID_1044
gatcatcatcaatactcgaatgctgaggagtcttcataaccatgctgtgatcaatgaaaatgcgcaaagacaaaccctccctcaatgccgcatgatcacactatgaggctgaattcgtggcaattcaggcttgggaacgtttccatttgcgcattcaccatatcctggcacagcgggtttggcgcaggacctaacccgatgtcctgctatggaccctttccaagcccccggggggggttgacaagggaaaacctacctaatcgaaccaagggctaatgcacggaaaagcccccccccccccaatggacaaacgccacccctttaaagcccttgtttggccatggaaagggagaggaccaaaactaaacctgtggaataccaacattccctcctc

SEQ ID NO: 10824 - DNA, 532 bp, Glycine max
  Coding DNA Sequence Number=SeqID_1045
ttcacaaagaatctcccttcggcgaggagaactctcgacctcccatgtggaaccgaaaacatgcgggcgggggcttccccagctacatcgcgaggaagcgcacaccacgggtatgcgtgggagactatactcttatgagatccaaggagaagcatatgagctaactactaccgcgtcttgtgagtccttaagcattaagcgatgcccaggcggccacgtttatcatatagactctcgttatctacccccactcgcatctgtcctcttataaaaatatagccagtaggcgatgaaatatgagtactctcgtccccttaccacagcaatgttatgagttatgaagttacgctgtgtctactccaggtcagtctagaaaatatcacctaagttcccagtagacaaacacctccttctgctgtaagagagcataggcgcgcatataagtgacgaagcctgctgttgactgcatttcgcaataaagaataaagaaaagataagtcttgatcgattaccgtagcgaccctcgaagagg

SEQ ID NO: 10825 - DNA, 596 bp, Glycine max
  misc_feature (286)..(286): n is a, c, g, or t
  misc_feature (372)..(372): n is a, c, g, or t
  misc_feature (425)..(425): n is a, c, g, or t
  misc_feature (460)..(460): n is a, c, g, or t
  misc_feature (500)..(500): n is a, c, g, or t
  misc_feature (532)..(532): n is a, c, g, or t
  misc_feature (570)..(570): n is a, c, g, or t
  Coding DNA Sequence Number=SeqID_1046
tagataggctctccatgcggagcgcgccgcgccataccggtactagcatgttatggtgtactgtctgagacgtgagaggtatggtgcgcatactaacactccactcacttcgctctctgctcctgtatgtgctccttctgccaacaacacatcatgagcgccatatccattcatactactaggtacctctgggagaaataatatgagaggtactctagctggatgccagcgccgcgcaccccccagctcgcctctctcatcatatcgtgacagcgtgtatctggtnctcttctgttgtagtggagtataagctccctcacatacactgttgttcggctctagaaggagccactgcgaataaggtatagacgnatgagctattaggtgttgtagagagataccgttatgtctattggctggctatntctctgatgcgcgacgccgcattcccgtacttctnactccagtacatctggcgtcatggagtgtatcctctcctntctatcgcacgtgtatgatctcgatgcacaangctacacaccgtgcgtgcgcgctcgtatctgctgtcgnggactatctgctacggtagtgcgcaa

SEQ ID NO: 10826 - DNA, 574 bp, Glycine max
  misc_feature (71)..(71): n is a, c, g, or t
  misc_feature (74)..(74): n is a, c, g, or t
  misc_feature (80)..(80): n is a, c, g, or t
  misc_feature (82)..(82): n is a, c, g, or t
  misc_feature (89)..(89): n is a, c, g, or t
  misc_feature (95)..(95): n is a, c, g, or t
  misc_feature (101)..(101): n is a, c, g, or t
  misc_feature (104)..(104): n is a, c, g, or t
  misc_feature (132)..(132): n is a, c, g, or t
  misc_feature (264)..(264): n is a, c, g, or t
  misc_feature (272)..(272): n is a, c, g, or t
  misc_feature (296)..(296): n is a, c, g, or t
  misc_feature (340)..(340): n is a, c, g, or t
  misc_feature (342)..(342): n is a, c, g, or t
  misc_feature (361)..(361): n is a, c, g, or t
  misc_feature (363)..(363): n is a, c, g, or t
  misc_feature (396)..(396): n is a, c, g, or t
  misc_feature (403)..(403): n is a, c, g, or t
  misc_feature (405)..(405): n is a, c, g, or t
  misc_feature (408)..(408): n is a, c, g, or t
  misc_feature (410)..(410): n is a, c, g, or t
  misc_feature (412)..(412): n is a, c, g, or t
  misc_feature (431)..(431): n is a, c, g, or t
  misc_feature (445)..(445): n is a, c, g, or t
  misc_feature (459)..(459): n is a, c, g, or t
  misc_feature (476)..(476): n is a, c, g, or t
  misc_feature (493)..(493): n is a, c, g, or t
  misc_feature (497)..(497): n is a, c, g, or t
  misc_feature (500)..(500): n is a, c, g, or t
  misc_feature (543)..(543): n is a, c, g, or t
  Coding DNA Sequence Number=SeqID_1047
taaaaaaccaacacccaggcacagtcacgttctggagtggggtgaagttgtattgatgttatgcggggaanaanccccgnangaggacncacaanacgaancanaaatctccgcaagaatgatacctttgantgcgtacactcaatatggaatcggacacgtgaagggaaaaagagaggagtcagtgatatactaaaacattgcactctgtgcgcatgtatacgagctcatagtggaatctgcccgatcgctatcaaccaactntagtgcantgagaaccacacccctcttgaganagtcgcgcggcagctatctctgcccacaatataaagcgacgtgngngtggaccgtacaccatatnanatatgtcgggtcgtcacggcgtggagatatagnatcgtcncntgntngngtgtcgggtcactccgcgnaagacgtctacgtnacccacagcgacgncgacatctatacgtagngtcacgcgaccgacgcntgancgnccaccgcgaccacgacggcaaaagtaccagtaaatagaccacnttgatagcggctagctcgtcgattatcagca

SEQ ID NO: 10827 - DNA, 436 bp, Glycine max
  Coding DNA Sequence Number=SeqID_1048
gtcccaatcacaaaatcagtcccaaatatggaattagaggatcttcagtcggctttagataaagatgatcgtactgtaacaaatgactttacctctaacaatatcagcagtaatgataaaatagacgccatctacttaccctatgattttattactccctctcaaaaccatgcgatccctgctgctgatgaacttagacttcgtactattgctggtgaaatgatcaccgaagctggctattcccttcgtcttccttggtatgctaccatcaccgctcaagccatcttccaacgcttctattatagagtttcatttgttgattatgatattaaagaaagtataatggcttgtctctttatagccacaaaaatcgaagaagctccaagaaaactcagagatattgtcacagtctgctatcatgtattcaaggtcaagg

SEQ ID NO: 10828 - DNA, 317 bp, Glycine max
  Coding DNA Sequence Number=SeqID_1049
gattacaacggtggaggctcggacatggatctgctcatgctctcaacgggaatactggatgttctcgaagctttgccatacacacgtgctacttttggcacttgcgtgggctccagtttgtgtcaatgcaatttgcatctgtcagcggattatggcgagcttggttattggcctacagggtgctccaccgatggtgaaaatacctcacaggatgatgttggatattattctgcaaactttgggcctaccggtggctgagtatcgaagcaaaatgtgacagtggcatgatgtggatgactataatttccatacaccaa

SEQ ID NO: 10829 - DNA, 289 bp, Glycine max
  Coding DNA Sequence Number=SeqID_1050
gcttcccttactttttaggcatgacttcaatcatataagtgtttaggctgtaactgggttggtgcacacatcaatagctcacctaagtatgtcttaaaaggttttcaggttgttaatatcagtggggatactcaagagcctactagtacttcgtcataccattgcaatattatgaggcacatacccctagattcaattgatccatccttagctattggattttactgccgagacaaagatgattttcgatgatttactgctcaccaagcttgcaaagctcgcagaagaa

SEQ ID NO: 10830 - DNA, 312 bp, Glycine max
  misc_feature (95)..(96): n is a, c, g, or t
  misc_feature (177)..(177): n is a, c, g, or t
  misc_feature (221)..(221): n is a, c, g, or t
  Coding DNA Sequence Number=SeqID_1051
agattttcagatctcggcgtttcttccaagttgactcagtgggagtcctcctccttagtcggtgtgactttcggcggagattggtaggtttctcnngttctccggaagcatcgttttcatcctgggccctacatcccagcgccggcgatggatctccggtctcgtccggtgtttgcngttccggttatcgttgctgtcatcgggtccgctttcagtgtatnttggcgttggagcgagtatcgagtccggtggtggcggtttgtttacatccgccgcctaccacattgaagctgtgcctttccacttcaatgt

SEQ ID NO: 10831 - DNA, 457 bp, Glycine max
  Coding DNA Sequence Number=SeqID_1052
gatcgatgaagaccacaatgcgcgtgttgccgactttggtctatctataatgggccctgtagatagcggcacaccactctcagagctgccggcagggacacttgggtaccttgaccctgagtactaccgtctccactacttgacgacaaagtcggatgtctacagctttggagttgttcttctagaaatcctaagtggcaggaaagccattgacatgcagcttgaggagggcaatattgttgaatgggcagccccgttgatcaaagctggggacatttctggcatccttgatccagctttgtctcctccctctgacctggaggctctgaagaagattgcagctgtggcatgcaagtgtgtgagaatgcgaggcaaagaccggccttccatggacaaggtgacaacatctctagagcgcgcacttgcgctgctgatgggcagcccatgcctggagcaa

SEQ ID NO: 10832 - DNA, 577 bp, Glycine max
  Coding DNA Sequence Number=SeqID_1053
ggccagatgaaatgaaaccaacttatttcctgtagatcctgcttgtgatgtggcacttgccatcaaagccgtagcctccaattctccaattgtacccacagagccctccttacttcctcgtaataaacttatccagtgatcctttttcgcgggagagttgtcacttgtgtagagatgtattgggggaatgtctattgttcatgccattgcttgcattttctacaattctatttatgaagtagcaaatttttctattgagcttcccagttataactttgacatcaatgtccatttggcctcccatatctagttagtaaagatctcaaatattacatttctctggttaagacagactccatttgaacctatcctgaaggagacactctgtattaacccttcgattccctaagttctggttttctttgatttcactgcatataagttttgttaagtaagttgtgttccttacttggtgcattttcaactgtgtagaatttaatatgatgtaatttgcttgtttgtacatccatattttgttatgcccttggttctatgaaatcttgcattaacttctttt

SEQ ID NO: 10833 - DNA, 546 bp, Glycine max
  Coding DNA Sequence Number=SeqID_1054
ctattcttactcaaaatggatcctgaattacaaggcgaccaaaacaaagaattcaagccttcttatgatgttgaagtcacaagagaggaagctcctgaattaagagaaactcatcaagattttagccaattggcaaaagaagaagctgaatttgacaagcaagacatgcaagaaggaggcttcgaaaatgattatgcctcaacaggggaacatttgactaaatcaggagaacctgataagagattcaaggaaaatcaatctggagaatcatatcaagaacaaaaccaaggacaatccagaggaaataatcaaagtgataacagaaactatgatagaaatgagcaagataacaggaataatcaacaaagtgagcatttaactaaagctggagaacctgatatgagatttaaagagaaccaagaagcttatggacaatcataaagacgtttttgaaagtgttttatgcctttattttgatagtactagattattcatatagtaaaataaacagaagatatatacatatgttactctgtgttttgtaga

SEQ ID NO: 10834 - DNA, 596 bp, Glycine max
  misc_feature (78)..(78): n is a, c, g, or t
  misc_feature (80)..(80): n is a, c, g, or t
  misc_feature (86)..(86): n is a, c, g, or t
  misc_feature (92)..(92): n is a, c, g, or t
  misc_feature (143)..(143): n is a, c, g, or t
  misc_feature (163)..(163): n is a, c, g, or t
  misc_feature (201)..(201): n is a, c, g, or t
  misc_feature (275)..(275): n is a, c, g, or t
  misc_feature (299)..(299): n is a, c, g, or t
  misc_feature (393)..(393): n is a, c, g, or t
  misc_feature (410)..(410): n is a, c, g, or t
  misc_feature (412)..(412): n is a, c, g, or t
  misc_feature (414)..(414): n is a, c, g, or t
  misc_feature (416)..(416): n is a, c, g, or t
  misc_feature (425)..(425): n is a, c, g, or t
  misc_feature (435)..(435): n is a, c, g, or t
  misc_feature (442)..(442): n is a, c, g, or t
  misc_feature (454)..(454): n is a, c, g, or t
  misc_feature (475)..(475): n is a, c, g, or t
  misc_feature (540)..(540): n is a, c, g, or t
  misc_feature (555)..(555): n is a, c, g, or t
  Coding DNA Sequence Number=SeqID_1055
catctgatccacgtagagtgaagatactgcacgttgataggacggggtatcagagacgagatgagtaaagtagacaananccaccncgcacntcatccgcactccgctgtgcacgagtgatcgactgatcctctacatcctcnccacatactcactcactgcnatgactctcatgcgtagtgagtgctagagtatgttagntgttcctacgacgcgacagtcgtaccctatacgtaatactctgtactcgatcgcgtctctcgtgtcacgtcganttgatagctcagtcatcgcgttcncgctgcgtacgtgactcgtagatacgacatctatacacatcactagacatctatgtgacgcatagtatcatgtcatgactcgtcgatcgtcttnctacgcgatgactgacncntncncatctcgcntagctattcntgacgtnctcgtagcatangctatagacgtgtatcgtgtngacagtgctgatgtagctagcggtcgctgatgagcacggcaagcaccgtgatgtctcgtcatgtngctactcactctccnattctcgtctctcgtagtgaagctagcactgtacgcaacag

SEQ ID NO: 10835 - DNA, 427 bp, Glycine max
  Coding DNA Sequence Number=SeqID_1056
aagaccgatcgcagtcaaaggacaggttgtcattcgtccaatgatgtacattgctctcacttatgaccatcgtttggttgatggacgagaagctgttatgttcctacgcaaaattaaagcagccgtcgaagatccacgaatcgttttagctggtctctaagccaattttctcgtcttattttctttttctttcgattgtgtcaaacagctggaaatcaatacacacattcatatccaaaatgtggcttcttcccacgataacataaacacaaaaaacagcaacaacaacaaaaatgaataacgcgtcgttttagaaatattaaatcaaattgcaccaggacaacaaacgaatacaactctcattatagaggcgaatttggattgtaaaacatctactcactttcattgtttgcgtaatattcggaaa

SEQ ID NO: 10836 - DNA, 572 bp, Glycine max
  misc_feature (45)..(45): n is a, c, g, or t
  misc_feature (74)..(74): n is a, c, g, or t
  misc_feature (234)..(234): n is a, c, g, or t
  misc_feature (380)..(380): n is a, c, g, or t
  misc_feature (385)..(385): n is a, c, g, or t
  misc_feature (417)..(417): n is a, c, g, or t
  misc_feature (420)..(420): n is a, c, g, or t
  misc_feature (462)..(462): n is a, c, g, or t
  misc_feature (502)..(502): n is a, c, g, or t
  misc_feature (510)..(510): n is a, c, g, or t
  misc_feature (512)..(512): n is a, c, g, or t
  misc_feature (518)..(520): n is a, c, g, or t
  misc_feature (534)..(534): n is a, c, g, or t
  Coding DNA Sequence Number=SeqID_1057
cgcagctacgcggtgagtgggtggagggcagcgagagcgtgatgnagagaggagagtggaacgcgagcgaaganagagaggagtgtgggagagacagacggcaggccgcggacgtcagtgggagataggtggtggttgtccaacgaggaggaggaacgtacagaacgcattggctgtggaggtgtgtgggtgagaatcgatgtttgcgacgtgttagtacgttagtggtttgtnggggtgactgtgaggcgattatgggttagtgttattgtggcatggcactagatggttgtgtagacatacagattacacatacttaggcgtgtgcacagagagatatagttgtagtgttgcgcgtgtgctgatgggtggtgcgtagnatagnatgcagggcgctaactatgtcgttgagagggnggnttatatttgtagatggtgtgtgggagcgctgagtcgagcgangaagaactcgtgttggagaggtgggggaccgatacccccncaccatcncnccctcnnnggaggagaagggangttgtgtgtgtgtgctttgtcgttgttggagcggtgta

SEQ ID NO: 10837 - DNA, 340 bp, Glycine max
  Coding DNA Sequence Number=SeqID_1058
gctccttcaaggtttctagtgatcttccaatttcgctccttcaacactccggacccaatgcttgttagtggcccgtctcctggcgttcaaccattctctcctctcctcgctcctatgaattagcacggaatttcggttctcgagttcccaggggatcccccgtaaccctttttttttttcttttttgtttttgccccccgctgggcaaggctcaaggcccccgttacgggtaatgccaagttgaagcccggaccaattgttggagtgtcgcgccaaaccccccggtttcttttaaaagggccctgttgccaggccacgttgccgaaatgctctggcccct

SEQ ID NO: 10838 - DNA, 493 bp, Glycine max
  Coding DNA Sequence Number=SeqID_1059
aacgtttggccaaagtaccagcagcaaacaataaggattataacactacgtccgtgtatgaatcgccaaaattgcgatacgcaaacaattactcgaatcagccatctgatgaatatgagaataatgatgttgaattgtatttggattcgaatagtcgtagcagcggcgaattggccgacacggaattggaattgaatcagcaaaggcgttattcacggcattttacgctgtcgcccgaaacaacggattacgattcaaattgtggtgatttagatagtttatcaaatgatttgaatggttgcattggcatgaacagccattgcctatccggatcgggtttgaatagttccaatgcgattataccagactattcgcgactgtacacaagcatgccagtgcttgaagatggtttgtctagtggccatgcatctgacacggagaataacaatccagttccatattcgttgaatagtgtatcagcagtggcagcagt

SEQ ID NO: 10839 - DNA, 403 bp, Glycine max
  misc_feature (105)..(105): n is a, c, g, or t
  Coding DNA Sequence Number=SeqID_1060
atccagccactgtgttcaagctaaggagagtcgccatgggaagaagaccggctaggtgttaccgtcagatcaagggcaagccctaccctaaatcacgctactgcngtggtgtcccggatcccaaaataaggatctacgatgtcgggatgaagaagaaaggtgtcgacgagttccctttctgcgtgcacttggtctcgtgggagaaggagaacgtctccagcgaagcgctcgaagctgcgcgtatcgcttgcaacaagtacatggtgaagtccgcggggaaagatgcttttcatttgaggattagggttcacccgttccatgttctgaggatcaacaagatgctttcgtgtgccggagctgataggctccagactggtatgagaggcgctttcggaaaggcttt

SEQ ID NO: 10840 - DNA, 555 bp, Glycine max
  Coding DNA Sequence Number=SeqID_1061
ttcgtcccaataaagttctcaaaagtgcaaactagtttatcactaagagaaccaattaatggagaaaatgagagtggtactaattactctattgttgtttataggtggagaagttgcagaaaaagtaggtaatggcaaagttgccaataatcctgaagaagatgctagtgatggcgaagccattaatcttgtagaagaagctgatggtattggagatgccgttactcctgcagaaggcaaagccactaatcttcaagcgtatgagtaagctagatgctgagaggttgtgtcaccttgcaattcacctggggctcagagatgcattggaaatgaggcgttgcatcagcgggagaggaggcgtggaatgaacgggcctcgtgctacgacatgttgcatttttgattctatgaggaaatgcttgggagactctgaaggcagacttgtatagacgcaccgagctcccatgtcggctattggcttcctcacaggaatgttccaaatcctcagtaagactgtaaaatgcagaattgtcttcgaaaccgacgctcgtgttaa

SEQ ID NO: 10841 - DNA, 295 bp, Glycine max
  Coding DNA Sequence Number=SeqID_1062
aaaagatccccctatattgaagagccctttagctcttttggaaacatatcttggcggccttaaatatatgccggggttccctgatattgtaataatcgtcgacccccaaaaaaaatatccggcttttcgaaaatgtataactttggaaattccccccatttgtttaatcgatccaaattgtgccccggccctccccgatatttcaattcccgctaatgatgatgctataccccccattcgattaatttttaccaaattagtttttcccatttgtgagggccgttccccccatata

SEQ ID NO: 10842 - DNA, 426 bp, Glycine max
  Coding DNA Sequence Number=SeqID_1063
ggctttaacgaatccattcgcctactcccccttatctcgattcagctcgtcacacttctcacggtcctgtaaacccacaacatctcaagggatccgcgtcaacctcctaactccatctttcctcataactccgctaccatctgttctcctcccaaataacaccctacccctccaccctccactctcctcttcgcaccctccggccccgaacctcccctattctttatcttcacaccgtggactcactaattcgtcgcgccgctacacacacaaccttctttctcgcacccctctttacacggttatggtccactttttcctaccacatctgccagacgaatctcatctagccccacatacccctgctttttcgggtacacacaatccgccaactatcgccttcaacacaatactctcctaccaaaa

SEQ ID NO: 10843 - DNA, 492 bp, Glycine max
  misc_feature (29)..(29): n is a, c, g, or t
  misc_feature (52)..(52): n is a, c, g, or t
  misc_feature (111)..(111): n is a, c, g, or t
  misc_feature (133)..(133): n is a, c, g, or t
  misc_feature (191)..(191): n is a, c, g, or t
  misc_feature (198)..(198): n is a, c, g, or t
  misc_feature (202)..(202): n is a, c, g, or t
  misc_feature (204)..(204): n is a, c, g, or t
  misc_feature (226)..(226): n is a, c, g, or t
  misc_feature (239)..(239): n is a, c, g, or t
  misc_feature (250)..(250): n is a, c, g, or t
  misc_feature (288)..(288): n is a, c, g, or t
  misc_feature (355)..(355): n is a, c, g, or t
  misc_feature (369)..(369): n is a, c, g, or t
  misc_feature (374)..(374): n is a, c, g, or t
  misc_feature (399)..(399): n is a, c, g, or t
  misc_feature (415)..(415): n is a, c, g, or t
  misc_feature (422)..(422): n is a, c, g, or t
  misc_feature (437)..(437): n is a, c, g, or t
  misc_feature (448)..(448): n is a, c, g, or t
  misc_feature (450)..(450): n is a, c, g, or t
  Coding DNA Sequence Number=SeqID_1064
tgagtaacacgcagcgcctgactgtgtgngagactgctacaccacatcgatntacaccactgcgcgcagcgactagatgacgtgagaatctgtgtcgttctgaccagagtntgtagttgtgtgtgtgatgtcngcatgggtatctatagacagtgacacctccacgcgctcacatgggagtgtagcagctnatttaanatcntnactgcgtctacatgccgcagangagtactgacgcngagacgagatngctcgacgagatcgagactatgtggcattcttatcggncgctgatgcagtggcgacgcgcgcgtgacgtgcatgtcggctgctgactatgtcactcggtcgcgcngagagcatcagctnctgtnatgcgtgcgacgatgcgctgccgcnacggtacgactgcagnaggatgngattgcactgatgtngtgggtacgcnantgtgacaactgatgcagccgtgcactgtagtcacatgattga

SEQ ID NO: 10844 - DNA, 542 bp, Glycine max
  misc_feature (129)..(129): n is a, c, g, or t
  misc_feature (242)..(242): n is a, c, g, or t
  misc_feature (290)..(290): n is a, c, g, or t
  misc_feature (324)..(324): n is a, c, g, or t
  misc_feature (337)..(337): n is a, c, g, or t
  misc_feature (410)..(410): n is a, c, g, or t
  misc_feature (413)..(413): n is a, c, g, or t
  misc_feature (423)..(423): n is a, c, g, or t
  misc_feature (437)..(437): n is a, c, g, or t
  Coding DNA Sequence Number=SeqID_1065
atctcgctacacatcaactatatcgttcgacatcatacatgcttcgatgtctactgaatcagagcgcacgcgatacagcactacgccgcacgcgatcgacgttacacgcagtagcactcacatcgaganatcgcacgacatccaccatcacgttctatctcgctagaatgtcatatcgcctacgctcacacactcactactcacatactaccacatcacactctctacaatctggtgatgtntactgactctgcactgctattcattcgtaccgacgtctatatcttcantgtctgcgcgcacacatcatgaccatcgcctctntactcacaccatncttcatctacatgcctcatcgatcactacttggctatcgtaactccctgtcgtcgctcgcgactcattccgcntcnttctcagcgntcattacgccgacntctctactgtgatctagtagcggatacaactctgcacccactatgcatcgcgacgtcaatctcccgtataatcagcgcgttctctactactacatcacttttcat

SEQ ID NO: 10845 - DNA, 256 bp, Glycine max
  misc_feature (198)..(198): n is a, c, g, or t
  Coding DNA Sequence Number=SeqID_1066
aaaaatccacgaatgcaaacagcattaactctccccaagggtcatttcctcttcaccagtgaagccgtcaccaacggtcaccccgacaagctctgtgactacatttctgactccgttctcgatgcctgtctccaacaggaccctgattccaaagtcgcctgcgaatccgcagctaagtccaacatggtcatggtcttnggtgagattacctccaaagccgagctcaactatgaacaaatcgttcgtgaagcgatca

SEQ ID NO: 10846 - DNA, 468 bp, Glycine max
  Coding DNA Sequence Number=SeqID_1067
aagcgtcagggcaggttgtaagcacgtccttggatggggtggccaacacttactgcatggccgatcgatcgttattacccttgacattagtttttttttcccctgatgccctttttttcggggggtgacatagtgtctaggggggaggacaagggggcctggttttcttcgggagggaatcatattttgcacttaggttgtttttagttttgcactcggttgttcgtattttttcaggtggaatcacattttttttagagtactataattgctaatattaattcgtaaaggtaacgttagtttgacacgaagcacgcattcggtttaagcataccaatccttgtgtttagacaaatgcctctgtcgttagaaaagtcattgtctcacataagccgagtggccgtcatatggtgtcagaggaacagaggaatagaataaaatcagacgcgtaaacataatattccagtg

SEQ ID NO: 10847 - DNA, 505 bp, Glycine max
  misc_feature (165)..(165): n is a, c, g, or t
  misc_feature (418)..(418): n is a, c, g, or t
  Coding DNA Sequence Number=SeqID_1068
gtaagctagaccactacacgtacagcgattacctgcgcgctgcgcaggtatccacaatgacgcaccgaacgtaccaacacgaggaaggtgatgccggcgcaggagggagaagcagcacaaacacgacagacggcagaggaggaggaggtggaaggtagagtatanttatgcgcagtctcccgtcactctagctgcgtgttttcccttctctcgctttcctttgggttgtatgcgtgcggcgcgcttcgcgcatcttctctctcgccccccaccgacggctcctactgatgtcctctcggcctttctcctcgttatgatcgccatcactctcttgattgtctggctacgcgcgttcagctctggtgtagtaaagatcaacaccaccgcgctgatacaaaaaaaaatttatgcgtgttgntcgccgcgctatggagaggaaaaggagccgcccgcccgcttttgtggctcttaccatacgctcccgttgttctatctgtcatcttga

SEQ ID NO: 10848 - DNA, 581 bp, Glycine max
  misc_feature (157)..(157): n is a, c, g, or t
  misc_feature (168)..(168): n is a, c, g, or t
  misc_feature (174)..(174): n is a, c, g, or t
  misc_feature (176)..(176): n is a, c, g, or t
  misc_feature (192)..(192): n is a, c, g, or t
  misc_feature (271)..(271): n is a, c, g, or t
  misc_feature (301)..(301): n is a, c, g, or t
  misc_feature (303)..(303): n is a, c, g, or t
  misc_feature (305)..(305): n is a, c, g, or t
  misc_feature (309)..(309): n is a, c, g, or t
  misc_feature (386)..(387): n is a, c, g, or t
  misc_feature (497)..(497): n is a, c, g, or t
  misc_feature (501)..(501): n is a, c, g, or t
  misc_feature (523)..(523): n is a, c, g, or t
  Coding DNA Sequence Number=SeqID_1069
acgcccatcaggagacgcagaacggtgtactgcatgtgagatagtcgcacatagatacgcggcgcgcggcacagactgcgacgaaaatgacgcacgttgatgcggagcgacagagcgcgctagacaggagtacctcagcggcgagacagtatgctgnggtgtaccgtnataatngntgactagagtgcgcangtataggtatcgtgcgcacgcattaatagctgacaagatgtgagcggcgacgcgtttggtgcaggcacacacgatgtangagagactgctcattacacgcacaccgatnangntgantaccacacgacctacagtacgaatagtattggtgagatctcgagaatctgagacactacatgactcgtgatccgatnnatgactaatgatcacatagctgtatgatttataatatgtgttgagtgtcacgtgtatcgacgtaagagttacgagtagctacagctgagtacatacatagctacgccgcngaanactatgaatcagtgcgtgattngtagtgtcgatatgagacatgtagcatttgcgcaccagcgtttcgtttgcagtgtcac

SEQ ID NO: 10849 - DNA, 539 bp, Glycine max
  misc_feature (74)..(74): n is a, c, g, or t
  misc_feature (95)..(95): n is a, c, g, or t
  Coding DNA Sequence Number=SeqID_1070
tctggtcgatcggtatttgcctctacgagttcatgtgtggaagtcttccgtttggagaagattcagaagatccncaagaaatttgcgaagaaatnttaacaaaaccagtgaaattcacttcatactgtcgagacaagaaggctagaagaatgatgaaccaattaattaatagagttcctgaagtaaggctgggaagctcctttgcttctttgaaggcccatccatggtttgaagacttcgactgggataaactcatggataaagagttgaaagcaccctatcctccacctaaacagagaatgatttcggacgaagaaataaagaagatgttggctgtcaataaaaaagtcattgatgagataaaggaggaacaaaagaatgccaaaaagtatcgcaaggaacaggcagcagatcctaattgggataaaaatttttgagaaagttattttgttctatacttatggtaaatttttaatgcctttaaataatagttttcttagtaagtattaaagtttcataatagccttaactcgcgaaaa

SEQ ID NO: 10850 - DNA, 586 bp, Glycine max
  Coding DNA Sequence Number=SeqID_1071
gcatgctgtggctcgccatcgaggtttaccgtcgccgcgagggcacggttgccaaccgcgccacgcggcggctgttcgcgttctcgatcctttatctgttcgcgctgttcgccgtcctccttgccgaggtcgtggtccgcgcgatcctgcctgccttcatcggatagggacgccggggggcgagatgggggcacacgggacagcaatggacgacaagaacgaaccagacggcatcgtcctcaccgaggcgcaactcaagagccgccgccagcgttcgatcgcgattgcgctcgcgctcggcgtcatggtggtgctgttcttcgccgtcaccctggtgaaggggccggccgtgctggtgcgaccgctgtgagcgagatggcgaaccagggtgtgcagcaggctccgcaaggcgagggtgccaaggtcacgcgccgcatgctgacccgcgacgccctggtggcgtcgatctgcggcttcgtcgtggtgctgatggtcggcgcgtcctacgcggccgtgccgttctacaactggttctgccgcaccaccggcttcaacggcagcaaacaggtcgcgacgtcggcgcctt

SEQ ID NO: 10851 - DNA, 170 bp, Glycine max
  misc_feature (72)..(76): n is a, c, g, or t
  Coding DNA Sequence Number=SeqID_1072
atataccggtgccttggtgatagttaaacaggtgccgtggaacaatgtctgtttaccaaagcaatatttccnnnnntaaggttgatcttaagcaggctcaatacaaggacatagataagcgatactttgaccaacttatccagcttaagacaactgaaatggccaacagg

SEQ ID NO: 10852 - DNA, 581 bp, Glycine max
  misc_feature (396)..(396): n is a, c, g, or t
  misc_feature (505)..(505): n is a, c, g, or t
  Coding DNA Sequence Number=SeqID_1073
gaaagggaaccgaaccagcgcagccagactacacacatcagcacatggagtacaacatgagaggagaccgaagcaagacaaccgcacgcgcacagaggagagatggcgagaggcgaacgctcctggcgagaaagagaaaagagccgaagcagacgacgagcgaatcagagacaacgaaattacagaccaacagagagaccgaagcaacacgaatacatatggagaacagacagacaaagaggtaagcgcgctgcggggcgaacgacgaagggagacaagcacaaatagcaagcgaggctacaggaagcacgccggtgtgaagcggcgcggcggatcgcaaccgaggtgagggagagcgcgcgcagttactaacaaacaccatgagcactacgcggngagacactaatacacaaggaactatgaggacgaacctcgtataccacgaatgggagatatgaaaagtcaggtgaaggagaagatacgagaaatgagacgcgaaggaganagtgaagtgacagaaggaagagcgtaggtagtaataccacgatcagcgcgcgtaccacgcaggatgacagacggag

SEQ ID NO: 10853 - DNA, 485 bp, Glycine max
  Coding DNA Sequence Number=SeqID_1074
actcactcgagactccaggaaataagaaagaagaaagaagaaaaaatggagaatctattgggtcttctcagaattcatgtgaagagaggtgtgaatctcgccatccgagatatcgcaagcagcgatccatacatcgtttttcacttcggaaacaagaagctgaaaacccacgtggtcaaacaaagtgtaaacccagagtggaacgatgatttgactctttctgttactgatccaaatctccctgttaaacttacggtttacgataaggacttgctctcggcggatgataagatgggagaagcagagtttagcattgctccatatcttgaagccattaagtttcgccataagatccaaggaggacttcccaatggaaccataataatgaagatacagccgaacagacaaaactgtctgtctgaagagagccacattgtgtggaaccacggcaagcttgttcagaatatgttcattaggctccagaa

SEQ ID NO: 10854 - DNA, 435 bp, Glycine max
  misc_feature (141)..(141): n is a, c, g, or t
  misc_feature (144)..(144): n is a, c, g, or t
  misc_feature (179)..(179): n is a, c, g, or t
  misc_feature (223)..(223): n is a, c, g, or t
  Coding DNA Sequence Number=SeqID_1075
aacaacatgtatggcactgtgctatgtgcttcactgtatgtacgtcatgagacagaagcatcagtagtagtacttacggatcagatatgactggtgatagatgtgtagataatagtaagtcagtgtctcactcctgttatnatnctgtctctagagagtcgttgccacgaggtacgacnactagcacatcttgcgtgcctgtctcatcaatggtgtagatgtngagcatgacttgcacgcacgtatcaggagatagagatgagagacacaatcatcacatggacgtgagctacatagcgcgctgacgacagctcacatccgagcaggacgagtggtctgatttctatgatatgtgagtatatgagccgtgcttgagtgcgagaatgaggtcatatcgcaagagggttattacagttactaggtttgtgcgtacta

SEQ ID NO: 10855 - DNA, 447 bp, Glycine max
  Coding DNA Sequence Number=SeqID_1076
gaaactttacgacccaatgacggagattaaggtgcagatactcctcctcaatatctccgttggcgagagtggagatcgtctcaccagagccgctcacgtgttggaacagcttaatggccaaacccctgtgctttccaaagcatggtacaccggccgctcctttgggattagaagagatgagaagattgcgtgctatgtcactgtctgaggtgacatcgcactgcaactattggagagtggtgtgaaggtgaatgattatgaactgctcagacagagctttagtgatactggttgctttggcttgggcattcctgagcctatagatatacgaatcaagtatgatccttcaactggtctttatggaatggacttctctgttgttcttgatcgtacaggctatcgtgtcgcacgtcgtcctaagtgcatgtctcggtgtggattccagca

SEQ ID NO: 10856 - DNA, 285 bp, Glycine max
  Coding DNA Sequence Number=SeqID_1077
ccctgcaagggctggtcaggaacaacataagacttctccaaagacttccaagtctccaactcatgggagtgggactcctgtttagtgcacgggaagctctggtcgggaaactttcaaaaaccccaaaaaacctctatcggctgggttctctcttactactgagttgacaggataatgtggacaaatttttttaaaacacaggattgacggttatgaagaatatactattgactgaggtcttctacaagggaactgggttggatataggaagtgtgtgaaccttta

SEQ ID NO: 10857 - DNA, 568 bp, Glycine max
  Coding DNA Sequence Number=SeqID_1078
ggcagaccgcggataagtcaatatgggtacatattaaaatcttcaacgataaatataacacgcggagccgggcccgacaacgtcgtgatatctatagtgagtggttggtctgcaccgcgcggtatggtcgctatattatattagtgtacgatcacgctttgtgggtgccgatttacgagagtgggcggcacgcatattagactataataaaaagcatatcagcgcggggcgctggggtggcggctaatgcgggagaattgtgtaaggaggaacgactaattaaattgaatacacgctgtgtgcgaaggacgatgatagtcgacaaagaaatccagatcattgcggtcgcattcgattctacattgatgtatactactgatatacactacacgtcacagtaacacaataagggatgcgatatgcacgaggggtgtgaaagtgagcgagggtatatattaacgacggaatacggcgcgcgagatgaggcaggcgtgcgtaattcgtatgttatcctctacgcgtatataggcggggcctcgccccatccgaccttctgatgagtggacaa

SEQ ID NO: 10858 - DNA, 568 bp, Glycine max
  misc_feature (59)..(60): n is a, c, g, or t
  misc_feature (94)..(94): n is a, c, g, or t
  misc_feature (113)..(113): n is a, c, g, or t
  misc_feature (198)..(198): n is a, c, g, or t
  misc_feature (207)..(207): n is a, c, g, or t
  misc_feature (220)..(220): n is a, c, g, or t
  misc_feature (233)..(233): n is a, c, g, or t
  misc_feature (240)..(240): n is a, c, g, or t
  misc_feature (251)..(251): n is a, c, g, or t
  misc_feature (264)..(264): n is a, c, g, or t
  misc_feature (273)..(273): n is a, c, g, or t
  misc_feature (278)..(278): n is a, c, g, or t
  misc_feature (298)..(298): n is a, c, g, or t
  misc_feature (324)..(324): n is a, c, g, or t
  misc_feature (329)..(329): n is a, c, g, or t
  misc_feature (350)..(350): n is a, c, g, or t
  misc_feature (389)..(389): n is a, c, g, or t
  misc_feature (393)..(393): n is a, c, g, or t
  misc_feature (414)..(414): n is a, c, g, or t
  misc_feature (422)..(422): n is a, c, g, or t
  misc_feature (428)..(428): n is a, c, g, or t
  misc_feature (438)..(438): n is a, c, g, or t
  misc_feature (446)..(446): n is a, c, g, or t
  misc_feature (449)..(450): n is a, c, g, or t
  misc_feature (475)..(475): n is a, c, g, or t
  misc_feature (477)..(478): n is a, c, g, or t
  misc_feature (481)..(482): n is a, c, g, or t
  misc_feature (484)..(485): n is a, c, g, or t
  Coding DNA Sequence Number=SeqID_1079
gtatatgtgtagtgtgcgtcgtgtctgatcgctatacagtaaatagcgcgtgagtcagnnagagcgcaggctgcgacacagcgcagtgagcatncgtcacgacgcgagcagtngcacgcaagcagggcgagattagcagctattgtagacagccatgtgagatcagacagacagtgactgtatgtgtcatgctatatnattctatanatacatcatatantactattctctgnaataacnaggagcagagnaacacataaaaantaactatcnccctnattccatataattactacangaggagggagcgacactcattcttcntgcgntggtgttggtgttggcgtgcnatgcacatgtcatagtgagctgatgagagcataaatggnttantgttattagtgctgatgtatntaatctanactctntcactgggtnagaagatnatnnaaaacaatacacatacagggacggngnnccnntnngggggtgggtgttctctcttacgtcctcttctcctcgactgtgcgcgatgatagtgtcgcagagttgagtacttgttgtggta

SEQ ID NO: 10859 - DNA, 372 bp, Glycine max
  Coding DNA Sequence Number=SeqID_1080
tatctttccttggatcatcgtcttcctccaggttctcagatcctcaaatcgagaagaacaattcagtgaggttgttgttggagaaggaggagtaaggctaagatggtgaagatgacattgatagctcgtgtcactgacgggttgcctctagctgagggacttgacgatgggcgtgacttgccagattccgacatgtataagcaacaggtcaaggctctctttaagaatctctccagaggtcataacgaagcttcgagaatgtctgttgagactggcccctatattttccattacataatagaaggacgtgtttgctacttgacaatgtgtgaccgctcttaccctaagaaactggcgttccagtacctggaa

SEQ ID NO: 10860 - DNA, 537 bp, Glycine max
  misc_feature (62)..(62): n is a, c, g, or t
  misc_feature (214)..(214): n is a, c, g, or t
  misc_feature (252)..(252): n is a, c, g, or t
  misc_feature (263)..(263): n is a, c, g, or t
  misc_feature (267)..(267): n is a, c, g, or t
  misc_feature (276)..(276): n is a, c, g, or t
  misc_feature (288)..(288): n is a, c, g, or t
  misc_feature (309)..(309): n is a, c, g, or t
  misc_feature (311)..(311): n is a, c, g, or t
  misc_feature (341)..(342): n is a, c, g, or t
  misc_feature (407)..(411): n is a, c, g, or t
  Coding DNA Sequence Number=SeqID_1081
aaacgagagaaagaaccgcgcaggtatgaccacatatctggtacctcgctcttaccaggacncgcggcggaaacacgatacaaggagaacagggggcgtgcgagcgagatagattgaaatcagtgtggtcagcaacgtggcgcaacattcctgcataccctcacagactagatgtgggagggtaacaacgagcgacggaacgcccacccaacangagggatggggggagtgggagtaagggcagcgtggggnggccgggcgtnggtnacgtggtcnactgggcgcggngaggcagacgtcgcgccgcgngnctataacgagagacgagaatagtgcacatnntccagatatatgaggagaaaggtgcagagacgacacatagaacgcaaaaaccaaatcaaataaannnnnggtgagccgtgcgtgggtgtcgccctccgcctcgcgcgcgcgaggggagagagcaacaaccccaacaaaacaagaggaggtggggaggggacggacaagggaggataagaggctggcacacgaaca

SEQ ID NO: 10861 - DNA, 269 bp, Glycine max
  Coding DNA Sequence Number=SeqID_1082
ctcatgggccccagtggagtcgtcgggctcgcccccgccgatgccctcgtcatcgcctcggcccctcctcggtcgctctccgcctccgcgtgtttatttgcatttccattcgcgtgcttgtgccactgctttccgtcgcgggttcaggggggctgtacctcctcggtgccctccagcgtccgcgcgcgctcacgggctcgccgacgcgagctagcctacgcgtagtttgcgaatccgatatcactgaactttatctgttactgtcaatt

SEQ ID NO: 10862 - DNA, 556 bp, Glycine max
  misc_feature (79)..(79): n is a, c, g, or t
  misc_feature (380)..(380): n is a, c, g, or t
  misc_feature (437)..(437): n is a, c, g, or t
  misc_feature (515)..(515): n is a, c, g, or t
  Coding DNA Sequence Number=SeqID_1083
atgtgatctccatcctgactagtcgtgcttgcgacagagtaataatatagagcattacattataaaagacgacatacgnctgaatggtcttcggcacgttattgttgatcatcaggtgtatatcagtctagtagatatagtcggccatgtggtcgagcttaggcagttcgcttatttgcgtactggataacttgtatattccgtacatatagatatagagagcagacaagcgagcgtgggatacagtcattgtagtgcgattgtatctagtgcctagtctctatgagattacgtgagacgacagacctatgctatggatgaggagcagcgaggctcgctcgtctcgcggtgagagactgtggtttatatcgagagtcggncagaatacgaagagtacagggatagttgcaacatatggtgatgatacgactgccgtntgtcttgctgtgtgtcgcaacacacactacagagagaagatatagaagtgctgtaatccgaagtaacactgtgcgcantcttcgagtgcgggtggcacaccacgattcctaccaaatat

SEQ ID NO: 10863 - DNA, 473 bp, Glycine max
  Coding DNA Sequence Number=SeqID_1084
ggaaagagatggcttctacctccgccgtgtcattgttcatgccactcacccaaaaccgatcgccgtcgtcgacaaaaactgtagccttacgcaagccactattgcctttgaagccatctaaggcgtcatcctcctccttagccatgccttcacggaggtttcaagtgaatgcatctaacctgaagatggagaaggctgtgagcggcttagcagcagcagctctcaccgtttcaatggtgatccctgaggtggctgaagccgcaggctccggagtctctccctctctcaagaacttcttgcttagcattgccgcgggaggggtggtgctcacggtcatcatcggtgtggttgttggtgtctccaactttgatcctgttaagagaggctaaggacgagagatatctgtgtgtcattatattatggtaatgatttgtcaatttatgttataattaactcttgcattcttcttgacc

SEQ ID NO: 10864 - DNA, 293 bp, Glycine max
  Coding DNA Sequence Number=SeqID_1085
ggtcccccggcctgctagaattcggcacgaggagccggtgttgaacctagaagtggagattctcctttcgtacttggatcaaagggagaagatgttgcgaaagcccgttaatccttttgactttaggctgtgctatgttttgggtgccttggcagcgacatggtttgtgttggttcctatttacatgtggctgaaagatcaagttgttcccaaaggtcagccaatctaagagatattgataattagtaatccttttgatacttataattcggctcgagaaagtttcatcaaat

SEQ ID NO: 10865 - DNA, 567 bp, Glycine max
  misc_feature (81)..(81): n is a, c, g, or t
  Coding DNA Sequence Number=SeqID_1086
aagcaaaagcacaagggcgcacccacctttcaccgttcttctccggagccgaccatggtcgttgaactcatgggttgcggntacaccacacacggccacgcggccgatgccaataaactatttccaagaaggcgctgtcgctggggttcctcgaccctcaaggtcatcatctcccccatcccctcccgaggcggcctgggcagccccccctgggaaaagatgggccaacccagggggggcccaaggttcccccgggggaattaaaaatcttttaaccgaaaacggccaaagccccgtttttcccccgagccccccttttgggggcttaaacccaaaataccttaaaaccccccccccgggggggccaccgggcccccctccctcccaatgcggggccccaaagacccaaaaccccgtgataatcccccccacaagggggcccccccaaaaaaagagaaaaaacccggatatcccaaaaacccttaaaaacccccaccggggggggcaccctttctcccccaaaaaagaaaagaaaaaaacccttttctctcccccacacgaggaggg

SEQ ID NO: 10866 - DNA, 574 bp, Glycine max
  misc_feature (287)..(287): n is a, c, g, or t
  Coding DNA Sequence Number=SeqID_1087
attagcctttacaggttacgcgccggcgcgtggggcggctgcccacctacaacagtggacacggtccaacccatcggcggcaagcactcgcgccctgccacacagggaggggccgaataaagcggaaacacgggccaataccacttattttctcccttctatccctcccgcccacctgcgcatgcgttaccaccacggtccacgggcaccctgcggcggccaacgttggtgatattcggattcctaacacgagccgacaccggaatcttcaaagggtcaaaatgggngggaaacattaggtgttcactatccggcttcgaacacggtggtactagggcataaaattgccaacggcaacatggtctaaatatggttggcttaatctgcgcacaataggccttaacacggtgcaaagataaagcgccggcagaacaatggggaaaagcggggaaaaatggggttataatgtgtacctctcgcgccgcagtttaagtaatcaggtaaatgagggaagggggtggcgagagagggctacgaacggtagtccgcgcttcactccttacgcgcaaaggtg

SEQ ID NO: 10867 - DNA, 496 bp, Glycine max
  misc_feature (47)..(47): n is a, c, g, or t
  misc_feature (233)..(233): n is a, c, g, or t
  misc_feature (253)..(253): n is a, c, g, or t
  misc_feature (363)..(363): n is a, c, g, or t
  Coding DNA Sequence Number=SeqID_1088
gagacggtgtcgatatatagcaaatacaaaagtaatatactaatatngagcggtcacagagtcagtataacgtctacagcgtcgcgtgcagtagacccgctgcggcgagggatgagagtagactatcatagctcaatctagtcagatggatacgatgtagctacattatcgccacggggcggcacgtggtgactgagatatttttagtgttggtgcacatatttgacgatacngagtgttgctaatctgtatncttgcgtacgcagtagtgtcatcatacttatggtcctacgtcctgtatccctctaggcggggagttgtgtggtgtaggcgagtgagtcgcgctcttctctgttatgtatnattatctcttatacagaacacgatgtctggccacccgcgaatgtcctctctctattatttggagcatgttataatgtacgcgctggtgacgcgccgctctcgtgctgatctgaacatcgcctgcggtgtagat

SEQ ID NO: 10868 - DNA, 500 bp, Glycine max
  Coding DNA Sequence Number=SeqID_1089
tttaacagcccaatttccctatccacaacatggactcaaaaaccatcaagcgtaagcctacaaaatgcctcgtccccagctgcctctacaacaagcccaaccctcccgctaactccaaaacccttcccccaaaccctcccaactggcgtgaaatcaccggtgaaactaaactcttctataatcctgttctccagcgtcaatacggttcaaataaggaccaagtcaaacttatgatctgtgaaagtcattatttataccatgaacacattaagaatctagaactccagttagaacgcgctcctgcaacggcggacctgacttttcaaatcaaggaagcgatagaggagactggaaagcattatgagattatgaccgtgctgacagtgctttttgagcctttgataaatagactgacgaaaacaagcaagaaacatatcgatagattatccgaagatgaatctgatattattattaagcaactggagtttttaaagcttata

SEQ ID NO: 10869 - DNA, 561 bp, Glycine max
  misc_feature (194)..(194): n is a, c, g, or t
  misc_feature (438)..(438): n is a, c, g, or t
  misc_feature (495)..(495): n is a, c, g, or t
  Coding DNA Sequence Number=SeqID_1090
ggagcagcgagctacgatcatacagccctgcaccagtgagtgtcagttctgcgtgacggaggtgtgtgttgtatgtggtgctgcgtggtgtttgccgccggacgacggaggtaagagacgaagagcgacatagcgaatagtgtgtaagcaccgatatataactggcgctactcgagcatcagcgactatctacntatacacctctccaccggtatagtcttctcaccacgcactacaatataattatgaaagaagagttgttgggccggtgaatccgcacccgccagtagatttagtcgctctgctgcggagaatgtctctcacggcctcgaagcattcagccggagtgtttttgtgtccgtccgattctattggccctccagaagttaatcaccactcaattatatccaagacaacacgtgatgtttccacatgcangtggtgatcgaggagtaccggcccccacacccgtatataatagcacgggcggtgctngtgtttgtttatgagacgcggtatttgggagcggggtggtcccccggtttgccgatatgggatgga

SEQ ID NO: 10870 - DNA, 344 bp, Glycine max
  Coding DNA Sequence Number=SeqID_1091
gattttggcacactaaccagatgaactataagcgtctgaaatttgggatgcgcacgtacatcaagtttctcacatttggccatgaacaatgtactaccatacaggctgaaagaaggggttccttgagtagatgagagataacttattattggttcatggacattttcagagacattataaagcatgagttcctcatcagtcattcaagagatgatcaatgccgctgggaatatatagttccaggatatctaggaaggaagctcgaatccacgcaaaatttcgtccagcttgcaagtcgagcaaaatattggcaagggtcagtagtaggttgtatttcattgtct

SEQ ID NO: 10871 - DNA, 551 bp, Glycine max
  misc_feature (41)..(41): n is a, c, g, or t
  misc_feature (184)..(184): n is a, c, g, or t
  misc_feature (365)..(365): n is a, c, g, or t
  misc_feature (442)..(442): n is a, c, g, or t
  misc_feature (444)..(444): n is a, c, g, or t
  misc_feature (486)..(486): n is a, c, g, or t
  Coding DNA Sequence Number=SeqID_1092
tcacatcactcgcacgatattctgtccgccccactgctctncgaagctgagacgtggcagtacaaactacactcgcgcgctacccgtactcatcatactgtggtatcttctctccccctaccccgtcatgcaatcatattacctctgtcgttatacgacactaggtatgaatatcgctgaggangaacagcacgcgccacccgcccgcacagggcgtcgcgtgtggatggcgcccacgccccccctcgactcgtatctgtccatgagcgggacgtagaccctctacgtgggtcgtcgccgctcgacccacacgtcgcactcgcgccgtatcaccgagcctgcacacttcctccactcacattgtntaggacgcgcgcgcgctatactgtcgcacgacacagaagctacagtcatgataattgtctctatactcgtcatcctncncacgcatgctctcatctcgctcgcgctctcctgtgtctcatntctctcatccctctctctcatctgtgtgtatgctgtctactactagtgacatctggcacagctcc

SEQ ID NO: 10872 - DNA, 268 bp, Glycine max
  misc_feature (124)..(124): n is a, c, g, or t
  Coding DNA Sequence Number=SeqID_1093
ctccctctcggtcgcgggaaatggcagcacaatcaactccgccccgctcacatccacgagtaccagggtgctgaattgatgagcaaacacgagtcacgtcccgagaggcgtgctgtttctctgntggagagcagaaagtcatcaggaccttttccctatgaaatgagtgggggtaaaatccaattttagccgccgacgagggtgggaactttcaaaacgggttaaaggaagagggcccttggttaaactggccagttaaaaactactg

SEQ ID NO: 10873 - DNA, 519 bp, Glycine max
  Coding DNA Sequence Number=SeqID_1094
tttggaactgatctcactaacgtcagtgtcaagagaagcagaacccatgaaaatgctaccgagaggaggataaagatgaaacaacacgcaatagcagatagttcttataatcaaagctctgatgatgctcatgaatcaagacgctacaagtttggtctttttgcaccagccgctggtggtacatatccagctgctcgtttggaggacaactccaagagagcttttgatgttgagaatctagtttcggattatcgtcctacttaccaaaatcaagttttgaaagacctctttgcgcattacatggacgcttggaagtcatggtacagcgaagtcacgcagaagaatccattaccagatacatcaaaacgccattagagatattcttaatcttctcttactagtgaacatttcgttttgaccaatgtgggtttagtttctccacacaaattttaacggcaggaatccgacattttaagatgcagactgcaccatctctgtgccttcactgtaggctgttta

SEQ ID NO: 10874 - DNA, 411 bp, Glycine max
  misc_feature (258)..(258): n is a, c, g, or t
  misc_feature (288)..(288): n is a, c, g, or t
  misc_feature (301)..(301): n is a, c, g, or t
  misc_feature (306)..(306): n is a, c, g, or t
  misc_feature (353)..(353): n is a, c, g, or t
  misc_feature (357)..(357): n is a, c, g, or t
  misc_feature (368)..(368): n is a, c, g, or t
  Coding DNA Sequence Number=SeqID_1095
gattctgtgatttcatgctataaaaagtaactagaaatacaaataaacatataactgtcttgaaaatatatttcaattgtttagctagagaaggccaattagaggatggatagaactgttgatgccgatattgtgatcgtgggaggtggtatttgtggccttgcaacagcccttgcccttcacaggaagagaattaaaagtctggtgttagaaagatcagagaatttgcgagccacaggagcacctataatagtgcangcaaatggctggcgtgcacttgatcagctnggcattggctcancactnagacaaactgctattcaaatagaagggggaagatttatatctctcancganggctgatccantggaatttccttcggggttaatcaggaccttcgttgttaaagc

SEQ ID NO: 10875 - DNA, 409 bp, Glycine max
  misc_feature (109)..(109): n is a, c, g, or t
  misc_feature (183)..(183): n is a, c, g, or t
  misc_feature (302)..(302): n is a, c, g, or t
  misc_feature (352)..(352): n is a, c, g, or t
  Coding DNA Sequence Number=SeqID_1096
aagaaagtcgactatgtcggacgtaggacaatagagagaaagtggacgcaaagaaaccccactagccgatgcagctcttttcctttgccagacccattccaaacctcanagtgcaaaagaccgtctacccctctcgacatcctcaatccaatccctcaacgcgccagttctctcctcattganagaggcctcctgctgctggcgacccatcattccacttgcggcaaaactaaccttgctcccattttttcgtagccggtgtaaaggatttaaagctttctaagcaggggggtttggcgtantacttcgatccctccttagcaatccccttctctccgacgtcttcggccgnggactgacactatcctgctggctgcctgcatcaataggctggaagctgctgcgtata

SEQ ID NO: 10876 - DNA, 596 bp, Glycine max
  misc_feature (26)..(26): n is a, c, g, or t
  misc_feature (116)..(116): n is a, c, g, or t
  misc_feature (128)..(128): n is a, c, g, or t
  misc_feature (194)..(194): n is a, c, g, or t
  misc_feature (261)..(261): n is a, c, g, or t
  misc_feature (304)..(304): n is a, c, g, or t
  misc_feature (342)..(342): n is a, c, g, or t
  misc_feature (350)..(351): n is a, c, g, or t
  misc_feature (356)..(356): n is a, c, g, or t
  misc_feature (358)..(360): n is a, c, g, or t
  misc_feature (362)..(362): n is a, c, g, or t
  misc_feature (364)..(364): n is a, c, g, or t
  misc_feature (373)..(373): n is a, c, g, or t
  misc_feature (405)..(405): n is a, c, g, or t
  misc_feature (455)..(455): n is a, c, g, or t
  misc_feature (472)..(473): n is a, c, g, or t
  misc_feature (485)..(485): n is a, c, g, or t
  misc_feature (500)..(500): n is a, c, g, or t
  misc_feature (521)..(521): n is a, c, g, or t
  Coding DNA Sequence Number=SeqID_1097
cgcagtgtggcgttcgattgatattngcagcacactgctaatgtgttccagcgatacgcgcgtcgatattctatagagagctatggatcatatctgttagaacagcgtgaatatcngtacgcgcgctnacgctctgctaccgtgcatcctaagactgatatgaacgtcatgtagcacttacagaccgtgataantgcgtcgtccgatgcacatctatactcttcgtgatgatacgagcgccgcgccggcacgacatctgancgacatattcatcgcgtatgtgtggtgtcgagagtgatatgancatgatctctcgagtatgaattgtgtcggctcgtccgntaaatttnntatcnannncncncacacagantgcttccctcactctgggccgggtgatgacangtgtatcagagttctatatataatgattatatgcgttctactatcagcgnctgcgtcccgcaacgcnncctgtatagttncgtcgcgtacgtcancgcaacaagacagtatcaggncaatcatattagccaatatctccatacgacatgcgatcgcgcgcgcactatgacgtccagatatcgtatagctcg

SEQ ID NO: 10877 - DNA, 517 bp, Glycine max
  Coding DNA Sequence Number=SeqID_1098
aacaaccccttgaatagcattggcaatgccaacattctggtttggaagaggaaagctgagcagtacttggctgattccggtattccgtacaccatcatcagggcgggcggtctgcaggacaaagaaggtggcattcgagaattaattgtgggaaaagatgacgagattctagagacagaaatgagaacaattgcaagggctgatgttgctgaagtctgcgttcaggcgttgcagctcgaggaggcaaagtataaagcacttgatctggcctcaaagcctgagggaacaggcaccccaacaaaggatttcaaggcacttttcactcaagttaccgctcggttctgatcttctgttactttgtcttttaagcagagtaataggacaagagactgagagggataataagttcattatgtgagatacacatgtctgaatcggctctttctatatttttcaaggggtctttcccgaagtatctaagtatattttgtatgcaccattcacaaaatcccaaagt

SEQ ID NO: 10878 - DNA, 422 bp, Glycine max
  Coding DNA Sequence Number=SeqID_1099
ggttacctgcaatggaaaccaaaataaacaataaatccaatgagataacataacataaaataaaaataaagaaattatgtaacacagatgccatttctagtgtctgacataaataaataataacatcatagagcagtcaaaggacaataaactttgaggcattgtcatggatgggaaagaagagagggggaatgttagtaacttattctatgttcacgcatggcttaacatgagccgcaaatcattgaacctttttatccattgtccaagtccaactatagtcccaaataggaccaatatgcttaactttttatataacaaaaactatagtgtctatttcaatttttgggaatgtctgacacatttataactctcttgtacatgaacaaaacatcaataatttttccttgctttatagataa

SEQ ID NO: 10879 - DNA, 326 bp, Glycine max
  misc_feature (74)..(74): n is a, c, g, or t
  misc_feature (128)..(128): n is a, c, g, or t
  misc_feature (184)..(184): n is a, c, g, or t
  misc_feature (197)..(197): n is a, c, g, or t
  misc_feature (200)..(200): n is a, c, g, or t
  misc_feature (225)..(225): n is a, c, g, or t
  misc_feature (251)..(251): n is a, c, g, or t
  Coding DNA Sequence Number=SeqID_1100
agaaagaatacttgctttttctggtttggatagattatttttagtattatgactttgtgataatgtagtattantattaagacttactctctgctgtaatttattagaagggatattttgatttgtanttttgtttgaagaaactatgtgaaccttttttaagtatattagatgaaaataggtntagtttcattaantanttctatgaatgttttgaatgatggnttgaactttgaacaaacaatgtgtgnttgtggctgtttaaagctggaattgagaccttgaaattggagaagggaaagtgtgagttgagtaaacaaaacaat

SEQ ID NO: 10880 - DNA, 549 bp, Glycine max
  misc_feature (161)..(161): n is a, c, g, or t
  misc_feature (330)..(330): n is a, c, g, or t
  misc_feature (380)..(380): n is a, c, g, or t
  misc_feature (382)..(382): n is a, c, g, or t
  misc_feature (522)..(522): n is a, c, g, or t
  Coding DNA Sequence Number=SeqID_1101
aaaactctctcacacagctcataaactataaccccctcaacaattcatactacaacaagttaacaacccctcacaccacccctcccacgcgtccagagacctcatcgccgttcctacccagagcaacatcatcaatccgcgccagacaaggttggcgccgntcaacccactttctgcagctttcccccaaacaacaatccaaccccttttcacctcacacccttttgtggcaaaaatatataaacaacacacgacaccgtaggatgcagacagaggcacgcaatatatagacaccgcccaccgcacaccaccccccatgcatcttcatgntttaaacacagagataaagtgatagaagagaaaaaacagcgacgctgaananacactcacgcaaaaagacaagtgcgccaccccgaaccaccaacaaaaaaatacaacaaacacgccattctccactcccgagcctccccggcgggctatactctacctaatattttaaagtaatcaccgcccgcctcaaanaagcgagaaaaaacatcccaaggttgt

SEQ ID NO: 10881 - DNA, 587 bp, Glycine max
  misc_feature (316)..(316): n is a, c, g, or t
  misc_feature (365)..(365): n is a, c, g, or t
  misc_feature (554)..(554): n is a, c, g, or t
  Coding DNA Sequence Number=SeqID_1102
cgcagttgtattcgaggccagcagctgtatattggtcggctgtgcatgctccacagattttataatctccaaactatatgctctactactctctatccctcaacttccttctcctcccgcggcgctacctcttcgcttccccatcctcttgtcttcaccgctctgttgacttcacttgattcttatatatagatttatcctgaacaattagtcatctcctcaatgacacactccacctcctttcccctctcttatgctctctctacctacaccacttctcagccatctttcccacctcattcccagctgccatgangcagcgcgcatggacttccagacgataggatgatttatcataatgtctngtacctgatatatctctctacatatacaatagagttgatctatagtgttcgcacatctactatactaagctcgaattcctctccgcttcttcttccttctctcaatctacttataggtctcctcgttatactcactctcatatatgtgtgtgtcatatctcctgtcgtgttatcatctcgagacttacnctatccacaatatgtcagcggttcatcacccca

SEQ ID NO: 10882 - DNA, 548 bp, Glycine max
  misc_feature (71)..(71): n is a, c, g, or t
  misc_feature (118)..(118): n is a, c, g, or t
  misc_feature (295)..(295): n is a, c, g, or t
  misc_feature (300)..(300): n is a, c, g, or t
  misc_feature (396)..(396): n is a, c, g, or t
  misc_feature (432)..(432): n is a, c, g, or t
  misc_feature (472)..(472): n is a, c, g, or t
  misc_feature (475)..(475): n is a, c, g, or t
  misc_feature (479)..(479): n is a, c, g, or t
  misc_feature (481)..(481): n is a, c, g, or t
  Coding DNA Sequence Number=SeqID_1103
ctgttgtgagtcttgcgatggtttatttgtcgttcgtgtcgtctttgcgagccaccaacatacctcgtgtncacaacacataccacacacattatcttctcataactcttctcactcnattaacaattttataattatagtgtgtatgtgagcattgcatatgaggacggcggggcggagttgggcacagaaaagaaacaaaacaagatgtatatcaaccacaagggcgcatgtgttgtagcgatcacctgttttatccccctacctcatttgtgtgcccgcgtcattttcctcntccgntgactgggggcgccgcatacatgaggctcgtgttatagtagtaggtagaagtggacggtgagttactttgagagtagtgtgtaagtgttgtgatantgtgtgggactaccacaacaggcgacgacataaagnccgcacaaccgctatcgatttcatccttattatactattntgngttntntttcctgtggttgtgtctgcgtgtcgttgtatatgcctccctgcaactagcagctcgcaagtagtgt

SEQ ID NO: 10883 - DNA, 551 bp, Glycine max
  misc_feature (52)..(53): n is a, c, g, or t
  misc_feature (201)..(201): n is a, c, g, or t
  misc_feature (382)..(382): n is a, c, g, or t
  misc_feature (389)..(389): n is a, c, g, or t
  Coding DNA Sequence Number=SeqID_1104
cgctcagaacgagaggctcatcatataatcgcacgcacatccacctcgccannacctccgcctcgtaggtatgtctgttcattgacaccgcatatatcctcgtcaaccagtaaacgcatgctcagaatagcaataacgctgtgactgggctcgcacgtgggtggtgcggagtatatagcaagggagagacacagagcgacnatataataaaatagcgtcatgatatgtatgcaagagataaaggaacccatcagccgacaccagacggcgagcatcacagtgagcaagaagagtttcttcttataatattaaatatatgttcctattatacacatcgctcgctctatactctggtagatatgcacgcatactccttccgganaagagcntgtgtggagcggcggggccgcgccggacgcgctctgcgatcgcgctcgtgatcaagctagtcgtacactccgcactattcccattgcctagtccaccctatctccgtgcgacgatcgacagtacccgcccacctctctaatgtagagcgtcgtggccatctt

SEQ ID NO: 10884 - DNA, 247 bp, Glycine max
  Coding DNA Sequence Number=SeqID_1105
gattctaaactggaagcagcggtttaacatcattctaggaacggcagaagggcttgcatatcttcatgaaggcactaaaataagaatcatccatagagacatcaaaagcagcaatgttcttctggacgagaatctcactcccaagattgcagatttcggccttgcccggtgttttggtggtgataagtcacatttgagcactggaattgctggaacacttaacattattgtcccagattgttcttat

SEQ ID NO: 10885 - DNA, 501 bp, Glycine max
  Coding DNA Sequence Number=SeqID_1106
ttagttgggtcttcttcgacccgcggaaattaatttccgggcccgggtcacttggaggggcgaaccaatttttttccttataaaggggaggccgttttaagaactcttggcgcgaaaaacatgggcaaataagttggttcccctggggaaaaatatttttatcccgtttcacaaattcccaacacaaaattaaaaagcccgggaaagaattaaagatggaaaaaagcccgggggggggccttaaaagaggggggcgcctaaccccaacatattaatttgggcgttggcgccttaaattggcccctttttatcaagatggggagaaaactttttcgtggccaattttgtatttaaataaattcggccaccacccccccggggaagagggcttgttttgtttttatgtgcccccacgggtggttttttttttttttcccacaggaaaaagggcaccaaagttttgtttgccctttaaccgccttggccccttaaagagaatgt

SEQ ID NO: 10886 - DNA, 447 bp, Glycine max
  misc_feature (50)..(50): n is a, c, g, or t
  misc_feature (261)..(261): n is a, c, g, or t
  misc_feature (412)..(412): n is a, c, g, or t
  misc_feature (420)..(420): n is a, c, g, or t
  Coding DNA Sequence Number=SeqID_1107
atcctcagtcactctagattgttttctgtttctgcagaccagctcacaangccacacaccataccatcgcgacaccgcgagcacgaccacgccagcactataatatattcatctatacatattgtgtgtgattatttccgtccatgtcaccaggccggcgtgatcagacgcacgacagaggacatttctatctggctctcatacatgtcatctcacacatcctctacactataagctaatcattcgacatatcttatacanaagagaagacgtatacatatatccaccatatccaatacaatatacacaacattacatacacatcacagagactacacatccacacgcactcaccacactcacactctatacaacacataacagacaatacaacaacacagacaacaagganaacaaaanatatacgctgctatccacacatatatt

SEQ ID NO: 10887 - DNA, 368 bp, Glycine max
  misc_feature (30)..(30): n is a, c, g, or t
  misc_feature (79)..(80): n is a, c, g, or t
  misc_feature (157)..(157): n is a, c, g, or t
  misc_feature (234)..(234): n is a, c, g, or t
  Coding DNA Sequence Number=SeqID_1108
ggcgccgcggtgatgtcgggtgttttttcngcgctggcgggggggagagtgaccagccgggcgtgacatgccgacctannaatataacacaccagacgaaatctaacccacaaacacaaaaagaacagtgagagaaagacagaccaccaaccacaanaacacactgcgaggtcggccctccccccacagagcacgcgacttttggctcccctcttctctctaatacatcaatcncaaagcatgaaaaatagcagcacaaacacaaatcacagaagcaaaaagaaagaagtaagacaaagcaaaaagaggatactatcgcagcagatgcatgaggccgacgaggtcagagagcacagagaggttgaaaa

SEQ ID NO: 10888 - DNA, 461 bp, Glycine max
  misc_feature (46)..(46): n is a, c, g, or t
  misc_feature (304)..(304): n is a, c, g, or t
  misc_feature (339)..(339): n is a, c, g, or t
  Coding DNA Sequence Number=SeqID_1109
taccacagtcggtgcgtgagcggtccgtaccggtccgcgtgtatanagtgtattgtaaatcagtcaccacgtacggtatgaggtacatcaccctatctctgcacgcggggcgcagctatagcattccgcggcgagtatactgttagtcgcgcagcgcgcagcatcgtagctggtcgcgggcccacctcactactcccctgcacgtgaatagactggcagcggcgctcttcgatgtgagctatgtatattatccagtacgctatctgcatcaccggctgagctacgcaccgtagtgtcgagctcncgcgcacggcgcagtacgctagcgccgtcgcgcgntgcgcctcagctcacggcttcatgactagctccacgctctgatgtcgactcacacctctatgtgatctatctagctgcgtgagctgtcagccgcactatttgctatctcttatcgcaccaag

SEQ ID NO: 10889 - DNA, 255 bp, Glycine max
  Coding DNA Sequence Number=SeqID_1110
atgccagaaggcctttaataactgtgaaactaacagcaatagtacatgaggagcaggtgctctttattccgcgccttgccgacgagcaaggataaaaaccatttctaacacacatccatctgctgaatatcgcccgacgtatagaaggcccacctttgcatgaacgggcatatcgctgatctataccacttgaggttagaagaacaagaatctgagatgagaccacttcttattcttgtgatcgtgggcacctgc

SEQ ID NO: 10890 - DNA, 554 bp, Glycine max
  Coding DNA Sequence Number=SeqID_1111
aaaccaacccttattcacattgctgaactagaaacagagcgcatcgccaatcacctcatacaatattcagtacaagactttgcagacgatcaggagaatatgaaggatatggtggtcatgaatacaagtgagaatggaaaagtgacgaccattgattttaatgcgcaagcaacatcgaaagcaatggctgacctctcgcgtcatcttcaaaaaaatttagaggacattgaaaaggggaactttcaaaaagaggcaaaagaagcattaaaggatcaaacagatggacatgacggcattatatataacattccgcttgggcaagcgtccggaaatgcactcattgccaacctcggaccaaaagtgcctgtacgatttagtgtgattggtgatccgcatacggacgttgaaaaaaacattaagccttatggcatcaacaatgccttgattgatattagtgttctgatcgaggtcaaggtaagagtcattatcccatttgcctctgaaacaatcgtagtcaaaaactctgtacctgtctccatacaagccgttcaagg

SEQ ID NO: 10891 - DNA, 297 bp, Glycine max
  Coding DNA Sequence Number=SeqID_1112
ctttcaacagtaatctcctttcctgatcacattcaaattattctgatatttttctgtacttatttatggactaatgcatgagagtatttatcatatacttttttcagcttcagctgacccttcaaattgtgttttcttctttctcccccctcaccccattctcttgttacctttgactgtctttctgtgtatttaggttgaaatatgtcgacaaatgaatctgttttttatggttaagtttcttttgtccatttttccttcctttcatttttaatatatcttgcttctatctgttaa

SEQ ID NO: 10892 - DNA, 587 bp, Glycine max
  Coding DNA Sequence Number=SeqID_1113
cggactgttgctccggcctgaaacaggtcctcaaatccgacaaaagtgtctttgtgtaatcatccaagacaggaatgatcccgacttgggtctccagatcaatgtgtctctcgctcttgctcttccttctgtttgccatgccgttgctgacgtcactaagtgccctgctttgcttcacatggacccaaaatctcaagaagcccaagtgttctatcagctagcaaatggtttaaacaaaaccggcccagcctctgctcccaccatttcggcccctgcgcccaccagcgtatctccaacccgcaggatccgaggatggtaacaacagtggtcgggcgacctctttgccaagcaagaaccacgctcagagctttcggaaacgatggctagtgcttgaagttgctgcctatctcttcataatatcatttactatcaccttataaaagtaatattgaaaagtaaatttgtgcgcttgcagtgacgttgattttgtgcagttactttcgtttcgtgagaactcttctcaacctttttttgtctaatgcaaaataagacgcgagttacaatttttgtattgtctcgtatgcttt

SEQ ID NO: 10893 - DNA, 329 bp, Glycine max
  Coding DNA Sequence Number=SeqID_1114
tcgaagcaaacaccacaaagaaataaacttttaataactaatcctctcagacaacaatcttcagagtttcatctgtaaaatggcatcaccaaagtcaccaaccagaccgacccaacaaaacccagaacccagtttccacgatttcctccctgccatggccgggaagctaggaggcgagggtctgatcggagagctctgcaacggattcgagctgttgatggaccgagagaaaggtgtcatcacgttcgagagcctccggcgtaacgcggcggcggtgctgggtctcggagatctgacggacgaagacgtaaggtctatgatcaaggaag

SEQ ID NO: 10894 - DNA, 181 bp, Glycine max
  misc_feature (26)..(26): n is a, c, g, or t
  Coding DNA Sequence Number=SeqID_1115
atttgaatctggattcttgcaggatnggtgatggctgggctagctattttgacaggcctcactctcttgaaaagtctcggtgttgtctgacactgacattggtaacagtgggctgcgctatatatcaggaataataaaactaggatgatttaaatgtagctatacaccacataaactgata

SEQ ID NO: 10895 - DNA, 600 bp, Glycine max
  misc_feature (30)..(30): n is a, c, g, or t
  misc_feature (34)..(34): n is a, c, g, or t
  misc_feature (37)..(37): n is a, c, g, or t
  misc_feature (54)..(54): n is a, c, g, or t
  misc_feature (191)..(191): n is a, c, g, or t
  misc_feature (196)..(196): n is a, c, g, or t
  misc_feature (228)..(228): n is a, c, g, or t
  misc_feature (238)..(238): n is a, c, g, or t
  misc_feature (248)..(248): n is a, c, g, or t
  misc_feature (273)..(273): n is a, c, g, or t
  misc_feature (280)..(280): n is a, c, g, or t
  misc_feature (384)..(384): n is a, c, g, or t
  misc_feature (403)..(403): n is a, c, g, or t
  misc_feature (411)..(411): n is a, c, g, or t
  misc_feature (420)..(420): n is a, c, g, or t
  misc_feature (433)..(433): n is a, c, g, or t
  misc_feature (439)..(439): n is a, c, g, or t
  misc_feature (487)..(487): n is a, c, g, or t
  misc_feature (568)..(568): n is a, c, g, or t
  Coding DNA Sequence Number=SeqID_1116
gagacggatgcatacaacacatacgaccangcantcnagtgtagtgatgtgagnatactcgctatgttacagtgagattataattgatatatgacaatatctacatgtctgtatagtgataattatgactgtgatatcatactaatgctcctcttgtcgcatatatacttacatatctatctgacgaacgnccatncgcgtgcctctctcgcgcatctggtgtcgtantcgctcatcnccatagcagncatgtagtgcatgtgcattggcccngctgacngtgtctatgtctcgatcgtctgtcgcgctctatcttctacactgcatcgactcactacggctggcggcgaccacgcctctcacacctcgcggcgctacatcgcntactcgtcttcgtaggtancagaagancataaacancgatgcagagtgngctganagttagataagatgaacatataatagcagcatgcagagctggacatancatatcacgccgtctcactagcagatacaaccgcagagatcgtcgttcagcagctatcgatcgcgtcctcgaccgcgagcnaccatactgctgcgtcgcattcgctctcatgt

SEQ ID NO: 10896 - DNA, 487 bp, Glycine max
  Coding DNA Sequence Number=SeqID_1117
agtagtttgtggatctcgccgccttcccagctggtgatgctttaataccattatatcacaatttcttcacagacttttgagacgataatcacccttcctcaagcttgcacattttgctggtcatagtcccccggccggattctgaaaaagaagctgcctgctggtaatcttggagggtgcattccgaaacctccaagaccctagggagcagcgccataaaagaaccttttccttttacgcttaagaaggcaaatagcaatattccagcttgagcaagggggttcaaaaggaatggcaagaaacttcctaaaaaatgggaagagtacacctcgccagcgcttggacaaaatttggaccccatcgggaatttgcctagctattacctgggtaatccttctcaattttataaagaacttgccaaaaaatttgcgcgaagtccttaaaaaaggtgcccctttccttatattgggccaacccattccgtggg

SEQ ID NO: 10897 - DNA, 557 bp, Glycine max
  Coding DNA Sequence Number=SeqID_1118
gcatgcaggaattcccactagaccattacccccctcctcttcctcctttaaggcaaacacgcatttatgcaacacacaccacttgcaagtagctattatactccattaccatggcatgcaattgcaattccaaccaacctcctcctccagttgaaatggagaatttcccccctactcctcctcccactcctaacattgaagagacctgtcctgaaatggatgttatggagatggagtttgaagaagagttttcttttccagttgttgttgttgctacagaggaaaatgctcctaatgcttttactgaagagaagcctgcagaagacaaaaatgcgaacccgaaggaagcaagtcctaacgatgatgattgatggggtctgcaggaagcagaaggcagtttgagatgcttgggtgcatctgccaactataacagacaagaacactcttgtttgatttaagactttgccgttctagttttttctttatttcgttttaaatttatgaattgcctgtaaggaaaattctaattgatggagtgatgagcttctcgtatcgat

SEQ ID NO: 10898 - DNA, 302 bp, Glycine max
  misc_feature (272)..(272): n is a, c, g, or t
  Coding DNA Sequence Number=SeqID_1119
gaaaagtccccggaccattctattgggaaaaaaaaaaaaaaaaacccccattttttgaaacttttaacaaaaaaagcccaagggttgatccccttgaaaactgacccctaggctatcaatggccttgccgtggaattttccccaaggaacttttaacatttttggaacccaaaattttcttcttcccaaaaaacctttgaacccaaaatcgtgatagttaacgtggttttcctcccccccttcctaaaccttttctttttccctttcccttnccccttcctctttgccccttttgaaggcgg

SEQ ID NO: 10899 - DNA, 556 bp, Glycine max
  misc_feature (246)..(246): n is a, c, g, or t
  Coding DNA Sequence Number=SeqID_1120
agtcggtgcgctgcgcgttataataacgatgaggtgcattgtattgatgacaaatgtatacgaagtcattgtacgcgctgaataacacattataagacaatagacacgggtcgaggcggtggtgaatacatgtgcgtgagacgtgaaggaaataatagtaatcacattctgttcggtgactatgggcggtgatagggcgagagatgacgctccgagatcatcatcacagcatagctgatatatatnacaactcgcgagccgccgcgctgagctcggtgtactatacggattggtcttgtatatctgtcatcatcggccgatgggtctaagcgcgccgacgaaatctatatgaactataaaatacaatagtgtgagttatgatagaaataaaacgcgagaaacgatgtcgaggatggtcggtcggaacagagatacgagtgacgatctacatataccgacgaatacatgagtgctcacagaatcagcgcgacaactacgtgtccttctgatcacttcagatgtatatatagaattctatatatcagggcacgactct

SEQ ID NO: 10900 - DNA, 562 bp, Glycine max
  misc_feature (39)..(39): n is a, c, g, or t
  misc_feature (116)..(116): n is a, c, g, or t
  misc_feature (123)..(123): n is a, c, g, or t
  misc_feature (139)..(139): n is a, c, g, or t
  misc_feature (174)..(174): n is a, c, g, or t
  misc_feature (265)..(265): n is a, c, g, or t
  misc_feature (284)..(284): n is a, c, g, or t
  misc_feature (320)..(320): n is a, c, g, or t
  misc_feature (327)..(327): n is a, c, g, or t
  misc_feature (439)..(439): n is a, c, g, or t
  misc_feature (491)..(491): n is a, c, g, or t
  Coding DNA Sequence Number=SeqID_1121
agaatcaccacgttataggcgataactagttgtcagacnccgcgctggtgtcctgctacaagcttatattatatatcctgtatcatgtcatgctaccgacgattgctacgtcacgnacgctcngtatctcatatcaggntgagccagctgtcacgggtgcgcggacacgagtgncaacgtacgctatcgtgtgatctctgctagataagacgcctgcgtgtacgtacgcagtctgtgctcagacctactacgacgtcaccgatcnacgcctatcacagatcagngacaactgggaacgtggagatgtagtgcgcgcgcantagtaanaatatgcgctgaccgcatagtgtgactactatagacactccatgactgacatgatgatacgatcgtacgtcgtcgacatcgagagtaatcctgtactagtgcgaatggacgnacacatgcatgtacactcccatacgcgacgtgattgcgcgtcgttacacatnactgcgactgttatacatgcgggtcatttgataagatggacatacaggtcgtgtactataccgtcatcgag

SEQ ID NO: 10901 - DNA, 441 bp, Glycine max
  Coding DNA Sequence Number=SeqID_1122
cctcgcctctggttgggtagtgtcagacatggcggtacaagagggtggtcgtattatgacgcacgtgatcagacgtgagcagattggagttgcgaaagatatgagctgcgcctccactaccccaccaaccgcgcgcgggtgggaggcgggagggcagcgccgctagagcacagcagaccacagatccgagagcctcaccccgcggtgggcgctgtgtcgtgtaggactggtgctcggccctcatacacaggaacgtagagccgatgcaccgcggcgagcgggaattgcgccaggttatatatgtgtcgtgtcgttatacgctgctatgtattgttctgattatcttctttcacaccgcctctatatctttcgtgggtagtggtcgggtcgcaaagatttattgtgtgtagtgtccctgctctcctccatgactagccgaga

SEQ ID NO: 10902 - DNA, 465 bp, Glycine max
  misc_feature (85)..(85): n is a, c, g, or t
  misc_feature (198)..(198): n is a, c, g, or t
  misc_feature (208)..(208): n is a, c, g, or t
  misc_feature (242)..(242): n is a, c, g, or t
  misc_feature (245)..(245): n is a, c, g, or t
  misc_feature (310)..(310): n is a, c, g, or t
  Coding DNA Sequence Number=SeqID_1123
ggtagcgccaactatcacaccgacactcgccacctcacgatgcatctgctatgagcacactgacacacacctactctgtcacttnacgactctcacgctgccacacactacacgctcgcgatcatgacatatgcgcacgaccacgctcgaccgtacatagtgcgatgctatgactcggtcgctcgcacggcacacganggctactcanctactcgcttctactacaccactctatcactcanacncgtctgtgttcgcgcttcggaccaccctcgctgcgccagcgctctctctcattgttatacgcgcncgctacgctggtcacacacacacgatgcgagctcctcgccgtctgcacgcgcgagacgactactgcctacatacatgctgatgctcgctgtacacgctcttgtctactacactcatctaccacgcaactatgtattatgcaatagcctcgcgcct

SEQ ID NO: 10903 - DNA, 468 bp, Glycine max
  Coding DNA Sequence Number=SeqID_1124
ttgttggtcggttcagagataaataacaatctctctcttctatcttcttctgcaccttctgcactctcatttccactattttattctttctctcatacccgtcatcatctctctctggtacaaaccctacttccacaccccgttccctgagccctcccatactctgcatcctctcttttctcaccttccccattcttctcctctctttcatggatgtggacatagtgaaaacttccagcaacaacaacaacatggacgtgatggcaatgatgatgcaaatggaaaagttccctgaattattctgcgaccctttttataccacctcttaccaagaaaccgatttgttatcaagtggaagttcctcaacaaccagtgcttccaccctattcaacaacaacagcattgtaacaacaactccaccaccgacgacgactctcgtcgatccaactccgtcaaatgttgtccaat

SEQ ID NO: 10904 - DNA, 473 bp, Glycine max
  Coding DNA Sequence Number=SeqID_1125
attcgcagccgaggaattcaaagtgcctccccagaccagcgccatcatcaccaatgataagagattatggactttcaaatattcccacctgttctcttataaatacaaaatgctttgttcagtttataatgtgcgctcctgaccaccatatgttccttcttaacaaccctagttggaagtcaaaagctctctctaaatgttgttgggataaatcctcagcaaagtgcaggtaatatcttccttaagcatggttcagaactacgtctgattcctcgtgatagggtcggtgcagctggggtttaacgggacgtttgattattggctaattaattatcttcttcattatttttctggacgagtgtatctataactattaataaatggaattatcttatttagtgtatatattttctagatagttttatcctttatcaatttatttattttttaacaattatcccactactttttag

SEQ ID NO: 10905 - DNA, 543 bp, Glycine max
  misc_feature (143)..(143): n is a, c, g, or t
  misc_feature (183)..(183): n is a, c, g, or t
  misc_feature (436)..(436): n is a, c, g, or t
  misc_feature (447)..(447): n is a, c, g, or t
  misc_feature (463)..(463): n is a, c, g, or t
  misc_feature (467)..(467): n is a, c, g, or t
  Coding DNA Sequence Number=SeqID_1126
tctgctgcgttgtgactgcggatcgtggcttcgtattctcgatatgtgacggacaccggctacgagcgtcgcggaaaggtgcgtggacggagagcacgtacagtgactctcgatgtctgtcgagtaccgcgtgatgtgagagngcacgagcagcctcaacatcaaaccgcacagcacagcgcntcctgatcctcgccactctatgtcagtgcgcgcgtacgtccgatatctctcctctctaatcctgcatatctgtctatcgcgccagtagatagatacagaagagatcgtaattgccactctcacgatactgcactgcagttctgcgacgcgccgcgtggtaacgatgcgctcgactcgagagtatcagctgcggccgtgcgtataatatgacggaaagataatagagagataaatggagaatatacaaactacnagtatataatnacgtcagcaacgcagnatgnaatataaacggacagtgtataccggaatgagaagcgataattcgactacgtatcacatactgtagaacgctcctca

SEQ ID NO: 10906 - DNA, 374 bp, Glycine max
  misc_feature (306)..(306): n is a, c, g, or t
  Coding DNA Sequence Number=SeqID_1127
tcgccatctggttgtcgagttcttcggcggtgctgcacacctttttctcgaaacgggagcctaatacgggctccttgcggcaaaagactacgtccttgccatgcatttccgtcttgtaaccggccgcccgcagcttcttcagtcgctcgtcggccgcggcgtcaccggcgaccagttttacggttttcgtaccgtcagcggcggcggtcgtggcggccttgtccttgtcagtcgtcgctgacgacgtgccggtagtggcgggagtcgtggatgccggtgccgaggctgctggtgcttgtgccggangatccgtcgccattgcttgtgacagcgcgcagatggaaagaacggtgaaaagaccaattatcatgcgc

SEQ ID NO: 10907 - DNA, 522 bp, Glycine max
  misc_feature (455)..(455): n is a, c, g, or t
  Coding DNA Sequence Number=SeqID_1128
tactgcacacatacacggcatcatggatatcataagacgatgagacacgcgtaatgaatacagatgatggagtacgaagcaaatttcttcttcccggcagggatgataccattagaatgtggcaccaatttgtatcgcctctaaattgatacgagctttgagaaagttttggtaaggatctagcaggattgtgaagatcgtgaccgcactagggatgggcacatgagaaggaaatgatactgtaaggtgattgatgcatcctctactgcaactaccgctatgagtaaactgataccagcattaacggaggtaaatgcggcaattgcgggatttgagaaagttgacataagcttaagaagcacggccaagatattagggacagtttgttgcgtcgctggagccttaaccatggctttggtcaaaggacagaagctgttacacacagagttccttcncttctatacatcttactggcagtgaaggtgacgattggctgctgggttgtctaatggctcttagcaa

SEQ ID NO: 10908 - DNA, 347 bp, Glycine max
  Coding DNA Sequence Number=SeqID_1129
gcgcgttgtacacctccgccgtgaccctctcggcagcccaatgcaaagcagtttccccctttatagtattacaccaaaacccaatgttttcccatgatggagcatacacccaccaaccctatccctgtaccccccctgtatagcgccctgcccccccccccacctagttgctcctgggttaactgggaagcatgcgcaattttctctagagttaccccccccccccagaggggattttcccctcccccccctttttcccttgtaaattggatgatgtatttcctatcgctaaaaatagtgaggtgattttgcccattatcgtcaaagttgagttttatttgtggtgt

SEQ ID NO: 10909 - DNA, 509 bp, Glycine max
  misc_feature (454)..(454): n is a, c, g, or t
  misc_feature (465)..(465): n is a, c, g, or t
  misc_feature (476)..(476): n is a, c, g, or t
  misc_feature (481)..(481): n is a, c, g, or t
  Coding DNA Sequence Number=SeqID_1130
gtgggtaaatattcccttacagagctaaaaaaaatgctggaaatcaattagttcttttggttggccaaactttttgtttaacgttgctggaaaggtttaaccctttgtaagatgctgtttttcgtgaggacaaaacttatatatgcgggctctactgtttgtcaattaaaattgggaattccatctaagtaattcgcattttaacgtttgtattaaaagattatataaattattgagacaaaatttcattttctgattagaaaataggacaagcaactcctaaagcaccctatataagttttttccatttctcatcacccacttcttgttgctttgaattgaggcttgattcttctgtttgaggcggcctcttaattaagtgtcctttgaccttgtgggcaggtggatgaagctccccaagttcgatgagcatgctcttctttgcaacaccttnggacaagccanggtgtgatcanaagtnctgtgagcaggaagtgcaggaaccatct

SEQ ID NO: 10910 - DNA, 555 bp, Glycine max
  misc_feature (88)..(88): n is a, c, g, or t
  misc_feature (373)..(373): n is a, c, g, or t
  misc_feature (487)..(487): n is a, c, g, or t
  Coding DNA Sequence Number=SeqID_1131
gtagagttacctatcatctgctggatagaaacctaatgtaatagatacaatgtatatgacgtattagatacaagttgaagagaccaancaccacctatctacagcacaccgtccactcttatcttagaacacagaattgcacgataaacacactcaccacacatatagacagtgtgagagagcagagataagtgaagtgccgtaccaaatgtagtggtaatactgcgcatctgcacactcacacatctataaacaagcaatcccttgtatggacaacgacttcgacacggagtgaggaggatgagtaagatacgtgcgcgctatatagatgtatatagataacatatacgatcctacacgacactacgcctantatgaacgtacgaataactagataacacatagacgctcacgaacgcgatagataactggcagagagataacaacagtacacaagagtatgagagatccaccgcgatctaacatnatagatacacacccactacacgactgcatgcgacgaagacgagacacacggatgtctcaacctatatc

SEQ ID NO: 10911 - DNA, 556 bp, Glycine max
  misc_feature (26)..(26): n is a, c, g, or t
  misc_feature (69)..(69): n is a, c, g, or t
  misc_feature (183)..(184): n is a, c, g, or t
  misc_feature (275)..(275): n is a, c, g, or t
  misc_feature (338)..(338): n is a, c, g, or t
  misc_feature (459)..(459): n is a, c, g, or t
  misc_feature (473)..(473): n is a, c, g, or t
  misc_feature (493)..(494): n is a, c, g, or t
  misc_feature (499)..(499): n is a, c, g, or t
  Coding DNA Sequence Number=SeqID_1132
gcggtgcgttgtggtagatctagaanaacggaggtggaggcgagcgagtagacgtgtgctcctcacagnttacaaccatacaaagcgtgtatgagaataatgagacgagtgagggagtagtatcaaacatgcgctgaggatcgtgggcatccagagtagtatatacgtagtaataccagagannttgaaggagagagatagagaggagcggaacggatgatgagaagatgctgacatcgttggcgtatagcagcctctgctgcgtatccagcccnacaacgacaacaacaagaacgagacacacagtgtagtgcgacgcattatacctatttatattntgactatatattctctctgtgatggttggggtgtgtgtagtagagagtttaaaatatagagaaagagaggcggatcgtagaagatggagatgatatatctctaataaccacgcaacactantaggggtgttgagnggcgggcgggggcggggggnnggagnatggtggggtgggataatacaatagataaagagatgaacgtctctgtaagttaatgt

SEQ ID NO: 10912 - DNA, 535 bp, Glycine max
  Coding DNA Sequence Number=SeqID_1133
aactgttttcctcagactcagaccttattctagcctattattccaaaagagaacaatgagcgtagcggtagtgaacagcttcaccataaccgagttcgtaaatgacaaggctaagtttgatggtttcgtgaacgaatggtttgcgaggatagatgagaatggcgatgggaagctttcgcgtgacaaaatccgagggaggttagggatgcttctgcctttcggttcggaatcgccgccgcagcaagagaacgaagagatattcaagaggttcgatgaagatgggaatggtgcacttgatctgaatgagttcaaggccttaatgactgagattatgaatgccgctgctcgtagcattggtggctctcccgtcattgttgttcttggaaaagatagcttgctcatgaaggctgttcaacatgaattggcaacaccgtcttctcattcttagtctttttttttaatctggttcttttacttagatttcttcctgttattttttgtacgttttattgcatttgctatggctatacaccta

SEQ ID NO: 10913 - DNA, 486 bp, Glycine max
  misc_feature (47)..(48): n is a, c, g, or t
  misc_feature (70)..(70): n is a, c, g, or t
  misc_feature (107)..(107): n is a, c, g, or t
  misc_feature (144)..(144): n is a, c, g, or t
  misc_feature (165)..(165): n is a, c, g, or t
  misc_feature (283)..(283): n is a, c, g, or t
  Coding DNA Sequence Number=SeqID_1134
tcaaggcgctgctgtagcgacacggggcaggcgcgaggaatagactnntgaggtgaagtgaggagtatanaggcacagacctccctccctctgcacgaggagctctngcggaggccccactgctaacttcgtgtggataagggnccctgagtagggaagttgcancagctacaaatcaagtctgggtgggccatagcgctggggggtgccggggtacttcttatgactgataagtgcgaataacgcataatgccagaactaatctcctctctgtaacctctgnccgagtagacgtctgccctagccgagctcggagggactaagagaacatcatgatgcaaactaacctttcctactaccatgggggtcctagagagctccctaggcgcaaggatgcactcacgacccacggagtggagaataagaaagagcactccccgcatccccccgggggtatcccctccatctactaggaggcgacaccgt

SEQ ID NO: 10914 - DNA, 495 bp, Glycine max
  Coding DNA Sequence Number=SeqID_1135
ctacggcgaggcatggttgaaattagggcaacaaaaggggcaaaacgaatcgtaggagacagagagagagagcggttcagtgtccggattctataattgcaaaaaaaaaaaaaagattaattttagaattagtgagaattaggaatgttctaatgagttatgctcacggtacatagaaataaatggtttgcattatcattctaacttatttcaaatgtatttaacatgtttttaaaatatataaaccaacaaaatcgtcaccattgaaataatttaagtaatttggctaaaaggttttgattggcattattaaatattttaacttattaaaattataaaatcacatgacaactctttcttattttattcataagaataagaatagaaaaaatatataagaaaatttataacaacacacaaactaaaccaattgacttagatcctattcaattaagtgacaatttattatatacaaactacaaagtgacatctata

SEQ ID NO: 10915 - DNA, 541 bp, Glycine max
  misc_feature (485)..(485): n is a, c, g, or t
  Coding DNA Sequence Number=SeqID_1136
taataaaatcgtcaattcttccctgcagccgccgccgccgcctaccttctccggacgaaccgccgacagggccaccgcagcgtcgttgccggccgtgccttcggggagcaaccgctctgcctgcgccggcgctcactcgctgcgcctccggtggccacttcttctccgactccggcatagatttagccctcaagtgctgaagccccagcgtctcaccccatggcgaagaagaggaagcgcagctctgatgctcccgcccctgctgccgtagagaagcctgacgactctgcgccagagcgtccggaacgcaccctcttcgggttcaaggactcggctgacgaccctgcttctaaggacgcagggcagttcttccggaacaaggagaaggtgctcattacgtgctcccgccgcatcatttacaggtaccggcatctaatgcagaacgtggtgtcattgctgccgcatgccaagaaggacagcaaggntgagtccaagcagagtaagggcagcgcgctcaacgagctggtcgagctcaggagct

SEQ ID NO: 10916 - DNA, 560 bp, Glycine max
  misc_feature (509)..(509): n is a, c, g, or t
  Coding DNA Sequence Number=SeqID_1137
gagacccgttctatattcgcacaactaaccggcaccgagtgtttgaacgcagtctcacactcactgattcatttctattacgttatactgagtacgagcgtatctcgcagcatacatactgtccaactgtctcagcgtcatcacacatgcttcgagcccaatggagagagtgcgactgctgcgccagagtgcgcgacaactgaatacattagctgcgcattcgctgatagtgtacgtacgaatatgatgacagtagaggcagctcacccgcattctatttcctcggcgcatcgtgtttttgtgcgagcgcggcctctatctatttagatactctcatcaatactatagtcagcgacacataccgcgatccaccataccctcgacatctccacaaatactacctcaaaacatcaggcataccgcggcgcataccgtcatgtcgatgctctatcgccacgccctcatcagattatcgtcgaccagtaccgatcaagactccgcgaacatgncgtggaatcactctctgatgcacatcatgctgtcatgtgttcacgcctcat

SEQ ID NO: 10917 - DNA, 515 bp, Glycine max
  Coding DNA Sequence Number=SeqID_1138
tggtctaccctgctgagctatgaggcgatctattgtttttgttgagctcacgtgatgtgatgttctacctcgttggcgtgcgaggatcatttgtcatcgcacgctggggatctagtggcaaacatatacttaaagtgtgtaccagtggttttgtctgggtggtgcgaaaaagggcgaggagggaagagtttgatgagatggtatgctccctagtgcctctctcggctcattgagtctcgtcggcggtatcattatatgcgagacgtctacggcgcccgttggtgttatatgggagtttgggtggtgggagggacggaaggaagttcgaatattggaagaagagtatagatagtgtctgcgcgcgtttgtccctaagagagataaagtaagagactagaatagaggagatttcttctgtcaagacgcgcgggggtggattctcacttgagtttgttgaggagactgggctcgcggcatcgcgtgcgagtggaggtcttcgcagtctttttagttga

SEQ ID NO: 10918 - DNA, 535 bp, Glycine max
  misc_feature (43)..(43): n is a, c, g, or t
  misc_feature (182)..(182): n is a, c, g, or t
  misc_feature (248)..(248): n is a, c, g, or t
  misc_feature (263)..(263): n is a, c, g, or t
  misc_feature (306)..(306): n is a, c, g, or t
  misc_feature (329)..(329): n is a, c, g, or t
  misc_feature (485)..(485): n is a, c, g, or t
  Coding DNA Sequence Number=SeqID_1139
gtccgtccgtgcgtgttgttctctgccgcgctttgcgacatcngcttgtactccgtctcgtgtgcgaggcatcgatccgattcatgccgcactcttctctcatctgtcacgcgctgcgactcatctctcgcttctcgcaacaatgtgctgcgctataccgccaccgcactcccatcacgacnccgccacgcgccacgtgtcgcgcgctctcacgttaagaattggtgatcgcggtatgtaggagagangggcgtgcgctccgngcggtattcgcctggagagctcgtggtcgccgtgactacgtcntgtcatcgttgacctgcaatcantatatatcacacgatatcaactaatagatgaactcatagtgatgtatatcagttctgtctatagatacgtgtcactctctcttcggagaggatgatgctagaacaggatcgtgatattacgaggactctcgtacctcaatcgtcactgctgcaganctacaagcagtgaccagcatcgcgcgctgtatctcttatgtcgcgcctcg

SEQ ID NO: 10919 - DNA, 586 bp, Glycine max
  Coding DNA Sequence Number=SeqID_1140
tttggtcgacagtgcgttggatcttgccaacgaggaactcgtcgagcagcataaagacacgctgaaaattatggatgtcgatcaggaactgaagacgaaattttggggtatgacactctcagcgcagatcaacgcgaaagagggactttttaaaaacgccagcagtctctacaggattggcaaagcggacgtgaagcagagcgattccggggcgttgacggtcgtcgcagaagtcggactaagcgaattgaaaattgaatacaaaacattcagcgctagagctttaggaatcaattttggcgactcagttgaagtcaactgcggaagcaacggtgtcagattcaactttacgatctcaaccgacgaagaaggtaactgcacgtcttctytaaacgacattcatctcacccgattgggcggactgagcatttcttttaaaccgtctggcttcacgaactggatgaagagccatgctttgtcttggggactctacttcggatctggtaccctctacaaggaactgaacagacagattcaaattytcgcccccgccgccatacagcaaatcgacgtctgcgaattattt

SEQ ID NO: 10920 - DNA, 542 bp, Glycine max
  misc_feature (103)..(103): n is a, c, g, or t
  misc_feature (294)..(294): n is a, c, g, or t
  misc_feature (467)..(468): n is a, c, g, or t
  Coding DNA Sequence Number=SeqID_1141
gcatgctaggcatcctcagaggcgacacaacaagcgcgccgcagcagaccaatgaatgacactaagcgtggagatccgatgactcgcttgctgcgtatgtcgnctcgcgctctccatatgtattttatgccgacgtcatacgccaaggatctgcggccacaaagcgaaccagaacccagacagaagatgagcaacgaagatacacaaaataggaaacgcgccgaggctgctgtgagaggcaggacatgatgagaaacacccgcggcaacaccacagggtggagggagggaaggncgttatgcaagaggacgatatgtttattagtggtgacgcctctacgcagatatacattattcgaactaacaccatactaattagagaggatgagcatccactcttttagcgcgctgcgttctgccgggtgcgattggatttacctcctgagtcgttcttgtgttggagggtannttgcgctctatgctgtgtcgtcttttgttgggaggggtccccccgtctgcctatctttggtgtcttctctgttt

SEQ ID NO: 10921 - DNA, 576 bp, Glycine max
  Coding DNA Sequence Number=SeqID_1142
tatctgtatcttcgtgtatcctgtccttgtagatctctcacttccgtgtgccgccatcaacatgctcgagcaagttgtctgggaggtctctgtctcttcttctgttatcaacgacgtacgctacactatctaactatcacaacacaatcgcttcgttagcatacagtgagaagccgcaataggctacactgcaacttcactcttatatgtaattctatctctgctctgctcccgcccccgcgtatgacccgcacgtccgcggttaccgcggttgattgcgaccgtgcgcgctgcggtttgcactgtacttgtagtagtgtcgtgctatgaacgattgggactcctccacctacactctatactccatatcgatgtacgacgatctcgcacacccacatgcgcacgctcatccgctgatattacaatattcaacatcttacttcctactacaataatcccttaatataataatccaacagcagagaacaacgacagaatatatgaaaaaacacgttaatacacaactcatcttttccttatgttctacgtccttcatgttcgcaccttgtaggtcac

SEQ ID NO: 10922 - DNA, 445 bp, Glycine max
  Coding DNA Sequence Number=SeqID_1143
taatcgttttgggttcgtctctctcgataaaagggtaaaacgcagaagcggcccgacgaagaaatcaggtatcaaagatgaaatcattcaaggaagaattgacgttggatgaaaggctcgcggaatcgagggagatcatcgccaagtatcctactcggattcctgtaattgctgagaagtattctaagaccgatctgcctgcaatcgagaaaaagaagttcctggttccacgagatatgtcggttggacaattcatctacatcttgagtgctagattacacttgtctcctggtaaagccttgttcgtcttcgtcaacaacactctccctcaaactgctgctctgatggactccatctacgagacttacaaagacgaagatggattcgtttacgtgtgctacagcagtgagaaaacctttggttgatactaccacaccatgtttgt

SEQ ID NO: 10923 - DNA, 514 bp, Glycine max
  misc_feature (310)..(310): n is a, c, g, or t
  misc_feature (389)..(389): n is a, c, g, or t
  misc_feature (395)..(395): n is a, c, g, or t
  misc_feature (437)..(437): n is a, c, g, or t
  misc_feature (461)..(461): n is a, c, g, or t
  Coding DNA Sequence Number=SeqID_1144
taccctctacaacacttcatttatttacataataaagacacacactactccgatataattggcgtctattgagtgagtgtgattgtatctaaccaccctcctctgaccgcgaactaggacagtgtactccggccagcgttctacacattattacgaggagatgacgtctagtgagtagcgcaatataggcacaggcaaccacaaccgatacatctgtcaattcgtacgaccgttcgcatcctccgtgtcgcgatacatacagggagtgacatgatgcatggacggtctctctctactatcgacacaaagnctcgcaatgatgctcatcgaatgcgaagtcgccatatatatcacacaacaatcatacgctgaaccacatgcactaggcntcgccnagccgcagctcactgtggctattagcgttgttccacagaaangacgagcgagtaatactcatatanaacggtattctcggacactcgttatcgtgaaatgaccctatagaccgcgtatt

SEQ ID NO: 10924 - DNA, 193 bp, Glycine max
  Coding DNA Sequence Number=SeqID_1145
caaacctcccaaggtatacatcaaaaactgttaccgtattctgacacccattttcttcatttcagttaaactttcatttacaaatgactatggataagcaaagagtttcttcctttgccatatttgaaggtggaacatctgtttttctagagcaacacacaaacacacacatcagcagctatatacagatata

SEQ ID NO: 10925 - DNA, 189 bp, Glycine max
  Coding DNA Sequence Number=SeqID_1146
attcctaatcttatcttgtctctgctacattgtgttttctctactgttggcctttcaccacccattccttagttccatacaccatcatagatcttatgcttgtgtcttgaagtttccccttaagcttaagcggtacctttttgttgttagtctcacagtcacagtatgggtgccattctgcttagcgca

SEQ ID NO: 10926 - DNA, 133 bp, Glycine max
  misc_feature (30)..(30): n is a, c, g, or t
  misc_feature (35)..(35): n is a, c, g, or t
  misc_feature (40)..(41): n is a, c, g, or t
  misc_feature (46)..(46): n is a, c, g, or t
  misc_feature (48)..(48): n is a, c, g, or t
  misc_feature (50)..(50): n is a, c, g, or t
  misc_feature (54)..(56): n is a, c, g, or t
  Coding DNA Sequence Number=SeqID_1147
tgtgatgcattccatctcggaagagatcanggaanaaganncggcnantncttnnnattactccaaagcaaaagacatctgctatcccgggaaagttattcacagtgtgttcctgaataccatcaccaatgcc

SEQ ID NO: 10927 - DNA, 583 bp, Glycine max
  misc_feature (267)..(267): n is a, c, g, or t
  misc_feature (274)..(274): n is a, c, g, or t
  misc_feature (407)..(407): n is a, c, g, or t
  misc_feature (474)..(474): n is a, c, g, or t
  misc_feature (499)..(499): n is a, c, g, or t
  misc_feature (547)..(547): n is a, c, g, or t
  Coding DNA Sequence Number=SeqID_1148
cagtatgtatgtgtcgtatgtgtccatgatctccactacctaacacgcaacacttctcctcacttcggactttagaaaacactctcagccatcgtgtcgcgttcgcatcttgggaaaacgagcgctgtacgcgcccatcctcacagtcctgccactaagcaatatctcatgcttccgacattcgatctgaatatcatatatgttagagatgtcagcatcatctgtgtatcgcacatggtgagcgccactgcgaattctgcagaccantgaaccngtatagatccgtctcgctatcttatattctatatctcgtatgttatttgtgcgtctgatcttagcacgtctgaggtactagtgtgtatcttgatgcacgtcatagatggtgcatgtctcattctcagcgacgngcctcgccgcacaacatcgcgcgcgccgtcggtagtagggacgacgtggatcacgacggtatgtggncgcggcggtcgtctggcgctcgatntatgtcatatggcgcttctcactacagacacgtagtgttatagtagtngaagccatatgatagatcagcgctatcgtacgcgtg

SEQ ID NO: 10928 - DNA, 232 bp, Glycine max
  Coding DNA Sequence Number=SeqID_1149
gggttcaccaagctattatttacgtacccgtcgttccccacaaagattggtcttcaaggaaggccctacttcaacttcccattcttccccactgggatattcctcccctgagaagacttccctgaaaaaaaaattttgtactggggcctaacaaggcctttcggggccaaaataaggggcccaccttggggcccggcttgtccccattttgctggcatctgcttattccacc

SEQ ID NO: 10929 - DNA, 522 bp, Glycine max
  misc_feature (497)..(497): n is a, c, g, or t
  Coding DNA Sequence Number=SeqID_1150
taatcttccttcttgctcttaataggtacactcatcatccaaattaccgaaataagcgtcctttccttcctcgttcatatccatgatcaacttgaaagaattgtccctgctgacctggaactccttctcaaatctgttcttagaagcttcagcataatcctgtctgtatctggtgtagtcaactgcaccattttcagcactttctctgctgaccttcttaaggacatcaaggattctggtcattctgcttctgtacaagccgtattggatctcgaacaagtcttcaagcatctgaacaaggaaattggtcttatgttcattggtaccgataagctgagggcttgagttacattcgatgaaccacaagttcaactcatcatcgagcatgaagtccaaaccgaacatctcgtacacgttactctggttccagaaagcgtgggcagacattctgacagtatggatgaaagcttcttggaagcttggcttcaaggtattgntaacccagttcttatccttgacttt

SEQ ID NO: 10930 - DNA, 325 bp, Glycine max
  Coding DNA Sequence Number=SeqID_1151
gcataaactttatatgatctggaaatacgaccctaatattgattttgtgatgctcaaagacatcaaccaatcatttacaactaataaacatattattacactttaccatttaataaacaaaagaaacttaaaatcctataaacaattttttataacagcatatagttttatatacctaatatatacatattctaagccacatattactcttctaaataacattaccataactaataatactaaaatctcaatccctaatacatttcaatttacaacagacaaaactatttttactacccctaaatatcttattagataccaccct

SEQ ID NO: 10931 - DNA, 407 bp, Glycine max
  Coding DNA Sequence Number=SeqID_1152
aactatgcgtgccaaacttgcgcgaacagcgtggttgcacacacctgtagtgcgacacaaactttttattttcattgtcctctctacaccatcggtggccctcatggtcaatatacgccacaatgcggcaaccttctttctaattttgtttttgggtgctatatggggggagaaaataggtcgcaaatgaatagcggttgttaatatgggattttatgtgttgtataaatgggcgcacaccggcatcgaatagcgcgtcacccggtgcgaaaaacgggcggaaaaatgtcggtctttctacgcggcgcctcggtctaacacgggtataactgctaaacggcaaacatccgggctgttgtaatggtgtataaatggtgtggcaaaggcgggcaacaaacacgggcaga

SEQ ID NO: 10932 - DNA, 347 bp, Glycine max
  Coding DNA Sequence Number=SeqID_1153
gctctttgacgggttcgctgatgtttaccatttctaaatatcctcctctctttccacattctccataaaatcccttagaaacagagtgaaaagagacaagttctaatttttgatatttttcttccatttctcttaatacttttttaaatgaaataaatgattggccctctttgtagatattgtcttggtacacttcgtcagccattaagattaatttatttctgtagcagaaatccacgacctcttccatagccttgcggtccatggtatttccagtgggatttccaggattaataacaaccaaagctcttgtattaattcctttctttttggcctcatccaaagcc

SEQ ID NO: 10933 - DNA, 342 bp, Glycine max
  Coding DNA Sequence Number=SeqID_1154
cactcccccgccaatataatattatttcgagtaagatcgatctctaccctcaccttttaattagccattaccaccaccccaattcatgaacgataacatgaccgccatggctgatcaatgcattcatgatccatccatagaaagactcatggatgcaaccatgtcatcatcatcagagggcatgatgatgttgagaccaaccaattcacacaactacacaacaagtggccacaatttaactccaaagggttgtgcattcaaaccaatccgaaggagatctagaacttctaagagcactccaattacccttctcaaagtcaacacctaccatatcagggcatt

SEQ ID NO: 10934 - DNA, 576 bp, Glycine max
  misc_feature (274)..(274): n is a, c, g, or t
  misc_feature (291)..(291): n is a, c, g, or t
  misc_feature (320)..(320): n is a, c, g, or t
  misc_feature (325)..(325): n is a, c, g, or t
  misc_feature (348)..(348): n is a, c, g, or t
  misc_feature (417)..(417): n is a, c, g, or t
  misc_feature (517)..(517): n is a, c, g, or t
  misc_feature (529)..(529): n is a, c, g, or t
  Coding DNA Sequence Number=SeqID_1155
gcgtgctcattgtcatatcgttggagtataggcaccgcacacccttgtctgtgtgtcgcatactcgtgctttatctcaatagtctagaaacacgagcgagtgcgtggcaacgtatctctctgtcattgtattacttatattattctaatcctgttactacagcacatatctcgttacgacatcgttcgtatcgtcgacagtctcgcgtatgtgtgttgagttctactacacgttgcttcgcatcgcgactggcgtgtcgcgcgccgctcgtttnctcgcacgcgcgcatgngtacacgagcacgctgcctgcgcggagantcaangaacatcaggcggtctcactggntatcgatcgacatctatctcgactcgcgcgctctctcgcagcggtatcgcgatatatcaacacactcgntcgagtaccggcgtgcgcgtcgcgcgcgtcgtgttggtgcgcatattgattgatctcgcgtagcgcgcggcactctctggatatcgacgtcatctgctcncgtcgatctcgnaacgtgtgcaggatcctgcgtctgcgtcgccgcagtatgtgatacgt

SEQ ID NO: 10935 - DNA, 557 bp, Glycine max
  misc_feature (111)..(111): n is a, c, g, or t
  misc_feature (130)..(130): n is a, c, g, or t
  misc_feature (293)..(293): n is a, c, g, or t
  misc_feature (298)..(298): n is a, c, g, or t
  misc_feature (316)..(316): n is a, c, g, or t
  misc_feature (324)..(324): n is a, c, g, or t
  misc_feature (368)..(368): n is a, c, g, or t
  misc_feature (402)..(402): n is a, c, g, or t
  misc_feature (458)..(458): n is a, c, g, or t
  misc_feature (483)..(483): n is a, c, g, or t
  misc_feature (532)..(532): n is a, c, g, or t
  Coding DNA Sequence Number=SeqID_1156
acgtctcacacacacgatttcgaatatgacgtactagctgagagcgtgacgtctgatctactcgcatgcttgtagatcctacagagagtacacctacccaggtatattatntctatcgtactgagacacngctacgcacatcgtcgtgcatactgccatctgacatctagctctcacctcacgataactgtgcatctacggagcctctgtacatataatacataatattcatctcagcattaatcatattataatccatcgatgtatgagtctctcgacgcaccatgctctcnctatngcatccactgtcatcgcnccgcgtgnatttcgcagctctaagcgacgtcgtatcccactgacgtgatgancatcatcgctagctaggagctatatgatatgcgngcacgacagcagacgatcgatctcattcgagaatgcctatccactgcatgctcatnatgcattcactacactatactaaantctataccatacagtctacactgtactgctactagtcagcgcagtcgcngccgtgaatacgctaatcttcctat

SEQ ID NO: 10936 - DNA, 428 bp, Glycine max
  Coding DNA Sequence Number=SeqID_1157
cgatttctctctcgaaacaaacagcaaaaacagaaaaataattcatcatgaaatttgtcgtgctcgcagttttgttcgccttcgttgcggttgctgttgtcagtgcattaccacaaacaggtggtgcaggtcaaactgctgcaaatgcaccacaaagtgcagccggagtgagtgaggcagcaagttcattgcaacagctcatacaaactctactaagccttgtggaaggattaaccggaggaaagcttggaggattacctaagagtctccctgttggtgatgtcgctggacttgatagtctccctttggttggtggtggtgatgccgctcaaaattaagacaacctcagaaaaatcaaaggaccacggaaaatcattctcaaaatcaaactaaaaaatttcaaaaacctgcagatcgattttaattga

SEQ ID NO: 10937 - DNA, 416 bp, Glycine max
  Coding DNA Sequence Number=SeqID_1158
gatatacattaagccgaggtcggacgaaacaataaggaacaactcgaccctgatgttaatcttggtaggtgattatggatcttcgatggactgacaaattacctgtgatagagttgcaatgactgcgctctgacgcatacgcaacaacgttcggaacctcctcaccctctactagaaaaacccgcgccggatcttctagggatacgcgctgctccgaatgatgttccacttacggtgctcctcgcatgacacacctaacaagcttgattacgatctcgtcctcaccgtcgagaactttctcgagcgccgcctccatacccttgttttcaactccggcatggtcaagtccctccactctgctacggctcttatcaagcatatacatatcagggttggttaggcagcggcgaacatcc

SEQ ID NO: 10938 - DNA, 407 bp, Glycine max
  Coding DNA Sequence Number=SeqID_1159
ggtcaagtcggtaccaagcttaaggtgtctttgggtcttgcccaaggtgccttgatcaactgtgctgataacactggtgctaaaaacttattcattatttctgctttcggtattagaggtcacttgagcagactccccagcgcctccgctggtgatatggttttggtttccgtcaagaagggtaaacccgaactcagaaagaaggtcttacaagccgtcgttgtcagacaaagaaagccttggagaagaaaggaaggcattttcatctactgcgaagataacgctggtgtcatcgtcaaccccaagggagaaatgaagggatccgctattaccggacctgttgctaaggaatgcgctgatatctggcccaaggtcgcctccgccgctggctctatcatctaaacaaa

SEQ ID NO: 10939 - DNA, 571 bp, Glycine max
  misc_feature (149)..(149): n is a, c, g, or t
  misc_feature (169)..(169): n is a, c, g, or t
  misc_feature (185)..(185): n is a, c, g, or t
  misc_feature (216)..(216): n is a, c, g, or t
  misc_feature (438)..(438): n is a, c, g, or t
  misc_feature (458)..(458): n is a, c, g, or t
  misc_feature (462)..(462): n is a, c, g, or t
  misc_feature (472)..(472): n is a, c, g, or t
  Coding DNA Sequence Number=SeqID_1160
atgagacgtttgctatgtcccacgagtatactgcgaccgcgtcagtccagtcactcgcaatgcgcgcgtccatcgacgcagtactcggaaatgtaaccgacaccgcacgcgcgacgaacgggccgtgtgactgattcgtactatctagncatgtgagtgactgacacangacgtgacatacgcanctgcgtgactgcgagcgctcgcccagacatnccactgagctatgatcctgttctcacgacaccgctctctcgttgctccgcagtcaatcgcgcgcgtcgctcgtcgtggtcgaccgcgctcctgctctctcatcactcactgcatcacgtgccatacgcagcgcacgtcgctgatcatcgatatgtactagcaatgagcgactacacagctcgtctgccactgactcacatcctatacctgacgctcgtcgantacctagcttacctgagtantgcnctacgctctnactgcatatgtgcgcatgcagtattactactcgatatgataatatgtgatgcctatcgagtgtctctagcccgacacatcgtatatgagcgcgtgcgca

SEQ ID NO: 10940 - DNA, 133 bp, Glycine max
  misc_feature (67)..(71): n is a, c, g, or t
  Coding DNA Sequence Number=SeqID_1161
agaatgagggtctcggctagcaccgcctccgcgatctcaacgacgatatcaacaagctcatccgcgnnnnntcccactgggaacgccgcatcgtggagcacggtggacaatattactggaagcactccgcgaa

SEQ ID NO: 10941 - DNA, 501 bp, Glycine max
  misc_feature (316)..(316): n is a, c, g, or t
  Coding DNA Sequence Number=SeqID_1162
tagatataccgactaccatcagtaggactatcagtgatatgtatagttctgcctccgtccgcttcatatcgttatgttactgtacgtcggacgcggatatgaagtgtctcacttctatgtggattctccaatcactcgtactatgatagtatgtcgtcaagtatttatatatatgtctatgtatctacctgcttaaatagaagacacgagagtgtagcagggctaaagattctccgctccatgagaccgaagggagattaaagcaccctacttgaaggtgagattatagacaatagtacggatggaggaatagaanagtggaactatacctaatactgtcatatctatgggtgtggggatgtgtgcctagcatgatattaacgcatactctccgagattcgcgtaagacggaggtatatagagagataagtgatgagcgctcattcctctctcccgcactcggagggggtgtctctgctatttgtaataagaggcggcccc

SEQ ID NO: 10942 - DNA, 169 bp, Glycine max
  Coding DNA Sequence Number=SeqID_1163
aaagcagtcgatgtcactccatctcttactatcacacttggtattagagagcgcgcttcctagggatgaggagtgatcataatgtggcaggctatatactgtggacctcgcaggctctgagaatatagctcgttctcgcagcaccataggtaaatcataggatgccggg

SEQ ID NO: 10943 - DNA, 178 bp, Glycine max
  Coding DNA Sequence Number=SeqID_1164
atgaacacggatctgaaggtgggcggtgaacatatttcttcgctgttggaagaagagatcactgtgcctactctggccgtaagagataaggatgaaaatgattgcttagctatgcttgatgatcgtagagtctcgaatggggatctttttggcgcctatgacacagcttattctaagc

SEQ ID NO: 10944 - DNA, 580 bp, Glycine max
  misc_feature (155)..(155): n is a, c, g, or t
  misc_feature (180)..(180): n is a, c, g, or t
  misc_feature (186)..(186): n is a, c, g, or t
  misc_feature (213)..(213): n is a, c, g, or t
  misc_feature (219)..(219): n is a, c, g, or t
  misc_feature (318)..(318): n is a, c, g, or t
  misc_feature (415)..(415): n is a, c, g, or t
  misc_feature (444)..(444): n is a, c, g, or t
  misc_feature (458)..(458): n is a, c, g, or t
  misc_feature (489)..(489): n is a, c, g, or t
  misc_feature (544)..(544): n is a, c, g, or t
  Coding DNA Sequence Number=SeqID_1165
acgctcgaatcgctctgactatatgtactttccgtaataatgcgatcttatctctattgatgcgctcgcctctcatctcacggcgagcctcatcattacatctcatgatatcgtcggagcgcaccctacactctcttattacttattctgagttnccagatagatctgtcttattgtcgntgttanattgctaccggacgagatgataatcgntcatangtctatgaattctcgtcctcgagtaatactcttcttacgtcctacaccactcatctcatgcgcctcatacatgacctacgcgcgtctcgtcgctcatantatgtgctctcatcgacatcacctgcgacagatcactctcactgctcgctgatcagtcacacacgcgagcatgagtacatcgtcgcacgtctcatgntcgctacctcgctgtggtcgcaccgactngataccttgcttangccgctctcgatgatatacacagaacgagtntcggtctcagcatatgacctacgctatattatctcgacaatgctcttcacttgtncgatatatatcttgatcgatagacatctctcacctc

SEQ ID NO: 10945 - DNA, 375 bp, Glycine max
  Coding DNA Sequence Number=SeqID_1166
tgagttcattgaggtcattgggaatgaatggtgaccaatttcaaccatgacttgattgaggtcagagactaggttgatccatcattggggcaagatatgagatagagctttggcgtgccgtattcattcgattctctctatcttgtcttttccacgtaaaagactgtttcatttctatggtcggggaagaagcctcatgctagcaagttacccctttggcattacaatcatcagagccttgcatgtggcaagtgaaggaaagatgcaccattttgagaaaaacaaattgcaaaaggtgtagttcttaatttaattatgcttttttacttatttatttattactattgttacagcacaacaatttttcttttggga

SEQ ID NO: 10946 - DNA, 585 bp, Glycine max
  misc_feature (37)..(37): n is a, c, g, or t
  misc_feature (62)..(62): n is a, c, g, or t
  misc_feature (65)..(65): n is a, c, g, or t
  misc_feature (92)..(92): n is a, c, g, or t
  misc_feature (101)..(101): n is a, c, g, or t
  misc_feature (105)..(105): n is a, c, g, or t
  misc_feature (144)..(144): n is a, c, g, or t
  misc_feature (180)..(180): n is a, c, g, or t
  misc_feature (220)..(220): n is a, c, g, or t
  misc_feature (225)..(225): n is a, c, g, or t
  misc_feature (246)..(246): n is a, c, g, or t
  misc_feature (479)..(479): n is a, c, g, or t
  misc_feature (495)..(495): n is a, c, g, or t
  misc_feature (560)..(560): n is a, c, g, or t
  Coding DNA Sequence Number=SeqID_1167
gataatagtgcagacacgggtctataatgagggggcncacgacacactctacgcacgcgtanaancatagtaagcgcgtgcgactgtgacgnactgctgcngtgngcgctactgactgtcatacaagtatacgaatcgggggcnggccgtataatatatatgcggcggcgtgccgagtcnggagatagacatataatgtatggcatacaatgcggcgtangcggngcctggcgcgccgcgcaggantaggtgagaatagactagacatgcggcgcgtgagacacatattacagagcgtcgcgcgcgtgctgccgtataggtgtcgacagacaaaaaatgatcgtcgagacgtattagtgtcgtgccgcgtatacggtataaatcacacacacatatcatcgcgcgcgcgcgcggcgtgtacgtggacgcgctcgttataatactcacgaagtcggcgtatagtatgactcgcaggcggnccctggcatacataangacgatgtatatatcactcccgcggcgcatgcgcgcgcagtataataccgatgtattgatactanatcgtcagtcgtttagcctacgacg

SEQ ID NO: 10947 - DNA, 387 bp, Glycine max
  Coding DNA Sequence Number=SeqID_1168
accttcaccgtgctggactatatgacgggttggtgattggtcggaagtcccacatcacggacgtgttcgcgatgacgcagatcgacggccgcatgtgccaggtcctcgatcaccatgatggatgatgctttaacaaccagaagcatcaggagtacatatggagagaagaagcgcttagcataggcttcccttgcttacaattgcaggagcaaaactcatttgtctgcatgataatttaaatcctttgttgtcggtcatgtgctataaatggtcctgtcatgttaatcaggccatgtatatggatcagagtggaccagaaatagaataccttgtgaaattcattttcgccatcctattgagatgtgggtgtttattactagagaagct

SEQ ID NO: 10948 - DNA, 524 bp, Glycine max
  Coding DNA Sequence Number=SeqID_1169
gtaaaactctcaatctccaaggtgaaaagaaaagggatttatgtatatggataacaagtcaccaagcaaggagtcccaggagtagacacgtgagtcgattatcgctatctctaactctttacatgataaaactctggaatcacagtctggcttggagagcaagaaatcagatggtgttgcgatgcaaaaccgtgatcaagatgacaagcttaggtctgaactgatttcaatttcttatgctgactcccctgatgaaaaaatctgatcagcgtcaaaggtaaactacttcatgtgtaaatcctggattaacgtgaggcagatctttactctaaggcaaaggttgcgacttgactgcttatatactgactgagctatcgcgcaactatatgtaaatactttcagcggctacatgtgtgacgcatatgatgaaaccaccccgccaactgaaaagtgcggatgctcaaaattacgtaaacctgagggagaagcttgacaaccggaaacacacttaaatcgcttatcga

SEQ ID NO: 10949 - DNA, 399 bp, Glycine max
  misc_feature (140)..(140): n is a, c, g, or t
  misc_feature (328)..(328): n is a, c, g, or t
  misc_feature (361)..(361): n is a, c, g, or t
  Coding DNA Sequence Number=SeqID_1170
ttgtctcattgtcttctcctttcttgccaattcatctctttgttcttgagtcatttcttcccttctcttcaattccaactctctgagtctagcttcttctctcatctccctttgtttcttttcaatctctcgagtttganctaactttgcttcattaattctcaacagagtctgctctcttctttcatattccgaatgttcttcttcagtgagcaagtcttttgcctttaactctctcattctcttttcaatttcttctatcaactccttttctctctgttcaaactctcttctttcaatctctctgagttcttcttgttcttgtaanagtttctctctttgagccatttcattttggaanaattgttcactataatttatctctacaatctccctttc

SEQ ID NO: 10950 - DNA, 578 bp, Glycine max
  Coding DNA Sequence Number=SeqID_1171
tatgcacctggttctcaagctatcatgaccattgtgtctgttgtatggattcctatggtctatgtgaaactcctttcaagcttgatccgggacttttgtgctccgcagcgtgcgacatcgaaacaatgaaaattggaagtcttttgtgttgttgtcttctccaaccatctgagaagggaccaatgtatgagaagggtataagccaacatcccctggattgtcgcaatataagtgaagggaatgtgctttgttattgcctggctctgatggtatcaacacattttgatgtagaggctttgctggatgtgaggagatgttgctgctcctggatgtgagtggatcttgcaagtttgcgactatactgttaccaaggacatgaagaattcggtcgaagcctctttatgaaatgcatggttactggagcgctccatgtttgtctagttgcatgttgtggttgcagctgaagaaccttctcctccacgggttagttcatgactactgtgaatgtttttgttcgcgattgtaaatgcgaagctccagggcgtgttgacaagaggatgtatcacgaactgctgaca

SEQ ID NO: 10951 - DNA, 384 bp, Glycine max
  Coding DNA Sequence Number=SeqID_1172
tacctgacaagatggcagcccgtgtcgccgcagctctcgccctggccctgctcgtccaggtggcctcagccgctccccaatacacctgcagctgttccgccacccctgcctccggccccgtctacattggaggtggtgtcggcccagtcgtctaccctagcggcggtgtgaccattgacacccctgctcccggccccgtgtactgcggtggtgtcggacctaccgtctacggaggtggtgttgccatcgactcttccgctgatgcctacgctgctgccaccgctgacgcttcctactacggtggtgatgtctccactgacgccaacactgtatacctcggatcctcttctggtgccgtcagtgtgaccgacaactccatctacg

SEQ ID NO: 10952 - DNA, 585 bp, Glycine max
  misc_feature (105)..(105): n is a, c, g, or t
  misc_feature (271)..(271): n is a, c, g, or t
  misc_feature (276)..(276): n is a, c, g, or t
  misc_feature (279)..(279): n is a, c, g, or t
  misc_feature (399)..(399): n is a, c, g, or t
  misc_feature (439)..(439): n is a, c, g, or t
  misc_feature (473)..(473): n is a, c, g, or t
  Coding DNA Sequence Number=SeqID_1173
tatcgttggcaacacactctagaaacgatgctcatacgttgcatgaaaatatatatactatcatgagagctcgtacgtctcgacacgtactcgctagagccgcgngcatacccttcggcattgagagcgtgatacgaatgatgtgtctctctttgagcttcacactctcatctacaggtgcaaagacgaacaatatgtgactatcatgcaacctatgatacaatacggtatatcgatacacaccgtatgagtatatgcacgaatcagatangagancantactcgcatatagcgcggattcgcatgcgtaacgcattatcaatctatctcgtatagtagcgcgagatcattatatcgactacgcaattagacgtgcgcacgttgtgtgtaggtatatgngccgatatgcataagtagtctatgtagctgcgagcatatnctcgtaccatactagatcgtagtgatagcgaaantatacccatcaatctacgtgtgcgagacgtgattaaacgcaactctctctctatcaagcgtacgatcggacagctgcgcgcactcactgccatctgcattagtacataccac

SEQ ID NO: 10953 - DNA, 599 bp, Glycine max
  misc_feature (131)..(131): n is a, c, g, or t
  misc_feature (192)..(192): n is a, c, g, or t
  misc_feature (357)..(357): n is a, c, g, or t
  misc_feature (387)..(387): n is a, c, g, or t
  misc_feature (436)..(436): n is a, c, g, or t
  misc_feature (496)..(496): n is a, c, g, or t
  misc_feature (530)..(531): n is a, c, g, or t
  misc_feature (535)..(535): n is a, c, g, or t
  misc_feature (569)..(569): n is a, c, g, or t
  Coding DNA Sequence Number=SeqID_1174
tcggtggtgcgcattgtaatatcataggtgtctcatgatgttgttagagaatgaatatatgagagttcatataatatgagagatgtcggggtgagtatgtagggtgtgcgcgtgagagcgagtcgccgtgntcctcctatgcgctggcgcttctaccgcattgcacggcaccactctactttactaccgcancccgaccaacaccacgacgcgcaaatcacagagtacgcaggagagcacgacgatccgtgggggtagtcatggggtagcgcgaaatacgagacgtatgtgtctatatggtaggaaaggtatatgttacgaagtacaataagagcgcgacagggtggtggagagctncggcatagccgcgacagccgggagatacanatcatatctcacggaactactccaagcaggctgtctatcctcctaatanattcgtgtgctgaggtgtgggcgtacagactcggtggagtcatgtttgtgattcataatnagtgagagagcacgcgatacttgtgccgcggggnntaanaaaccacactgtcctcaacccccctcacatttgnctccccacagagcgcgccaggatgaataag

SEQ ID NO: 10954 - DNA, 370 bp, Glycine max
  misc_feature (83)..(83): n is a, c, g, or t
  misc_feature (85)..(85): n is a, c, g, or t
  Coding DNA Sequence Number=SeqID_1175
ggcgacaagttttctttatccaccgcctccgtctgttttgctcaatactatgaccgtcgttggtttagccgctctgccggttntnggtctgtcggaagtgagaggaaataatctgaaatactccaaattcaacaacaacaacgcatcatcatcatcacaaaaacagcgattcggtagcatctcgagcagaaccggaatgctttgtctatacacgccagcgtttctagccgcatcggcctctttcgtcctctcaccttctcaaaatctcagattccttcttctcaaatccgcactctccatccatttcttcaaaaggatcttcgaggttctgttcattcacaagtacagtggagagatggcctcagacgca

SEQ ID NO: 10955 - DNA, 538 bp, Glycine max
  misc_feature (266)..(266): n is a, c, g, or t
  misc_feature (432)..(432): n is a, c, g, or t
  misc_feature (490)..(490): n is a, c, g, or t
  misc_feature (496)..(496): n is a, c, g, or t
  misc_feature (511)..(511): n is a, c, g, or t
  Coding DNA Sequence Number=SeqID_1176
tattcatctcttgcgtattctgagcgctcttgcgcacgtattatatgcgcggtgtatccaagtagtgtgtatagatcgaattattgctgcgctcacgatagaatctccatattaatatagacgagatgacaccttatgatgtgatacagttgtcgtccgtcaggtcgcaaacgagcagcggatatatatggataaacttgacatctgtcacgcttgtcgccgcgtccttttgtcgcgcctcgttctcattatgtttacggggtgcnccgtgagcacatctcgatagtacagcgatagcgatactgtacgtgttctcgctctttttattatatggtgaagaaccacatatacaagagacagcaccccttctcactcgatatcgttatcaactccctccggtaggacatccacaactaccgcctgattctatanagtcaagctaccggctcactctgtcacgtcgcgcgtctaggtctgaccatcagtactncttgantaaatatactgtcantagtgtactcacgcacacagatgcata

SEQ ID NO: 10956 - DNA, 376 bp, Glycine max
  Coding DNA Sequence Number=SeqID_1177
actacactctcgtctctaaatactgacgacgtccccgccgcgaaacctcctcctcagaactttccggcggcgaatccagctccagtgcattggcgagtgtacatgctctcaacgacgctctgactaagtcgattaacgcttataaatatctcaaagtatatggaacacggaacgtctcatactagctcagtttgattgaatgagttcttaccctatgaaagcttgaggctgttgccccaaaggaaacccctcgattccccttccggggaatcaacacttgggttgagagctaactaaaattggccctcctgacgaagtttttgtcccgggaaaaaaaccaaaaaacacaattaaacgccggttctcccatcgggag

SEQ ID NO: 10957 - DNA, 492 bp, Glycine max
  Coding DNA Sequence Number=SeqID_1178
agcttatcccaaccgtcgaacttcaagggggggtcccgttacccaattctcccctataagggggtcgaattaagttcgctccacgcgcccccggttttacagccccagtgtgtgtccccacccccggggggaaacccctttcactccgcctttttttttttctcccccccccccccccccgccccccccaaccccgtctcttttttttccccacccccacggccggtggggggggggggggtccccctcccctcccaaaccggaaattccaacccgcccactcctcgaccatcctaccaccatacccccgaccccccccggccacagagagaccactcgggggagccgggcggtggacgcgttgcattctttaaattactgctgcctcactaaataatatcccaccccccactgcgccttccagcccgcccgccgcgtcgctcctctcccgaggcacggctcctctcggtgtacgacccaactctgtttctc

SEQ ID NO: 10958 - DNA, 235 bp, Glycine max
  misc_feature (80)..(80): n is a, c, g, or t
  misc_feature (185)..(185): n is a, c, g, or t
  misc_feature (206)..(206): n is a, c, g, or t
  misc_feature (210)..(210): n is a, c, g, or t
  Coding DNA Sequence Number=SeqID_1179
acgagcccacgcaagggcgcgagaaagccggaaaggaaaagcacaaaacgaaggcgggcgggggacgcacacaaaaaagngggccggggcaacaaagccgaacagcccgggggaacaacaaaggaaagaacccagggcgaacaaccaacaacagggaccaaaacagcgcaccaacaagccaaccngaaggcgcacacaaccgaagnccancccagacacacaccggagagcagaa

SEQ ID NO: 10959 - DNA, 513 bp, Glycine max
  misc_feature (314)..(314): n is a, c, g, or t
  misc_feature (327)..(327): n is a, c, g, or t
  Coding DNA Sequence Number=SeqID_1180
aatacgaaacaagctcgcgcgtgcgcaccatctgcgcccccccgctgcctccaccaactcccccgtctcgtgtattctctctggtggggtgttggtgggaattatcatctactgtctgttgtgcgcctgggaagacactatacctcctcacttgcgccctctcctaacacaccaatgctgttatatatacctcccgctgctgctgctattgtcatgaatgtcttcgcacactgcttgtgctatcatgttgtgtctgcctctgtgtggagtgatcaatactacacgttatgcacgttctcccacacccacccccnaccccacaccgcnctccctatatactccacttgtccgctcccattttggttatatgaactatcccctccacttactcatctcgctgtgcccaatacaaatagaggtgttgtgtgcgcttccgctcccccgccgcctcacctgtgttgtctgctcccctcctaacccattatctcgtattgtctgtttgttgttcgtctc

SEQ ID NO: 10960 - DNA, 534 bp, Glycine max
  Coding DNA Sequence Number=SeqID_1181
cagcttctcgtgctatctataccgcccgactcgatgcgtccctccctacaccaacccccattcttcccacccctgcaccccccaacccacgagatctcccgtaattctatcactccccctacccccacccctccccatccccaccctcatcctcattcaccctacccccgcctcttttcatcatccacctccaaagctcctccaaccacatctccagtagcccccccttctacacgcctttctctctaccacgactacacctttatccccatttcacctctccccactctatcccaccccctccccttcccacaccatttccccctaacctatcttctaacacctccctccccctccctccctccacctccccccccacctcccaccctgctccaccctcaccctctttctccctcccccccacaccccctcccccctcaatcttcactaccccctcccccacacccctcacactctcttctatcatctcatccaactctccccctccctcacagaaacccaaacaccccgcta

SEQ ID NO: 10961 - DNA, 508 bp, Glycine max
  misc_feature (203)..(203): n is a, c, g, or t
  misc_feature (347)..(347): n is a, c, g, or t
  misc_feature (349)..(349): n is a, c, g, or t
  misc_feature (356)..(356): n is a, c, g, or t
  misc_feature (374)..(376): n is a, c, g, or t
  misc_feature (389)..(390): n is a, c, g, or t
  misc_feature (436)..(436): n is a, c, g, or t
  Coding DNA Sequence Number=SeqID_1182
atagtactatagtcgtcacggtaatagactcggacagcatacaaagtacgcaacggatagaaggacgaccgaaagcgaggacgagaggcacgagaggcggagagagagggcgcgaagagaaagcacaaccacacacacaacaccgcgcgcacggtgttgttacagaataatataaagacgaccggcgtttgtagtatgtagtnaggacgcgcgtcgcgtctgcacgtcggccctgtttgtctgttgagttttataggttagtgactagtgcggctccaccttccattcggtagttcgttatgaagtagaataagatatggcgatctcatttgttggattgtggtatntnatatgtnttctatataacaataaannnaaggaagaaaaanntcgtctacaatcccagtcgacatacctctaatgtgttatatatctngtttatataacatttaaagaaggggggtgggcgcgcctcttcctccctctttaattacttatcttatccatc

SEQ ID NO: 10962 - DNA, 510 bp, Glycine max
  misc_feature (46)..(46): n is a, c, g, or t
  misc_feature (67)..(67): n is a, c, g, or t
  misc_feature (74)..(74): n is a, c, g, or t
  misc_feature (96)..(96): n is a, c, g, or t
  misc_feature (307)..(307): n is a, c, g, or t
  misc_feature (333)..(333): n is a, c, g, or t
  misc_feature (335)..(335): n is a, c, g, or t
  misc_feature (396)..(396): n is a, c, g, or t
  misc_feature (398)..(398): n is a, c, g, or t
  misc_feature (428)..(428): n is a, c, g, or t
  misc_feature (431)..(431): n is a, c, g, or t
  Coding DNA Sequence Number=SeqID_1183
actacttaatgtttctcggttctcgcgctcctctacttatcgcgcngctgctcgtctatatgtgtgntgtaagngggatgtgttttgtcacatatnaactctatgtgatcatactagcaccctaccaccgaccacgcgcacgtatgtcgagctgcatgtacatccgcgctcgcgccaatcttcctctcttcaccagcgtcgttgtactgattcagccaccagagcggcagacagagaccaacaccagccatctccctccgctcgtcacaacatatcacaatactacataacaacagatacatcgttntcgtatggtggtgtgtgtgtgtatantntgctgctactctcatgtgtgactgttctacgttacgagttcacagtcgcgtcacataccancngtacgcagataatactcctctactactccnctnccgggtgtgcgactgcgctgacgttacgtgtagataagcagaggcggcgctctcatctcgaacaggtccgggcgccgta

SEQ ID NO: 10963 - DNA, 502 bp, Glycine max
  misc_feature (248)..(248): n is a, c, g, or t
  misc_feature (416)..(416): n is a, c, g, or t
  misc_feature (465)..(465): n is a, c, g, or t
  misc_feature (473)..(473): n is a, c, g, or t
  Coding DNA Sequence Number=SeqID_1184
atgtgtctacgttctgatactcttcatcacgcagattatattcggagtggtgctgcgtctttgctgcacacgaacatgtctacgcgctgcagagagagcgcaatacattacagcgcacttgctagcaatagatctattgtttggtctaccgcgcttcctgacttcattggcgatattttcattatatcgattctctgtgacgtgcgtattgatatccttagtcactcacgctgttgtagttgtgcttngtgcacacagatgtactattattagtgcatcgcagccgacatacttagatgcgcctgtcactgagcgtgatctctgctggatatgtgtagtcaagcgcgtcgtgtcgtgctgtcgatcatgagcgtactcgatccttccgagcgcatactagggtcgtgtgcgacgtntatgtgcgtattagatgtatgtcgcatgcgagtcgactgcagtagaaantgtgatgntcacatgtcagcacaaagtacctcgtagt

SEQ ID NO: 10964 - DNA, 170 bp, Glycine max
  Coding DNA Sequence Number=SeqID_1185
tctgcataaactttttcgaggaatgttcacgattagtgtgcccggcggttttggtagaaactgctcacaaggggtataattctgaatgggcttaccactggaccagttatttccccaatcagggcttgccttgtccagtggaaaaagtgtctaaaactcgttatcacgat

SEQ ID NO: 10965 - DNA, 564 bp, Glycine max
  Coding DNA Sequence Number=SeqID_1186
ggtctgttcgggagctcgaaacttactaatacgaaccccacgaatcaccatgcggtaaagcgtgtcactctacccgacatcgagtgaaaataattgtagtgatagaatgcatgtacatcgcgcagaatagagaatcggcgctctcgttatgagcagacgctatatattgcatgatatgataacgctcaaggtatagacacaagagcaggggaggccacacgcgtacgaggcatttaacatctggccaaggagacctctgcacgaccacgcgaagcggcgacgctatttcttgctctcgttaaattagttagagaaaacgatcggggaagttgcgaagacggatgcttagagagctagttcgccaatctacagagtcactatcagtgatgattgtaagcctctgctcgtacctctcgatgcgatagaaagtgtgaaagaggagaaagagaaagagatacgatgccatttccctctctacccctgcgggagtagtgtcgttgtaatataagaataacgcgcccaccgcccgtgggcaggacagtactttcaacctatgtcagagag

SEQ ID NO: 10966 - DNA, 349 bp, Glycine max
  misc_feature (95)..(95): n is a, c, g, or t
  misc_feature (134)..(134): n is a, c, g, or t
  misc_feature (144)..(144): n is a, c, g, or t
  misc_feature (147)..(148): n is a, c, g, or t
  Coding DNA Sequence Number=SeqID_1187
gaaacaaccactaacaagaaccaagaaaccaagcaaatcattgttctctctgtcctgtgttttgtgatttcccccttcaagccaccaccaatggncaacaacgagatgcaagttgagaaggggtttggacttgnaaaagtacantgnngcgttggtatgagatagcctctttcccttcaggaaaccagccaaggatggcgtgaacaccagagcacatacactcttaagaatgaatggactgggcaagtgctcaacagaacttggagtatggcaagaaaaggcacataaggggactggtttttaagctaaacgacaaaggataaggcccagtcaaggccaaagtttaggg

SEQ ID NO: 10967 - DNA, 579 bp, Glycine max
  misc_feature (35)..(35): n is a, c, g, or t
  misc_feature (71)..(71): n is a, c, g, or t
  misc_feature (162)..(162): n is a, c, g, or t
  misc_feature (271)..(271): n is a, c, g, or t
  misc_feature (279)..(279): n is a, c, g, or t
  misc_feature (313)..(313): n is a, c, g, or t
  misc_feature (333)..(334): n is a, c, g, or t
  misc_feature (496)..(496): n is a, c, g, or t
  misc_feature (514)..(514): n is a, c, g, or t
  Coding DNA Sequence Number=SeqID_1188
gcgtgtatgtctgctgttaagtgtgcgatgacgtnggtctgtatcttgagatgatgagcttgcgcgtggangcgaacgctcggctgcaatgtacgaacgtaggagaagtgaggacgagagcgagggtggacatgagcagcaggtagggtgtgatggacggtnctatgatgatctgagtttgatgtagtatgctagcggcgtgttcgtcgtccggaggcgatcagctcgcgacgcgtgaagcggggtcagagagagacaaagtggtaatatnctgtattngatgagtatgtgcgtattgacaacgtagagcgantggtgggtagtatcgagaanntcaacgactctccacccgcacagatatgagcgcatagagacgaagacacctctcgtgagcagcgcacaataaccgtagaggtagtgggacgtatagaagagtgagcagattaatataataattttatctctatatattgcagtcgtcggtaggtgcgcgctngtgcgatagtagctaganagctttaatagattgttctctgcgggcggcggttgtagaggacagacgaggcagaagaatcacag

SEQ ID NO: 10968 - DNA, 543 bp, Glycine max
  Coding DNA Sequence Number=SeqID_1189
gtattttgtgtcgttacacctggtttccgctcccggcaattaaatagattttttttcttccccacgacggccgcgcttccgttggcgtagagaacgttttatcaccaccggcggagggtatttaaacccactttacatttcctctctgtgacccccgggggggcacgaccggaagcgccggtttctctataaacctgcccccgctacctaactcgcgctgcgcaacaacatgagcctaacatattaacaacaaggccgaggtaaacccgcctattttagagagatcagcgccggggcgtaaaagatgatcagatgggttctcaccttttaaaattataccacagccggctaacgattcggtggaggggcattatctgttgataagaatatgtgtgtgtgtagaagcggtaattatgccctcaaatcgcctcgatcgacaaaaggtatgattcaactaataccacacacggccaccgcgacatcgttcacatacttgcgtaaagggtagtacaacctgcgtatagaaaccaagcccaaacaccg

SEQ ID NO: 10969 - DNA, 161 bp, Glycine max
  Coding DNA Sequence Number=SeqID_1190
cagacatcggccaggaactcgttaaaggccccgcagctggcgagaaattcatatgctccccccccctgagcagcgtttcaaaaattgacgctccagggacagggggtgaaacccccccggactatatatagacccaagcgttgctattggaggccccctgg

SEQ ID NO: 10970 - DNA, 537 bp, Glycine max
  misc_feature (406)..(407): n is a, c, g, or t
  misc_feature (412)..(412): n is a, c, g, or t
  misc_feature (477)..(477): n is a, c, g, or t
  misc_feature (480)..(481): n is a, c, g, or t
  misc_feature (484)..(484): n is a, c, g, or t
  misc_feature (492)..(494): n is a, c, g, or t
  misc_feature (502)..(502): n is a, c, g, or t
  misc_feature (506)..(506): n is a, c, g, or t
  Coding DNA Sequence Number=SeqID_1191
gatacgacacgagaaggccaaaggtaagagtcatggagagggatgagagtaacgaagactataagatagaaataattaaaggattctatcttccgccgcgtcgccgttctgtcttgcgcagcgtattgccgggttctgcgtggggtgttggttgggtggcgcgcgggcaggcgctgtgggcggccggtttgctccatccggaggcagcgatctctcgccgccgctcatcactgattaatagtattatagtatatgcgttcgtccgtgtctatattcgagtacgtggattcattcgcacatacatacacatccagatatggcaattcgagtgctcgcgcccgcgactatttgtatatcttattatatctcacgctctatgccacactgcggagaagaaagtggtggnnggtantgcgtcggggggcgccctccccttgctctcctcggataatggacacaactcggccgggaaatatnctnnttntaaagatnnnataaagantaanaaatataataatatatcgtcacagcctctgc

SEQ ID NO: 10971 - DNA, 391 bp, Glycine max
  Coding DNA Sequence Number=SeqID_1192
aaatgcatatcgttcatcaccagaaatccacccgggccagacaattctaatctcttcattctcgttctcggtgcgcttggaggaaggttcgatcacgagatggggaacatcaacgtgctgcatcgcttctcaaacaccaggatcatcctcctgtcagacgactccttgatctttctgctcccaaagacgcacagtcacgagatccacatcgagcggtctgtcgagggtcctcattgtggactgatccccatgggcgcgccctcaagtagcagcagcaccaccggtctccggtggaacctagataacaccagcatgaatttcggcgggctgctgagcacatcaaacattgtggaggaggagattgtaacagtcacttcggattctgatttga

SEQ ID NO: 10972 - DNA, 466 bp, Glycine max
  misc_feature (155)..(155): n is a, c, g, or t
  misc_feature (271)..(271): n is a, c, g, or t
  misc_feature (297)..(297): n is a, c, g, or t
  misc_feature (343)..(343): n is a, c, g, or t
  misc_feature (345)..(345): n is a, c, g, or t
  misc_feature (387)..(387): n is a, c, g, or t
  misc_feature (402)..(402): n is a, c, g, or t
  Coding DNA Sequence Number=SeqID_1193
gcttctttccttcatatgctatattgcaattgacatattggccgcgtgcttcttcgacgtgctgcccgttacgcgcgcagcgctaagccacccgctgcttgccatggcagttgctatgtatatagcactcaggattccttgcgccaccaaacggngtagcttccaacgccctacgtgaccctatggcttccccaacgcctgtacttgcttggggctttcccgtgctacgtcatgcgggggctagtgtgactgatctcctcaaaactacttnttcgagaatgaagatagatgcagaanaaatcccatgctcaccgtcatttggatccccccaacaccctccttntntcgcgtcacacatccggccattatgccctgctacccatcagngcaacctgtgatganatgagggctgtcaacgcgaagcccagcacagccgtaaaggtcacagccaacttcgagttctcgt

SEQ ID NO: 10973 - DNA, 402 bp, Glycine max
  misc_feature (123)..(123): n is a, c, g, or t
  misc_feature (192)..(192): n is a, c, g, or t
  misc_feature (290)..(291): n is a, c, g, or t
  misc_feature (293)..(294): n is a, c, g, or t
  Coding DNA Sequence Number=SeqID_1194
tatgctgtttgttatgttctatgttttaattgtcatatgatcagtattatgtgtattatattatattttcatcatatcttcacatacagactatatcttattactctagacctatccacaacnaatatcccacataccacaccaacgctgcccgagatacatacagtgacgcagctcatagacatcaatganagacaataaaggtcatatctgtctctatactacatctattatctcatatctatacatcttctattcgatcaccaatattataacgcactccatacatnncnnaccagcgtcgctaccctgctcgatgtcaccaacgcgtgtcgctcctagacccgtcacgctctcatcactcatactctctctctaatatcacaaacgacacagcgcaca

SEQ ID NO: 10974 - DNA, 334 bp, Glycine max
  misc_feature (263)..(263): n is a, c, g, or t
  Coding DNA Sequence Number=SeqID_1195
gatccacgtggcgtcgagggaagcgcacgtgagggttatcaagtccgatgggaggaaaaccctattccttgaaccctgcgggtaggcacgcgccaaactgggcgctctcccagtcaccccccccaccccaacatcacactccctctgggttacgattgctttagggcacggcccgctgcccacttctgacgcgggtgcggaactaaagatgttacaagtgtcccgatgcgcttcacccccctctacacggaactatgcgatangctgctcgactgctctgcccccacgagtcccatcactgctagtttacacctgataccgtgcgctgcgtaat

SEQ ID NO: 10975 - DNA, 482 bp, Glycine max
  Coding DNA Sequence Number=SeqID_1196
agttccgctcgcttgtttcagacacgacgtcgatctacggtcggaggaaatttaccggcaatctcagaagagtatccttaaccgtctccgccgccgcagcagctgagcctctcaccgtcctcgtcaccggtgccggtggcagaacagggcaaatcgtgtacaagaagttgaaggagaggtcggatcagttcgtggcgagaggcttggtgaggacgaaagagagcaaggagaagatcggtggagaggacgaagtgttcgtcggtgatattcgagaccctgaatccattgctcctgctgtgcaagggattgatgctttggtcattcttacgagcgctgtaccgaagatgaaacctggttttgattcctaccaaaggaaaaaagacctgaagtcctacctttgaagaaagaactttaccttgaaaaaggttgatttggaattgggccacaaaaaacccaaaaaaatgctgcctaaggccgcccgg

SEQ ID NO: 10976 - DNA, 512 bp, Glycine max
  misc_feature (180)..(180): n is a, c, g, or t
  misc_feature (220)..(220): n is a, c, g, or t
  misc_feature (439)..(439): n is a, c, g, or t
  misc_feature (453)..(453): n is a, c, g, or t
  misc_feature (462)..(462): n is a, c, g, or t
  Coding DNA Sequence Number=SeqID_1197
tatatttttctacatgcgccatctcaggtacgagtggtctcaattagagacgtgcagtagggccgcgctgatggcggcaactactaggctagcgctgttcagcagcgtcggacctcggggcgtgtatatgtagttgagtcttctggagacttgaatgccttcaaagcttattctcttcanagggccgtgttttggtagtcgatcacattgtccacatggngttgatctgctttcgcttgaccaaaggcgcgacaaacaagactccaacaaacaatccaacaacagtaagaagcatggaaatcttgttaaagcccttgcccaagatatcaaaggcaaaactgggtgcgactcgtgtaccgaagatatccaagccataggcaaagaccaaactggtgctttcaattccgctctcgctcgtgataatgttctcgatacccanaacttcgtacttgngggtaaggngccatttcgggtcgaagttgatgacaggtgtatacttgaccaggccttca

SEQ ID NO: 10977 - DNA, 582 bp, Glycine max
  Coding DNA Sequence Number=SeqID_1198
tcagcactcaggtcgatgatgttcacctcaccactaccatgtactctcctcctgacaagaacttccgtctcaggcccggtgaccttgctgagcacatcacttggatgaagaacatcaacggccgcatgcctgcaggctccaactactttgtcgagcttggtcacaacggcaacggcgacatcatcgaggctactgccgatgaatcgcagacagtgtgctctcctgcagacgctatctactacgactaccctccggacactcctcaagagttccagaagcctctaggctctggtgtcaacaactggcccgtcactccagcatcctactcctggagtcttgcttgcgctaagcgtgataccctcgcaagctggttcatgactgctgccaaccgcgacgcattcgcacacgtatctcacactttcactcacttgcctcagaacaacatcacctacagcgatgccaacaaggagatcgtcttcaaccaggcttggctcaagcaggttggcattgctagcggtaacaagtggtctcctaagggtcttattcctccggctatcactggtctccacaacggtgatgcta

SEQ ID NO: 10978 - DNA, 575 bp, Glycine max
  misc_feature (39)..(39): n is a, c, g, or t
  Coding DNA Sequence Number=SeqID_1199
gtatgatcacgcatcctgactagaagaacacgagaggantgcgtggctgcacgtgcaatagacggagcgccggctgtcaccgctgttcttctgacagcgcgtgttattcatcgctcgtgtcgcgggcacctcaccttatgatgcacacattaaacaaatatagcgatcaataatacatactctaccaggaaacgcgaacaacattaatatatgaagagacgaccagagatagataccaacaatgacactaagcagcaagccgcatacataccagtatatataagtatccgcctcagacagtccatataaggtatcagtacgcactcacacagacgagataacacagcgagagagcatagggacaagctacacacaaaacagcacatagtaccgaccaccaatataagatcgacagacgacacgtactagatgatacacgctcctcgacgtgaaacaaccgataacgagcggcaaacaccccatgaacagacaatacggaaacaacaccactgcactgcggtcacgagcctacaacccgctgcaccgctcgacgtcgagcgcaatctgatcaaaca

SEQ ID NO: 10979 - DNA, 208 bp, Glycine max
  misc_feature (103)..(103): n is a, c, g, or t
  misc_feature (167)..(167): n is a, c, g, or t
  Coding DNA Sequence Number=SeqID_1200
aaaaggtcatgatattatggaaaactcttcaacctggttgggattgcccttcttgaccttctatcgccaatttaccaaaaccctttttgctattccacaaaantttaataccctagttaactacaatcttgttaatatatcatgttgccgaaaccagaacctcctanttgagccaaggctcctgctcccatttagtttcaataaaatc

SEQ ID NO: 10980 - DNA, 353 bp, Glycine max
  misc_feature (52)..(52): n is a, c, g, or t
  misc_feature (81)..(82): n is a, c, g, or t
  Coding DNA Sequence Number=SeqID_1201
taaacccagaatccgttcaattcgaaatctccagcgaagaagaagaagaagnaccaaaatggcgaattcaatggctacgcnnttcgagaagactctaccgatctcttctctctaaccccagattctctcaggcttccatgcccttcagcaccaacaacaacatctccgacttatcagacactgaatctccccttgaaacgaaggcttcagatccaaaccatcaagaggaacgcgtgatggaggagcgtccactcgagaacggccttgactttggcattttcaaggcgatattggtggggcaagtggggcagcttcctctgcagaagaagctcaagaatggcagaactatcact

SEQ ID NO: 10981 - DNA, 561 bp, Glycine max
  misc_feature (102)..(102): n is a, c, g, or t
  misc_feature (236)..(236): n is a, c, g, or t
  misc_feature (264)..(264): n is a, c, g, or t
  misc_feature (337)..(337): n is a, c, g, or t
  misc_feature (380)..(380): n is a, c, g, or t
  misc_feature (408)..(408): n is a, c, g, or t
  Coding DNA Sequence Number=SeqID_1202
tggtgacctacactcatcacagccatcacacacatactacgataatgacgcacaatcgatctcatcagcatgtcgcacgttgtcatacgatatgatgctacntagtagatagaatgatatcgacacattgtatacatattgaacttgtagcacacacagcgtccgtgctcagccgccccatgatagatgatattatgagatagataatgtcgtactatacctctactgatacatantagcgtaacataagacagtcagacgcanaagacatagcacgcgcagcactcgcacttatgacgtacatgctatcagctagtcgatatatatatatggacgncggccgtggagcgcagcggtgagtagaggtgccactcgatgtnaagtacagctcgacgacgtcggcgtggntgtgagtgtgagtgtaatattgtaagtgtgtgtgcattcttcgtacgtcaagcttcagttcgcgatgaccgtacggatattaatatagtgagtatcggacatgatatgactcgatattatactatatatatcatcatgtctcacagactcgca

SEQ ID NO: 10982 - DNA, 543 bp, Glycine max
  Coding DNA Sequence Number=SeqID_1203
gagctggcaagggatttcttggccaagtgcgaattaaccaaccctcgggtgcaggggtggccaaatgataatggggcgcaagcgttgtttgagcagccaagggcgtgccgaggcaaatgtcgcctgaggatttggcccggacaaaaatggttgtgtgagggccggggaaacccttttcatggaggatccggtgatgaaggatgcaagcctgctcgccgataccaagtgcgggtcggtgaagaaggtatatgtggtagcaaagactgatggctccagctcggaggagatgcagcgttggatggtgttgttgatccccggcacggaggctgaggagatcgcgggagctggccacgccatcatgagctcaaggcctagggagctctgtgatgctctggtcaagatcgccggcagcttaaatgcttgctaaattgtacgatatatatccctggaaatcaatgtaggtgtgtacttggttttcatctaaaaatgaatatgttcagttgatactattaaatcaatggaaattaagtagtgtgccccgtt

SEQ ID NO: 10983 - DNA, 588 bp, Glycine max
  misc_feature (26)..(26): n is a, c, g, or t
  misc_feature (40)..(40): n is a, c, g, or t
  misc_feature (88)..(88): n is a, c, g, or t
  misc_feature (94)..(94): n is a, c, g, or t
  misc_feature (103)..(103): n is a, c, g, or t
  misc_feature (107)..(107): n is a, c, g, or t
  misc_feature (145)..(145): n is a, c, g, or t
  misc_feature (167)..(167): n is a, c, g, or t
  misc_feature (185)..(185): n is a, c, g, or t
  misc_feature (238)..(238): n is a, c, g, or t
  misc_feature (302)..(302): n is a, c, g, or t
  misc_feature (304)..(304): n is a, c, g, or t
  misc_feature (370)..(370): n is a, c, g, or t
  misc_feature (382)..(382): n is a, c, g, or t
  misc_feature (389)..(389): n is a, c, g, or t
  misc_feature (418)..(418): n is a, c, g, or t
  misc_feature (440)..(440): n is a, c, g, or t
  misc_feature (445)..(445): n is a, c, g, or t
  misc_feature (447)..(447): n is a, c, g, or t
  misc_feature (450)..(450): n is a, c, g, or t
  misc_feature (466)..(467): n is a, c, g, or t
  misc_feature (484)..(484): n is a, c, g, or t
  Coding DNA Sequence Number=SeqID_1204
agtttgcgaatgatagtacgcgcgangcggagacaaatgnagcacgtgacatagtatgagaggtactacgagatgctgtattctatantggtgncgagtgtgnagcncgtatagtcgtttgtgatacgagatgcgagtatgtggnttgtctcacgtataatacgctnacggtgactcgcgctcgnacgacaagcacgctggatgtcgcaagatgatatttgatgctcatgactaattnatatcgtattagttcttacgtctgtctcatttgatgtatatctgattactatgactgatgactngnatatatatgtgtcgtaggcgcatgcgcgtcgctcatacatcaacgacaaatgcagattagtagtangatgcgcgtgtntaagtangagtatgttcgtatgtgtgtgtgtatganctaatgcgtatgatgtcgcaanttgtngncgnctgtatacagatgagnntgctatctcaacgtgtngatcgcgtatatatatgattattagtatgatatatgaatatatacattgcatgttgtatatagatcgaggttagtacgagagtacgtgtttgtgagtcgcttta

SEQ ID NO: 10984 - DNA, 510 bp, Glycine max
  Coding DNA Sequence Number=SeqID_1205
ccaagaaacatagtgcccgggtgaaggggccctgttatgcacaatcgagccgaatcagacagattcgcaggaagatgagatagataatggtcaaccaaccaccagcatgtgatttgaaagaattggtgcgcaagttcatccccgaaatgattggaaaggagattgagaaggcaacatgtagcgtctatcctcgacagaatgtgttcattcgtaaagttaagatccttaaagctccaaagtttgatcttggaaaactgatggaggttcatggggattactctgaaaatgttggtgccaaggtggacagccctgccgatgaaacattggctgaggaaccccctgaagtagttggggcttgatctggctcataaggcatttttgttattttagaattcctgtttctcttacaaaaattaattttcagttttgttttaatatttagaaacccatttgttgcaaaaaaaaaaaaaaaaaaaaaaaaaaaaaagcgccgctcgaatcggacgcgtg

SEQ ID NO: 10985 - DNA, 548 bp, Glycine max
  misc_feature (254)..(254): n is a, c, g, or t
  misc_feature (368)..(368): n is a, c, g, or t
  misc_feature (408)..(408): n is a, c, g, or t
  misc_feature (466)..(466): n is a, c, g, or t
  Coding DNA Sequence Number=SeqID_1206
gggctcgcggtgatgttgtctctctccatgcacctatgtgtgtctccccgcatgtctggttagtgcgagacgccagtatgctccgcgagcgccgcgcccgctcctctcgtgtgttgcgtgtttcggccggagcgtgtcgaccgtgatgctgtctgtgcacccgctgacggcgtgtatgtatacgcgctacagccgcgcttgcggtgcgttacctttgccccgccgctacgcgtcacttctatcttgcgcgcgcntggtgcggtagcggaggagatcgatcgtgttggggttacctcgctcgcgcgctgctgctgcgcggcgttacggtccagcaataaggttgtgctactgaggcacgtcatggtgcngtcgtcctgtaccgccagcgccgtctgcgtccttgagggntctatgtactgctatctgtgttctgtgcacatcgctcggctatgtatgtgagagccgncgcctacgctgtatgttgtgtgtctccctctcacatgcacgcgtgctttgtcgctccgtgaccctagttgtgtgtgctcgct

SEQ ID NO: 10986 - DNA, 485 bp, Glycine max
  Coding DNA Sequence Number=SeqID_1207
gaagggaatctcatcgacggcggcggtggctacggcagccgggaggggcgcgaagactacggaagcgaccagaagcaccaacaacaacagaaccaaccgaccgagaaccggggcaagccaactgcagggcaccaacagtagaggccaaacccgggaccggtaaacaaagtgccggaaccctaactaaccgggaacccccacaaacgagagaaccaccaccacaaaaacaaaaaaaccccccccatcacaaaacggcccaaaccagtctccgacaaaataaaaaaagaaccacccaaaaaacgtccaaagaaacacaaacacccccccccgacgggtgaccaaacgcaatcaccaaaacgggagaacgcaacaaacccgagtaaaaaaaaaacaacaagccacacaaaaaacccctcaaacataaagcgcagcaacacagcacgccacaccgaacacccacgaggaaaaggaacaataacagcgcg

SEQ ID NO: 10987 - DNA, 399 bp, Glycine max
  misc_feature (72)..(72): n is a, c, g, or t
  misc_feature (74)..(74): n is a, c, g, or t
  misc_feature (243)..(243): n is a, c, g, or t
  Coding DNA Sequence Number=SeqID_1208
ctcttacttctccacattgacagaaaatacccatctcttctctttacttcctttttttccttctctttttgngnggtggaattattttgcttcatcatgggagttttagtaatctcggctctcctgctccatgtcctatcattttctgtttgcgttcaaggcttctaccgtcgtggcggccaccatcccggcggccacatgggaccttggatcaatgctcatgccactttctacggtggcggngatgcttccggcactatgggtggagcatgcgggtacgggaatctatacggccaaggttatggaacagagactgcggcgctgagcacggcgttattcgataacggacttagctgtggtgcctgcttcgagctgaaatgtgtcaacgaccctcagtgg

SEQ ID NO: 10988 - DNA, 491 bp, Glycine max
  Coding DNA Sequence Number=SeqID_1209
tgaagcggttcaccgtcttcaacgccgcccaatgcgaaaacctgccggccgaggtcgcggccgtcgcgccaccgccgccgccgggcctgatcgagcccagagtcgaggcgctgatccgcgcgaccggcgtcgacttccgcatcggcggcaaccgcgccttctacgcaccgggtccggacttcgtgatggtcccgccgccgcaggcatatttcgagccaatcaactggcaccgcacagccctgcacgagctggggcacgccagcggtcatccgtcccgtctcggccgcgatctcggcggcgtgttcggcagcaagaagtacgcgttcgaggaactggtggcattatcctgactctgtgatcctgtctcagaatcatgcattggaggcgcctcaccacggctccggtgaagctcttcagacgtccgggtcaagcgttcccgcagcgtagcgaggacaacgcttgacgcggcggcggcacgacaagctgttcat

SEQ ID NO: 10989 - DNA, 497 bp, Glycine max
  misc_feature (261)..(261): n is a, c, g, or t
  misc_feature (302)..(302): n is a, c, g, or t
  misc_feature (369)..(369): n is a, c, g, or t
  misc_feature (444)..(444): n is a, c, g, or t
  Coding DNA Sequence Number=SeqID_1210
tcaatcgtcagtcgtctcgtgaataaccacgagaagccagcgcgcatccttctcacacaagtagtggaggcagcgcaggcacaacatctgtcgcgtaagacaatgctaattactcggttatgcagcgcttaaatgcttgccttctttgacgtccgacattaacacactagcacgacacctccatcgctcacccagcacggataagtggtcgtggccactccatgtgtcagacatgagagtgatgtgagcgtgccacgacanactcacgaccagatatgagtgacactaagtaatgttccttngcatacttactgtgagtcgcgtgcgtgaaatgtatgtatgcttacatctctacgcgacatagtcagntctcaacaatcagcgcgcgactatgtctagatagagcagtcattcgagagactcacaccgtcgcgacggctcgantcaaacacaatctctctccatctcgtccgtgtatgcctcagcgcatcacatat

SEQ ID NO: 10990 - DNA, 475 bp, Glycine max
  misc_feature (294)..(294): n is a, c, g, or t
  misc_feature (339)..(339): n is a, c, g, or t
  misc_feature (367)..(367): n is a, c, g, or t
  misc_feature (372)..(372): n is a, c, g, or t
  Coding DNA Sequence Number=SeqID_1211
tagatgagtagatcgcgcccaacgcgatttgtattagcgcacagtatataaccacaggacgactgctagtatataacagccagcgagttattattcgccgcatgtactctagtgatgtatagaatgagagttagatagaaattataaattagagagaagaagcataagtaagtgtaatgacgccacattatttgttaattatatattatgtgattaatatttatttcttgttataattttccaagatatatataaccactaatctcaataattatatctcattataagcgtatnacaatatagataatataatactatctatattgcccgcggtgtgtngatgatacaccacatcattttatttctnctgcnatgagtatggttgaagagagagtgatagaaagaacaatttagtagtccttcccctcacgagggatggtattggtcgccggccagctccgcagcgtagattaaa

SEQ ID NO: 10991 - DNA, 598 bp, Glycine max
  Coding DNA Sequence Number=SeqID_1212
gtttatcccaaaatgcctcgacgcagctccggtggtggttaccgcgctcgccccgcaccagcacgccctgcaccagcacgtgcacgcagcccgcctcctcctcaaactgtgaaacatgctcctcctccagcaacagctcagcctcagcgtagtgctattggctctaccatagctgatggtatgacttggggtgctgggaatgcaattggtcacagggttgtggatgctatcatgggaccaagaaccattaagcatgaaaccgttgtttctgaggctgcccctgcttcccctgttgccaacagcatggcctctgcttcttgtgacactcagtccaaggctttccaggaatgtgtcaacaattatggaagcgacatcagcaagtgccagttctacatggacatgctcacggaatgcaagaagaattcgggttccatgatggctgcttaagtgccatctactatcgttatctgcaataaataaaaaaaaagcgaaagtttatgaagaagagtttgttctctctggtgtctttgataaccagaagtttaaagtctagtagtttttcttattttgtaagatgtggtgatctcctatgttgacg

SEQ ID NO: 10992 - DNA, 380 bp, Glycine max
  misc_feature (101)..(101): n is a, c, g, or t
  misc_feature (103)..(103): n is a, c, g, or t
  misc_feature (123)..(123): n is a, c, g, or t
  misc_feature (144)..(144): n is a, c, g, or t
  misc_feature (155)..(155): n is a, c, g, or t
  misc_feature (238)..(238): n is a, c, g, or t
  misc_feature (271)..(273): n is a, c, g, or t
  misc_feature (275)..(277): n is a, c, g, or t
  Coding DNA Sequence Number=SeqID_1213
acacagtctgccactactgaagtaaatctgagcagtcatagactttcttgttcctatgctttatatattatatcgactgtgattgccgtgtcgtgcggctntnctggctgctcatcccccgcncagtaaagagcgataatgagngtgcggcggcngttgagacggtatgagactgatctcatagtagcttagatgtgggtcgttctatttcccgagttctttgcgcggggcagaacangcgtagtcatctagcgctccatcttcatatacnnngnnntcatacataaccctgagcaacaggaaacatacaacaataatatttatatatatctaactcaagcgtaccttactttctgcataagtttataatcatcctcaag

SEQ ID NO: 10993 - DNA, 256 bp, Glycine max
  misc_feature (43)..(43): n is a, c, g, or t
  misc_feature (182)..(183): n is a, c, g, or t
  Coding DNA Sequence Number=SeqID_1214
gccgtcatcttctgctttctgtgtactgcaccgaccgaaagtnatagtccccaacgcccgcatgtatgaaagggtgaatcacatgcctgcctgtcggaagggtgtgccaggggcagcccgtgtgaagccttctcttcctggagaaagaaaggttacttggttaccattatgggtgacgaatnntctcgcaccatttgagaacacggatgggaacacccaccgagaccctgttgccaacccccacgatgatgaggaa

SEQ ID NO: 10994 - DNA, 561 bp, Glycine max
  misc_feature (487)..(487): n is a, c, g, or t
  Coding DNA Sequence Number=SeqID_1215
atagtgttgtcgtttcgagcaaaagaaatgaatgacaaatagaccaccgcaagggcagagaaacaaaaacaaacaaaacgcagcacttggttgtgtttgagttgagcttgcgcaaaacccctaaaccctgtgaatgaagaagagtggcgaagaaaatgggggcaagttcaagctcaagggtgcggataggtcagcgtacttcgcacgcagagaggcagccaaggtcttgaaagtggttctcgaaggagacgctaagcgccgcgctcttgcctccatcaaatccctcatctatcaaccttccgttagaaacaagaaagccacattcgctctcatttgtcaaaccctaaaacatcttcccattatcaattatgtcttggaagctgcttctattctcaacagcaagtggaagaggcaacgagaattgatttatatcattgtctatgatattcttttcggccaggcggttccacacaacataggagtgaangaatggcggatgtgctaccaagatgccctgcgttctactctggaagagacttagttgcagagggttgtcaagac

SEQ ID NO: 10995 - DNA, 473 bp, Glycine max
  misc_feature (87)..(87): n is a, c, g, or t
  misc_feature (218)..(218): n is a, c, g, or t
  misc_feature (384)..(384): n is a, c, g, or t
  Coding DNA Sequence Number=SeqID_1216
atcacaaggccgtgaccgcactaacaccgcccctccacccctgcgcgtgcaccgaccacgctcccacccccgatccacccatatcanagaaagtaaataaattgaaccaaaataaaagatcaggtcccgtgcgcgggacagcgatgagtcggcgcgatgcgtatcgtgaagtgtgcagatgatatgatatagacatccacgaagacgtgccacagtcnataaaagatcacaagccatgagcgtctcctcgccaatgatgagtaacgtggcgtaatctaggtcatctcatgacgcctgctcaaatgcaccgtgacttctgtttgcatctctccgcatctctgcgcgagtgactgtgtgcttggacgatgccgtgagtggcgtccnaacgatctggtatagatggccatcttatgcgcgactcgtcatctcgctcgtggctatcgtccactcattacatccctgtcgcctagtca

SEQ ID NO: 10996 - DNA, 394 bp, Glycine max
  Coding DNA Sequence Number=SeqID_1217
ggatcttgcgcctttctatctcaatcatctttctctttgacaacaacacagagatagagccaatcacaaatccttcctcctgattttggtggcgttgaggagacatcatcacaatgtcaagcgtagaggatgcgaaagagcaagggaacctcaccaatgaagctgaaaagtcaatgccatcatcacagcaagaggaggctgctgtcaagagcaagtatggaggtctcatgccaaagaaaccacctctcatttccaaggatcatgaacgagcatactttgactcagctgattgggctcttggaaagcaaggtgttgcgaagccaaagggacccttagaagctcttcgtcccaagttacagccaacgcagcagcagacgcgttacaggaagtctcc

SEQ ID NO: 10997 - DNA, 573 bp, Glycine max
  misc_feature (220)..(220): n is a, c, g, or t
  misc_feature (467)..(467): n is a, c, g, or t
  Coding DNA Sequence Number=SeqID_1218
tgagtcgatgatatatggtagcggcgagaagctcgtcgtcgctgctagacattcgtcgtgggttcgatggtggtctgcggcgggttagaatgtaattagtaggtatactgggcggcgatggagtgttatataaataaatgttgcagagaaggataggcgcaggtagtaagaagagtagtaaatgtaatagtagatgttaataaattctcgccactccgcncatggttcacccagagtctgtctcatgctacaccgcccgggtgagaaagacgacgcaaagagaggagcggagtgatttgtgggtgcaccaaaagtaaggcctttatgtcactctctagttcctctttataatcacctattgtttagcccgttttctcgaaatatcttagaagaatgtggggggggaagatagacccggttgattagctccaaaattatagcgagaagaaagggcggtggctcgttantaaaaggaagggaaagataaaagaaataaaggcaacaaaataataaagaagagaagagagaagaagcagaaacaacaacacgatactacagtcagacactaccgaa

SEQ ID NO: 10998 - DNA, 455 bp, Glycine max
  Coding DNA Sequence Number=SeqID_1219
agacttgtctcactctttagtcttttctctttgtaaagtaaagtaaacaagtttctgaaatagcatacttgttgatatattatgaaatgtactgaaaaggggtggatggtttaggcccattttggactgacatgcttggatataggaagtacatcatagagaaaccaaacaaggttctgttcttgatgtatgaggacctcaaaggggacatcaattttcacctgaaaagggtagctgagttcttgggttgtcctttcaccttggaggaagaaaatagaggtgtgattgagaacataatcaagttgtgtagctttcagaaaatgaaggaattagaggtaaataagtctggtacatttggcaggaactttgaaaataagtttttgttcacgaagggtgaaataggggattgggttaattatctttcgccttcgatggcgcagaaattaaccaaagtc

SEQ ID NO: 10999 - DNA, 346 bp, Glycine max
  misc_feature (26)..(27): n is a, c, g, or t
  misc_feature (51)..(51): n is a, c, g, or t
  misc_feature (74)..(74): n is a, c, g, or t
  misc_feature (79)..(80): n is a, c, g, or t
  misc_feature (123)..(123): n is a, c, g, or t
  misc_feature (145)..(146): n is a, c, g, or t
  misc_feature (216)..(216): n is a, c, g, or t
  misc_feature (230)..(232): n is a, c, g, or t
  misc_feature (249)..(250): n is a, c, g, or t
  misc_feature (290)..(290): n is a, c, g, or t
  Coding DNA Sequence Number=SeqID_1220
gcttgggagaaccctgttgacgaacnncagtgctgcctccgtgccttcaangggcgctggttgtagcttgaagnctgcnnggtgtgtctttgcaccactttcttagagctgaagcttctcaancctcaacagtttatgtcgccanncttgcccttcagcgttcgttgtggcgttggtggcaaagtcctccctccttccttggtttaccaccttgtnctccctcttaaacnnncagtgaaagggatttgnnaggaaaatattggtcacaaattcgactatgagaaggatgntgcgagccacagctatgctgctctttctgtcctgattaggaacctggcgtgttgtt

SEQ ID NO: 11000 - DNA, 382 bp, Glycine max
  Coding DNA Sequence Number=SeqID_1221
gtctttctcaatcaccgctggtttagacttgataataacaatgtcaactacgtcgttgcagaaaaaggtcggacaagaggaggcccctactttccacagaatcagaatcacattgacttcccgtaatgtgaagaacctcgagaaggtgtgcgctgacctcgttgatggagccaaggtccaaaaactcaaggtccgtggacccgtccgtctccccaamcaagcacctcagaatcaccaccagaaagaccccttgtggtgagggtagcaagacctgggacagattcgagatgcgcatccacaagcgcctcatcgatttgtactcccctgctgagaccgtgaagcaaatcactgccatcgccatcgaacccggagtcgaggtcga

SEQ ID NO: 11001 - DNA, 263 bp, Glycine max
  Coding DNA Sequence Number=SeqID_1222
tcttccaactgcgttaaatgctggcctatggacaaggatatcgataggtttcttgtgaggaacattgttgaacaggctgcagtctaagatgtgcacgaggtttgtgtctacgatcaatacacgcttcctaaggtgtatgtgaatatgcactattgtgtttcctgtgctatccactctcatgatatgagggttcgatcccctactgataggataaagcgtgagcctccacatcgattcatcacgggcaaggatgatgcaccaac

SEQ ID NO: 11002 - DNA, 198 bp, Glycine max
  Coding DNA Sequence Number=SeqID_1223
gagaatgttcctcggcgtattcggacgccacgctggcgtgccccaggtgccgccttgtgtccaccgtcggaagggcgcatcaagcgccgtggaataactacgaggggctcgcgcccctccaatccggcggtgccgccgacaacggcgggagtggagggcggtcgaattgtgattgcgactacaccgacaacgaggagg

SEQ ID NO: 11003 - DNA, 564 bp, Glycine max
  misc_feature (101)..(101): n is a, c, g, or t
  misc_feature (118)..(118): n is a, c, g, or t
  misc_feature (174)..(174): n is a, c, g, or t
  misc_feature (247)..(247): n is a, c, g, or t
  misc_feature (274)..(274): n is a, c, g, or t
  misc_feature (298)..(299): n is a, c, g, or t
  misc_feature (328)..(328): n is a, c, g, or t
  misc_feature (331)..(331): n is a, c, g, or t
  misc_feature (334)..(334): n is a, c, g, or t
  misc_feature (340)..(340): n is a, c, g, or t
  misc_feature (349)..(349): n is a, c, g, or t
  misc_feature (365)..(365): n is a, c, g, or t
  misc_feature (385)..(385): n is a, c, g, or t
  misc_feature (407)..(407): n is a, c, g, or t
  misc_feature (414)..(414): n is a, c, g, or t
  misc_feature (428)..(428): n is a, c, g, or t
  misc_feature (430)..(430): n is a, c, g, or t
  misc_feature (433)..(433): n is a, c, g, or t
  misc_feature (448)..(448): n is a, c, g, or t
  misc_feature (477)..(477): n is a, c, g, or t
  misc_feature (480)..(480): n is a, c, g, or t
  misc_feature (508)..(508): n is a, c, g, or t
  misc_feature (516)..(516): n is a, c, g, or t
  misc_feature (539)..(539): n is a, c, g, or t
  Coding DNA Sequence Number=SeqID_1224
gtacagatgtaggagtgacgtcacaaagcgtgtagacatagcaacatatctactgaatgtagtagtaacagggactatggagtgagagagtcaagagcgcngccgtcgcagacccgcnagcaacattgcgcgagcagtagtgcgtgatctgctcgcaatgtatcgtgtgtgatnaagtgagacggtatgagatgacgtgcacgctcaagtgcagtgtgctgtgatgctagtggatgcgagtccgtgncacgacataggagctgcactgcagaanacgtagatatctacgaccatactnncgttactactgtatgtacgatgatacacnacngancaccangacatcttntactactctactcacngtctttacttgtgtatatcngtaagtatttctactgaatgtntatcatnatgatagtcgtatnanganatagatgatcgatgncagtgtggcgtcgcgctgcgtgttgctgngtnctgttcgtcgttgatcgcgtgatgcgcngcgcgacngctgctcggagtggactacggtncttcaggcggttctactaaatcatg

SEQ ID NO: 11004 - DNA, 597 bp, Glycine max
  Coding DNA Sequence Number=SeqID_1225
aaccaagatcgtgtgttgatccaagtgttcgaaggagagcgttccatgaccaaggacaacagattgttgggcaagttcgagctctctggaatcccccctgcagctagaggagtaccccaaattgaggtctcattcgagctcgatgtcaatggtatcctccacgtctccgctgaggacaaggccagtggagccaaggagtccatcaccatcaccaacgacaagggtygtctctctgaggatgagatcaaacgtatggttgaggaggccgaggctgcagctgaggatgmcaagaaggccaaggagagaktcgaggccagaaactcactcgagaactatgtctaccaagtccgtaacaccatcaatgacaacgagaagttgggagacaagatytcagaggaggacaaggagaccattgagagcaccatcaaggacgccatcgagtggttagagcagaacagcatgggaragaaggaggagtttgatgacaaatacaaggaagttgagaagattgtccaacccatyttcgccaagttgtacggaggagcccaagcccaccacggagcccctggagctgatgaggagatgcccgaccacgac

SEQ ID NO: 11005 - DNA, 490 bp, Glycine max
  misc_feature (132)..(132): n is a, c, g, or t
  misc_feature (155)..(155): n is a, c, g, or t
  misc_feature (209)..(209): n is a, c, g, or t
  misc_feature (219)..(219): n is a, c, g, or t
  misc_feature (248)..(248): n is a, c, g, or t
  misc_feature (279)..(279): n is a, c, g, or t
  misc_feature (283)..(284): n is a, c, g, or t
  misc_feature (290)..(290): n is a, c, g, or t
  misc_feature (335)..(335): n is a, c, g, or t
  misc_feature (376)..(376): n is a, c, g, or t
  misc_feature (382)..(383): n is a, c, g, or t
  misc_feature (402)..(402): n is a, c, g, or t
  misc_feature (406)..(406): n is a, c, g, or t
  misc_feature (428)..(428): n is a, c, g, or t
  misc_feature (452)..(452): n is a, c, g, or t
  misc_feature (456)..(458): n is a, c, g, or t
  misc_feature (461)..(463): n is a, c, g, or t
  Coding DNA Sequence Number=SeqID_1226
gtgaatgacttagtatgtgtagtatatataaattgaattattataatgtacgtggtgtaaatatcagtatacacatgaacgtaagctgaaagaagatagtaatatagttatctgtgtgtgtgtcgtagacantattgatatatgagtactataancatatagatttatgtagtatcttgcatctatctgtttagagttagtccgtgcgngggtggtcgngaagatggagcgtggcagaaaggagtagnaagataggtgagtatagagcatggagtgtgntaanngtcganaagtcaattatattactacttcgatatatcggcgatgctatgatngtgtgctcgtcgtcgcggtgtgatcgtgcctgtcccgccanccgcgnncggcatcacttctctcctncacntgtatcttactctcgtgctacnggtattgtgtttctgttattgtgncgtnnnccnnnccctgcgccatcgtgctcacatataca

SEQ ID NO: 11006 - DNA, 377 bp, Glycine max
  Coding DNA Sequence Number=SeqID_1227
gtcggaggaagcacctgaaagattggaggaagctaagaatctcgcagaaaagctctgcagtggtcctctttcacaggctgcaaatctgtggaacttgagagcttctatagagataaagtcacttgctactgctaccggcagtgcttcctttagtgaggagaatctaagttctctgtttgatttatttaatattgtacttccgaagttatccataaccaaggccgagggactctggcatacggcgatgaaattgttttctcatgaaaagatatatttcgaaaagctggtgaaatgtgcaatgctatcattaagttcagctggtgggagtgattgtggagcttcagtctcttcagcttttgtcggatgggttttgcaga

SEQ ID NO: 11007 - DNA, 554 bp, Glycine max
  misc_feature (62)..(62): n is a, c, g, or t
  Coding DNA Sequence Number=SeqID_1228
atatatcttcctacaacgacgcgagcggggtagagaacgagagagaagaattattatacacnccttctattatatagtacgcttttatacaggaagtcctcttgtggaacatccctctccgcgggtaaaaggcgagtggtgggtggggtgaggagatcttcccgactgctggtgtgtggtacagcgggccaatcattcagtgtgtgcgggagtctcgcctcgaccgtctcttgtgaatgaaagagctacggctgttgcgggtaggtctattgctgcatctgcttgtcgttgtgtgtcgtcggttttctttctatgtcttaaggattggaattgtggttgtagtaggtatcatgagtatacgtgcgtcgcgtatggtttcatgatcgccccattatcctctcttgtgagttaggatagcgaggcgacagggagggtgagcatatgggaggtatgcttgctccccacaccataatcttcgatctagtgaatagagggtggtgcccgctgtagtcagtaatttgtgtgcgggagacgcagacaggaagtctcctcct

SEQ ID NO: 11008 - DNA, 466 bp, Glycine max
  Coding DNA Sequence Number=SeqID_1229
gtatacggtatctttgcggaacgctatgcgctcggtagtggtgtgcgagccaaggtcggtcgctcgctacataacgcagtgcgtcaacatggcacacgcaggtgacggtatcaagtaatatagccgcgtgacgtaacacgaaacacaagcactaccgcagaagcacaccagagcgctcgcaccaccaacgcactctggcctcaatatctccatcctctaacttcagtccagcatcgcaggaaagcactcagcagactcatatacgaaataacaatgacagtgaggggtagtacgcggcactgtgtcggtgctcggcactgaagcaaatatgtagcacgttataccatagaggatagatatctagctgatcagagctgtttctcttgctgtgcgatgttcgtctacatagtgacgcgcgtagggtgttgtgcctctgcggctgttgcactactgtcctctacggaga

SEQ ID NO: 11009 - DNA, 142 bp, Glycine max
  Coding DNA Sequence Number=SeqID_1230
cacacagccagtcctcatcacacctcccctcctcagcccgtgctcgtggcctcgcaccagctgtcccacctgatccttcccctccgcacacagtcattatgcataagctcataattcatgcccgctcagtcagtttttcatc

SEQ ID NO: 11010 - DNA, 542 bp, Glycine max
  misc_feature (498)..(498): n is a, c, g, or t
  Coding DNA Sequence Number=SeqID_1231
acagaagagagcgtggtgctacctagaggcggtcaattcaacatcttggataatgaaatgatgaagatttttcgcctacacgctaccctctggccaatgactccaccgaggaggacaaaataaagttagtgaaggacctgcgcatcgggattttatagggtaagcttataggtaccatttaagtacgtacagaggcgcaggtagaggtacttagggggctgtaggtcggggggcgcgcggtgcgagggagtaggagttagttgtgggaattgttgtatgcggtgtgggtgtcctctctcccttgctggtcttgccggaggggagggtcgcgagagggcgggggcagtgtgatgagtagaagcacagcgagaacaccaaatatataggggtaggtagcaggtgacacgccagaggcctccttctctttcgtcttggtctccgccgttctctgttgtcctctctattatcatgctttatttaggcgcgggggggggtggngggggcgcccaatattgcgatgagtgtctattgcccgtgcctaa

SEQ ID NO: 11011 - DNA, 479 bp, Glycine max
  misc_feature (42)..(43): n is a, c, g, or t
  misc_feature (67)..(68): n is a, c, g, or t
  Coding DNA Sequence Number=SeqID_1232
gagcctgttgccctacctgctgtgcgactgccacgcggttcnnaaggttcgggtgtgcggagcgggnnttctggacccgaaaacaaaggccgcgattaaccgcggagttgccgtctgccacttgggcgcctcggattggagcgcgacccacggagcgttcctctcgctcgggtcgggcccgggtcggatcgaggtgtgccactggatcttcgagaacgacgtggcgtgggccactgcggagtgagaaaagagagcatcagaataaggaaggaagaagagtcacctctataggaaattaaagttaaattaaaacaaaaaaggaacttctgttctgctaagaaaatttagcagtctcgagaattatttgtttttaatttgagaattaagtaatgtgattttattttttttggatagaaaagtgtaagacaagggtcttttccctacatttggaagaggaaggtagacgcaaatatatgaaa

SEQ ID NO: 11012 - DNA, 411 bp, Glycine max
  Coding DNA Sequence Number=SeqID_1233
atgtacacctggacgacactcgttgccgcagcggcgactctctgcgcagtaagcggacagaagactgctcagcaggaagacccatgcaaggccaagtttagggtggtgggtgacgccacgtactgtgacaggtactgggagtgtgtcaacggtcagccagagctctatgactgccccaacggtctagtgtacgccggcaagaaccgcggtgtgacagagggttgcgactacccatggagggccaactactgtgaagacaagacccaagctaatggacccatcggacgagaacattgcgactggctgtacggcatcttcggccatgagacttcctgcacgaggtactggacttgttggaacggaacggcgacagaacagctgtgtatcggcggactgctgtacaacgagaac

SEQ ID NO: 11013 - DNA, 357 bp, Glycine max
  misc_feature (97)..(97): n is a, c, g, or t
  Coding DNA Sequence Number=SeqID_1234
gggaataccaaaagtttactggcatatcatgaatttggtcatgctatttgaggaactttcactcctgatcatgatgctgtacaaaaggtaacactanttcctcacagtcaaactcataaacttacatagttcattcctaacaataacccaactctaatctccaaacaacaactctttacaaaaattattagaagactaagtggaaagactacagaaaaaattattttcgataaacctaaagtgacaactaaagcagctagtaatttacagcgaatcaccagtttgacaaaacagataattaccacattgagaatatctaatattaatccttaatcactttataaaccatcagcacaa

SEQ ID NO: 11014 - DNA, 344 bp, Glycine max
  Coding DNA Sequence Number=SeqID_1235
agggcttctgactcctgtatgtgtactgtctgcacagttgtgtcatgggcaaccacaatgtccggtcccctcgaacagattcgctcatagccttgtctttgacagggttttgtccgtgcttgtgtacacagaaggaacggtagagtgatgatcatgcccttccagagcttccacgatgacatgagggccgggattggatctctcaaaaagaaggcacttattgcgtacttcaaatttcaaacacactgtagagaagaagagaagctagacgaaaagcgatggccgtgttaactacgttcattcgaagacgttcgcgattacaaggagctccaaactgtctacgc

SEQ ID NO: 11015 - DNA, 525 bp, Glycine max
  misc_feature (176)..(176): n is a, c, g, or t
  misc_feature (190)..(190): n is a, c, g, or t
  misc_feature (192)..(192): n is a, c, g, or t
  misc_feature (203)..(203): n is a, c, g, or t
  misc_feature (297)..(297): n is a, c, g, or t
  misc_feature (387)..(387): n is a, c, g, or t
  misc_feature (419)..(419): n is a, c, g, or t
  misc_feature (492)..(492): n is a, c, g, or t
  misc_feature (499)..(500): n is a, c, g, or t
  Coding DNA Sequence Number=SeqID_1236
caccgcgagtttgttgctgagtcagagctcgcgctttattaaacaccacctactcactgtcacgtacgtgcactctcctccctgtcatagtaacaccgcccaatatatgctagtatttaatatcgatgcgagagcatatgtctgtgttgtacgcgagtgcgtacgtgtgtgatttntgaaccagagtcanancatccagtgcntcgccccgctcattacctattcttgatagaacaatgtgattaaaataatataatcacacatttagtattcatagaagattacaataaattaatnatagagagaagagtgaggaagcgcagataacgactgccgcttacgccgcgcaagacacctgtgcggatcggtacgcatacgacgatcgantagtagcagtagctgacgcacgcgattgtttngcttctaccaaccacacatcactataccacacacaacatgtgataaactatagccggatatcatagatacatnttgacgnnatctaatctctgacgctgcaaatag

SEQ ID NO: 11016 - DNA, 576 bp, Glycine max
  misc_feature (141)..(141): n is a, c, g, or t
  misc_feature (405)..(405): n is a, c, g, or t
  misc_feature (517)..(517): n is a, c, g, or t
  Coding DNA Sequence Number=SeqID_1237
gagaacgctggttagccatctatctccgctcccggtactggtccttgttacgatcgcgatctacgcgtggtggcatcgtagaggtgaagccgtacgtcccgcgtctggtccgtccacggatcgcggttgagtcactcgagncgtcggagagtgctgactcgcgtggtggagtgagagtgactgtctgggacattgtggactgtttattgttgcggcgattgtggggctgtacgcgccgctgactgcctgatcggactcgttctcagtaccgttatgctccgcgatgcgcaacagggcgcgcgtcgactagtgtgcttacgctcattatatttgtgagttactcaggtaatattgagtgtgattggtttatcgctcttctcagcgcttatacgcgccgttctactnctcgctatagctagtctctctagtctctctctcgtcttatgacgcgcggtgttctccactacgcagattcgcgcgctatcgcgtatcagcgacgtgtaacgacgaatgaatnttgcctcagtcatctctacatcgtgtctctctacactattgtcctcagtcagtgatata

SEQ ID NO: 11017 - DNA, 253 bp, Glycine max
  misc_feature (39)..(39): n is a, c, g, or t
  misc_feature (43)..(43): n is a, c, g, or t
  misc_feature (46)..(46): n is a, c, g, or t
  misc_feature (53)..(53): n is a, c, g, or t
  misc_feature (57)..(57): n is a, c, g, or t
  misc_feature (85)..(85): n is a, c, g, or t
  misc_feature (101)..(101): n is a, c, g, or t
  misc_feature (103)..(104): n is a, c, g, or t
  misc_feature (127)..(127): n is a, c, g, or t
  misc_feature (142)..(142): n is a, c, g, or t
  misc_feature (156)..(156): n is a, c, g, or t
  misc_feature (161)..(161): n is a, c, g, or t
  misc_feature (170)..(170): n is a, c, g, or t
  misc_feature (184)..(184): n is a, c, g, or t
  misc_feature (197)..(197): n is a, c, g, or t
  misc_feature (202)..(202): n is a, c, g, or t
  misc_feature (209)..(209): n is a, c, g, or t
  Coding DNA Sequence Number=SeqID_1238
atgatatacgcgcacgagtgcgccgcaccagtagtacancacnctnattccgncatnagcagagcgagcgaagtataggagttgnacagtcgtacagtacncnncaacagagagctaccagtcagancagcgccccacgcgnagtcagtagttgangtganacacgcacnaccctagcacacgngcgagcgatgtcnctacnagtgtgnaaccgtacagacgaccgtcgcgtaagtacgaagcactacgagcc

SEQ ID NO: 11018 - DNA, 406 bp, Glycine max
  Coding DNA Sequence Number=SeqID_1239
tccgccatcggtatcttatccaaagacggcgtcgttttaatcggcgagaagaaagtcacctccaagcttctccaaacctccacctcctctgagaaaatgtacaagatcgacgaccacgtcgcctgtgctgtcgctggtatcatgtctgacgccaacatcctcatcaacactgctagagtccaagctcaacgctacaccttcatgtaccaggagcccatgcctgttgagcagcttgttcagtctctctgtgatacaaagcaagggtacacgcagttcggtggtcttcgtccctttggagtttcgtttctttttgcagggtgggacaagaaccatgggtttcagctgtatatgagtgaccccagtgggaactacggtggctggaaagctgcggctgtgggagctaaca

SEQ ID NO: 11019 - DNA, 514 bp, Glycine max
  misc_feature (44)..(44): n is a, c, g, or t
  misc_feature (50)..(50): n is a, c, g, or t
  misc_feature (71)..(71): n is a, c, g, or t
  misc_feature (74)..(74): n is a, c, g, or t
  misc_feature (334)..(334): n is a, c, g, or t
  misc_feature (374)..(374): n is a, c, g, or t
  misc_feature (428)..(428): n is a, c, g, or t
  misc_feature (478)..(478): n is a, c, g, or t
  Coding DNA Sequence Number=SeqID_1240
gagctctagtgtgacgcgcaacagtgtgcgtctgtagtatacantaatcntttctaatgaacagcaacatntgnttcatacattagcgctcgcttaggctgcatgccgcgcaggcgagcatcagtctcagtatatgcagctatgaatatgggaggtgagcactgcgtcaggtttgtgctgatcgtttgtacgtacgtgaatcgtagatgcgtgagttagcgctacgacgttacaccttacactatgttcttacttgttgcgcgctcgcgcgcgcgtgccgcgcgcgttagtacaaagcgttctgattgcgttcggttagctgatgtgacgtgtnggttcgtatcgacacatgagtaagaatatatatattacgnacaaatcgtggactgcgatagtgcgaccatgctctctcgcacgtgtttctgcgnttgtattatttataatacattgaaataaataagtgaagtatatcatatgntcctcttatattacgcgcttctgtggtgtggtgtcc

SEQ ID NO: 11020 - DNA, 567 bp, Glycine max
  Coding DNA Sequence Number=SeqID_1241
agaaaccctaacagatcggccgagccctccgccgccgccccgccttcagctctctccttccttctccgatccaagatgaagctcattgctgcctatctgcttgcttacctctctggcaacgccagcccctctgcagaggacctgacatccattcttgagtctgttggatgagaaatcgacaatgagaagatggaactcatgctgtcccaagtgaagggcaaggacatcaccgagctcttggctgctgcaagggagaagtttgctgcaggtccatctagagacggaggtgtgcatgtttcagctgctgcccctgctgctggacgcgctgctgaccctgcacctgagccaaagaaagaagagaaggacgtggagaacgaacagagtgatgatgacatggacttcagactgttccactaagttgtgcggcaccttgtgtctgaagaatctatccttgctcaggaaactaaagtaaatgatgatttagactttattcaactgagctgagacacactggcaagacaacgtcttgatatgcaattcagcccctgatagctggttgattaactg

SEQ ID NO: 11021 - DNA, 559 bp, Glycine max
  Coding DNA Sequence Number=SeqID_1242
atccatcaaaccgttgagtaggcgggtgtttctatctggatgttaagactactgcaccaggacttctatcaatggcaaatgctactgctaataccaatgattgacaatgtttcattacaactgcgacaactcgctggttggacggaaggcatgttgtttttggtaaagttctttctggaatggatgctgtttacaagattgaagctgaaagaacacaaagtggcactcccaagagcaaggttgattgttgacagtggtgaactccctctataattgtacttcacgaatctgaatctagacttgctgaaagagttcccagttttcatttcaattacatctacgagactacttatcttttataagcatgttctaatagatcaaagactagttgaatgtttgtgatacttattagataaagtttttccccctaatgataatatggaaaatggcatttgtgaacatgaacattgtaaaaggaaatctaagtgaacatggctgttgaataatagcagatgcccttaatgtgaagtatcttaagctaggaaaaagggttggcgca

SEQ ID NO: 11022 - DNA, 428 bp, Glycine max
  misc_feature (131)..(131): n is a, c, g, or t
  misc_feature (178)..(178): n is a, c, g, or t
  misc_feature (348)..(348): n is a, c, g, or t
  misc_feature (369)..(369): n is a, c, g, or t
  misc_feature (372)..(372): n is a, c, g, or t
  misc_feature (382)..(382): n is a, c, g, or t
  Coding DNA Sequence Number=SeqID_1243
atgctgtgtgtactgtccaaccgtaaaagtatcttaatcaacgaaaacccagcaaacgtagaggcgacacccgcttccccgaactcgcttcggcttcagcaactgccggaggagcattcgacgcctcaggnggctctgactcgggagtcggcggtagcgattgcggaggctgcttaanatagggccgaattggtggaggaggtgacccgtctgaaggtaaagcagtcgcagtagagggacgacccttcttcggtttcttcaagttaggatcaaagtgaacagttggcgcgggatcgcgaggttgagaagaagatgaagctgaaggatctgagaccgaggacgatgcanccggaggtggtgaagccccantanaagcagcctnttccggaatgtcgctcaaagcaggctcgaaatgcacagccgttgca

SEQ ID NO: 11023 - DNA, 532 bp, Glycine max
  Coding DNA Sequence Number=SeqID_1244
agaagcccctttgcattattggcgggggtgagcttcctgatgacactgtattgacatgttcccgtggctccgataatgcactggagttcctttccacctgcaagatcgcgaacctcaccatcaaggctgagctcggatgctgcctgctccatcggagcggcaagctaactattcaggagtgcttgctccagtgcgagccaaaccctctggactacctgtccttcccgatagtcagcacggcgatcgaatacaatccattatcgtcgtcgctcaaggagcagcaggggcacggcgtgacggtcgtccgcacccggatcgaaggcggcgccaaggccatccggaccaacgggaccctggcgctgcagcgcgtgcgggccatctacgcccgcaggtccgtcttcttctggttcgaggtaggggagaagctggaacccctgtgaaaccaataagctcttgtattctgtaatctcactcaacctagcgttgagagcaaacccttgtagtatcatgtctgttccatgcctgttgtaac

SEQ ID NO: 11024 - DNA, 166 bp, Glycine max
  Coding DNA Sequence Number=SeqID_1245
ccaattattcacgtggtaggcccaaaggagggggctacccttctataatatcagttaagccttttctcgctgggttctacttcgggctttggtttcctttctcttttcttttctttcggttttttgatccctaggttgttttcatttggcagggaaaaacgaattt

SEQ ID NO: 11025 - DNA, 208 bp, Glycine max
  Coding DNA Sequence Number=SeqID_1246
aagcccatatgtggttgaacgcccatagttattcaatggggttatgtcaaagcacgctcatatgatgctagaatactacctctcttcatgtttaaactgggatgcttttgtaatgagtggtgaacatataaaaggatctattccatagattgccaagtttgggttctttctagccgacctttactgggggaaggcttgatttctatac

SEQ ID NO: 11026 - DNA, 496 bp, Glycine max
  misc_feature (270)..(270): n is a, c, g, or t
  misc_feature (432)..(432): n is a, c, g, or t
  Coding DNA Sequence Number=SeqID_1247
ttcgatcgactctctaggctactagttatactatacaccagcgctcctctctctgtctggtgtggagtagatactaccgcccaccagaactccacatccgacaccacaaatcgtacattatattcaactctctcctcgccactgcactctctctccttacgtcagttgcgtatacggacgtatacgcttattacctcccttctcgcacgcgcgcgctgcgcgatctccgcggccttctacgctcggagtgtggttatgcgcctcaccgcnagagctcagcgaaccgatcgtctagtccttcacgcctcaccacgtgacacaatataccccctcacactccctcacgcaccagactgctcgctctctcgagtcgagtataacactctgcgctccgccggcgtggcgtgcgcactgcagtcacatctccgcganctctcaagcctacactctctctcgatcaccgctacgtgcacgtgactcacgtgtctgtagctag

SEQ ID NO: 11027 - DNA, 567 bp, Glycine max
  Coding DNA Sequence Number=SeqID_1248
gacttcaccatctgctttacaattgaacattcctcttgacgattctcctgggacccctgacaattatctaaagtccttttccctgcaaaagtacagcgcgagttcttcagcacgtaagagaccgttgtcaaggttgaaaactaagcatgctgaaccgagtccaccagtactgaagcctctaaagaatactgttttgcacgagaagtacattaatcagttgacccgaagagaaggcgcaaaaaagcctcgtaagaaggctgctggcaccaatgcaactgatcctgagaggcctctttyggagcagcgagctggtagtgtgaaggctgcaaagaatgctytcatttcagaagcaacagacttcatagggcagtttaagaagttgcaagccaattcccttgcacacgttytggaaaacagtgaagatgacgaggataattcggtgtagtgtcatactagtggttaaagcagctagatagcatgttatcaactaactttagttagtacaataagactgtaagagactgacgataggtcacggaagttatcgctcaatgcattttgtcaagg

SEQ ID NO: 11028 - DNA, 505 bp, Glycine max
  misc_feature (141)..(142): n is a, c, g, or t
  misc_feature (465)..(465): n is a, c, g, or t
  Coding DNA Sequence Number=SeqID_1249
atgagatagaccagcgctcctcgtatacataccaccacacgcagctgtctcattatggtgctagttgagtcgtgccatcacgtggaatgatgatgccgccccgcgtcgctcttgcattcgccatgctagacacgacgcaanncacgcacagcgccgccgcagctgacgttggcgtcgcgcgccacgcgccggtcggatgacgacgtcagtagctgctctgtgtgttcgatgcgcgtcgtctcgctatgtcaacgctgtcgtttctctactgcgctgcgcgacgctgtctatcgtgtgtgctactcgctctatccgccgtctggctcttcgtctcagcactatctcacgagactcgttatgatatcgaacgacgcacagtatattgtatactgccgcgtcacacatgtgcgtataagttatattcatattaatactgatacactcgcatattgttctccgagactntttatgacttctattgaagcatttatgcacactctctatg

SEQ ID NO: 11029 - DNA, 522 bp, Glycine max
  misc_feature (429)..(429): n is a, c, g, or t
  Coding DNA Sequence Number=SeqID_1250
tatagttgtttcgacacacggcgctgacgtcaccgatgaatattgtttataaaatcttcgttcatgtcgttatatccacctattacttgacaggagcttgctaaacagcacaccaatcgtgatcagcgatacgtgtgcgtgttgcggcttgcgttctcccgcccgcacacacatgacacacataatttaatatatatcacacagctgctgcgaccacactaaatgtatgatgctctcagtctaatattacatcgattgcatcgactattatcttacggtttgactaccgcaagaatacataatatgtatcttactactgcttgtctcgcacacatatatttatatgtgtctgccggcactgctattcagtgaatgagtgagagtgctgtatgagacgcaacgtgatgtgctgtgacgctgatttgtgcncaagctcacgtcgcgcagtacgacatgatgtttgattattgaatgtacttgtatatcacgctactctattaaagagcgctccgagtacgtaca

SEQ ID NO: 11030 - DNA, 504 bp, Glycine max
  misc_feature (183)..(183): n is a, c, g, or t
  Coding DNA Sequence Number=SeqID_1251
gtccagtgtgccatacagtttacctcctttttgtcatatggatggtagtctgtcggtgggttcccaattgtttttttatatcactagtggattactctactatcaatcgattcccgccgtgggctgttttccacccttcctaactcttacatctcttttcatcgttgcttcttttttcttttnctctccacccctactgcatcccctcccccctcttgtgctaagctcgcgcggggtgctgaggagactcatcttcctcccacagccaccccccccccgccggctctttgtccagtggactccttgatctgaccacttctttttactcccccaaggggggctcctccccccccactcatgcgatcccctgtttgtggggggggtggggggggggggatataaggtaactaaataacttaatattttatctattgtaggggtgttgtgtggttgtgttatttgggtggagggggggtggccataacctccccaatcaataaatca

SEQ ID NO: 11031 - DNA, 422 bp, Glycine max
  Coding DNA Sequence Number=SeqID_1252
tatctccagtagaatcaagcttgggcgcgaggcataactctctaatgtatgcgtcacgagtgagatcaattgtgaacgatccgagcaaaaatgtttcttccaaagagatagctcgactaaagaaaatgattgcatattggaaggagcaagcaggtaggagaggagacgatgaagatttggaagaaatccaagaagaaagacaaactaaagagaggactgatggtaggcattctatgtagtaactctaggcaaataggaacactcacaaatagcccacaaaacaggattttgaaatgttgtgtgatcagttcccactcaacaagatagcacaggcttgataggttgtaatttttctgagggatgcaagatgtatagttgaattatgtacatatatttttagtattttaactcgttcacatata

SEQ ID NO: 11032 - DNA, 570 bp, Glycine max
  misc_feature (101)..(101): n is a, c, g, or t
  misc_feature (194)..(194): n is a, c, g, or t
  misc_feature (214)..(214): n is a, c, g, or t
  misc_feature (268)..(268): n is a, c, g, or t
  misc_feature (284)..(284): n is a, c, g, or t
  misc_feature (286)..(286): n is a, c, g, or t
  misc_feature (357)..(357): n is a, c, g, or t
  misc_feature (371)..(371): n is a, c, g, or t
  misc_feature (377)..(377): n is a, c, g, or t
  misc_feature (379)..(379): n is a, c, g, or t
  misc_feature (509)..(509): n is a, c, g, or t
  misc_feature (511)..(511): n is a, c, g, or t
  misc_feature (517)..(517): n is a, c, g, or t
  misc_feature (520)..(520): n is a, c, g, or t
  Coding DNA Sequence Number=SeqID_1253
tatatactcgcagggcacgacgttatatagaagtaggtatatcacgatatacttacggcgcgccgatagctcacgcttgtgacaatcccagctcaagtaangtgtgagagctgtataattgcgccgttgatgatgatgagaactatggcactggcgtgtatatggatgagatgacaaacgtatcatagctgtgncacacgatgtaagtgatcgngcgcgtgcgggaccattcatgtggtgacggcgcacgtcggtatcagtgctcatntctcgatcgatcaatngnactgagcgctacttcagtatgtcgatcatctatagtatacagagagaggcatcgcgatgcatatgatgatnagtcgctgttgatncgtgtncncgatcgatatagatacgcgatgattgacttgtctgcgggatcttatatctgaatgtcatgctgaacgacgctacgtcatcatcagcgcgagaagatagcatagtacatatgtgtgacgcgatagcagtgngncatgcncancgctgatgagcgtgtcgtgcggtgataatctctgatgtcacgctcactaa

SEQ ID NO: 11033 - DNA, 471 bp, Glycine max
  Coding DNA Sequence Number=SeqID_1254
gcaatatgcagtaatcgccgccgcacgcgactgaggtccttgttcggcgtcatatactaattcggccctcaataatatacgaagaggctgacgtagaaacggctcagcgcacacgacgtagcgcgtgtctggtttgtcgagtcacgatacgcaagcgtgaatctatacgggttcgacaatgcgaataatatggtcgggtgcagttgtgcgcatgggctcgttataacacagccattttatacggtgtcgctactggtatgagtgtgcatcgcactagaccatgagcgccgctgactcatcgtgttctgttgatttggtaatgaacaattatatataggaggtgctaagtgtgtattgtggttgcggagcggtataagcccagtaaaatacgccctgcccgcgcctgtataagtaatcatgatgcgcacatcaataccgatatcagagaatataagtataggctcaccaccc

SEQ ID NO: 11034 - DNA, 430 bp, Glycine max
  Coding DNA Sequence Number=SeqID_1255
atgcaaaacgctgttgccgcattacccaaaggtcatttcctctttaccagtgaagctgttaccaacggccatcccgacaaactctgcgatttcatctcagattctgtcctcgatgcttgccttactgtcgatcctgacgccaaagtcgcttgtgaatctgctgtcaaatccaacgtggtcatggttttcggtgaaatcacctgcaaagccgagctcaactatgaacaaattgttcgtgaagctattaaaaacgtcggatatgactctgtagataaaggtatggactataaaaactgcacagttatcgtcgctatcgaacaacaatctccagaaatcgccgaatctgtccatttacacaaaaaagaagaagattatggcgctggtgatcaaggccttatgattggttatgcttgcaatgaaacccctgaat

SEQ ID NO: 11035 - DNA, 349 bp, Glycine max
  Coding DNA Sequence Number=SeqID_1256
tgatgaggagtagcgcttgctgacaaagagtgcgtaggtatgatacgatcgactctcgtacaccgggagcgtgggcgtgatacagagaagacgggtggtacgaggcataggagagctggaggagaaaggacatttgactcgaggcggacatcactcgcgaaggcgggtcaaggacacgggggagtgcaagcagccggaggccgacaagagtgcaggagcgcaccggcctgcaacgagtacgcgattaaccgtcggatgtgaacgcggcagtatgcgcggcgggtatggcgccccaccccaaccgaaatgcggcgaggcgacgagaaagcagtcggatggagggccccca

SEQ ID NO: 11036 - DNA, 592 bp, Glycine max
  misc_feature (26)..(26): n is a, c, g, or t
  misc_feature (39)..(39): n is a, c, g, or t
  misc_feature (42)..(43): n is a, c, g, or t
  misc_feature (46)..(46): n is a, c, g, or t
  misc_feature (49)..(49): n is a, c, g, or t
  misc_feature (79)..(79): n is a, c, g, or t
  misc_feature (89)..(89): n is a, c, g, or t
  misc_feature (108)..(108): n is a, c, g, or t
  misc_feature (116)..(116): n is a, c, g, or t
  misc_feature (156)..(157): n is a, c, g, or t
  misc_feature (182)..(182): n is a, c, g, or t
  misc_feature (201)..(201): n is a, c, g, or t
  misc_feature (215)..(216): n is a, c, g, or t
  misc_feature (239)..(239): n is a, c, g, or t
  misc_feature (243)..(243): n is a, c, g, or t
  misc_feature (264)..(264): n is a, c, g, or t
  misc_feature (268)..(268): n is a, c, g, or t
  misc_feature (311)..(311): n is a, c, g, or t
  misc_feature (315)..(315): n is a, c, g, or t
  misc_feature (332)..(332): n is a, c, g, or t
  misc_feature (334)..(335): n is a, c, g, or t
  misc_feature (373)..(373): n is a, c, g, or t
  misc_feature (397)..(397): n is a, c, g, or t
  misc_feature (399)..(399): n is a, c, g, or t
  misc_feature (403)..(403): n is a, c, g, or t
  misc_feature (438)..(438): n is a, c, g, or t
  misc_feature (445)..(445): n is a, c, g, or t
  misc_feature (484)..(486): n is a, c, g, or t
  misc_feature (514)..(514): n is a, c, g, or t
  misc_feature (525)..(525): n is a, c, g, or t
  misc_feature (540)..(540): n is a, c, g, or t
  misc_feature (542)..(542): n is a, c, g, or t
  misc_feature (554)..(554): n is a, c, g, or t
  Coding DNA Sequence Number=SeqID_1257
atcactcataacatatcgaactactnacatgataatcangcnncancangcactagtaaactactctgcgtgcacgcanccgagtatgngttcgcaagtcgacatgtntcatctanctacgctactactcaactagcaagacgacagcatcgtcgnntgctcggctcgatagctcgagtggnaacacattactagcgtaantcgatatcgatacnnatcgtcactactatactgactangttnatacgtgaaaccatgcacacnctgncgcgagttgtcgctgtcgtgttacgggatgtatcatattatanaaantacacggcgatgtgtgngnnatgcatcgctttatgcgatatactatgccgtgtgtcgntgctgtctgactatcatgacgacncngtcntctctatcgtctcgtcgtagcgtacagtacgacanatagctnacatgagtgctgcactacaccacttgtacagcagacacnnnacacacactatctcgcccagatagtggncgactcagtangttactgtcgcaacntnataatcgtttgnggctgtcagcaacgactgcatgcataccgacctacgcg

SEQ ID NO: 11037 - DNA, 301 bp, Glycine max
  misc_feature (88)..(88): n is a, c, g, or t
  misc_feature (175)..(175): n is a, c, g, or t
  Coding DNA Sequence Number=SeqID_1258
tctctccgttgttggtgctcgtcttggccgctgctgcgtttgtgccctctcgtcagtgcgctctccagtatcattagtataattgtantttatattatatattgtatataatacctacaggcggttatgacttatattatatacttccttcagagatacctattagagatatatnatgccatacttatttctatgcgtactaatagttctaactcatccaccgcgttttcgcgcgcgagtttcctcgctggttgcctgctactgccgcgaaactaaatatttgttgagaccaccactcacc

SEQ ID NO: 11038 - DNA, 138 bp, Glycine max
  Coding DNA Sequence Number=SeqID_1259
gaatgggggtcggttcccatacctgttccccccagctcctttcgcaagccgcgcatgcctcttcaaaagtatgttataccggtacccccccacaggctctcatatgcgcgttaatgtcgtcccacagacatcctgcgt

SEQ ID NO: 11039 - DNA, 482 bp, Glycine max
  misc_feature (363)..(363): n is a, c, g, or t
  misc_feature (365)..(365): n is a, c, g, or t
  misc_feature (398)..(398): n is a, c, g, or t
  misc_feature (451)..(451): n is a, c, g, or t
  Coding DNA Sequence Number=SeqID_1260
ctcgtgtcttctagttttatctgttattcctttttttctccaattgttgagatattattctgaacactgatgattttcatacagataatatcgcgtaaacaaaagagaccgtcggcgagcggaatcgtcacagtaaaacaaataagtcatggaatatcaatgcgtgccagagcccgcttgacacagctctggggagcgggacgggtttgggttgctttttgggtggggtgtgagttatcatctatgaggtgttaattacaatatgcaccccttcccaccacgaccacgagaacaaaccgactatgatacatatttatgcaatggaaggactagacgttgtttctgtgtctcgaccccgcttgntntgtgattgtttattttggtggttgtggccccgnggggcagtatatacagtggcatactcttgtgttttttgggtgggtgcgtggtnggggggcagcgccccacggaagggaagagaa

SEQ ID NO: 11040 - DNA, 575 bp, Glycine max
  Coding DNA Sequence Number=SeqID_1261
tagcgcgagctacggtgccaattgcgaacctgagaatccactcccctaccgtctctgctgctcgatggattccgggctcggcgctttcgcgccgccccggaatgacggctaagccgcccacctccacccgaccggccgacgcaaccagccgtggatcgcgcctccggacacgcccagcaacccgtccgccccttgatctcggttccactctccaatagcaatcatggcgaaaatatgcaccggcgtggggcgtcgcgatgtggctgtttttcctggctgcctggtttgtcctgctcgccgccatcgcgctggtcgccccgcaggcgtttggcctggacatcacccatttgcccgccctgttcgcgagccagccgatgccacagcgcatcgcgatcggtgcgatcctcgtggccgggctgacgctgatcggcgcctcggcctggcggctctcgcgccaggaccggcgcctcgacacgctccgtgatcgcctcaagaagacccgggaagacgtcgtcgtcgcccatgccttacagaaccatctcgacaccacggtccagcacctgatcgagagcgat

SEQ ID NO: 11041 - DNA, 516 bp, Glycine max
  misc_feature (50)..(50): n is a, c, g, or t
  misc_feature (90)..(90): n is a, c, g, or t
  misc_feature (163)..(163): n is a, c, g, or t
  misc_feature (343)..(343): n is a, c, g, or t
  misc_feature (348)..(348): n is a, c, g, or t
  misc_feature (424)..(424): n is a, c, g, or t
  misc_feature (448)..(448): n is a, c, g, or t
  Coding DNA Sequence Number=SeqID_1262
ttgagtctcgatctgctggtgcgctctctgtctgtgctcagtctctatgngccgtacgtcatctgcgtgctcgcgcgcggtggcgccacngcggcgcgtactctgcgtcatcgtctctatcgcgcgtgtacacattgctgtgctctcgcgtgccttgcctgcngcgcggcgcgaccgccgcgcgcgctcgatctccgcgcctgccgtcatcgacactatctccctctccgtcgtgcgttgcgatcgcgatgacgacacgaggtgcacgtgtacacgacactactcgtcgatccagatgatatacacaatattagtgcatcggtgtgtaggaaagcagctgagntgctnagtcgtgaggatacgcggctactacgtagttcgctactgacaagtatagacgtcattccatcctacacacatcaangatatatcatactcatcacatatntatcactgtcctacgttatcatacgacccgcgacatgacaagcgatcactctgatatgtcgacgaccc

SEQ ID NO: 11042 - DNA, 578 bp, Glycine max
  misc_feature (38)..(38): n is a, c, g, or t
  misc_feature (60)..(60): n is a, c, g, or t
  misc_feature (123)..(123): n is a, c, g, or t
  misc_feature (145)..(145): n is a, c, g, or t
  misc_feature (185)..(185): n is a, c, g, or t
  misc_feature (244)..(244): n is a, c, g, or t
  misc_feature (465)..(465): n is a, c, g, or t
  misc_feature (490)..(490): n is a, c, g, or t
  misc_feature (553)..(553): n is a, c, g, or t
  Coding DNA Sequence Number=SeqID_1263
agttcgactcgacgtgttcttgttcgcgctacgcgacngcaatacgacaccgcgacactncgctacaacgcacagatggaaagcgctactaactcgacgcgtcacaacacataacgatacacnacgcgatatatacgcattctgnctattactgcggtacgcgctctccctgtttcgttgcgtantactggatatgcagcataatatgtatcaccttacacacacacttacaacacgagtatcnaatcgcaatagagattagcgctgctctacatttcgtctctgtctactattctcatatagcgtgcgttaccgtatatgagacatgcagtattaattataagtgaccatagtatagaggaatagtaatatggagtgtctcgcggacgatgcgagtgtctgtgtacgattacgcgccgtgcgtgcgctatatgcgctaggatgtgcgagtgtggtcgggcgtgnatagcgagcgcaaacctatgcgccncgcgagcatgggcgcgaggattactcgtccgcactgccatccacacgccgaccgacgagccanctcaaccgaacgcacatcgtagtca

SEQ ID NO: 11043 - DNA, 179 bp, Glycine max
  Coding DNA Sequence Number=SeqID_1264
tacatacattatctttctttgcacgctcttactcgtttcctttgtctttgtctttctctttcggctttttcttctgctccactgtttctatcccttcctttctgtatgcaatgtaagtgttggttactctcctctcttcctgccaatggatttctttgccacacatcgccttcattgct

SEQ ID NO: 11044 - DNA, 534 bp, Glycine max
  misc_feature (295)..(295): n is a, c, g, or t
  Coding DNA Sequence Number=SeqID_1265
cccttctttatctgactctcttatttcttctcctctcttcttctatagaatccacttctaactccacctccttcaattcttcttcctcttccaattcttctattccttctaattcttcttctactccttctcccaataaacctacaagtttaccctggaaaccaagggtgagagatttaatttgcaaacctattccaaagatgaaagagagactcatgttttatcacatgccaaaaacaggaggagcttttttaacagaacatatttatctcgaatataattacacaaatactgnattggcaagtgggacacgttggatttaacaaatacatagcaacagtaaaagagagaaacgtgaaagatccatttttattcaccttggtgagagatccagttcagagagtagtttcagaatataatcacatgattaataatattggggtggattattcaagttacactcttaatttattaccgggggatcacaatagtatttattatgacgtggagtttgtccgcaaagtcattgacagg

SEQ ID NO: 11045 - DNA, 585 bp, Glycine max
  misc_feature (49)..(49): n is a, c, g, or t
  misc_feature (104)..(104): n is a, c, g, or t
  misc_feature (177)..(177): n is a, c, g, or t
  misc_feature (241)..(241): n is a, c, g, or t
  misc_feature (260)..(260): n is a, c, g, or t
  misc_feature (406)..(406): n is a, c, g, or t
  misc_feature (560)..(560): n is a, c, g, or t
  Coding DNA Sequence Number=SeqID_1266
tgcgagagactctagtgtcacaccctgcgtacaatcatcatagtacacntacgtacacactgtcatactatctctctctcgtgcgcgtgattgtgctacatcantgatgatatccatcgatcgcacatcgaccccgacacacacatgtactgctccgcatgatgctagtgacagcantgctctgtagcatcaatcatacgccactacctagctgctctcatatcgtctacgctgcttaacntacttatacatcaatctanaacttgtactatatcacataattacaattcgatatactataatacacatatgtgatacgctgtactcactaatatgactcactacatactcgtatatcacctaccgccagacacattcacatcactcagcactatactctcctatntcatatatcacgcgctaccgtcccttcacgtctcgccgaactacgcgcagcgacatcaccgtatgcttatcgtacgtctcacagttagcgaccggtactattctctctctgtcatctcatgctctctctatttataactcgagtgcgtgtgctntctctacggctggatattatctcac

SEQ ID NO: 11046 - DNA, 506 bp, Glycine max
  misc_feature (214)..(214): n is a, c, g, or t
  misc_feature (317)..(317): n is a, c, g, or t
  misc_feature (348)..(348): n is a, c, g, or t
  misc_feature (381)..(381): n is a, c, g, or t
  misc_feature (420)..(420): n is a, c, g, or t
  Coding DNA Sequence Number=SeqID_1267
tgtagtgtgtgttccttgcctataatacgctacgctgcgttgttcgatcgtcgcatgagggcgacctatgaccggctcggctgagacttacgcctatgcgtggcgattatcttcagcgtggcggtgtgaagcggcatagatactctcctagtggcctgctacgtacactacacgacacctacgacataatgtgcatactgtcgcgttatatgtnatagatggcagtctcatcatataatatgaggccgtgcagctgactctcctctctccatatcacagcgatagtataggcgctacgtctcctcctacgtatattnatcgttttggatggagcgatcgggtacagtnacgtctatacgtcggactcatgctatttgtaanagagtaaagatcagagtacgacggtcgatcgtctaatcnctgacgagcgcaagatcgacggtgtctagtgtatgccgtatggcgtgaatatgatgtcaccgctacgctacgtctagtgagttcta

SEQ ID NO: 11047 - DNA, 544 bp, Glycine max
  misc_feature (31)..(31): n is a, c, g, or t
  misc_feature (50)..(50): n is a, c, g, or t
  misc_feature (53)..(53): n is a, c, g, or t
  misc_feature (70)..(70): n is a, c, g, or t
  misc_feature (78)..(78): n is a, c, g, or t
  misc_feature (85)..(85): n is a, c, g, or t
  misc_feature (87)..(88): n is a, c, g, or t
  misc_feature (93)..(93): n is a, c, g, or t
  misc_feature (111)..(111): n is a, c, g, or t
  misc_feature (131)..(131): n is a, c, g, or t
  misc_feature (134)..(135): n is a, c, g, or t
  misc_feature (144)..(144): n is a, c, g, or t
  misc_feature (147)..(147): n is a, c, g, or t
  misc_feature (162)..(163): n is a, c, g, or t
  misc_feature (165)..(166): n is a, c, g, or t
  misc_feature (172)..(172): n is a, c, g, or t
  misc_feature (175)..(176): n is a, c, g, or t
  misc_feature (183)..(183): n is a, c, g, or t
  misc_feature (185)..(186): n is a, c, g, or t
  misc_feature (194)..(194): n is a, c, g, or t
  misc_feature (197)..(197): n is a, c, g, or t
  misc_feature (200)..(201): n is a, c, g, or t
  misc_feature (203)..(203): n is a, c, g, or t
  misc_feature (206)..(208): n is a, c, g, or t
  misc_feature (234)..(237): n is a, c, g, or t
  misc_feature (242)..(243): n is a, c, g, or t
  misc_feature (251)..(251): n is a, c, g, or t
  misc_feature (256)..(256): n is a, c, g, or t
  misc_feature (263)..(263): n is a, c, g, or t
  misc_feature (269)..(269): n is a, c, g, or t
  misc_feature (272)..(274): n is a, c, g, or t
  misc_feature (292)..(292): n is a, c, g, or t
  misc_feature (301)..(303): n is a, c, g, or t
  misc_feature (305)..(305): n is a, c, g, or t
  misc_feature (307)..(307): n is a, c, g, or t
  misc_feature (310)..(310): n is a, c, g, or t
  misc_feature (319)..(319): n is a, c, g, or t
  misc_feature (321)..(321): n is a, c, g, or t
  misc_feature (331)..(331): n is a, c, g, or t
  misc_feature (333)..(333): n is a, c, g, or t
  misc_feature (335)..(335): n is a, c, g, or t
  misc_feature (338)..(340): n is a, c, g, or t
  misc_feature (344)..(344): n is a, c, g, or t
  misc_feature (350)..(350): n is a, c, g, or t
  misc_feature (359)..(361): n is a, c, g, or t
  misc_feature (389)..(389): n is a, c, g, or t
  misc_feature (393)..(393): n is a, c, g, or t
  misc_feature (399)..(399): n is a, c, g, or t
  misc_feature (407)..(407): n is a, c, g, or t
  misc_feature (415)..(415): n is a, c, g, or t
  misc_feature (426)..(426): n is a, c, g, or t
  misc_feature (446)..(446): n is a, c, g, or t
  misc_feature (453)..(453): n is a, c, g, or t
  misc_feature (456)..(456): n is a, c, g, or t
  misc_feature (460)..(460): n is a, c, g, or t
  misc_feature (465)..(465): n is a, c, g, or t
  misc_feature (467)..(469): n is a, c, g, or t
  misc_feature (480)..(480): n is a, c, g, or t
  misc_feature (482)..(482): n is a, c, g, or t
  misc_feature (491)..(491): n is a, c, g, or t
  misc_feature (493)..(493): n is a, c, g, or t
  misc_feature (508)..(508): n is a, c, g, or t
  misc_feature (518)..(519): n is a, c, g, or t
  Coding DNA Sequence Number=SeqID_1268
caatagcagagtcttatcgacagagacgccnactgaactatctacgtgtntangatgcgtgatggaaacnctagctcntacgatnanntgatntgcaatccagtgctcctncgactccactgcgcgagtcnatnngtatactantangtagtcgctttcgcnntnnctacanatnnctacaancnnttcattanctncanngnagnnntttgacagagatcagaagcgtcgacnnnncgtcnntgatcgancgaangatctgntgaagntannncgtgcgtaatgatgctcncttctcacnnngnanagnacgacgacncntcacagagantntncgnnnatgntatcgntccagatgnnnatgattatctagtgattgtcgcgactangacntatacntgcagcantttcagcntgatgggtcgntttagtaatttaattagacnaatcagntcngagncacgnannntgaagtcgttngntatcactgngntcaactcgtaatatncgatcgatannctactagagctgatactcatgatat

SEQ ID NO: 11048 - DNA, 584 bp, Glycine max
  Coding DNA Sequence Number=SeqID_1269
caacttatttggctacggctacaagaactgtcagtgtcttttatttttgtgctattatgcttttgctccccttaatatcatcagcactttgatgtggcaggagccttgatttgaagcaaaaaacaaaggttattatcactatactattatttcatgtaccactatcgaatcaactcatgttgatacaaataacctaaagatgtacataaatcatgccttatatgtttttgtaatccgagatcagatttcaaaacaaacctgagatacgaaggacaagatgaactccaatttgccagatattacacatacaaaaaacaaaaagaagataataagcttttggcgataaacaagccaaatgtaccttatgtgatgctatccagttatattattttacttatcacattatgaattttaactacttgtgattgactctacactgtactctcttactctatataggtattattcgatattacctctatctttagagtcatacctgtttacttatctatacttgatatgatatgatacattattttgttgtacctttcatttgatggagatagagaagtacctctttctcc

SEQ ID NO: 11049 - DNA, 397 bp, Glycine max
  Coding DNA Sequence Number=SeqID_1270
gcgatggctccgtaccttctgcgttccgccgtcgccatcctccgccgatcgaccccgcaagtgtcggacgtcctccgccgctccagcccccgctccttctccggtggtgctctgagagttgaagccacaaaggggtgctgcatggacaaggatatggaaaagcttgctgcagacttgcgtgaagtgaatgcgcaactcgattttctgttggagcaggagagacgcttcgagcgtggccaggagctgcaaaagaagctgtcgtgcgtccttgttcctgccaccatcgcattctacatctttggcccgaagaagaagggtaagccgtcggaggaggagcaaccagacatttagccttgtgcgtatccatgtgcatatgccgtagcttcggtgtactgaa

SEQ ID NO: 11050 - DNA, 488 bp, Glycine max
  misc_feature (106)..(106): n is a, c, g, or t
  misc_feature (136)..(136): n is a, c, g, or t
  misc_feature (138)..(138): n is a, c, g, or t
  misc_feature (185)..(185): n is a, c, g, or t
  misc_feature (199)..(199): n is a, c, g, or t
  misc_feature (225)..(225): n is a, c, g, or t
  misc_feature (262)..(262): n is a, c, g, or t
  misc_feature (278)..(278): n is a, c, g, or t
  misc_feature (281)..(281): n is a, c, g, or t
  misc_feature (350)..(350): n is a, c, g, or t
  misc_feature (391)..(391): n is a, c, g, or t
  misc_feature (398)..(398): n is a, c, g, or t
  misc_feature (405)..(405): n is a, c, g, or t
  misc_feature (414)..(414): n is a, c, g, or t
  Coding DNA Sequence Number=SeqID_1271
tgacttcgcgtgtcgcgctgtctaatcatctctctattgctgagtgtcatatcatgtgtatatcactggcagagtggcgacgaagacacgacacgtagtcaaatgnaatatagtatatcgcacagcacatcactangnctctcgtgtcgtcgacgacgaagcgacgccgacacgcactgaagagnatactatatatatnatatatacagtatctacatattctcntttcgtccgttgcagtctcgtgatatataatgaaagnataaacacaactgcgntgngtagcacagagtagactagtagtaagattgtggtatagatgacgcagcacgcagcagagaggatgggangtgttctatcattcgttactggaacacacagtatacatctntatatanatagtantttcttctnccacacatcatacgaggaacactccctctagcgccgtcgcttggttagtgatattagttaactgcctcctctac

SEQ ID NO: 11051 - DNA, 559 bp, Glycine max
  misc_feature (27)..(27): n is a, c, g, or t
  misc_feature (204)..(204): n is a, c, g, or t
  misc_feature (310)..(310): n is a, c, g, or t
  misc_feature (411)..(411): n is a, c, g, or t
  misc_feature (431)..(431): n is a, c, g, or t
  misc_feature (478)..(478): n is a, c, g, or t
  misc_feature (489)..(489): n is a, c, g, or t
  misc_feature (495)..(495): n is a, c, g, or t
  misc_feature (512)..(512): n is a, c, g, or t
  misc_feature (517)..(517): n is a, c, g, or t
  Coding DNA Sequence Number=SeqID_1272
tctcgtgacacgcaatctgacatctgnacgcgcatctgccagcctgacaccctcccctgtgtatctacacgctatgtagatagtatattagagtgcttacagtcgtcccgagatacgagacgtctactatcccactcgacacacataacataatcttgtgtctcactctaatgaatatctcctgcaatacatatacacatatangatgatacacaaccatccgtgtcatgctcgtctctctgtagactacgcggccgagacgcagcatacaccgagatactacttatcgactgtgcttctgtgtcagtcntcaccgtgctcactcacatcgcatctcacctacgccgctctatcccgtcctcacgtgcatcactctcagctcgctcagcatgatgagtcgtcacgcacacnaccagtgctagcactatctnatcacgagactccatacagaacacggtcgatgcgttatctaacacgntcactcgatangtgagntgcacgatcatctctcnatcancgagtcgcactaactagaccagtacgcgcatctatcgacgta

SEQ ID NO: 11052 - DNA, 347 bp, Glycine max
  Coding DNA Sequence Number=SeqID_1273
gcgtttaatatcgattcccgcgaactcatttcaccatcaatctcctccttcagaaagctccagaaccctaaatccacaatccttcgaacaagatgttggaacttcgtttggttcaaggctctctcttgaagaaggttctagaatcggtcaaggatctggtgaacgatgccaacttcgactgctccagcactggcttctctctccaggccatggactcgagccacgtggcgctggtgtctcttctcctgagatccgaaggtttcgagcactacaggtgcgacaggaacctctccatggggatgaatctcggcaacatgtccaagatgctcaaatgtgccggaaatgat

SEQ ID NO: 11053 - DNA, 575 bp, Glycine max
  misc_feature (84)..(84): n is a, c, g, or t
  misc_feature (122)..(122): n is a, c, g, or t
  misc_feature (175)..(175): n is a, c, g, or t
  misc_feature (237)..(237): n is a, c, g, or t
  misc_feature (239)..(239): n is a, c, g, or t
  misc_feature (395)..(396): n is a, c, g, or t
  misc_feature (479)..(479): n is a, c, g, or t
  Coding DNA Sequence Number=SeqID_1274
agtgcgtgtgatagagagctctctccaacatcacacctgacgctaaatgagcgcagcgcatctaagaacgacgtcacgatacgncctctgctcgtcttctattgcgactcgcgttagagacngatcagcgttgtgtgtgagaaatatgtcgtaatatcgtatgatagcgcgactntgtgtgatcagagcgacgcacgagctgcgtgctacacgacttcggctccgcgctcctactgngngaggtgcatactgcgacctgcgacgtgaggtcttatcgagggtcggagagacacacatgtcagcagacgctgacgagatacattgctatgatttgtgtgcggtgataccacgtatcgcgcgcgcgcggtcgatcgtgctgtgcacgcaggtctgcnnctgcttcgcggatggaagaaagacggacgaggcgcgtgtacgtgcgcgtgagccgatgcgttctcgtgcgcgacactctcttnagcgacgtctgctgcggtgaagcgtggacagtctatatgtatgggctagccgaggagagaactggcagataactaacactacaatgaccgtcaatg

SEQ ID NO: 11054 - DNA, 420 bp, Glycine max
  Coding DNA Sequence Number=SeqID_1275
gaggtcttcctccaagttacttatatttgtaatggaaagaaaattctaacagctcccacttgcagaagtttaataaatggtatgatccaccatctgttaactcatgcatatggagctaatttatgctcacaagtttcaacaaacaaaatcgaaaaattctacgtcgcgaggtggttttggttgtggaggtggctacaatcccaatggttgatgtggtggtgcttgtgttcatgaaatgacgtggctttgcaaactttcagtgccaggtttgcttcaagtatggatatcgcttctcactgccatggtaggtttccaatgagatcttgcttcaaggctctgttggacctgacagactctattcatttactattttaacgcgtcaaagcttcacagtcaagtcttcaacttcagcttcatgtt

SEQ ID NO: 11055 - DNA, 271 bp, Glycine max
  Coding DNA Sequence Number=SeqID_1276
ggttcttgttgctggttatctcggtttcttcggccaggggggccccggtggccatccaggggctctgtcgccggcgctgctgcaaccctgtttgccctcatccgcaggctggtgaccacggcaaattgcctgcctgcccgtcgatggtcgggacacttctgtttcttccgcacgacggggacccgttgcctgcccggagcccagtcgctgcccctcctgctgctgcttcaagcctgactgctgcacgatttccgttctcctggttaacatt

SEQ ID NO: 11056 - DNA, 570 bp, Glycine max
  misc_feature (82)..(82): n is a, c, g, or t
  misc_feature (84)..(84): n is a, c, g, or t
  misc_feature (160)..(160): n is a, c, g, or t
  misc_feature (307)..(307): n is a, c, g, or t
  misc_feature (413)..(413): n is a, c, g, or t
  misc_feature (421)..(422): n is a, c, g, or t
  misc_feature (460)..(461): n is a, c, g, or t
  misc_feature (473)..(473): n is a, c, g, or t
  Coding DNA Sequence Number=SeqID_1277
atatcataccgaacacagcaggagtgcggtatattactctgatatatattcagatatagtttgcaacacatctcatgtaatntnttggtatgttgtgggtgctagggttatgatatagacggcgcagcatccatgtataatgtacgatacaaataacatntcaactagcagctacaatgagcgaaaacgctgtctcagatgtgcggtgatagactcgaagcgggtatcagatatataaatactatgaagccgaatctgataggcgatcgagcggtatatgagtgagtgagcggctaagatatacagnagaataatgagaagaaaagacaagcatcagtaagaccaaaacacacatcactcatatctctatcatgtgtgctagaggttcgcatatgatgatcattataattgtncggctagnngtaatttgttcgcggtgtgggagcgtgtgggagtactnntccctcctgctntgtcccgcgcgcggcaccctctcgcacacacacccgccgcaccaacacacacaactatgagcacatcagaactgacacgataaccatacaacacata

SEQ ID NO: 11057 - DNA, 572 bp, Glycine max
  misc_feature (129)..(129): n is a, c, g, or t
  misc_feature (176)..(176): n is a, c, g, or t
  misc_feature (183)..(183): n is a, c, g, or t
  misc_feature (403)..(403): n is a, c, g, or t
  misc_feature (412)..(412): n is a, c, g, or t
  misc_feature (517)..(517): n is a, c, g, or t
  misc_feature (525)..(525): n is a, c, g, or t
  Coding DNA Sequence Number=SeqID_1278
gcacgactgcagagacatacgacaacgtatatcaatgagtgacctatataataccatgtatgtatcatgtcgtgtctcttgtgacttcctgagctgtgcgctgattctgttgttatgtctctcctcgancacgcggatgcgaggccacggatatgtgtatatgtagtatataatanagatgcngcaggtgcactgtcacccactgacctcgtcagtgctaccaccatgcgtcgctatcagcgacatccatgcgacttagcgatcaatgcatccggtgtccgagcagtgagcgacgtgtcggtcgacgtgatgaactctctgaacttcacgcacccgacgctatgaacacacacaacacgacacaacagtttgagcttagaatatgtagctcagacacgtctcncgctctagngcttacatctgctcagcgtgtcgttagttgatatctgtagcatacctgataatgtgacgttctatctcactgtagtgtgggtctacgtatatagatgactgtatntgtcgaantagacgacgtatgggagagacgtattctcatgggagtacgcgacgcg

SEQ ID NO: 11058 - DNA, 498 bp, Glycine max
  misc_feature (45)..(45): n is a, c, g, or t
  misc_feature (452)..(452): n is a, c, g, or t
  Coding DNA Sequence Number=SeqID_1279
tttgcaagtcttcctcaacttccgtctgctgcaatccttatcatnggagcagactctgtcaattggaaactccaccacccccctactgtagatcctcgtgtgagaggctcaaacctgaagaccgagctcccagtgaaagtagccaaccagagcttagagggtcgctcagcacgaacggtgaaggcgactgtgaaggaaatgggcaatggtgtaaacttgcttattgggagcagtcacagaggataggaagacagtttccagtcgaaaacaaattcgtcaacgtcttcggcaatcttccacgaggtgaagggctatcgctggcgacgctagcgcagcaaaaacctccgaatcccgatatattaaaagctcgggagaaaatcggccgaggcgtaacgctgagtaaagaggaagatggcgtttgggcgtataacagatcggaaaatccccttttngtgaattcgccagcgctcgacgacccagactcgagtttcttcatcg

SEQ ID NO: 11059 - DNA, 402 bp, Glycine max
  misc_feature (31)..(31): n is a, c, g, or t
  Coding DNA Sequence Number=SeqID_1280
tttgcacaaggaaagggagaaccgccatcgnacgcgctctctatcaagatgtggatgaattctacggagtctgggatccagataaggagaaattgtgggtatatggagataagaatgaaacatgggaggtgactttgttgggagaggaagtacgtccggagcttccggagcgtgaactcggaaaaaagggagagagggatggttttttttgtagggacaggataaaaaaggaggaagtgaaaagtgattcgaggcagatcaaagaggagttaaagaatggaggtagggcgaacggaaaagaaaggaaaagagaaattaggttgatcaatgatctgacaactgtagaagaaggagagactgaaaggaaagcaggaaaggacaagggcaatgtagaaaatggaa

SEQ ID NO: 11060 - DNA, 537 bp, Glycine max
  misc_feature (30)..(30): n is a, c, g, or t
  misc_feature (35)..(35): n is a, c, g, or t
  misc_feature (90)..(90): n is a, c, g, or t
  misc_feature (173)..(173): n is a, c, g, or t
  misc_feature (227)..(227): n is a, c, g, or t
  misc_feature (288)..(288): n is a, c, g, or t
  misc_feature (299)..(300): n is a, c, g, or t
  Coding DNA Sequence Number=SeqID_1281
tctcgcgcacgccaagagatgagaaggganaggtnaataacatatactagatgtacaacatgagacaaagtacaagcagggagagagatnggggagaggtaagggagataataatacaaagcagcgcagaatagtgtagggaagatgtgaaccacactcgtctatcagcatanccttcacctcatggagttatgcaatgcggggcgccagactcacccctaccacanctacttcatattacctcagcatacgacattatacagtagcatcgaccgagaccgagaaccngtatgaacacnnacctctcagcgtgtatatctgcatgttgtataactgtggtcttgacacgcagatataagacttccacaccttcatgtgagttcatttctttagtgatgagataagatagagtgtatgcggttgtcacctttctcccgcttgcctcgcgcgcgcggagaagggccacccttattatgataagataaagcgtctccctccgcacccctcccgtggaggatggtgtcaataccctttttt

SEQ ID NO: 11061 - DNA, 401 bp, Glycine max
  Coding DNA Sequence Number=SeqID_1282
acacacagtgtggaggctaaaggattataatttttcaaaataacattgttttgcaacacctggtggtgatttcggcaaccccggttcgcaaaccctggcgaattggttcaagattgagaagtatgaggatgcttacaagttggtttactgtccaagtgtgtgcaacgattgcagttatccatgtcggtgatattggaatataccaggttgaatatggcaagcttcttgttccaagtttctaacccatacaaagtgaagttccaagggggattgacaatggaattgataacagaattgattaaagaataatttataaaattaaggataagttttatgcatttgctgaatattatggtatttctcttgttgtgctcctgtcgagttacttgcctaaaatatta

SEQ ID NO: 11062 - DNA, 528 bp, Glycine max
  misc_feature (80)..(80): n is a, c, g, or t
  misc_feature (124)..(124): n is a, c, g, or t
  misc_feature (178)..(179): n is a, c, g, or t
  misc_feature (209)..(209): n is a, c, g, or t
  misc_feature (211)..(211): n is a, c, g, or t
  misc_feature (260)..(260): n is a, c, g, or t
  misc_feature (426)..(426): n is a, c, g, or t
  misc_feature (468)..(468): n is a, c, g, or t
  misc_feature (496)..(496): n is a, c, g, or t
  Coding DNA Sequence Number=SeqID_1283
atctgcttgctctgtcgtctcgtgtcggctgccgcatcctctcctctcgtctcgtgtgtggacgtgcgcgttgtgcgtgngcctatgtacattacacgcgcgcgtctgtgcgtgtgcacgctcntgtgccgtccgtaccgtctgcgagactatcgaagcgatctgaattcctacacgnncctcgtgcacccgacacgcctgcacatccncngccgctgcctccactctctgctagatgctgatgtgtctgtgacgtgtangacgtggcatactgttcgattatgtgatgttctgtctacgcgtgtgtattgtgactacagccgtagtttaggactgagtctacgcgcgcctcgcggcctctatgttatggttccataactctgagcgcttctgagcggcgccggcccaaccgcactactcgatatnagatgagaaggcaatcaagaattaaacacacgccgggcgatnacattgctgatacaggatggcgatgatngctgtgtgctggtgtcctcgttatgtggtgtc

SEQ ID NO: 11063 - DNA, 128 bp, Glycine max
  Coding DNA Sequence Number=SeqID_1284
atgcacttaaattatctgttgaaattgtcatatcacctgacagttgccactatttcctgcttcaaatctgtttatttttggcttgtttttatgttgctatcatcttcatctgtaacttttgatatcaa

SEQ ID NO: 11064 - DNA, 392 bp, Glycine max
  misc_feature (74)..(75): n is a, c, g, or t
  misc_feature (99)..(99): n is a, c, g, or t
  misc_feature (105)..(105): n is a, c, g, or t
  misc_feature (119)..(119): n is a, c, g, or t
  misc_feature (131)..(131): n is a, c, g, or t
  misc_feature (246)..(246): n is a, c, g, or t
  misc_feature (295)..(295): n is a, c, g, or t
  misc_feature (324)..(324): n is a, c, g, or t
  misc_feature (338)..(338): n is a, c, g, or t
  misc_feature (342)..(343): n is a, c, g, or t
  misc_feature (355)..(355): n is a, c, g, or t
  misc_feature (367)..(367): n is a, c, g, or t
  Coding DNA Sequence Number=SeqID_1285
ataacaacacatcgcaagaaagatgaagagcgaaaccgacaatagcagacaagccgtagaataataacccactnncggcagagccggcgagacggacgncagatngcagagagacacgncgcagagagaancgatcacaccaagcgacaacgcggcggagccatctaaccaccatacaagaggggcagagagtagcacacagccgggcgagccggccggtacatagagataggagattataaaaanagatgaaagatgaaagtgaagcgcctctcttctccctgttgcccaccgncacacaagaaagaggggagaagatacganacaaagagagaatnatanncgcccagccccncgcgacgacgangagatcacaacgagcccacatccgc

SEQ ID NO: 11065 - DNA, 402 bp, Glycine max
  misc_feature (188)..(188): n is a, c, g, or t
  Coding DNA Sequence Number=SeqID_1286
gcaattgttgctgcttcatgggacaggaccggtaaggtttggaacctgaccaactgcaagctgaagaacacccttgctggacacaatgggtatgtgaatactgttgctgtttcccgtgatgggtctctctatgccagtggtggcgaagatggggttattgttctgtgggatgtggctgaaggtaagcntgtttactctctcgatagtagctcgatcatgcatacactctgctgcagccccgacaagtgctagctctgcacgaccaccggtcagaacatcaggatctagaatttgaacaacaagactatcgttaaagatttgaaaggtaagctgaagactgaggctaataccagctggcatagtgataacggcaacgagagcagagtgattgattacgcaagt

SEQ ID NO: 11066 - DNA, 532 bp, Glycine max
  Coding DNA Sequence Number=SeqID_1287
ttgaatcaactcagcaacagcgtgaaaatcgttggaacaaaaggcgaaattacgatccaccaaatcttctgttcaatctcagtgaccgatgttgatggaaaagtgcacgaatggccattgccatcggccaaatttgatttccattatccaaacagttgtggtcttagatacgaagctgaagagatccgtaaagcaattcgtgctggtaaattggaacacgaaaatgtaccacacacagacagtttaggaattgcccgtattcaagatgagttgagacgacaacttggcgttcactacgaaggacatgatgattgaataatttagatcttgttacaatttttattttaaactaaccaaatttcaattggccaaccaccacaatatatatagatagtagttgaatagattcgatttttttttagtcaatttttctgcaatttaggatattatatagtgggcccgaccataggaaataaataacaacatagattttccatttattgttatgaccacaaattgttttatcgattag

SEQ ID NO: 11067 - DNA, 282 bp, Glycine max
  Coding DNA Sequence Number=SeqID_1288
ctgaacatataattgagcagctcaaggtagaacttcgagaacaaaaactgaaagcaaaggaggatgcagaagatctcactcaagaaatggctgaattgaggtaccagataactggcatgcttgaggaagaatacaagcgccggtcttgcattgagcaagcggctattcagcaaattcagcagctggaggttcaggtctccaaagagcaaaggaaattgagtggagcactaagacgactgcaggaatcgcatgagctagctgacacgcaagctacggagatta

SEQ ID NO: 11068 - DNA, 509 bp, Glycine max
  misc_feature (89)..(89): n is a, c, g, or t
  misc_feature (194)..(194): n is a, c, g, or t
  misc_feature (263)..(263): n is a, c, g, or t
  misc_feature (385)..(385): n is a, c, g, or t
  misc_feature (389)..(389): n is a, c, g, or t
  misc_feature (421)..(421): n is a, c, g, or t
  misc_feature (425)..(425): n is a, c, g, or t
  misc_feature (437)..(437): n is a, c, g, or t
  misc_feature (475)..(475): n is a, c, g, or t
  Coding DNA Sequence Number=SeqID_1289
gtcgggcgtgcatagtcaagaagtagtcgtctgcagagtacgtatgcgcgatgtgaggatccctccaacagaagtatctatatatctantctctcgtgttcttctttatgagtatgtgagtgtatacgcaggttagaccacagcagccacaggtacgcggcgcgaaggtctgcctcgcgattacataaacaatnccgcccgcgccagcacatgctgctcgctgtgcgttcgagaagagatagacactctcaccagacgcggcntccacccgcgcacattaccctccgctactctgatggatatatatagagcgcgagtgtaggggataaatacccacgacgatgtatagtatacgcagatagaggcttaggtcaccaccatgtgncatncaacacacaataacataattataaggagtgangatngagagcgccggnatctatccacagactttagatgacggtttttctcttcnacatctcgcagacctgccgtagtgcgagaggcca

SEQ ID NO: 11069 - DNA, 549 bp, Glycine max
  misc_feature (68)..(68): n is a, c, g, or t
  misc_feature (80)..(80): n is a, c, g, or t
  misc_feature (82)..(82): n is a, c, g, or t
  misc_feature (84)..(84): n is a, c, g, or t
  misc_feature (116)..(116): n is a, c, g, or t
  misc_feature (140)..(140): n is a, c, g, or t
  misc_feature (190)..(190): n is a, c, g, or t
  misc_feature (208)..(208): n is a, c, g, or t
  misc_feature (248)..(248): n is a, c, g, or t
  misc_feature (263)..(263): n is a, c, g, or t
  misc_feature (271)..(271): n is a, c, g, or t
  misc_feature (277)..(277): n is a, c, g, or t
  misc_feature (312)..(312): n is a, c, g, or t
  misc_feature (346)..(346): n is a, c, g, or t
  misc_feature (358)..(358): n is a, c, g, or t
  misc_feature (374)..(374): n is a, c, g, or t
  misc_feature (380)..(380): n is a, c, g, or t
  misc_feature (424)..(424): n is a, c, g, or t
  misc_feature (428)..(428): n is a, c, g, or t
  misc_feature (441)..(441): n is a, c, g, or t
  misc_feature (451)..(451): n is a, c, g, or t
  misc_feature (460)..(460): n is a, c, g, or t
  misc_feature (462)..(463): n is a, c, g, or t
  misc_feature (466)..(466): n is a, c, g, or t
  misc_feature (482)..(482): n is a, c, g, or t
  misc_feature (489)..(489): n is a, c, g, or t
  Coding DNA Sequence Number=SeqID_1290
atacgtgtcgatgtagctacgcacatcgagacgatgtgatgagagtagtgctatgctgatacatcaantgcgctcaactngncncacgagtgtgcgtgcgtgacgctgtagatacnagccgcatcatcagcgctcatcancaacgtcatatatgtctcgtactcatgactctagcttactctgatgacancgacgacgtgtgcgcgcntacgacgcaaaggcatacgacgcgacacgtagcgtcgtcntacgcaggtacgatncggctcancgctgngcactgcgtcacgctcagtgctcgtcgtcgtctancgtacgacgactgtgacacgtgctagttctcaangaatggctgatngcgacgtagcatactngtacanacgcgttgacgactaggactccaaccgtcatcggcgtctcggangtcnatgctatagtcantagcagaacntccgtgctnannatncgaagcgtccgatgcnacgagantacgcagcagagcattgcgacgggggagcgtactcgtcgcgatggactcgacatcgatga

SEQ ID NO: 11070 - DNA, 310 bp, Glycine max
  Coding DNA Sequence Number=SeqID_1291
tcaaaaccaaccaccgctcaaccggcgaggggaccctctcccctgtctgcggccgcggtatattccaacgccgagaaccccagcccgcctccagaccctcgcccaggagaagaccccgagctctgcaaaaaccaccgaaggaagcacgacggatgtcgacgaaaaataaagggggagaggacgagcggaaaagaaaaaagggaggtgggaggaggaggagaagaagacgaagaaggaagagagaagaggagcggggggggggagaagggggggcggagagccggcgagaggaacagaacccgcgggcgcg

SEQ ID NO: 11071 - DNA, 594 bp, Glycine max
  misc_feature (167)..(167): n is a, c, g, or t
  misc_feature (192)..(192): n is a, c, g, or t
  misc_feature (282)..(283): n is a, c, g, or t
  Coding DNA Sequence Number=SeqID_1292
actatcactgcagacctgtgtggtgcagtaagatgagacggaaagtacatcaatcacattcaactcctctcagtatatgaactatatgtctcctacgtatggacactacctctctcattctaggtgtacgaatcatccttcgatctacgctacacatactaacatantgtaactatcgatagtgtagcgtcnctcgccactcgaatacgtcacgatatctgtctctcacgtgttgtcctcatatgtcatcattacgacgtgaatctgccctctgtctcgtgnncgtgcgttcgacattatatatgtattgagggatcacgtctgcatgagtagagtgctagtacctgtactacgagctctctacatcatccaaccagctcgaggatcatcttctctctgacatgcataatatgtatagatgagatgtaatgcgtggtactgtgcggctacatctcactgatactctgagcgtcgcgagcggacgcgtgtgcctcctcatcgttctcggcgagtagtggagcgaatcggtagttgttactgccatgtgcctcctactcgacgcgccgagcgcgctgtgcgactattactctatgt

SEQ ID NO: 11072 - DNA, 569 bp, Glycine max
  misc_feature (159)..(159): n is a, c, g, or t
  misc_feature (371)..(371): n is a, c, g, or t
  Coding DNA Sequence Number=SeqID_1293
tagtatgtgccccttcgtagatgtgcatgccgtgatattggtccttcgtcttgttatctcaagctcttgattctgagttgacgtagtactagtatattagcatatctatgtataggcatgcaggcgttgcgccatagcgtgctgcggacgcgggatgtnatgtcacaatatgtcgcggtctgtgtgctagactgcgtctgatgattattttagtgtcgatgtcgaacgtgtctcgttaccgtaattgtctagtattgttattgctcgtcgtgcgtatgacgtggagcacagtcagttgatagactcactgatctctcttcactcgcgcgacgcaatcggccgagcgcaggataacacataacccatcgtcncacgcttaacatccgctcagccttcctactctctagctcctacatacactttaactttcaaactacaataagttactctataggagaataagacaaagtcctggattctcttctctcggtctacgcatgagaagggggcgcgtcccccttcttcttagtttgggtttatcactcattccgtcttggttgtgcttgcga

SEQ ID NO: 11073 - DNA, 578 bp, Glycine max
  Coding DNA Sequence Number=SeqID_1294
ataccaaactctttcaacacctgtaaaatcggcaagcttcatcaaatcctcccaacacatccatggcgatttctcacgctcagcctctgcttcttctcctcttctcactcttcctcttaccttctctgcgcgccacttctttccacaactgcgataagaggctcgatcccgttaaggtcacaggtgtggagatctctcctgaccctgttgtgagtggcaaagccgcaacatttaagatcactggttctactgatgaagacatctctggaggagaagtagtcatcagtgtttcactctatggagttcatatccataccgaaactcatgatctctgcgatgagtcgtcctgcccgatcgcacctggcacctttgtcctttctcattcccaaacactgccttctattacaccacccggtacttatacgcttaagatgacgataaacgacaagaatggcgggcgactgacctgcatcagcttcaagttcaagatcacattgttttccacggtttctgctagttaagttttccggtgcaaatatgtttcctcttttgtaaaactctctcctagacttgtgtgg

SEQ ID NO: 11074 - DNA, 594 bp, Glycine max
  misc_feature (27)..(27): n is a, c, g, or t
  misc_feature (31)..(31): n is a, c, g, or t
  misc_feature (60)..(60): n is a, c, g, or t
  misc_feature (258)..(258): n is a, c, g, or t
  misc_feature (358)..(358): n is a, c, g, or t
  misc_feature (473)..(473): n is a, c, g, or t
  Coding DNA Sequence Number=SeqID_1295
attcatttgttatctactcctcgcttnattncgtactctcccagcattatgttattcttntaactttataatacctcgacacacgcctcgactcttctcttgtgctctttgactgccatatttcgttgctgcgttctatggatctcgcgctgcgcgctgctcagtgtatatctagtgttgtaaaagcatattccgagtgtgtgttatatgtgtctcgacatcgcgccattgccacatctctactctgatcctctcgtnttacatgttctcctctctaagctgctccgatagcgcagacgctgtactcaacgtactgtggcgagattatatgatgtgtatcgttgacatgatctctatncactgcacgttctgcaggtgtatgcgtttcagcgtcgatgtcatagagcattgctcactatcatctattatctctcatattacctcatataatggctaccactactgactcactnttatacttacatatactcataccactcggacaccgttacatgggtatgttgatctgtctggacatatatagtgcagatgtcataatgactctatcttagtgtctctggatcacggtgcgta

SEQ ID NO: 11075 - DNA, 252 bp, Glycine max
  misc_feature (129)..(129): n is a, c, g, or t
  misc_feature (162)..(162): n is a, c, g, or t
  Coding DNA Sequence Number=SeqID_1296
ttttttcttcacaatcaatgtgtttttttcaattataaaatatatcctctatcctacaaatctttctttgaaatatttagctatctcctttccctctctgcattctcaaagtaatcataatcctctagngccagcgaatccacactcacatcaaatccttgngattgactcgctcctattatatcctcacttgaattatacattgccttcttatctctaccagtaccttcatcttcttctaaatcctcaacc

SEQ ID NO: 11076 - DNA, 483 bp, Glycine max
  Coding DNA Sequence Number=SeqID_1297
tagcgcataccaaagggccaataatatctccggttcttgattagcaaagcgtagcaatggcgaagcgtctggatgtcgcgctcctgctgctgctggtggtgatggtgctcgcgccctgcgacgggagggagctgaaaggcaatggcggcgccggtggcgacgtcgacgaggtgaaggatgtggtgcccaggtttgcccgacgctgccgccctcctggtacccactaacccaaaattggttgcttggcggttgcccccccgtggaccccgggaatacctccccggctgcttggcggattcctcccaaaagaaaaaaaaagtcccccatggatgattgccccctggccctttgaaccacctttgtttgtttcgccctggaagactttcttacaaagctttaactccccgccccggaaaaaaaaaaaataccgccccggcgcgtttccccttaaaacatccgcgggggcccctttacattcgtgca

SEQ ID NO: 11077 - DNA, 102 bp, Glycine max
  Coding DNA Sequence Number=SeqID_1298
agcccggccctcgtggcggagtgagggaacttgagagaggcgcgctgtaaggcacccgaggttcgcgcgggtcgatgacgacgtaactgtggcgccggctga

SEQ ID NO: 11078 - DNA, 582 bp, Glycine max
  misc_feature (96)..(96): n is a, c, g, or t
  misc_feature (342)..(342): n is a, c, g, or t
  misc_feature (395)..(395): n is a, c, g, or t
  misc_feature (495)..(495): n is a, c, g, or t
  misc_feature (554)..(554): n is a, c, g, or t
  Coding DNA Sequence Number=SeqID_1299
gtatgcgacgcccttgtactatatcgtacgagtgcgacgcactagcggtaataagggtgacgatcgtgtgtcgacacgcgcgcatgactgtagtantaggcgtaaccgcgacatgctcatcgatcgagtgtataagacgaatagaagcaagcgtgtacgatacgcttggtatatcgcacacgtataggtgtacaatatatctgactcagtgtaagcactgatatgaagaacgacgcacacagtgcgtgatgctggacatactcgtaagtcagacgatgtgatatgatggccgctgagcgtcgagttatacgacatatgcataccgacacatctgaggtgtanctgctgcgtatatcgtagcgagtctcatggcaccacgtgtcgtagtacaattncccctctggctatgagtgttgcgcgactatcacatcatgatcgtcgttcgttgctcgagctcccgagagtatgatcgcacatatcgagtcaagtgcatancgagacgtatctgatcgctcgatgtgtgatgtgtctaagtatacttagtagacagcgangtctgcgacctgtgctgatctgacatgt

SEQ ID NO: 11079 - DNA, 443 bp, Glycine max
  misc_feature (209)..(209): n is a, c, g, or t
  misc_feature (273)..(273): n is a, c, g, or t
  misc_feature (413)..(413): n is a, c, g, or t
  Coding DNA Sequence Number=SeqID_1300
taccgagcatagtactgggcgcagaacagatcatagtgactaatgtagtggcggctccgaagctgcagccatgacgcgtgaccgttaatctgcatctactggactagagcctctgctcatgcatgaccacgatctcattactgcgcagaagccacgctagggcgcattgtgcgagcgcctcttaccactcactgagctcaggccataantctcgactatagtagcgaacacgtgacacgttcgcgcacgcatagtacaaatgccacagacacngcatagtgtcatcacacatgcaaccgagcgctggtacatatatctatgtcataacaccacgctggcgtgtggtctgtcatgcgggttgtgcacacggccctgcggcgattgcccgtctgtccctcatcagcgcacgatgnagagatggaagtcgggctagatacacatga

SEQ ID NO: 11080 - DNA, 453 bp, Glycine max
  Coding DNA Sequence Number=SeqID_1301
gacaaatacaattctctctccgacaatccgtcacaaaaggttccgtctttttaatccggtccggtctgcaattaggcggcgaggaagcaatgaaagggattgcgaggattgtgaattctctttctcgactcggtggtcgtgagatcatttctagaggaagtagttcttcgtcttcgtctcttcttctggtatctcgtcgctcgctcttcatctcggcggcaacgcactttcccaccaattcacgtgatctcacctcctcttcgagatcttcttctttacttcctcagaaatgggctttcctcggaggggggcagagaaggacgatgtttatccaaacacaatccactcccaatccttcttctctcatgttttatcctggcaaaccagtcatggaggttggaagtgctgatttccctaacgttcgttcagctctaggctcacctattagccaag

SEQ ID NO: 11081 - DNA, 570 bp, Glycine max
  Coding DNA Sequence Number=SeqID_1302
cggtcttctgtgtgtttatcgtggatggttgaaaaaatagacgccgcggctgttatatgcccacacacgatatctagtataaattcgaaatcaaggctctgcacgaaacgctattggttgtataataaatatccttcgctccgttgcgggattgtaggtttgtagttgagcacatatgtcgacaaacagcctgtggtataggtgctgttgcgctgttttttctattcactccatataatataaaatcgatttgacggtttaacgaattataatgggagtgcgcggagagtcccattcgatctatatggtttaccataaccgccttaccggatagccccctgtgtttgcccttctgtataataacaggtcttgttgcggtaatgacaaattaacggcggtcaccgtcgccacatatttaacatcgatatttgtccgtacatgatcatatctacatctatttcgtcccgctttgatcggaatagggagggggttacgatgggtatttgtgtccgcaggcgatggttattccccctcactttgtatgcgtgagttttcttttcacgcccgatt

SEQ ID NO: 11082 - DNA, 377 bp, Glycine max
  misc_feature (85)..(85): n is a, c, g, or t
  misc_feature (92)..(92): n is a, c, g, or t
  misc_feature (179)..(179): n is a, c, g, or t
  misc_feature (191)..(191): n is a, c, g, or t
  misc_feature (205)..(205): n is a, c, g, or t
  misc_feature (273)..(273): n is a, c, g, or t
  misc_feature (349)..(349): n is a, c, g, or t
  Coding DNA Sequence Number=SeqID_1303
cactcgccttatcctaacaatatacgtacgtatgcatatcttataagtagaatactcatgtggtcataatatataattataccanatgtganatatccagagaaaactaccttcttatatatgacctatcctatctcattgtcatatctattatatattatcacacatgtatatgacancgcatccgtggntgatagatctgagncgtactaggttatctcgagagtgagtctctgtctgcagcatgatagaatttcatcggtagtgtgtctnatttcatctgtactcgtagtcggttgctgctatctatctaagatacggtatattgcgtgtacataacacgtgtccnatacgaggagcagtaacatcatcggcat

SEQ ID NO: 11083 - DNA, 584 bp, Glycine max
  misc_feature (128)..(128): n is a, c, g, or t
  misc_feature (146)..(146): n is a, c, g, or t
  misc_feature (300)..(300): n is a, c, g, or t
  misc_feature (436)..(436): n is a, c, g, or t
  misc_feature (442)..(442): n is a, c, g, or t
  misc_feature (480)..(480): n is a, c, g, or t
  misc_feature (503)..(503): n is a, c, g, or t
  Coding DNA Sequence Number=SeqID_1304
gacttgtgggacgattgctccctacccggcggacgcccttctaaattccgctcaacgaccagcgattgatcgtatatacatgctcacgaaggcctccccctggagtcaatggctagacatagtgtgtntgttctccccgcaaacgnccgctcccactaactcaaacgtcctcgccacaacaagcaaagctgagatctggggagatggaatgaccatacactattctcacgaccacccacgcgaagcgagttccatgtatactacgcattcacccaacgaacgatgatagtacactgctgnagtatggcagacagcggacactctacaacgtaggtcgacgccatacgaactccgacacacagacttatgcgcaggacaagatcgacatccgagtgcgtcgccagcgcgagcgtatcgtacactcccaccactaacnccgtgntagcacacatccacctatcacatgcccacgcgtgcgcntagtgggtaacaaatcttccaanagtgacatcgacacgcagtccaatcaacactgctatcaggagagcacaggcacagtcaaaacgcaatctggcatcgcaaca

SEQ ID NO: 11084 - DNA, 355 bp, Glycine max
  Coding DNA Sequence Number=SeqID_1305
tcatacacgcgtgggcggcggcgagcagactacggagggggggagtgcgtgtgaggggggggagaatcgagtagcgacatggatccagacgcgttcgctaaggcattcgtggagcactactactgcaccttcgacaccaaccgctacgccttcgccaatctctaccaggagggttccatgctctctttcgaggggcagatgatccagggcgcccccaacatcgtcgccaacctcacctccctccccttccagcagtgccaccactccatctccaccgcgactgtctcagccctcaggcgttaacgccgacatgctcgtcttcgtcagtgacaaccttcatgtcgccggcgagcaa

SEQ ID NO: 11085 - DNA, 432 bp, Glycine max
  Coding DNA Sequence Number=SeqID_1306
taacagccagtccacttcacggtatgcacatcgtcaatgctactataagccaaaacaaggtgaacgagtacaaggctagtataagtttcctcaacagcaagaacaacaatattaaattagccttcttccatactgatatctgcatagaagacaaacaaataagaattcagaaaactgtatacatttaattgtacaaagattgaataaacagtgtatgcattgaaagtatgataagtttgttagacttctataataattatcccaaaagtaatgcaaaccataattttatattggttgactgtgtaaaattattacattggccatatatagaaattaaactcgattaagtaaatagtgtatccaatgcactgatgttgtaaatgatttttacactgattgaatcacatatagtcgtatggtaagtttattggt

SEQ ID NO: 11086 - DNA, 175 bp, Glycine max
  Coding DNA Sequence Number=SeqID_1307
tgctacataccgtgcaacttctgcactattgctcttgcggtgagtggtgcatgcacatgcctgtggaacattgtgaccgttccatgaccattctcgacctacttatggccctttgctatggtctgcggatccaaccctgatgatccactcatactcgagattgtgcacatgtaca

SEQ ID NO: 11087 - DNA, 519 bp, Glycine max
  Coding DNA Sequence Number=SeqID_1308
atagtcttagatgcgggtggacacacggatttgatcaagagcgagaggagtggaacatcccaagcggagtgtgcagagctcataatttactccactactggcgtctttgaagcaggaatgccaaacgatggacagagtctagcacaggctctgctttcattaacaggtggagtgaaacagatgatttgtagatgtaacaagatggatgctatcacacacaagtatttcattgccagaaatgatgaaatggcaaaggaacgtgcggccgatcagaacacagcaggataccatcatgacgataaacctcatgccactataaagggctttgagggagacaacatgattgagacgccaacaaaagatgactggaacaagggaactacccaggaaaatccacttgacgagagcaatgagaaaaagaggggatatgacaagtccctccagcacccacccccggacgcgaacaagaatgcaggaagaggcaccgtgcctgtggcactggttgagatgccacctgca

SEQ ID NO: 11088 - DNA, 598 bp, Glycine max
  misc_feature (243)..(243): n is a, c, g, or t
  misc_feature (388)..(388): n is a, c, g, or t
  misc_feature (446)..(447): n is a, c, g, or t
  misc_feature (457)..(457): n is a, c, g, or t
  misc_feature (554)..(554): n is a, c, g, or t
  misc_feature (569)..(569): n is a, c, g, or t
  Coding DNA Sequence Number=SeqID_1309
tgtacgtcaaatacagcctacaccccactctattcaatctcacgcacccgttctgtttgtagttgtcatcgctccgtacggctctgcctgcttaacgtatcctctgctctcacgagtgaaataccgcgacatacccacgtctctcgggctcagtcttatacaccaacttcgtctccatacatactctcggtcagcgccataatcccctctactgctctgtcttaggtacgtgcgtcgagtcanaaccttacacatcttctcagatcgaactcttcggacatcctatgcaggacgacccgcggctatactatcgcacacagctcttactccacctgccaccaccgtctgcctgcgactcgttcgcatcagctccgcctctccgctcacntctcgccctcgtcacgcatcactaccgcgactcctactgcgcgcgtgtgagcgcaccnntcgtcacccntctcgatgagtggcgagtcgaggtcttactcgagtatacgctctcccgtcgcgtgctgctcgtgtcgtgcacgccacgctccaaccacctcgctatntagtgtccacccacnaccctcttacgctgccatatctttgatag

SEQ ID NO: 11089 - DNA, 484 bp, Glycine max
  misc_feature (98)..(98): n is a, c, g, or t
  misc_feature (272)..(272): n is a, c, g, or t
  Coding DNA Sequence Number=SeqID_1310
tgggttgggagtgacagcccacactgaactatgaaggctacataatgcatagatatgtacaatgaactatacagtcaagccactacggctggcacgcngcacgacacacctaccacacacgcagtagatagccgcacccacacatgaccgctccgagagggtgagcggagcggtctgacggagtgggaggcgcgagcagccagagtgtagagatgagaatgatagagagaatatagaggcagcgcccgcccgcgagagcgctccccacaacnggctactacaaggcagagtcggagcgcaaaaacgacagccagcagatcatcttgatctgatacgctgccgagagctgagtaacagaagcgaataaaccaatacactatagcatagcctctctctccctcctctcgtcctcgtcgcgggtgggcatctcactactctcatatttcttgtggatgagcgaggcagccacgcaagcttgggtaga

SEQ ID NO: 11090 - DNA, 206 bp, Glycine max
  Coding DNA Sequence Number=SeqID_1311
tttgattattcacacattacccataagctgcgaaagggatattcaagatgaacttgtggctcggcttttcccttattccactggagctgatataaggagtgtttgcacataatccggtatgtatgctgttcgtgcccggaggaagactgttacagagaaagacttccttgatgcagtcattcaagtcatcaatggatacctgaagt

SEQ ID NO: 11091 - DNA, 580 bp, Glycine max
  misc_feature (63)..(63): n is a, c, g, or t
  misc_feature (184)..(184): n is a, c, g, or t
  misc_feature (192)..(193): n is a, c, g, or t
  misc_feature (217)..(217): n is a, c, g, or t
  misc_feature (220)..(220): n is a, c, g, or t
  misc_feature (226)..(226): n is a, c, g, or t
  misc_feature (248)..(248): n is a, c, g, or t
  misc_feature (257)..(257): n is a, c, g, or t
  misc_feature (267)..(267): n is a, c, g, or t
  misc_feature (270)..(270): n is a, c, g, or t
  misc_feature (319)..(319): n is a, c, g, or t
  misc_feature (365)..(365): n is a, c, g, or t
  misc_feature (383)..(383): n is a, c, g, or t
  misc_feature (424)..(424): n is a, c, g, or t
  misc_feature (428)..(428): n is a, c, g, or t
  misc_feature (447)..(447): n is a, c, g, or t
  misc_feature (503)..(503): n is a, c, g, or t
  misc_feature (523)..(524): n is a, c, g, or t
  misc_feature (526)..(528): n is a, c, g, or t
  misc_feature (531)..(531): n is a, c, g, or t
  misc_feature (533)..(533): n is a, c, g, or t
  misc_feature (537)..(540): n is a, c, g, or t
  misc_feature (542)..(542): n is a, c, g, or t
  misc_feature (544)..(544): n is a, c, g, or t
  misc_feature (549)..(550): n is a, c, g, or t
  Coding DNA Sequence Number=SeqID_1312
agtgctgcaggacgtggactccaatgcactacgtcgactactgaagtcggcttgttctgctcnttcatatacattaatgtaaatttatagataaatctatcaaacataacagaatatactgatctatatagatgtcgatgttctgttctgctgatgatatgtcgagtgttctgcagtaaaaaancacgacannctagacagacacactaaccgggantgnagctanattactgtattattatcatctngatataatnaattaatagntanggactattaagattactaaattaatatagcttggaatctagctacgatntgtgatgtgtctggcgcagctagcgaagtgaggatgagatagacangctcttgtgtggggtgtnagtgtgttatagatgcggactgccagagatacgatgagagnggtnagagagacccatatatctnattatcactctatcgcgcgtctatagagtagagaggggagcactactatgattacncctcctctctgtaggtaganntnnngcncncccnnnntncncaaannggcaggaagacagcgacgactaccgacaga

SEQ ID NO: 11092 - DNA, 421 bp, Glycine max
  Coding DNA Sequence Number=SeqID_1313
gaaatgattagctgatccaaccaattcccaccattctcagatgacaatcttacgttagcagcacccgactggttctgtttcttctaatgttccacaccccacaacaaaactagttagtagttacccacgatctatttccatattgggtcgcaatatctcaccttaaattcaccaaagtcgcatccttttccagaaagagagagtgggcaatggtggaatgaggataaaaggggaagagaagaagaagaagggagggaaatggcgagagaggagtggaggcttcaacttcaccaaagagcgaactcgatttgttcctacaagaaaatcactcttctgatttgctttctcaacattgttgttgctctctactctcttcgctctctctatgcttctctctctatttactctggcagcgttgcac

SEQ ID NO: 11093 - DNA, 301 bp, Glycine max
  Coding DNA Sequence Number=SeqID_1314
cctgccctgcgcagcgagggaaagagacacacacagcacagcgtccaccaggcaactaataaaaggcaaaagcacggctccttcggcctggggtctgctcagctgcacatggacaatgctgctgcgccttacgcgaccgctggtgcggccggaaacaaggatttcaggtattctgcctatgggtttaggacttcggcgctggaggagcacaaccagttcatcagcgcggccatggacaccgccatggacaactactcatggcgcctgatgccggcccagaactcggcgttctcactctcga

SEQ ID NO: 11094 - DNA, 348 bp, Glycine max
  misc_feature (35)..(35): n is a, c, g, or t
  misc_feature (38)..(39): n is a, c, g, or t
  misc_feature (41)..(41): n is a, c, g, or t
  misc_feature (52)..(52): n is a, c, g, or t
  misc_feature (54)..(54): n is a, c, g, or t
  misc_feature (67)..(67): n is a, c, g, or t
  misc_feature (79)..(79): n is a, c, g, or t
  misc_feature (81)..(81): n is a, c, g, or t
  misc_feature (83)..(84): n is a, c, g, or t
  misc_feature (87)..(87): n is a, c, g, or t
  misc_feature (90)..(90): n is a, c, g, or t
  misc_feature (94)..(94): n is a, c, g, or t
  misc_feature (155)..(155): n is a, c, g, or t
  misc_feature (160)..(160): n is a, c, g, or t
  misc_feature (192)..(192): n is a, c, g, or t
  misc_feature (194)..(195): n is a, c, g, or t
  misc_feature (198)..(198): n is a, c, g, or t
  misc_feature (204)..(205): n is a, c, g, or t
  misc_feature (214)..(215): n is a, c, g, or t
  misc_feature (221)..(221): n is a, c, g, or t
  misc_feature (225)..(225): n is a, c, g, or t
  misc_feature (250)..(251): n is a, c, g, or t
  misc_feature (253)..(253): n is a, c, g, or t
  misc_feature (257)..(257): n is a, c, g, or t
  misc_feature (264)..(264): n is a, c, g, or t
  misc_feature (266)..(266): n is a, c, g, or t
  misc_feature (303)..(303): n is a, c, g, or t
  misc_feature (311)..(311): n is a, c, g, or t
  misc_feature (316)..(316): n is a, c, g, or t
  Coding DNA Sequence Number=SeqID_1315
aaaacagtaatgaatgaggagcggggggtataaanagnnanagtgatatagngngagagatagaaancaagaggacgangngnnagntgngagntacgtgacatcgcccagcagtgctattccctgtcgcacggcatcgcactcacacatacatncatcncttcgcgctgcgtcgctggcgtgtgtgttgcntnngtntcgacnncccgtttgnnttcgtngtcnactctctcctctcctcctccattcnncntctnctgaggngntgagggggtgtgcgtcggtgttgtaggtgcatcgtgngtgcgccngcggncggcgcttcctcacgatatgcagctagacaac

SEQ ID NO: 11095 - DNA, 433 bp, Glycine max
  Coding DNA Sequence Number=SeqID_1316
aaaactacttctcttcctactccatctttcgcttgtacaaacctaatcagaaatggcaacggcgtcgtttagcatgctgtcagtgttcgccgctccttccggtggattgggctctcgcaacatcagaaacacaaaccaagtcttctccaataggaatcctttggtggggagtcaggtggcatggctcaggacgatcctatcaaggaagaatctcctctgccttcgacctcggccactccaccacagacgccgttgtattctcctccaccacttagcaagcctaaggtgagtaccaaaggtttggagatcttttagccgtttagcgggtccagcgcccgaaagaataaatgggagactccttatggtaaggttcctaacggcgattgcggtggagcttttgaagggagagaacgtggttgctcaatctcgacgg

SEQ ID NO: 11096 - DNA, 565 bp, Glycine max
  Coding DNA Sequence Number=SeqID_1317
ttttacttttcaggccaaagcttgttcctcagctagcattgtttggctgaagaacataaacaggagaactgttgatgttattgcatccagactgtatttttactattcgtatagctatgaacttatgggagatcttgctgaaattcggggcaaccttcttgcattgcaccgaattgccaccctccgccatgatgagctgggtcaggaaacacttcttaatttgttacttcgtaactaccttcactacaacctatatgatcaggctgagaagttgaggtcgaaggctcctcgatttgaagcacattcaaaccagcagttttgtcgttatctcttctacctagggaaaattcggacaattcagctggagtataccgatgcaaaagagtctctcctgcaggccgcccggaaagctcctgttgctgacggggttttcgaattcaatgtacaagtgggctgtgatagtgcgttactgtggggagaaatcctgagcggctgcttcatgcagaaggatggaaaagcctaggcctactttgacctacaagctggccgatggaactcgacggta

SEQ ID NO: 11097 - DNA, 552 bp, Glycine max
  misc_feature (153)..(153): n is a, c, g, or t
  misc_feature (201)..(201): n is a, c, g, or t
  misc_feature (243)..(243): n is a, c, g, or t
  misc_feature (266)..(266): n is a, c, g, or t
  misc_feature (268)..(268): n is a, c, g, or t
  misc_feature (307)..(307): n is a, c, g, or t
  misc_feature (341)..(341): n is a, c, g, or t
  misc_feature (372)..(372): n is a, c, g, or t
  Coding DNA Sequence Number=SeqID_1318
gcgctcgtctatgtgtacctctcggctcacacatataatatcaccactatatcccgcacgccgaatgacgcagtatgtcgacccgtctctgcgcgtgtctgtggtagtactatgctgacgcgcgtcacacgcgtacacgcacatcactatccngctgctgtgccggctcttatcgtcctcgctcgcaccgcatccatcatnctgtgtctcgtgcgcgactcgtcccgcgctcatctcttcccntcactgtgatcctctcacgcgtntnacctgtctcgcgcgcgctgtgcgtccgcgccgcatcgantgctcgcacgtggtgacgtggcggagctcgcccnagtcaccgcgtgttcggtgtcgggagtgcgntgttggcgcgtgtcatttctgctcctctactccgtgtcctgccgagctgtgccgaggccgctgccaactgcgcgccgttcgcagtggcgcgcgcgacggttgcgcgacagcgcgcgcgcagcgcggctagcgcgacgcgggactcacggctcgtctccactacgatacgcgtctggctgc

SEQ ID NO: 11098 - DNA, 269 bp, Glycine max
  Coding DNA Sequence Number=SeqID_1319
tgcatggccctgcagctcaatgcaattacaatagagcacttcatcttgagacttccttatcacctgatgtttacctgcccaaaagctgcaaaacatgacgagatgaaattgcgaagcatatttggcttggaatggtcagagcccttggttacatttgcactttcctgtggaagctgttcttcacctgcggtattcttgctccttaaaatagacaatgttgagaaactatagcttggattgggatcaactatgaggcttacaacgggtga

SEQ ID NO: 11099 - DNA, 292 bp, Glycine max
  Coding DNA Sequence Number=SeqID_1320
gcaccgtcagcaacctcaggtaatgctgagactgtggctgtggcggaaccagctgggagaactgcgtccccaacgacttgcgtcgacgaacagggactatcctatgagctcatctgcgaccggatggaaataatgattaatgacacgagcactctgcacacacatgatgcaccatgtgcccccgagctgcttgacgaaaatgccaggcttacggataagaacacccgtctgattaacgaacggagtctattgcatggtttgcggaataccatactcactttgctgaccaaat

SEQ ID NO: 11100 - DNA, 595 bp, Glycine max
  Coding DNA Sequence Number=SeqID_1321
tatcgatttatttctttacagtacattgggtaaagagtgttcgttctacgatgcaatacacagacgagttttcagcttcaaatcccaacaacgtccgggcctgctactgctactctagttggctgtcgagcgcccgcaagaaatggggcgacgacctctcagtcgatggggagggagcgcgcgcgctttgtatggcgccttcatcgacgcgcaggaacctcctggccgtcaggctgtgcggcggcggagcgcacagtgccggccgtgtcggcgaggccgttcagggcggccgcgccggctgtgtcgtcaaaaaaaacgcacacggcgttcaggcccatggaggcgagcgtctgctcgccctcagccgggcgctcgggctgcagttggacatggacgcagggttggttccactgttcctgtgcgccacggtcgggacgacccaaatcgccgccgtcgaccccgtcggcgagctgggcgccgtcgcatcaccacacggcgtgcgggcgcacgcggacgccgcatgcgccgtcggggccggggcccgaggggggagcccggaggcaggccggcacccgcgctggaggagagaccgcta

SEQ ID NO: 11101 - DNA, 481 bp, Glycine max
  Coding DNA Sequence Number=SeqID_1322
ttctgttccgccctcttggtgttttgcgcccgacgggggtggtgttcgacgcttttatgccgtcctcgtccccctcctggccttgtcccgccgcggtaggtggtttcctcccgtgggtgttttccgccccctcgggtcggcccccgcctcctgtgtgttacagggtgggggttcaaggtggggggggttatttcgtagtggggctcgtgggtctgggggttttgtgctctgtgttcctaccggtcctgggtgtattttgtaggtggggaccaagcccccggaccctctgctcctcccgagacctgtgcgttctgtggtttgtgcgccctcgggcccctccggccttctccctgtggctctgtcccggcgcgtctctcgtgcccggcgtgtgccgccggcgggtcaactctcgtggcccgctccccggttcgtgtcttctcttccaacacttgtggcgtgggagtccctgcggctggaggct

SEQ ID NO: 11102 - DNA, 487 bp, Glycine max
  Coding DNA Sequence Number=SeqID_1323
atattatcgttggtttggctgctgttttcaagacttatgtttggagtcgtttcaatcctagtagattctatggagaaaactggactgtcgtcatggtcgctagattcatcattatcaccatgaaaacttggtctgacgccatgttcttcttccttttcgtcatgactggctactggttcattttctacaagatgcaaaataccgtctatttcttggtccctgatccatcatctaatcctagtgattatcgtcccttcgtcattgtctttgttatcatggtcatcttccaattcttgtctgcattgaatatggtccgtgaacaagtccaaatggatttcttcttcattgattgggaaaagccaaagcttactttcaagagagaggttaacagagaagtttatttccaatctgcttggagaatgatccttattgctaatgaatggaacgaacttcaagttgaacgtcattatagggtcgagctccttta

SEQ ID NO: 11103 - DNA, 496 bp, Glycine max
  misc_feature (368)..(368): n is a, c, g, or t
  Coding DNA Sequence Number=SeqID_1324
attaccttcattatctcagcttctatgaaaaagcaactatactcatcacccacttactcctcccaccaaaaatccacacccggggttaacatgagagaaagattggttcgcttgactgaaactgtcaatgaactcagaaccaacgtcgaaaccgaagtccaaaaccaggataacctcgaaaaagttagctcaaagaactacactcttatgaacacacaaatcaaggctttgagaaaagctttcaacacccttgctgatgtgattatggaagagttggacgctattaaatcagatgttgctcgtgattctcaggaggctaatgccgctattttccgcaagcttgatgagcttggttcacaagttaatanacttcaaaatgagaagcaggatcaaagggaacaaatgagtaatgttgaacagagtttgagagaaagaatagaagctttggaaagaaagcaagatgagaccagtcaagatgtccaagcagtcgtagaaa

SEQ ID NO: 11104 - DNA, 565 bp, Glycine max
  Coding DNA Sequence Number=SeqID_1325
gacctcggcgtgtagtctagcagattggccagagcaagtgagtgtgagttgttgatcaacgagagattgaccagattgcacggaatcactcaccagactttgggttccatcagccgagctgcctcgcatggacagtcctcgccacttccttcatcgactgcaccagtgcaccagtaagggcttcctttagcgaagaaccattgtgttgcgtgggcgggcgcaacccaggctgtcaatggcggtgaagacgtggagatggtcattggttccatgatgaacaatgtagattagatcgaagataccgcttcactcaattaaatcggggtcatcgatatgagatcaaatagcttcgacaatcccacttagggctggttcgtttctatcggattgcacccgaaatcattccagcctaatcaaagtttatataaattagagaagcaatccgggtaggaattgttccgacccaccaatccgacacaaacgaacaaggctttatccagtcgagctactttgcaaagaagccctggattttctattttcacgcattagtttccccatagttcaa

SEQ ID NO: 11105 - DNA, 450 bp, Glycine max
  misc_feature (26)..(26): n is a, c, g, or t
  misc_feature (184)..(184): n is a, c, g, or t
  misc_feature (190)..(191): n is a, c, g, or t
  misc_feature (214)..(214): n is a, c, g, or t
  misc_feature (231)..(231): n is a, c, g, or t
  misc_feature (423)..(423): n is a, c, g, or t
  Coding DNA Sequence Number=SeqID_1326
tgggtagcgaggaggtgaacacgacnattgtactaaatagtcgtagaaatatgttgaggggttggtagggataacttatgttaagagtagaaataagtgctactacaattatcaatactgtaggggtggaggatagaagagtctgagagaaagatagaggcagcgagcaagcggcagaaagagngaaaannataacaagaattgaagagctganggaggtgagggggaagncctgagtgagaaggaataatatctttaatacctgatagctggattgagttggcggcacccctctctcttaccgctcctctcaccacacacacactgtctgttctttaagatagttaataaataatatatggtgtgtatgagttgagggtgagatgactgttagaagaagagatataataaaatacaatattntaaggcgggttgcgtggagagaaaaag

SEQ ID NO: 11106 - DNA, 558 bp, Glycine max
  Coding DNA Sequence Number=SeqID_1327
tcatgccaacaaagggcttcaacattaagaacttggctcatgaggactttaaattaactgtttgggatgtaggcggtcaaaaagctttgagaccttactgggcaaattatttccaaggcactgatgctttggttttcgtcattgattctgctgatagaaagagattagctgaaagtggctcagaacttcaaatgttattggatgaagatgatttaactggtattcttttgatttttgccaataaacaagatcttcttcaagccctccccgctgatgagatttcagaaacattgacattacaaaatattacaaagagacaatggtctattgtggcatgttcagcaaaaagcaaagaaggtttacaagaaggtatggaatggttagtcagtcagattccaaaataaaaacacatatatctagtacaaagaatttcccatatatataccttgaatatttaacatgattccttgtgccttgtttttttcttttacataaaagccaaggtcatattgtaacctctctctcgtttatatgatatacacctctcagttatgcatc

SEQ ID NO: 11107 - DNA, 467 bp, Glycine max
  Coding DNA Sequence Number=SeqID_1328
tacaatgacgaacgcacgaggtccgtcccaggcgcaataatatgacgtcccaggcccttcatgaaacgatgaagtgatggtaaaaagacaaagacaacttaggagaacaaacaagacagaatctaaaggacccaattattatgcataataaagaaccacttccttagttcaaacttccaagcttttgatgttctatcagagtttgaagggagtaatgaagcttcctctggacaaatgctgcaatatgcttggcttgttggatcacaatacaaaccaatggaactggcaaaatctgactgggctgcaattaagaagtctcctccatgggccattgattcttggggcatgggttctctaatctatgagctattctctggtatgaagttgggcaaaacagaggagttacgcaacactgtctccattcccaagtctctgcttccagattaccagcggctactgagttctgt

SEQ ID NO: 11108 - DNA, 599 bp, Glycine max
  Coding DNA Sequence Number=SeqID_1329
gtactgcgtcgatgtcacacaataaaattaatgaggatgggtgccccgccactcaagatgttgtttgatgtagtactctctatatatatcatatcgtgtgctataatgtattcttaatgttatagtcatttctataccttactcttatcgctaatgacctactctatccttcgatttagctgaaaatatctcgcactaacacacacatgcgccttcatctatgcttgattacatacacattattgtccgtcgtaccgcactcctctagtagggttctgagttttagactctattccgttaatgtcatagagatgtctgctatcgtgcgacatgaccgacgccttcttcgcgagtgacactcgaacctagtagtatagagtatagggtgagctggcgtacaacgtgtatctcttgtgcgtctagtcagcgtgcagccgtgtcgtccgctgagcgccgcgtggctcccgctcccactgcgagtatttcatctatatactcacactcctctagctaccctcaaccgtgcatatctgcgtaccagatgtctactgatgagtgctgtagtgacaaatatgcgttgttgcgcaatgcatctactg

SEQ ID NO: 11109 - DNA, 555 bp, Glycine max
  Coding DNA Sequence Number=SeqID_1330
gaatcaagtgatctccggaatcaaggaaacggttcaatcgatcaacggcgcggctcgtccatggggcgatttcctcgatctctccgctttcagcttcccgtcctccttctccgacgccacaactcgcctcactcagaaccttgctcatttccgcatcaactacaccatcatcctctccgtcctcctcgctctaaccttgatcacacgcccgatcgccatcctcgctttcgtagccgtcggcttagcttggttcttcctctatttcgctcgcgaggaggcgctcaccgtcttcgggttcaccgtcgacgatggcgtcgtggcggtgcttctcatcgttctaacgatcgcagcgctagttaccactggagtttggctcagtgctctcaccaccgttggattcggagctctggttttgatcttacacgcggcgctgagaggaacggaggatcttgtgacggatgatctggaatcgccttacggaccaatgctctctaccgccggcggagataacggtgattacagtgggatttgagctacatttggtgcttgtaacta

SEQ ID NO: 11110 - DNA, 550 bp, Glycine max
  misc_feature (140)..(140): n is a, c, g, or t
  misc_feature (142)..(142): n is a, c, g, or t
  misc_feature (164)..(164): n is a, c, g, or t
  misc_feature (179)..(179): n is a, c, g, or t
  Coding DNA Sequence Number=SeqID_1331
tgagtatgcccggtagttacgcgcctcacgtattgtgtgttgtgcatcactctctatactgctagtcctgcctcagatgagagagaagagacgacagtagcatccgaggatgagatgtggaccagccgcagtcttctganantgatagcgctatctgtgagagnaaggagcgtcactgnacgccgcgacacaaacgcgctcgcagactccggcaggagcgtagtaccctgcgtgctgaggctaggtaggagagtgcagccgactaatagtcatatctaattatgatatatgtatatgagcagctctcactcacataacacgcggtgtaacacagccacgacatgcccggcgaagagagagtgacgaggagctggcgagattgctgagctgtatatattctattctatcgaagaaagaagcaaaatagagcagaacgggactctacctccgctaggccacccggaggagggtgactcacctacctcaccttgggatggtggcgccgcccccctctggcgggatgtaagaatccttcctatttattggcgcg

SEQ ID NO: 11111 - DNA, 545 bp, Glycine max
  misc_feature (165)..(165): n is a, c, g, or t
  misc_feature (330)..(330): n is a, c, g, or t
  misc_feature (390)..(390): n is a, c, g, or t
  misc_feature (417)..(417): n is a, c, g, or t
  misc_feature (425)..(425): n is a, c, g, or t
  Coding DNA Sequence Number=SeqID_1332
gagtttcatcatgcaacgacgtgacagcgaacgagagtgcgcgcatataatatcgcgcatatctacataagtctcacactgcttctcgcatctcatgaccgcggcggaataacagatgtatatctacttagacagtattacaactacatacgactccacatatcnacgtatttgtctctagactgtacgctacggacgacgaactcctcgtcctatcgaaacgatatgcacaccgcggcatatgacaacactaggatcgcacgagctcgctggtcgaatcggtgcgagacacataacttataatcataccgatattgagatcgtgatacntgccgtacgtgtctgtgcgtcgtatgagcgtgagtccatgctggtactctcgtgtctctntactgacatacaactatacacacaccnacgcaagncacgaattgaatatctctcgtacatcgcgagtgtgttcttactacatccttcttcacgacgtattcatacacttattctattatgtgaatcaattgtactgtcatactctatactagtgt

SEQ ID NO: 11112 - DNA, 342 bp, Glycine max
  misc_feature (312)..(312): n is a, c, g, or t
  Coding DNA Sequence Number=SeqID_1333
gtagcttagggatagtcgctgttaatccgtcgtgttctggagatcgcttcttaagacctaacttctcagtcaccacttgctgctgcttctcttcgtctgtctgtttccgtagctggcgcggacgaatcaatgtcggaaccgtcgtgaatccagctccaagacgccacgacgtcgggggattgttagtttctggttgtctctcttcgccggattcgtcatctccaccgtcttctatctctggtccgaagacgaaactgtatgttagtgggctttctttccgtacaactgaagataacttaagaaatgtttttnaacaatttggcaagcttacacttgttaact

SEQ ID NO: 11113 - DNA, 582 bp, Glycine max
  misc_feature (50)..(50): n is a, c, g, or t
  misc_feature (66)..(66): n is a, c, g, or t
  misc_feature (89)..(89): n is a, c, g, or t
  misc_feature (101)..(101): n is a, c, g, or t
  misc_feature (135)..(135): n is a, c, g, or t
  misc_feature (229)..(229): n is a, c, g, or t
  misc_feature (260)..(260): n is a, c, g, or t
  misc_feature (287)..(287): n is a, c, g, or t
  misc_feature (290)..(290): n is a, c, g, or t
  misc_feature (300)..(300): n is a, c, g, or t
  misc_feature (309)..(309): n is a, c, g, or t
  misc_feature (316)..(316): n is a, c, g, or t
  misc_feature (326)..(326): n is a, c, g, or t
  misc_feature (346)..(346): n is a, c, g, or t
  misc_feature (354)..(354): n is a, c, g, or t
  misc_feature (397)..(398): n is a, c, g, or t
  misc_feature (420)..(420): n is a, c, g, or t
  misc_feature (442)..(442): n is a, c, g, or t
  misc_feature (489)..(489): n is a, c, g, or t
  misc_feature (494)..(494): n is a, c, g, or t
  misc_feature (534)..(534): n is a, c, g, or t
  misc_feature (537)..(537): n is a, c, g, or t
  misc_feature (539)..(539): n is a, c, g, or t
  misc_feature (544)..(544): n is a, c, g, or t
  Coding DNA Sequence Number=SeqID_1334
aacatgtgagatgagtactcagtgatattattgacgtatacacgagcggnagtgcggacagttgtnacgctagatcgcacgactgtaantctctacctcgntcagtacgtatatgactgatatatcttcgtcgantgctgtgtcctacacagtagatgatacgtaatgacatcacgagatgtgagacatctagaatgatgatactatatattactactactataagtgnataactaccagaatgagacgagagccgatanatcgtacatcttcataggagtcggctncgncggcaatgtngcgtgatgnatagcantagtgcacgnatactatgatgagcagaacnttcatgcngtatgacgtctcgttcagccgccgctgcagagtagtagtgatnncatcacgtcatacgtcgtcgtngaaagcactacgacgctgcgangtcgtcgaacgatatatcgagcgtgagatgcgacgtgcagtagagangccgncagcgtgtatactatataacaacatacataatgtcgtctnganangtagnctagacgatggcagcatgacgagtcaatgcgatgagta

SEQ ID NO: 11114 - DNA, 484 bp, Glycine max
  Coding DNA Sequence Number=SeqID_1335
gatgaagcaacctacgtttcccaacgcagcggcggaggaaaccaaaccagaacaaaaccagaccgcaccaaagcagaaatcgaagaaattcccaactgcaacggagctaatctcacactaccagaagcaaggggggctcgaaccagcggaagcctcggttaaggtcatcgaagaccttcaaaacgcgctcgtacgagtcgcttcgtcatcgaagaacgcctccagcaagaacaagcttctagctgacgcgaggaaaatcgacgccattagtggaaggcttgccgtcgtggacgccaagttggagacgaagcctggatacgtcgagactttcgcgttagggttagcttccggtgcggcgcttaacggaattagcgccgtctggcctcacgttactagagggattggtcaggtttggtccgccgttaagagtgggacagatccgtcagctgcctcttaaaatgaatattctctccagtgtgatttg

SEQ ID NO: 11115 - DNA, 144 bp, Glycine max
  Coding DNA Sequence Number=SeqID_1336
gtgagttgcacatgcaacacgactccaacgccttaacatactaagccggtgattcggaatctctgacccaccctcggcgacggtgctctctggctcggttcagacaacgccacctggggtttgattacatacgccgtttcctac

SEQ ID NO: 11116 - DNA, 599 bp, Glycine max
  misc_feature (256)..(256): n is a, c, g, or t
  misc_feature (302)..(302): n is a, c, g, or t
  misc_feature (311)..(311): n is a, c, g, or t
  misc_feature (340)..(340): n is a, c, g, or t
  misc_feature (358)..(358): n is a, c, g, or t
  Coding DNA Sequence Number=SeqID_1337
cgagcgcgaccttgttcattatatatttatagtgatgatgttctatagactagatcactaaccgctcaatgagcaactctactgacccgctgccatctgaacctccacacaactcctcacctagcagtcgcaccgtcacgctcaccctatcatcattctatgctatctctttgatcactctacagtctactcatatctccactcacactcactctgctgctggagctctctcgtgcgacactgccttctgcacgcntcacacacgccatcctccatggaactgtatgtattagcatgctgcncagtacatnatactctgtctacactctcgagtgaacgntcgcgctactgcacgcgntcactaggctgtccgcgcgtggacgtgtgatcgtactactacgaacgtatctctcttgctctcgagacatgtcacacgttacgactctgcgatgcacacggcactgatactacttgtctcgatgagcagtcatatcatcacgtggatatgtacactagccgctcactgccacactggctgactacaatactatatactgatatataatacactttatattaatgctacctcatgcgtcaca

SEQ ID NO: 11117 - DNA, 548 bp, Glycine max
  misc_feature (145)..(145): n is a, c, g, or t
  misc_feature (411)..(411): n is a, c, g, or t
  misc_feature (444)..(444): n is a, c, g, or t
  misc_feature (459)..(459): n is a, c, g, or t
  misc_feature (473)..(473): n is a, c, g, or t
  Coding DNA Sequence Number=SeqID_1338
attcccctggtattcggatcgacgaatggacattaatccactctttatattaccatgcttcattccctgttctacctatgcaatcattggccaaacacgtacggctattatcgttatatagtcataatgtcacgagtgcctagangatgcagctgtgggtcgctatacggctggttccatcgtatggaccgtcagggcgagaattatactattgtacacctacccgcccttctaactatcgtttcttcatattactcctattaggcatgataagccttcgcatactcgtggtgttggactactatacgactttgtcgaatgctacggatagacagctgttcttgttaatacataactcgtgtccgaatctccatatgtcctcgcgcgcgtctcgggcttcattatccttgntactcccacctattaatctccctgctgctcatncactgtatctcacantcatctataattgnatatggcctacttcgaatgccattacatacagttgcaatcgcgagccgcgacgtacctcgtgattctcgtatgta

SEQ ID NO: 11118 - DNA, 490 bp, Glycine max
  misc_feature (75)..(75): n is a, c, g, or t
  misc_feature (173)..(173): n is a, c, g, or t
  misc_feature (348)..(348): n is a, c, g, or t
  misc_feature (405)..(405): n is a, c, g, or t
  misc_feature (409)..(409): n is a, c, g, or t
  misc_feature (453)..(454): n is a, c, g, or t
  Coding DNA Sequence Number=SeqID_1339
ggatgactgcattaacggcgtgcaggataccagaccgcgtgacgcagccacgcgtgctctctcgcctaccttccntcacaacccccacaccacgccgccccgcccgcctcacccaccacccgacttcacccctcaaccagcgcgccctatatccctgcactctcttaattttntatattttacccattgagctgaggtctttgtagagctaccagcatcctcatctctctggctaactgtcgtatcacacacagcgaaaccccatcttaacggactgtcggtagctggctcgcctaccccgcgcctcccgccgcgctggctgtttgccattcatggttctcgcagtcngaagtgcgtttgggtggggccctcaccgccttcaccacatcacattcacaaatattntccnccacactcctccccactctctcctctccccgcccctcactcgtnngtgctttcttcgtgactctctcagcatggatgtccc

SEQ ID NO: 11119 - DNA, 519 bp, Glycine max
  misc_feature (34)..(34): n is a, c, g, or t
  misc_feature (174)..(174): n is a, c, g, or t
  misc_feature (196)..(196): n is a, c, g, or t
  misc_feature (202)..(202): n is a, c, g, or t
  misc_feature (244)..(244): n is a, c, g, or t
  misc_feature (271)..(271): n is a, c, g, or t
  misc_feature (309)..(309): n is a, c, g, or t
  misc_feature (329)..(329): n is a, c, g, or t
  misc_feature (339)..(339): n is a, c, g, or t
  misc_feature (355)..(355): n is a, c, g, or t
  misc_feature (364)..(364): n is a, c, g, or t
  misc_feature (366)..(366): n is a, c, g, or t
  misc_feature (379)..(379): n is a, c, g, or t
  misc_feature (382)..(382): n is a, c, g, or t
  misc_feature (385)..(385): n is a, c, g, or t
  misc_feature (391)..(391): n is a, c, g, or t
  misc_feature (430)..(430): n is a, c, g, or t
  misc_feature (434)..(434): n is a, c, g, or t
  misc_feature (453)..(453): n is a, c, g, or t
  misc_feature (470)..(470): n is a, c, g, or t
  misc_feature (485)..(485): n is a, c, g, or t
  Coding DNA Sequence Number=SeqID_1340
acgttatctattacgcgctcagacagtgcgtctngtagacgacacgacagtcatgcatatctctgagtactggaccgagacacgatgctgatgtgaacgatgatatcatggtgtctcatttgagtgcacgcgcatgcgacgtcgcgagtcgtcgcgctatagaggacgtaagtntagcggtaaatgagacatgtgntcgaangtcgagctgacgcccgaaactgtagtacaatgtcattttgangcttagtatgcgcgaagtcatcatatnatgatgtgcgacgcgcatgcatgatctgcagatacganctatcagatcatcatttgancatctgatgntgaacatggtcctacnctgatagtnancagtctgctacgntanatncgatcngctacgtctataccagctcgtccctggatcgacctgcantgangagctgtaacgtcgatatnataactcaatgacacgntacactactatacantcactctacagtacgacacgtcacacgcgacaga

SEQ ID NO: 11120 - DNA, 483 bp, Glycine max
  misc_feature (194)..(194): n is a, c, g, or t
  misc_feature (203)..(203): n is a, c, g, or t
  misc_feature (438)..(438): n is a, c, g, or t
  misc_feature (445)..(445): n is a, c, g, or t
  Coding DNA Sequence Number=SeqID_1341
cagacacaacagaccaaaccgcccacacacgaagcaccccacgcatcgccggcaccggcgcaggcgccgcgcgtcagaggcggcacccgccggcgccacgccgcgccgccgcgcgcgcgcacccccaccaccgcgagacgcaccgcccgaccgcccccgacaccaccgaccagcaacgccacaccgcgcacggncgcgcccangcccgcccggccgaaagacgagcccggtgcggcgggcgcggccgcgtggacgggacgagggcgaggcgccacaacaggaccagccacacccggacgcgacgagcagcacccgcggcgcacacaccggaacccgcccgcgccgacgacacacgcacgacggagcgcaccacacgaagacggcgcaacgagctcggagtccacaacagccgaagagacgagccccacacaaccacancaaaccnaagggaactaaacggagcaggggtttttccactctctt

SEQ ID NO: 11121 - DNA, 232 bp, Glycine max
  misc_feature (28)..(28): n is a, c, g, or t
  misc_feature (40)..(40): n is a, c, g, or t
  misc_feature (67)..(67): n is a, c, g, or t
  misc_feature (74)..(74): n is a, c, g, or t
  misc_feature (96)..(96): n is a, c, g, or t
  misc_feature (123)..(123): n is a, c, g, or t
  misc_feature (125)..(125): n is a, c, g, or t
  misc_feature (158)..(158): n is a, c, g, or t
  misc_feature (162)..(164): n is a, c, g, or t
  misc_feature (168)..(169): n is a, c, g, or t
  misc_feature (183)..(183): n is a, c, g, or t
  misc_feature (188)..(188): n is a, c, g, or t
  misc_feature (199)..(199): n is a, c, g, or t
  Coding DNA Sequence Number=SeqID_1342
tatccgcagcgaagcctgacatcgtcgncgacaacatcgnagcgtcaatactgaatgatgactgatngagtcantatatgtcgttagctcgattcngcaacgactcaaaccactgtcatccantntgctgccaacgttaccacgactgtcgacgtagntgtnnncaanncgacgaccatgacnacgtnacattccatcngaaactactctacgcataagtcagcatcgacta

SEQ ID NO: 11122 - DNA, 337 bp, Glycine max
  Coding DNA Sequence Number=SeqID_1343
tgaagtttaaaatcgcgcaccccacaccgcggtgcgagaagaaagtggagagcgatgacgacatgagactgcgggacccttatgacaaaagaatatctcaggaggtagttggtgatcttttgtgtgaggggtttgaaagctatattttcaagatcataggtggcggcgagatgcggggcgccccaatgaagcaagaagtgcgaactcctgggtcctggtcgcctttctgcttcacatggcgcagaccttccttccttggatagggcaggcgtgtgggtgggcgagggaggaagtctgtccgtggttgctttgcaagccaagccctatctgttatcaa

SEQ ID NO: 11123 - DNA, 485 bp, Glycine max
  misc_feature (55)..(55): n is a, c, g, or t
  misc_feature (69)..(69): n is a, c, g, or t
  misc_feature (71)..(71): n is a, c, g, or t
  misc_feature (73)..(73): n is a, c, g, or t
  misc_feature (80)..(81): n is a, c, g, or t
  misc_feature (105)..(105): n is a, c, g, or t
  misc_feature (139)..(139): n is a, c, g, or t
  misc_feature (182)..(182): n is a, c, g, or t
  misc_feature (195)..(195): n is a, c, g, or t
  misc_feature (210)..(210): n is a, c, g, or t
  misc_feature (213)..(213): n is a, c, g, or t
  misc_feature (238)..(238): n is a, c, g, or t
  misc_feature (241)..(241): n is a, c, g, or t
  misc_feature (271)..(271): n is a, c, g, or t
  misc_feature (291)..(291): n is a, c, g, or t
  misc_feature (294)..(294): n is a, c, g, or t
  misc_feature (297)..(297): n is a, c, g, or t
  misc_feature (310)..(310): n is a, c, g, or t
  misc_feature (313)..(313): n is a, c, g, or t
  misc_feature (317)..(317): n is a, c, g, or t
  misc_feature (346)..(346): n is a, c, g, or t
  misc_feature (374)..(374): n is a, c, g, or t
  misc_feature (377)..(377): n is a, c, g, or t
  misc_feature (411)..(411): n is a, c, g, or t
  misc_feature (460)..(460): n is a, c, g, or t
  Coding DNA Sequence Number=SeqID_1344
tgcgacgtcgtgacagcacagagtatcgtgtcgtacgacgcatgtagtcgtacgntcgtactatcggcntncncacgcgnnctacgcgtcgcgttggtgagagcngcgtgtacgggcacgtcactatcacttacacagntgcaggctcgttctagatcgctgatactcgtcagctagtgatnatgctagcgtggncgcggtccgtaggtngantgtcagttccgtcgtgctgtctcgnagnctctcattccgacatgctgcgcgtcgtgcncgctgtgtgtcgactggtgncancancgttcgtgatganaangtgntctaatgtacagaacgaacgcacgactcntgagtgctacgcgccatcgtcactatgngcntggctgctacgggtcgatatcggtagctgatgangtcatagctcgctacggtgcgtgtcgatgtacttcgcggcagcgctcgntcgttgctcagtcgctgatcgagtt

SEQ ID NO: 11124 - DNA, 293 bp, Glycine max
  Coding DNA Sequence Number=SeqID_1345
gtgcgggataagttgttggattgccgggggttttcaaggagaacttatttgcaagtatgtagatcgacctggggttagcttttgttcccgaactacttatgaggacaatgcaatcacaaatgctgtggagatttatgagcacccaaggtattttttctcttctttcttattatccttttgctagatttttttttattcctaaattgttgatatgatgttagcaatcactgtgcacaaccctcaaatagggcttgttactaactgttgattaatcaatcagtggagctgttcat

SEQ ID NO: 11125 - DNA, 385 bp, Glycine max
  Coding DNA Sequence Number=SeqID_1346
gaataattttctagcttttctgttagttattactatgtgttatggattgaatgaagcttgcaaaactagccgcatagtaatttctaacggcatctgggaaggtattcctcttgaaatccattgttattcctgggggcgagagacccgtgattggggaacacaaactataccatacaatagtagtgttagttttgagtttgtcgctgttctgaataaaaaaagaagaacaaaatatgtatgtgacttatggtaccaggatgcaatagaaccttatcttaaaataaaacattatcctatgcttgaagtatttcgagcaggccatacaagaaaatgtggccaatttcgtgaatggggtacaggaaagcatgggatttatttcagaaga

SEQ ID NO: 11126 - DNA, 471 bp, Glycine max
  misc_feature (35)..(35): n is a, c, g, or t
  misc_feature (46)..(46): n is a, c, g, or t
  misc_feature (64)..(64): n is a, c, g, or t
  misc_feature (81)..(81): n is a, c, g, or t
  misc_feature (109)..(109): n is a, c, g, or t
  misc_feature (131)..(131): n is a, c, g, or t
  misc_feature (133)..(133): n is a, c, g, or t
  misc_feature (157)..(157): n is a, c, g, or t
  misc_feature (172)..(172): n is a, c, g, or t
  misc_feature (256)..(256): n is a, c, g, or t
  misc_feature (415)..(415): n is a, c, g, or t
  misc_feature (433)..(433): n is a, c, g, or t
  misc_feature (446)..(446): n is a, c, g, or t
  Coding DNA Sequence Number=SeqID_1347
agacacaccctccatacatatgatgtcgtctatgngtagtagttgntgatagactcatttcttntactcactattttcacntgaatatttagttatgagacaacttganatctcttctcctctctcccccntnccgtcgtcatccacgctgcattantcgtagatacattantacacagtaattggaatactacggatcgttatgtcagcgctatgcattgactatacgacatgcgctcacacccacgcgaatcantcatctatgatagtcgtgagtgagcactgatgtactcgtcacatatgtatgatatgcatgatgaagctactgagaagaagtatacaagccgcgtgcgagtacgagacgaatcgactgtgcgccacaacacagatatccgacgtactaggatgatggatncggtaacatccctcgatngatgagtgatganggtcctaacatcatcacgtacatac

SEQ ID NO: 11127 - DNA, 187 bp, Glycine max
  Coding DNA Sequence Number=SeqID_1348
aaatcaacggccgattcttacgattcatctccgccgagcagatctgtgaattgattctcggcttctcgcgatggctgcccctcctgctagagcccgtgctgattacgattacctcatcaaacttctcttgatcggagacagcggtgtgggtaaaagttgcctccttttacgtttctctgatggctca

SEQ ID NO: 11128 - DNA, 588 bp, Glycine max
  misc_feature (34)..(34): n is a, c, g, or t
  misc_feature (44)..(44): n is a, c, g, or t
  misc_feature (113)..(113): n is a, c, g, or t
  misc_feature (277)..(277): n is a, c, g, or t
  misc_feature (284)..(284): n is a, c, g, or t
  misc_feature (331)..(331): n is a, c, g, or t
  misc_feature (360)..(360): n is a, c, g, or t
  misc_feature (404)..(404): n is a, c, g, or t
  misc_feature (407)..(407): n is a, c, g, or t
  misc_feature (500)..(500): n is a, c, g, or t
  misc_feature (511)..(511): n is a, c, g, or t
  misc_feature (536)..(536): n is a, c, g, or t
  Coding DNA Sequence Number=SeqID_1349
gatgcgcacataacccgacatacataatcatacnctgcatctantactcatatgagatacaagtaattcgtctcgtgtgacgactactgcacgagtactgatgagaagggtgngctggaagcacgctgagacgtcgagcatgatacggtcgtgctcatcgtatgcactatgatcgtctatcacttcgttatttcggttatcatcacgatgaagctgcatcgacgtagatccgatcatgtgctatgtcgatgcgactgagatatagtagtcagctttngtatagntccgtgatgctagcgtatatactgacgtcatagagcagttaagttgntgtcgcgctgtatacattagtctatatantttcgtgatgtggtttactgtattatagtatatgcaactttctngtnacctacgtgtcgtgtgtgtgatgactcgtaatgctcgttagtctccactctatttatcttaacacgcaactacgctactcgtcagtacactcncttgcgggccnctcgccacggcgatactcactatcnacacgcagagcgagtactgctgctcgtgctgttagttgatcctttgtcgtag

SEQ ID NO: 11129 - DNA, 526 bp, Glycine max
  Coding DNA Sequence Number=SeqID_1350
agtccctcgacgtcggtgttatgatcggatcgtcgtgtatcttcgcctcgctctccgtcgcgtcccttccgctccaatctacgctcatattaaaataatatggtacccgtcggaattatttcctaccccttatattatcttgcctatcgtgccgctgaggcgcctctccttatgtgccctatcgtgtttcttcgcaccacttcccaactcaaccgggagcctacggcgacgatctttgttgagcgcgagggaacagcctactcccccacccccgtccaccgcccccccacagtactatactttaccgctcttcgccctctacctgccttctttttgagcactcgtctacattatctaagggtctccccgtcatctccgcttcgctttttcccgtactcagggatgcttcctacgcctaatggctgctgcgtgctgaatcttcgtggcagtccgcgggggtattccatctactttctagatgtcgcctctcccacccgcggtggatgctcccagctttgaaatgcca

SEQ ID NO: 11130 - DNA, 547 bp, Glycine max
  misc_feature (66)..(66): n is a, c, g, or t
  misc_feature (116)..(116): n is a, c, g, or t
  misc_feature (121)..(121): n is a, c, g, or t
  misc_feature (140)..(140): n is a, c, g, or t
  misc_feature (158)..(158): n is a, c, g, or t
  misc_feature (199)..(199): n is a, c, g, or t
  misc_feature (210)..(210): n is a, c, g, or t
  misc_feature (225)..(225): n is a, c, g, or t
  misc_feature (378)..(378): n is a, c, g, or t
  misc_feature (480)..(480): n is a, c, g, or t
  misc_feature (508)..(508): n is a, c, g, or t
  Coding DNA Sequence Number=SeqID_1351
acgatcatagactgtagccgcgcaatatagaaacagtggtaacgcgtctcgtgtgtcggttaaaantactgctggcgggtgaaagcgactagtctagtgtggcgcccaacacaccnccgcngtgctgtagaagagaagancggaccacgagcacgaanagatatagcgacaccatcgcctcgttgatgcgcggacgacncgcaccgcgcncacgcgacacgcgcnctcccgctgcctctcacggcgctgcctcgctacacacaccggtacacctgcgccgcttattgatacttccgcgcaccactcacccgcatcgcgcaccgaccgcaacgtcctccgtctcccgatcagactaccgacaagcataccagtgcaggnaggggcaacagcggaaccaatactagcacttaggatgaacgcgacgccgcagcacatttacacacggcagatcagcctcacgaacatttaattagatctctnattacgtctacagtatgctaaaacttanctgtatctgttcacatcgcgccgcctggtatttacaaag

SEQ ID NO: 11131 - DNA, 594 bp, Glycine max
  misc_feature (203)..(203): n is a, c, g, or t
  misc_feature (304)..(304): n is a, c, g, or t
  misc_feature (311)..(311): n is a, c, g, or t
  Coding DNA Sequence Number=SeqID_1352
tacattgacacgctgatcgcgtacgttgttcctaccactgctcctaccctctctcatttcgtctcgacgcgtctataccgcacgacgacagctacggacgcgactcgcgggatgatagaggtgacaacgtctaccccgtatgcttacgccgcgctcgatccgcgcgtcaccgagcacgtccgtagcaccaccgccgcgcacanaatacgcacgctcgtgcagcggcgcgcgaccctcacggtccactctgtcttcattctataccactacgcctacgcatcaagaagagagatcagcatattanaatcctnagatgtgatatattgacgttaagtgtgattatatacatcagtgtgtagtctccatgtctccgatcttcaataacctatgtcagagcagtattctctgtgtagtctgcgcatacagcgccaccgagacccacctaccatcgatactagacgtgcggagcggcccacactcgtccagaagacggactcctcctccgacaccgccgtgcataccacccggcgcgcaccgcacacctgtatctaacacgtccatcggccgtcgcgtgactatatatgcggttctgcg

SEQ ID NO: 11132 - DNA, 557 bp, Glycine max
  misc_feature (176)..(180): n is a, c, g, or t
  misc_feature (500)..(504): n is a, c, g, or t
  Coding DNA Sequence Number=SeqID_1353
cagtccataaagacattgccatgcaaattcttcaaataacataagtacagtataccaagcaatcaaggatccgttcaccacagctctgcatagaaactctaacgatcaactactattagaactatctgttacctaaaatgctattgaacaagtcatcatggagattcaaaatatcnnnnngtctgagcctccagcccttttggacaaatgcaaaccacatttggcccaattccttgcaggacttgttcacatggaaatttccgaaagtgatgatgatgctaagagctgtgctgtgtgggaattatatcacttgctcttgaaagagcggcactgggcactcagtcacttggcaataactgcatttggatattttgcttctcatactaggtgcaataagctatggagatttgttccagaagatgcagcgctttcatatgatacagtttcaggagtggagtcagatcagcaaagatttatggttgagtttggaaaatttcttnnnnnggaaatagctcttcttacacttgaaccaagccctgaacagcttgatcttctag

SEQ ID NO: 11133 - DNA, 160 bp, Glycine max
  Coding DNA Sequence Number=SeqID_1354
ttgtgtttacccaacgccctaagatgggccaagcgcttgagagggaagaaagatcggatgatggagagagagacccgtttttgttaggaaaagaaaccttttccatcgtcgaggtgatatttgtcgtcgcgaaattttcgtgaatcggaagagcccccgc

SEQ ID NO: 11134 - DNA, 591 bp, Glycine max
  misc_feature (44)..(44): n is a, c, g, or t
  misc_feature (168)..(168): n is a, c, g, or t
  misc_feature (336)..(336): n is a, c, g, or t
  misc_feature (338)..(338): n is a, c, g, or t
  misc_feature (420)..(421): n is a, c, g, or t
  misc_feature (455)..(455): n is a, c, g, or t
  misc_feature (463)..(463): n is a, c, g, or t
  misc_feature (480)..(480): n is a, c, g, or t
  misc_feature (500)..(500): n is a, c, g, or t
  misc_feature (537)..(537): n is a, c, g, or t
  Coding DNA Sequence Number=SeqID_1355
gtgtcatgcatgtgtagatacctccgtggtctgcttcacatccngaccggctatgcgcgcactcctcgctgctgtcctctctctgtgtcctcattctgatggtgtgatgcgtgggaggagtttcgtgtgtgtgtattgatcgcaattttctattgagttgtcgtctgnagtagcgtgctgtgttgattctcgtgtgtgtcatttacttctgtctgtacggtctcgctcacacgcccgaagcaacgatataccaccgtgcgcacgtggcgctctaccatccgttgtacgtgattttgtcgttctctctcctcgcgtgccgatcgctcgcactctgcncntctctcgtctgcacccctgcatcctcctagaccttctcgctgcgatacacagtcacagtggtctgcgagtaatatacgatannacaggcgccgatagccacccatatctattccctntgatgtgntgtctcggtgcttgttnttcgttcattatcttcctantcgttctgttttcggtctcttttgtcttaattctctntatcgtgcgtcttgcggttcggtcttcgcatctctgctctcatacacatttgtt

SEQ ID NO: 11135 - DNA, 589 bp, Glycine max
  misc_feature (39)..(39): n is a, c, g, or t
  misc_feature (111)..(111): n is a, c, g, or t
  misc_feature (134)..(134): n is a, c, g, or t
  misc_feature (188)..(188): n is a, c, g, or t
  misc_feature (275)..(275): n is a, c, g, or t
  misc_feature (322)..(322): n is a, c, g, or t
  misc_feature (440)..(440): n is a, c, g, or t
  misc_feature (490)..(490): n is a, c, g, or t
  misc_feature (517)..(517): n is a, c, g, or t
  Coding DNA Sequence Number=SeqID_1356
gtatcatctgagtgtcgaccgccggtcgtgggcttcttntatatagaatataatctcattcttacactatctcgtactcaacatacatagctcgcagccatctgactgctntaactctgataagtgagagaatncattctccccttggtagcactccctccatctcacggggtacagaccttcaagcntacgaggagaacacacacacaacgagtgaatgcgtcctccgacaggcactcgacctcgactgaatacctcctctgactaatatgtgngcgctcttccacctcacgcagcgcacctcacacagaagcacatatcnacacctgtgacctctcgacgattattgtcggcctactactcgcacttactccgtgtctcgcctcttcttctcttgccactactcagcgcaatctactatttcacaccactcataacangcacgcgacgtacatgagcaaccacatcaaataacgtcactgtgagagcncagtacaacacagctatcacatttatntagtatgcgtgtaaactatgaatacatagactaaatctaatacacacgcaccaactgctcggtaataacgct

SEQ ID NO: 11136 - DNA, 213 bp, Glycine max
  Coding DNA Sequence Number=SeqID_1357
gggtctgtggactctcccgcaggcagatgaggatgtgtggccggatgtgttgcagccggtgttcccacaacaacgccaacgacatggacttcatagaatacagatattacagctatcccggactccgtaatgtgaagctgatcggggtggatcatttagagcaatttatagaatgtatactatcaattcgagtactgttttctctgagtttta

SEQ ID NO: 11137 - DNA, 562 bp, Glycine max
  misc_feature (58)..(58): n is a, c, g, or t
  misc_feature (67)..(67): n is a, c, g, or t
  misc_feature (95)..(95): n is a, c, g, or t
  misc_feature (182)..(182): n is a, c, g, or t
  misc_feature (286)..(286): n is a, c, g, or t
  misc_feature (293)..(293): n is a, c, g, or t
  misc_feature (314)..(314): n is a, c, g, or t
  misc_feature (320)..(320): n is a, c, g, or t
  misc_feature (334)..(334): n is a, c, g, or t
  misc_feature (339)..(339): n is a, c, g, or t
  misc_feature (355)..(355): n is a, c, g, or t
  misc_feature (376)..(376): n is a, c, g, or t
  misc_feature (378)..(379): n is a, c, g, or t
  misc_feature (381)..(386): n is a, c, g, or t
  misc_feature (500)..(500): n is a, c, g, or t
  misc_feature (511)..(511): n is a, c, g, or t
  Coding DNA Sequence Number=SeqID_1358
actattatatgtgtggtttgtgtagtgttgtagtgttgtaatttttatatatagtatntatttttanttcatatattatattcagtttttcattnctatatattatgtataatgtaatatcatttattggttcctctatctcttttatttctatataataggtaaataaaaaaaactatcanatactttttgtttgtggtgttgcgtacatacacacatcacccacaatatataaatagagtattgccttgtagtgtggtcgggtgtcactacataaaatctctanatataantgtgttggttgtggtgtgggntgtagnagagtaaatcccanttaanccacctccccctcccntcaccaccctacatcacatantnntnnnnnntttttttaatatatattgctctccctacttattatttatattgtgttttttgtgtttcaacacacatcaaatacatatactccttttgcctacacgcgctcccctctcctttgnggttgtgttgngtgggtgggcgcggggggtgggggccaacctcacctccttatctatctata

SEQ ID NO: 11138 - DNA, 411 bp, Glycine max
  misc_feature (62)..(62): n is a, c, g, or t
  misc_feature (152)..(152): n is a, c, g, or t
  misc_feature (164)..(164): n is a, c, g, or t
  misc_feature (177)..(177): n is a, c, g, or t
  misc_feature (255)..(255): n is a, c, g, or t
  misc_feature (257)..(257): n is a, c, g, or t
  misc_feature (285)..(285): n is a, c, g, or t
  misc_feature (299)..(299): n is a, c, g, or t
  misc_feature (359)..(360): n is a, c, g, or t
  misc_feature (362)..(365): n is a, c, g, or t
  Coding DNA Sequence Number=SeqID_1359
tagcgaacacgtgcaatactggtctacggagctaacgggaaggagagagagatcgacgagancggcctgtgtcaacatcgtttcgcgccacccgatcccctacgtagatagatatacttataaccctcttatatgcgttgtggtgacaagtntatttgagtganggattatggaaangtgggagttgagtgtgggttgtagcgtgagcgtgttgagatctacgagtgtgtgcgtgtgctcatgctcgtataatantncgtgggggcgcgtgagctctctgcgtgncggtcgtcgtcgtntctgtggagtgcggcaggctgcttgttgggtgtcgctcgatgtccgcgatcgcgacactnncnnnngcgcccgcggctggcatatatagttcatgcgactgctgctatatag

SEQ ID NO: 11139 - DNA, 305 bp, Glycine max
  misc_feature (255)..(255): n is a, c, g, or t
  misc_feature (266)..(266): n is a, c, g, or t
  misc_feature (272)..(272): n is a, c, g, or t
  misc_feature (276)..(276): n is a, c, g, or t
  Coding DNA Sequence Number=SeqID_1360
gccaagggggcctcttttgaaccatccaagaaaatttttttgggaattaaattttcgggcccgggttttggtcaaccccaaaaattagaagccccgtccaaagcgtcccaacgttagaaatttctttgggaatgggaaaccccctcaaccaaccctcccttatgggcccttggatcgaatagtgacggagatgttactctttgtctccaaataaccggccaaggaagggtcctccaccagctggtactcaccttnttccacagctnttcccntttncctgagttctccatcaaacacaattctca

SEQ ID NO: 11140 - DNA, 440 bp, Glycine max
  Coding DNA Sequence Number=SeqID_1361
catattggcttttaacctttgtcggtaaaaaagcagtggtccctacaacatggacaatccatccctagcactgaggcctaccaactgttatcgacgcggagtaatatcgttgtggtaagcgataagcgctatatccgtctatcatattctcggttctgcaggtacagtctcgcaagatatcgtgtccccgttatcatgcgaaatcctgtcaaatagggaaaatcaggtttggaggcatcactaaatctcccagatagaggcgaattgagttaatttagtacgggtcctgaactcagtgatcctagtcacatatcgggatggtcacatgagataagaattcagcagttcaaaatgacgtaaggaggtagaaaagggagcgatgggtaatgtaaaaccagggcaagtcctcgcattcacagggtaccagtctttgtggaatc

SEQ ID NO: 11141 - DNA, 376 bp, Glycine max
  misc_feature (56)..(57): n is a, c, g, or t
  Coding DNA Sequence Number=SeqID_1362
actcttggccagtcatcatcgctgaccctcgcttctttatggctgcggcgtctacnnaggtcgttgatgagatagacatcgagacggcatcataagaattctttgtcgctctgaattatctggacaatgacttggagggaatgttttctggtggagacgagtttggctttgtggatattgctgctgtgatcatccctctgattctagagatagctgggttgcaattgttcccaagtgagaaattgccaaagctcttcaaatggagccaagacttttacaacctttcacttgtcaaccaagttgtgccttctaaggtccaactttttgcctattttaagggtcgggctcatagcctggctgctaaaagaatgagtga

SEQ ID NO: 11142 - DNA, 315 bp, Glycine max
  misc_feature (86)..(90): n is a, c, g, or t
  misc_feature (137)..(141): n is a, c, g, or t
  misc_feature (181)..(185): n is a, c, g, or t
  misc_feature (237)..(241): n is a, c, g, or t
  Coding DNA Sequence Number=SeqID_1363
cttctgctgattgttgcaactatgattttctttgtgaggacaaaattactgaagcggaggagagaaagaagacaatttggtgcacnnnnngacacggtgaacaagtccaagctaaatgtgccatatgaaattctttnnnnngccacagattacttcagtgattccaataaactaggagaannnnnatcaggatcagtttataaaggagctctgccagatggaactaccatggctatnnnnnggcttagcttcaacacatcacaatgggcatatcatttcttcaatgaggtcaatttgatcagtggcattcatcac

SEQ ID NO: 11143 - DNA, 534 bp, Glycine max
  Coding DNA Sequence Number=SeqID_1364
tgttggctggttatccacctttctcttccaagaacaagactcaattatatcaagatatcctaaaaactaagcctgttatgccgagccatttctctgaaaatgctaaggacctcctctctagattattagttagaaatcctagcaagagattgggtttcaatggaactgaagagattaagaaacattctttctttgaaaatgtccaatgggaagaactagttaacctcaagaagaagcctcctattgtccctactttgactaagcctgacgatcttagaaactttgatagaatctaccttaatgagcctgtcattgaaactcccaacaacaatcccaagatcttgactgatcctaagaacaacttccaagactttacatacgttccaaaggatattggcaaccaatcttacattgaggatcctaagagtattttagatagcactaaataaatctatatataatttgattagtaatgaaaattttttacgtaaaattattgtaatcagtttaaaacacttgcttagaattcgaata

SEQ ID NO: 11144 - DNA, 479 bp, Glycine max
  misc_feature (48)..(48): n is a, c, g, or t
  misc_feature (52)..(52): n is a, c, g, or t
  misc_feature (58)..(58): n is a, c, g, or t
  misc_feature (74)..(74): n is a, c, g, or t
  misc_feature (90)..(90): n is a, c, g, or t
  misc_feature (147)..(147): n is a, c, g, or t
  misc_feature (172)..(172): n is a, c, g, or t
  misc_feature (179)..(180): n is a, c, g, or t
  misc_feature (184)..(184): n is a, c, g, or t
  misc_feature (201)..(201): n is a, c, g, or t
  misc_feature (243)..(243): n is a, c, g, or t
  misc_feature (254)..(254): n is a, c, g, or t
  misc_feature (258)..(258): n is a, c, g, or t
  misc_feature (403)..(403): n is a, c, g, or t
  misc_feature (438)..(438): n is a, c, g, or t
  misc_feature (443)..(443): n is a, c, g, or t
  Coding DNA Sequence Number=SeqID_1365
gtgcgtgtgtgacacctcatacacatcacacacacgctgtgctagtcntacntaccgnatatcgatgtatgcanagagtgatggatgtangagcctagcacagcgcgcatgatgtagtactcacgcgacacgcactcgatgtctagngtacgtatcgccacagccactacgnactgtcnncttnatcgcctgcgactgcgngtctttgtctgctggcgctcgctgctcgctgtagttcgttcnacacgtatccngtgntagtcgtgtgtaccttgcagcgagcggcgctggtagatgctgaatatcgtcggcacagtagtgtcacatccatcatatgacatgcgaatcgagacgctgatctactagactccagatgcacacgttctgtacgatgcacgtgagnagtaatcatcatcatgactcactgatgaaatgatngaggnatgtagtgctatgctcgacgggcatacgacgacgag

SEQ ID NO: 11145 - DNA, 598 bp, Glycine max
  Coding DNA Sequence Number=SeqID_1366
cacagacacatattacccgttgcagtaattttatatgatttgatatgtaagcgcaaagtacaccatacacccattcgcataaattacagagaagaagagattaggaccagagtagtgtgggctgggatgtatgcgcgaataccaccttaataacgacgcggtatggtgtgtgttagaatcataatagcgacgaatttatttcacatataacactgttatgttcttctatatgtgcgccgacaactatataaacaccgtaacgcaggggggagaaacacatataaatgagaaaattgtttcgcacaacatcgacgatttgcgcgccgacggtgtatgttttctcgtgcgtgattgtgactctacactacaaattattactcttgtgcgcgctcggtgcgtctttgtgtagtgttattcctgccacaatgggagtggtcaactaatattatattctctgtagatcattgtagttggtcgctgctgcgcgaggtatatatatcgtatgatattactatatgttacgtatacatgtagcagacgtgacgagcggctgtagtgtgatcgctcaacatagttatgtctgtactatagtcgtccg

SEQ ID NO: 11146 - DNA, 571 bp, Glycine max
  misc_feature (66)..(66): n is a, c, g, or t
  misc_feature (77)..(77): n is a, c, g, or t
  misc_feature (80)..(80): n is a, c, g, or t
  misc_feature (103)..(103): n is a, c, g, or t
  misc_feature (183)..(183): n is a, c, g, or t
  misc_feature (196)..(196): n is a, c, g, or t
  misc_feature (272)..(272): n is a, c, g, or t
  misc_feature (324)..(324): n is a, c, g, or t
  misc_feature (326)..(326): n is a, c, g, or t
  misc_feature (333)..(333): n is a, c, g, or t
  misc_feature (372)..(372): n is a, c, g, or t
  misc_feature (458)..(458): n is a, c, g, or t
  misc_feature (520)..(520): n is a, c, g, or t
  misc_feature (524)..(524): n is a, c, g, or t
  Coding DNA Sequence Number=SeqID_1367
aagcagaatcggagaccgcgtctgtgtgctgcgccaggtgcaatgtccagtgagagtgggtttgtngagacccaganccncaccctacatcacttacataatnaaaatccacaacataaaactaatctcaactccataatcatatataactgaccacaccacacgtcagtcgtgtgttgtatntgccatgtgcccncacgcctacaatgtcaagcgacaaaagcatgatgctaatacacatcgtggtgccaatagctgtggacgccggtagntggtacgagatctgagacacatacagacaacaggaggacgcacgacaagtancnacgtccncacacacatcagctcgcatcacactgtcacaagtctcantgtgacatgagccatccaacagcagatcataattgcacgtgtcgcggtgcagtaagatctgtgatagatccgcgcagacgcgcgcntactgcgtgcagagtgcacataggataagtgacagcgagctactatgcattacacgagagtnaganaggtacgtggagatagaaatacgaggatccatgtacatcattaacga

SEQ ID NO: 11147 - DNA, 567 bp, Glycine max
  Coding DNA Sequence Number=SeqID_1368
gaagatgtagaacagcgccaccaacctcgatacatggtatgcccgcgtcgcgtgccgatctactcgtatgtgtgagcacacaccacttgtatgtttcatctcttttcgtcgctctctatcattataatcgtcttctccactcttccctctatttccctcctctcctcagctctcgcgcacgacgccaagacttctctcagccctccttctatacacgtcacagtctgaagtcacaacagactcttacactgtgccacctgcgtgccgcgcaggaccgccgatcgcgtccgcttacctttcatgtcctctgttatattgttcttctgcttctccgtccacattcttcgcactcctgacttcatcatccaccttcacatccggtatcttctcctcccgatctgccctcgcctgtcctctctcctcacattcttatatcgtatctcttatctctctgtatctcctcttctctgatttcctatctatatcttctctatatactgtttgcatcccagtctcgcgctccctgctcgccgttatctccgtgtgaatctctcatgcacactagtc

SEQ ID NO: 11148 - DNA, 164 bp, Glycine max
  Coding DNA Sequence Number=SeqID_1369
caataggttggagtccggtatccctccccggcggacatcgggatgatagatcgtgagctgcgcgctcgcccggtgaggattatcgacccgagcgtgcgcgtgtgcggacgacgggagcggacgaacggcggcacgggtgcaccgcggcttgttttggcagtacg

SEQ ID NO: 11149 - DNA, 532 bp, Glycine max
  misc_feature (248)..(248): n is a, c, g, or t
  misc_feature (268)..(268): n is a, c, g, or t
  misc_feature (308)..(308): n is a, c, g, or t
  misc_feature (446)..(446): n is a, c, g, or t
  misc_feature (454)..(454): n is a, c, g, or t
  Coding DNA Sequence Number=SeqID_1370
gacaatatccatctaatcccatacgctgcggactcgcgtccctcgtttgcttgtcttccgtatctgccgtcctcgtgctcagtgattgcgctgtcttcatgatgcgcttcgtgcgcgttctactctccgctcgcgctctcatcaacacaccaaagcacctcttgcactccttacataaacaagcacacaacaacaacccccaccattctctcacttctctcataaggtcgtggtacgcaagtcgtctnctagattctatgtacaatcngaggctgcggctagtgtgctaggtgtggtgttaggtatcncactagctcgcctactctcgaacgagatggagcaagtctaccccgacacgccgctccatcattcccgcgccgcctgcgttgtgacgtccgtatgtgtatattgtagtgccccctcacccccctctctcgctgatatanataaccanatctatatacattctatatcccagatccacacttcccactctaccgtagatgggaggtcgtggtgtcatttctttaat

SEQ ID NO: 11150 - DNA, 379 bp, Glycine max
  Coding DNA Sequence Number=SeqID_1371
tcctcgattcctcgtcgtgcttgctcgcgatccattctacagggaggcgaaaccctctgcgcgccatgggcgaccactacggtacgctcggggtgcggcccgacgctaccaaggccgaggtcaaggccgccttccgccgccgcgccctgcgcgaccaccccgaccgccacgctcaatccggcgacgccggtgcccgagccgaagccgcgcggcgcttccgccaggcctctgacgcctaccacgtcctctccgacgaccgaaggagggccgagtacgacctccgtctccgctcttcctcctatgtccgcacatcctcctccacctgggcctcctcctcgggttcgcacggctacggctacgggcacagagaaagttcttg

SEQ ID NO: 11151 - DNA, 384 bp, Glycine max
  Coding DNA Sequence Number=SeqID_1372
taaacaccactgtcttctcatgggatatgcgtgaccccataaaaaagggactggctaatggatgtggactgctgccaaagcactataagccgccaattcggtgtcatgagtcccgaggagctagaaccttaaaaggcctggcagaataaatggccagtacctgcttgttagactttatgagctgagaaagcagcacgagggaaagggacgtatttgtcatgtccaaacagtttcacacggggcaataagagtttcattagaagcgacagtttgtttcagttttctcctatggtaggcagtaaaatttgcaacatgttgaggccctctctctctctgaatggatgattaaactgcttctagtagcaaggtcatgcaacttccaag

SEQ ID NO: 11152 - DNA, 477 bp, Glycine max
  misc_feature (187)..(187): n is a, c, g, or t
  misc_feature (217)..(217): n is a, c, g, or t
  misc_feature (226)..(226): n is a, c, g, or t
  misc_feature (343)..(343): n is a, c, g, or t
  misc_feature (398)..(398): n is a, c, g, or t
  Coding DNA Sequence Number=SeqID_1373
gtcatatcattcaccattattagtaaaatataattatctgttgaaagtaataaaagctttcagtgattcttcaaatcatacaaaaatatcgttatcaatgttgaacacctgctgttaaactgatgactttatcatcgagtgaaagcaaaatgtcatatcaaatttattttcttttactcttgccaanactgctcttcttagtttgtttattgattgnggtctttgngctttcaatcttcatcatggctttttgcataaattcttccattgtcaatggcttgtctccttcaccttcatcatctgatgcttcttcgaatgatggcatttcatttctgatcttggncattgaaccattgctaagcatatccatagctctcagttccatttccttctttcgngcagcatatgtagcaagaatatgatttgttctttcttcaataactcccaaatatgcagtcaaattactctctgtcactc

SEQ ID NO: 11153 - DNA, 343 bp, Glycine max
  Coding DNA Sequence Number=SeqID_1374
gcacgaggattttaaaggagtagtatagagacaacagaaaacacaaatcctccatgatatgttttggagaagtgaacaagttcgaacctattagctatgatactatactaccattagtatcccaatctcctactattagactttcctaatgtttcatgttaaagagtaataattaataggttaaaattactaatttggtatttagtttcatgattgatatattttagttcctatagttatatgattgatatattttaggttaaaagtgatttttttagtttttatgatttatattttaatttttttagtcctataatttaaattggaattcttagtctttata

SEQ ID NO: 11154 - DNA, 588 bp, Glycine max
  misc_feature (180)..(180): n is a, c, g, or t
  misc_feature (209)..(209): n is a, c, g, or t
  misc_feature (345)..(345): n is a, c, g, or t
  misc_feature (411)..(411): n is a, c, g, or t
  misc_feature (439)..(439): n is a, c, g, or t
  misc_feature (478)..(478): n is a, c, g, or t
  misc_feature (494)..(494): n is a, c, g, or t
  misc_feature (505)..(505): n is a, c, g, or t
  misc_feature (507)..(509): n is a, c, g, or t
  misc_feature (515)..(516): n is a, c, g, or t
  misc_feature (550)..(550): n is a, c, g, or t
  misc_feature (556)..(556): n is a, c, g, or t
  misc_feature (563)..(563): n is a, c, g, or t
  Coding DNA Sequence Number=SeqID_1375
atataacgcgcaagcaccgcctcgacacgctcacgcgtcgtcgcgccatcgcagactgcgcccgcaccgcacactgtgtcgcgtacttgacgcgcgtccgtcgaatccgacgtgagatagagatagtattgaggcgcgtcgcgtgtgcatttgtgtcggtcatgtgctatggctacctgntgatgactgattatggcgacaactgtcancgcgaccgctgcgcgcgctgacctggcgggcgagcgagtgggcgtgaagagatcacatgtacataagatattgagacgcggtggcgcgcgcagtgcgatagtaccggtcgcacactcccacaagagcgcgcgaagnacaatgatatatacgcagatcataatcaataaaagtactagtcactatggtaacgtaattcgaccncgtcgcacgtgcgctaggacacaaacgntctgcgaatctcagtagaacgagaatagggagaaagacnttatacgtagttttgntccactaatantnnnttatannagaggagtctaatgaatagtataatgtataatgngaattntcatcanagggtgggcagtagcaaacaaagaa

SEQ ID NO: 11155 - DNA, 219 bp, Glycine max
  Coding DNA Sequence Number=SeqID_1376
gtttgccggttcttttatacaattggcccgccggttttttcctctggaaagcgggccttggccccacccaaattatgggagtttggtccatccttggcccccccgggtttttccctttttgtttccggttggttttttttggggattttttgcgggatacaaatttcccccgggaaccagttttttccttgttttgcccagcttggaatttatcctccc

SEQ ID NO: 11156 - DNA, 389 bp, Glycine max
  misc_feature (34)..(34): n is a, c, g, or t
  misc_feature (76)..(76): n is a, c, g, or t
  misc_feature (81)..(81): n is a, c, g, or t
  misc_feature (97)..(97): n is a, c, g, or t
  misc_feature (186)..(186): n is a, c, g, or t
  misc_feature (207)..(207): n is a, c, g, or t
  misc_feature (223)..(223): n is a, c, g, or t
  misc_feature (228)..(228): n is a, c, g, or t
  misc_feature (244)..(244): n is a, c, g, or t
  misc_feature (322)..(322): n is a, c, g, or t
  Coding DNA Sequence Number=SeqID_1377
caacaacaatgtgtccgggagtaacaacactatngtaaccggtagtgacaataccgtagttggaagcaaccatgtngtatntgggaacaaacatgtngtaactgacaacaacaatgccgtatccggaaacgacaataatgtatccgggagcttccataccgtatccgggagccgcaatactgtatntgggagcaacaataccgtatntggaagcaaccacgtngtgtntgggagcaacaaagtngtaacaggagatgaatgatcaataagtggattggttccatctttcggagctaatgtacgtgtacaagttcagtatgtntcacaatcacgtggtggggccaatcatgttatgtaacttcatggagacatatagcatccttttccta

SEQ ID NO: 11157 - DNA, 578 bp, Glycine max
  misc_feature (323)..(323): n is a, c, g, or t
  misc_feature (363)..(363): n is a, c, g, or t
  misc_feature (524)..(525): n is a, c, g, or t
  misc_feature (533)..(533): n is a, c, g, or t
  Coding DNA Sequence Number=SeqID_1378
catctcaggatcgacacccaaagaaaaacagagcacaccatacaacgcaatcccatacacaataagaactgagagaggacattcgcacgtaactacgatgaggatagtccacatgacagcgctccctatcgtaagacatgatcatcacactacctaacatctatataataaaacacacaatctcacacaaccaccaattactacgacaacatgtagtaacctatcacacggcattgcataggtaaactcacttcataaagacacccgataccgagcagcgcagaataacagatgaagagattgatataacaataactaacacnacatataattattccaccacctcctagccttctcacctancgactaaatagacaaagagtagagacatgagcgctatataactcttactctacacctatatatattgagctgatatgtgaatgctatctctattaacacatctatgcagaacataaccctacactccaatctaatcaattaatagatccagtacaacgacnnagagttanacacaaatagcactaatcgttaactcctgaacagcataccagcga

SEQ ID NO: 11158 - DNA, 435 bp, Glycine max
  Coding DNA Sequence Number=SeqID_1379
ctctcaattagtattaccgggcaacagtgcgcggccgatggatctagatccagaggtggtgggagcactgtgacaactaccactagtacgcgcaccctcactctctcaagctagctgagctgagcttctctccggcggtccggcgctgctctccgctccctgcccctgctgctcttcacctccgcctcgccgtccgggaacgcagccgcggtcgcttcctctccggcaatgcacttccgtcacctcgccctctcaccgcggcgacgtcggctcccggatctgaaccagccgcaacctaccgccgccggacagcagcagatcaggtactcatccctggccggctgtgctgcgactcaaccccccatttgcagcagcagcagcagcagctaggtagtaggcagcggcatccgtcaccggcagcaaaggcaggcaggc

SEQ ID NO: 11159 - DNA, 545 bp, Glycine max
  misc_feature (328)..(328): n is a, c, g, or t
  misc_feature (334)..(336): n is a, c, g, or t
  misc_feature (361)..(361): n is a, c, g, or t
  misc_feature (398)..(398): n is a, c, g, or t
  Coding DNA Sequence Number=SeqID_1380
actgagatgttgtagggattgtagaataatatgtatgggttgaatgggatattatgttttcagattgtgtgtgtgtttattttatttgatatcagcgagttcataatgttgtgtttttttatcgcaagaaatattatttgttgttagtgatcgttggagagggagtagtgtagggagtgtgggtggtttttgtgtacggtacaagaagtcgattttgttagcaagtatgtgtatatttaacacctaggtcacatatggtcatgttgtttttgtttattgcgattttttattacttctaattttatttttatatcaatttatatttatncacaannnttgtgtgtgtacacaacaacacatnggtgcagtgggtcaaaccagtgcccacggcataaagngtgtggtgtagactatgaagtgtgttttgtttacgtgtggtgttgtggtgtggggtggtgtgaagaggcggtaggtgttagatgagagatgatatatatatttcttttgtgtgtggttgtggttttgacgaagtttttgtgtggttg

SEQ ID NO: 11160 - DNA, 305 bp, Glycine max
  misc_feature (195)..(195): n is a, c, g, or t
  Coding DNA Sequence Number=SeqID_1381
agccgaagaatggtgacggtctcaacacgcgcagctccggctccaaaacgaagaagaagacggcgaataaggcgaagttaaaggacgttgcggagaaggagccggaggttcacgagatctcggaatcgtcgagcagcgaagggaggcgtgatgagccgaaggaaagcaatggcgtggtggtggtggaagacgctnagatgattaggttcccgatgaatcggattcggaggatcatgagaagcgataactcagctcctcagatcatgcaggacgctgtgtttctcgtcaataaagccacggaattg

SEQ ID NO: 11161 - DNA, 596 bp, Glycine max
  misc_feature (102)..(102): n is a, c, g, or t
  misc_feature (230)..(230): n is a, c, g, or t
  misc_feature (463)..(463): n is a, c, g, or t
  misc_feature (553)..(553): n is a, c, g, or t
  Coding DNA Sequence Number=SeqID_1382
gtctagtatatacccatcggtccatccccattcctcgcacatcgcctccatacctctccgccgccaccacctcacctcgcgctcgggcccgcgttcctcctncgccctgcatctgacgcagcatattatctagtgcgtcgtcatggtatatatgtcttatttgtctaatcgtggtgattagtacacaaacagtcaccgagtgcgcgtctctctctcctcttctgtggtgncgagccgtactctccgcgcgtcgtgtgtgattctgtgagccgttgagtagtgcgatctcgcttctcctgcgatgcgctgtaattatatctctatcatatccgcgcattctcttcactactatctctccgcgttacatgcatgcactacgacgtctccgcgatccccctcgcatcttctcactccatcactcgaacgctaacgagaacgccgcccgaacgacgacaatacgaancgagacacacagatgtactgtatctaacagcgcatatatgtatgtagtctatcagactgtactagaatatgcctcgctcatctgaacatncaccatgtgaccgcgaacatcggctaccactacatactgtgta

SEQ ID NO: 11162 - DNA, 191 bp, Glycine max
  misc_feature (46)..(46): n is a, c, g, or t
  misc_feature (58)..(58): n is a, c, g, or t
  Coding DNA Sequence Number=SeqID_1383
ggatcttggatattgggtgaaccgtattggtattgggtcttatggngaagtttatcgngctgatgcaaggcactgaaattgctgtaaggaaagttcttggacaagattcttggggatgcctactcagtcaattgaagttggactgatagttcgtgatggctggcaaacgagccacacttgcgggcatcatt

SEQ ID NO: 11163 - DNA, 283 bp, Glycine max
  Coding DNA Sequence Number=SeqID_1384
aagactataacccttgaggacgagagcagcgacaccatcgacaatgtcaaggccaaaattcaagacaaggaacgcattcctccggaacatcaacgtttgattatccccggaaagcaacttgaagatggaaggaccctggccgattacaacatccagtaagaatcaacccttcatctcgtcctcaggcttgcaggtgggatcattgagccttccctcatggctttagctctcaaatacaaccagcacaagatgatgtgggcggagtgctatgcccatctgcagt

SEQ ID NO: 11164 - DNA, 247 bp, Glycine max
  misc_feature (77)..(77): n is a, c, g, or t
  misc_feature (114)..(114): n is a, c, g, or t
  Coding DNA Sequence Number=SeqID_1385
tcttcatccgcaagggtgagatactcaaggcccccccagtcgatcttgggaaactcatggaggtcatgccgactacnaaagaggggatgtgtgtgaagcttgaaagggctgtcnagggaaatgaggctgggcaggaagttgctgctgcccaaaaatttggttgctacttctggacctaggcaggcctgaaattggggttgcttttgacggaaactaaaaaggtggctgggtaactgttttccttggg

SEQ ID NO: 11165 - DNA, 546 bp, Glycine max
  Coding DNA Sequence Number=SeqID_1386
atagctcgaccgatgcgtcgccggacggccgtccacgcggtcctcgttgccgccggcctcctggtgctgctggccacgtactcgccgccgccgctgcgttctcctccagtgctgctactgggtggcgacgccgacgcgggtgcgcagggtagccggtcggcgcagtcgacgccacgtgagaggaggaagctgggtgtggtagccggccggcgcttgggccagagagtgcccgtgaagccaccctcgccggaccccaacggctggaagacgatggtgaagcccgtgccgccgccgccgccgccgccatcatcaatttactaggcgtacgaaagcagtatgccgatctggtgctcactcgcccatgctatgcaacgtcgcgtacttgcgcgtggccgacggctgcaaaatcttgtcttaggactgtcttttcatttcctgtggtgcttctaatggcgcttatggatgactggaacggtcttttgctccgtgcaaaagcatgaaacctccagtttcgctatttgtagccactccctaattttgtttcgt

SEQ ID NO: 11166 - DNA, 562 bp, Glycine max
  Coding DNA Sequence Number=SeqID_1387
gtgttcctcatctccatttgtatgatgtaattaactataatcgctactctaatatactaataccgacacaaatacacttcaatcgttcctctctctggtcatatcgctccactctttctttcttcgtgcttcaagtagataacattaaacatcgacactaaccacatgttctctatttcaaatgcatcacgaacctccccgctctcacgttccgttgtcatctctctgtgttatatctcactcctcagtctatcgctccagccgctgaccgcgttgctcttcatcgtcgacgccgtctgtcgtatgtgctgtgtgatgcagacctacaactcactcttatcctccgtcgctacataacacaaagctagctacgagttacatagcgtgacctatagtacgcaacctctcacatcatctcagggcgaactctcctcttatgtctctatcactactcactacttctctgctgcccgtacgcgacgactatacagtctgtatatctctctctatctgctctcctcccgcttctttgatatgataggactcttatccgtattgcctg

SEQ ID NO: 11167 - DNA, 586 bp, Glycine max
  misc_feature (98)..(98): n is a, c, g, or t
  misc_feature (123)..(123): n is a, c, g, or t
  misc_feature (192)..(192): n is a, c, g, or t
  misc_feature (195)..(195): n is a, c, g, or t
  misc_feature (215)..(215): n is a, c, g, or t
  misc_feature (219)..(219): n is a, c, g, or t
  misc_feature (263)..(263): n is a, c, g, or t
  misc_feature (406)..(406): n is a, c, g, or t
  misc_feature (430)..(430): n is a, c, g, or t
  misc_feature (519)..(519): n is a, c, g, or t
  misc_feature (532)..(532): n is a, c, g, or t
  misc_feature (560)..(560): n is a, c, g, or t
  Coding DNA Sequence Number=SeqID_1388
gactctacattacaactctctatataatcataacaaatctactctgtaatctctcactatatcaacaaccacagttatctcatcactctacgtagtgntgtgagacactagacgatatgtcangtagtgatatgtgaacactacgcgcgcacgacatcacatgcagtacctgatcatcaatatactgtgtgntangccgcgcggcgtgccacgcnacgnctagtacggagctacgctcgtcttcgtgctgctgtgctcgtcgncatctacatcacgcatgacaacacgcctgtctcgtgtacactactatctcataccaaccgtcggatatgtagctgcatcgtcgatactgatctaccgagagtgagactacaagataatattcatcatgcataaatcatagctntatcgtgatctcgcgtacacatcntctcgacatcaccactctcacactcagatatgagcctgtgcgcgcatctcatctacctcgcattctgctcgtttatcaagcaaattggnactcagtgagcgntactcgtgtactagatatcactacattncgaaggaatgtgccacgctcccgact

SEQ ID NO: 11168 - DNA, 512 bp, Glycine max
  misc_feature (31)..(31): n is a, c, g, or t
  misc_feature (66)..(66): n is a, c, g, or t
  misc_feature (325)..(325): n is a, c, g, or t
  misc_feature (381)..(381): n is a, c, g, or t
  misc_feature (397)..(397): n is a, c, g, or t
  misc_feature (441)..(441): n is a, c, g, or t
  Coding DNA Sequence Number=SeqID_1389
tggcgctttaccgtgtccgagatatcgcgcncgcctatcttatcgaccgcgtaataatacctgtanagcatgcgagcgatattcggctactggcacatgtaatagtaagctcgctccaccgcgagcgcatgcactgattcgcctgtatgtgattgcgatgtatgatcgtcccactccgcgtctggtggcgagtaagcgccgcctgtgtccgtatgcgttatatcatatatattatacaccggcgcgacatcatccgcgcgccatcatttatgcgtatatcgatgcagagctgtatatatatatctcgcgactcgctgtgacgaantacgcccgtcgcgttatattatatgtatcgtcacgcgcgacacagcagcgcgcatngaaagatacaaaaganggcgataatttggtaggtcatcactcctgctctgccgtcacgancatagcgtaagacagtataatatcgtattcgtatacgaaattcgtgtgacgcgccgcatagcaatgtatat

SEQ ID NO: 11169 - DNA, 195 bp, Glycine max
  Coding DNA Sequence Number=SeqID_1390
gacttcccaaacttcgtagctcacgaggttgtctctccacgtcccgatcaagttccgtgggagagagactcacagaactctctccaggggtccaagattctgttccaggaccaagtccagggtcccgagagcgtcgcctttgatcctctaggacgcggtccctacaccggtgttgctgacggtagggttttgttc

SEQ ID NO: 11170 - DNA, 410 bp, Glycine max
  Coding DNA Sequence Number=SeqID_1391
agtatacttactttccatggcggcgtccccccacctactcgtcttcctcgttgtggcgctcgcggccagcggcagcaacggcgccgtcgccgctgcgggcgaccatgacgatgtgcagctgcggaaggtagacctgtcacaggccatcgaggtcctttcccgctaccgcccggagaccactgatgcagagaccctgaagcgggccgtggcggtggtgaaccgggaggcgcagcggtactggaagcccatcttcaacaacgtcaacaaggtgatgcacagcggcgccaacgactgcaccaaggaggaggcgttcgccgcggccaaggcgctgctcaaccgcgagctcgggcaaggcccggacgccatcaagatggacttcgagtacgtgtgacctgcatgcacgcatgaca

SEQ ID NO: 11171 - DNA, 528 bp, Glycine max
  Coding DNA Sequence Number=SeqID_1392
aatgatgactgcacaagggcccatctgtgtcgatgactttgatagccttctccatactaaaacatgagggaccccttggcttgttcaaaggagcagtaccccaggtccttttggattgctccccctggtgctatgaactttgccggctatgagttggcaaagaaggccctggattaataatgaggagggcaaggccaggccgtccagagtaatatctctagttacctgggattttgtggtcccacagcaaccaaatgtttgggagaaatttttttgagttggttgcaagtaatccttggaataaaggccattggataccggcctctgaaaaaaccacattttgtttccctttccctcattcaaacttcccatggaaaattgccctttttttcccccaaaaattaaaaaaatatttcctccaatatttttggaaaaaaaaaaaaaaaaaattctgcccccccccggggaatccctctttttctagaggccccgcccccccgcggagggaatctccgcttttggccctct

SEQ ID NO: 11172 - DNA, 432 bp, Glycine max
  Coding DNA Sequence Number=SeqID_1393
atacagccgtgaaaggcgtcgtgttaataaagcgcgcacttcagaaaagaatgagttgttagttcatggtagtcatcggggtaagggaacatctaaactagcgcctcaacgcggaaaagcgaaggattgttgcacactaacatgggcagggtttagacttgcatccaggggtggccctgcctattacgttatgttcagtaaagagggtcaaaaaaggtacaagctgctgcagtagcaacattatcctggatgcgcagtcagaaaattttgtatagcagccatcagagtcctctgtgcagatcgccatagggcgcttgtagtttgtcgaccaggagaggcaacacatcatctatgttggtgtgtctgtggcatcaaccagaagaaacctaataacctcggtaaaaatcaggatttgtggaaggcagccttgcc

SEQ ID NO: 11173 - DNA, 346 bp, Glycine max
  Coding DNA Sequence Number=SeqID_1394
ctgtctgtgtactaacacctgttcccacaccacccaatcttactccacaaaatgccaatcgagtgtgaaatgctcttgctcttcttcagtgtgttgctgcacacctggcatacaaggatgctattcctcaatggtattgtcactttcctcattcatctgaaggactttgaacttctgtctggttctgtattgatcacctttgtgttacgcgtctgatagaattagcatgttcgtaaaataagcattttccatttgctcaagtgctttagacggtggtgtcagctttttttgatttggttaatgccatctgggtaatatgatgaattggaagctctggaaactataa

SEQ ID NO: 11174 - DNA, 316 bp, Glycine max
  Coding DNA Sequence Number=SeqID_1395
tggtgagcttttccccctcaaagggcaagtgattttttttttgcttccagaacagggcaggcctgttggtcgccttcgtatatgaaaaccgagttcttttccattctttcatggggtctgggaagttcatggcccctctcataaatatgaatccagatgccccatttgtcttgccaattccttatcgctgtaacagctgagctttgtaaatcttttggtccgggtaaaaggatctggtggtgccagcctacccggctttactttgctttcataaaaaagaaaaaaaaaaactgcccctttcctgccacaagaagct

SEQ ID NO: 11175 - DNA, 417 bp, Glycine max
  Coding DNA Sequence Number=SeqID_1396
gatccgtccgcagaaagcgcaaggcagtgcacaagaatgtcactgttgatgagaagaaattgaaagcctccttgaagaaattgggtgttaacgacattccaggcattgaggaggtcaacctcttcaaggaggatggcactgtcatccacttcgtcaaccccaaggttcaagcttccattgccgccaacgtcagcggaacatacgttatcagtggaacagcagagacaaagaagttgcaagacttgctccctggaattatcaaccaactcggcccagacaacttggccaacttgaagaagctcgccgagcaatacaagaaggacgactctgctgctgccgacgacgacatccccgacctcgtcgagaacttcgaggctgtgtcaccgagccaaggccgagtaagcagaggttcctgtc

SEQ ID NO: 11176 - DNA, 215 bp, Glycine max
  Coding DNA Sequence Number=SeqID_1397
ataaactcaaggtcagtagtttgtaatggaactattggagttggaaaatcagatggtatctctcaacaaactgggttgggcatacgagcttctacccctagaaacaaccaagataataattcccttgtcaatgataggaggggtcgtcctgttagttcagacaaggaaagggtgaacttcagagttgtaaacaagtcttttctgacttggagcgt

SEQ ID NO: 11177 - DNA, 517 bp, Glycine max
  misc_feature (257)..(257): n is a, c, g, or t
  misc_feature (354)..(355): n is a, c, g, or t
  Coding DNA Sequence Number=SeqID_1398
catttccccgtattctgtttttgtgggggcgcgggggggatacgccgcaacccctccctctattatatatatacgcgggcgcgtatcgcgctcaattataattaatatcaggggctgctcggccaattataataatactatgcggcgggcggaaatacgatatattgcaatattataacgcggcgggattaataatacgcgcgatatgttcggtgttgtttaatattataattataggcgcagcgtatactatacantgggcgcgggagtaaagctctggttcataacccctatgtcgtgggtgacatacgcggacaatttctgatttagggtgcgcgtctccctccttatcannctatatcaaacctacaaccacactccgcgcggcccatcgcaccaaaatagatatctcgtacataggggtaattacagtccgccgggtacgcgtctatgacaacacacccaagccatattatatcccccgccccgggtttcggcgcgcctttacaaaatattt

SEQ ID NO: 11178 - DNA, 528 bp, Glycine max
  Coding DNA Sequence Number=SeqID_1399
aaatcagtggcgacggcgacttcttccctcgtgcaaaccctcagacgttacgtcaagaagccgtgggagataaccggaccttgcgctcacccggagtacctcgaatccgttccgaaggcgacggagtatcggatccgatgccccgccacgatcgatcaagaggcgatcgtgccgacctcggatcccgagacggtgtacaacatcgtgtaccacggtagagatcagcggcgtaaccgtccgccgatcaggcgatatctgttgaagaaggaggacgtggtgagtgagaagaagatgttcgaggagacggacttccctagggtttacttgacgaccactgtggaggaggatgagaacgcacgtggcggaggctacgagtaacaaaaaaaaaaggtttccttgtagtctctgacttgctgatgggcgaaggactgcgtgcgatatttctctaccgacagaagattttccatggtttgctttactaataaggtttgtagtagcttaatgtactggcagacacactatttttct

SEQ ID NO: 11179 - DNA, 408 bp, Glycine max
  Coding DNA Sequence Number=SeqID_1400
aagcgagcgaacacacagcatcgtcgcacgccattgcttagtagccagggaaaaagagaagccgatctgattctgctctcatcacacacaccgccatgccggggagagaagacgaagccttcgctgacgaggagagctcgcagtgcagcagcggctgccagtccggctggaccctgtacctggagcattccgggtcaggccagcagcaacgtcgcacgctgccatacgtgcagcccggcgacgtcctgaggcagatgctgccgcaggtggaatactccgacgacgaggaggaggattctatggtctccgacgcgtcctccggcctgccgccgcacctgcgcggcgaagaggaggagctgctgcaagtgcaaggtcagaccagcatgctttcacagcagcgtcggtcgg

SEQ ID NO: 11180 - DNA, 421 bp, Glycine max
  misc_feature (131)..(131): n is a, c, g, or t
  misc_feature (242)..(242): n is a, c, g, or t
  misc_feature (252)..(252): n is a, c, g, or t
  misc_feature (388)..(388): n is a, c, g, or t
  Coding DNA Sequence Number=SeqID_1401
ctatatactacctcgcactaataatatactcgtgcatatgctacgtctactatcgaacgtatatacgaatacataattactccgtctacgtatctctatgacaactcgcgacgatctatacacagctcatntaaacgcgtctcgcagagagcgatcatcagacacgagctgacacgcgcactagccacctcggcttgcgcgacaccgacaacacgcgcacgacacatacgagggagagtctnccacaatatntatcacttgctactgtctcgtctgttagaggacacatcggcgcaatccgtcgcgcatagagtcacacacatgtgctaccaagttgaagccctgatatacaatacacagtatgtgttactctctctctgcgcgcacnatcacaatatacacagatcattgtctgcggaga

SEQ ID NO: 11181 - DNA, 411 bp, Glycine max
  Coding DNA Sequence Number=SeqID_1402
tgctcgaagatgttttgcattccatggaagaagctatcaaggcccgagaagataatctcccaccaggaagttacgagaaagcaagacttaggttcgcacatgcagaaacaatagtccccttctcttgtcttcttggacttttccttgatgcatctgagtttgagaaaatacagaaggagaaaccgttggaactccctccacagcctcctaaaaccagagactttaaaggcagcaccatggctcctttcggtgggaacaacatgcttgtcctctacagttgtcctgcagcttcctcgcctaagtacttcgtccaggttctgcacaacgagcatcctattgcagttccaggttgtgatggaaaagacttctgtcctcttgaagatttcaaggccaaagtggtgacccctcatc

SEQ ID NO: 11182 - DNA, 272 bp, Glycine max
  Coding DNA Sequence Number=SeqID_1403
tgcctcaacactgaagattctgtggtgtgcctctgccagtccagtcaatctgaattgctagctccccaaccagtagatattcgcaaacaagacctgttagcgcaacttgccatgctatcaaattcacaaggtccgtgttagggactattctgacgagagatctgaattcttgccccagtttggtgaagaagcgcagtctgagtttggcaagattggataagatgccctcctcgtgattacatgaagctagtgccagaataccagcatgcata

SEQ ID NO: 11183 - DNA, 180 bp, Glycine max
  Coding DNA Sequence Number=SeqID_1404
tgactcattcccatttcaatgggataaccagaagtggagagaaggttttcatgtgacttcaatggcttctgctggaaagtcgttgggtgttggtttgtccaaaatgcttgattcaatgatcaggttgttgacttgatttctcttttctagtgagggatcccccaccatgggaatatggta

SEQ ID NO: 11184 - DNA, 487 bp, Glycine max
  misc_feature (70)..(70): n is a, c, g, or t
  misc_feature (73)..(74): n is a, c, g, or t
  misc_feature (135)..(135): n is a, c, g, or t
  misc_feature (187)..(187): n is a, c, g, or t
  misc_feature (201)..(201): n is a, c, g, or t
  misc_feature (257)..(257): n is a, c, g, or t
  misc_feature (391)..(391): n is a, c, g, or t
  Coding DNA Sequence Number=SeqID_1405
gatggtgtctatgtttacgtcttcctttctctattgatcggccagagtatatcgacatgtttatgtattnatnntgaaatatggatagaacgtctgagtacgcacatcgcgattcatgtctgcgatttggcgtgnaggggcagctcgagatgaccaacgagcgtagcacgctactagtaagataganaacaagctacacantcaaccatctcactatataatgatactactgagttctatgttagagagtgacgcgnaacatcatcggagcggactgtgcacgagcaaatgaattctaatcatccatacatacctgaaagagaaggatcgattatactattgatcgagagtaattgatcaagctgacatatgaatgtcatatgatgattcnatactcgtatcatgctactgttgtatataatgttgtgctatcgaatgccctatacaggacaacataccacatgactattggagatacgcagactga

SEQ ID NO: 11185 - DNA, 509 bp, Glycine max
  Coding DNA Sequence Number=SeqID_1406
tttctgataatctcccatcgatcgattttgttaatacttttctgagatttgtttgaattttctcttgaaaatgtcttgctgcggaggaaactgtggttgtggatccggctgcaaatgcggcagcggatgcggaggctgcaaaatgtacccggacttgggcttttccggcgagaaggccacaactgaggcgtttgtctttggcgttgcaccagtgatgaagaaccagtacgaggcttccggcgagggtaacgcagagaacgatgcatgcaagtgtggatctgactgcaagtgtgacccttgcacctgtaaatgaataaaaaaacctttttcaagaaggcagagataatcagagtctcaatttaagcaataatatagccctgccgaattgtattagctcagcttttatgtgtaatgctaaaaatggctgcagccttgtcctttaagcccataatgttcttcgtttgtgtttacgttgttcttagatgtctctgccatatgtgaccatagtt

SEQ ID NO: 11186 - DNA, 544 bp, Glycine max
  misc_feature (449)..(449): n is a, c, g, or t
  misc_feature (454)..(454): n is a, c, g, or t
  Coding DNA Sequence Number=SeqID_1407
aatgtgtaggcttccatagttcctccagactccatgcctctgggccaaatacacaacactcctcccacgacgccacaaaaaccccccaaaacaacaacgcaaaaacacaaccagacggatggccaccccaccaaactccacatatacatcaacctcctctactattattttttagttatatcactttcctctccctccctcggtgatatccgcacttgtctcggtgcacttgtttttctttgtttcttttttgttttgatttttgcggttgcgcacgtgttattatttctccgggggggcgtcgctggtgccgtttgtagtagaatttgtgtttcttagtgttcgttcccgggagaacgagctaaaatctagcaacacagagggcccgggcaccgaccggaggagataaaagagaacgacacagtactctggactggtctggcacttgnttacnaaaaaaaaacgtgtgtacgcccggagaggagaacacacacccacttctccgtcaacttcaaggaaacacatatttcaactctgtaccctg

SEQ ID NO: 11187 - DNA, 570 bp, Glycine max
  misc_feature (387)..(387): n is a, c, g, or t
  Coding DNA Sequence Number=SeqID_1408
tcactttgctctcacaacgaatctatttaataaattatttttctcttgatgcgtgtttcttttgatggacttgcgttcgtcctcctccgtcacattcctacataagagaatgttatgagccgtggccctatcctagctctgtactcgctcccctgtcgcgcgcacggctctatacattctcactctctgcccctctgttctatgatctgccgtcgtcgtgttggtgagtgctcatcgcgcggccactcacgtcttctggcggcttctcttgcgcgggtatacgctcatgcgctatgaccgttcccgtacattagcattcttgatcgtatcctctcctcacccgctgttctagttttggatgctggttctagtataatcccggtcttnattcctgatgtgctatacctcgcgcagcgcgcgttctctgccttactggacatgctcaccactgccgacatatatacgacttactctacggacacgccatccgacagcgtgtatgtagtgcacccgatcccttcgttatcatatatgctcacacccatgtatatcgtccttcaggcctagttt

SEQ ID NO: 11188 - DNA, 573 bp, Glycine max
  misc_feature (146)..(146): n is a, c, g, or t
  misc_feature (207)..(207): n is a, c, g, or t
  misc_feature (268)..(268): n is a, c, g, or t
  misc_feature (352)..(352): n is a, c, g, or t
  misc_feature (396)..(396): n is a, c, g, or t
  misc_feature (446)..(446): n is a, c, g, or t
  misc_feature (460)..(460): n is a, c, g, or t
  misc_feature (500)..(500): n is a, c, g, or t
  misc_feature (514)..(514): n is a, c, g, or t
  Coding DNA Sequence Number=SeqID_1409
atgacaactcatgacgatgctgatagcgtatacaggcagtctgtacgtagcgtattcggttatgcgcatagtgatgtagtctgtcacactcgcgtgtgtattataattaccagtatatagcttcattctcgacatctcgcatgtanctgtactacgattatgtgtgtttggtacagatgttatagctagtctacatcgatcggcgcncgtaccatagactactgctgcctggtacgcgttctgtacatcctggatcacatctatgcancgcatacaagacgagcatctagcgagaaggtactagcagctgcactcttatgtgtggacatacacgccgcatgcgatgatgatntactgcgcatgggtgatagagcgcatggtactatcgcgagatcngaactgagataatcacagaagcgcgactagcaagtgcgtagaacgcgcgngggaccattagacncggagcagacgctcagatctagtgtctatatgatgactgntgcgcgctgcagcngctatgcttgcagtagtagtggtagagtttgttctgcacttgaatatcgtcacactatg

SEQ ID NO: 11189 - DNA, 275 bp, Glycine max
  Coding DNA Sequence Number=SeqID_1410
atcacaaatttgtggataccatcaaactccaaatcagtttgaagaactactatccacagaaagacaaacatttcattgactccatcaagttaccccacatccctcaccccaatataaaaatttacatgcttgatgatactcaccatattaaataagcatacaagataagactgtactaaataaatatataacccttgaaaaatctaaacaaaaatgaaaaggttattaagaatctagctagaaaataccatactgtgttagcatctgaaggcatc

SEQ ID NO: 11190 - DNA, 558 bp, Glycine max
  misc_feature (126)..(126): n is a, c, g, or t
  misc_feature (249)..(249): n is a, c, g, or t
  Coding DNA Sequence Number=SeqID_1411
agggttacgcactcggcacagctatcactactctctagtggttgatggcttaatatatgtggtggggtgtggagtggtgaaggatgtctagctgggtgtgtgggaacacacttcacaccaccagtnctctatgcgcgcacacaaaccctccacgacggctgtcggatactaaaccggtggtcggtatcaaaaatgcaagcaggtgtactagtgaacaatctaagacagattgatcgggcgagttaattncggatgtggtatgctgtgtgattctcaggcgctgtatcatccgtgttgttagtatattaggtggtgcgctgcggacgtcgccggggatgtgctgtatgcataacacacgggcgtggcgtaagaaacatcaacggatgcgtcaggatgtgtagagattataggcggccgcacacaggagctgcaacaacacccaccaccccatcctcctgcttctgactgttgattatttatgttattagtataccagctcgtgcttgtgctgacgctcgtgtgtgatcattagtgtgcgatatccggtgcacacactgt

SEQ ID NO: 11191 - DNA, 539 bp, Glycine max
  misc_feature (44)..(44): n is a, c, g, or t
  misc_feature (50)..(50): n is a, c, g, or t
  misc_feature (146)..(146): n is a, c, g, or t
  misc_feature (156)..(156): n is a, c, g, or t
  misc_feature (232)..(232): n is a, c, g, or t
  misc_feature (260)..(260): n is a, c, g, or t
  misc_feature (304)..(304): n is a, c, g, or t
  misc_feature (370)..(370): n is a, c, g, or t
  misc_feature (405)..(405): n is a, c, g, or t
  misc_feature (460)..(460): n is a, c, g, or t
  misc_feature (476)..(476): n is a, c, g, or t
  misc_feature (479)..(479): n is a, c, g, or t
  misc_feature (491)..(491): n is a, c, g, or t
  Coding DNA Sequence Number=SeqID_1412
ggatcgtggtctgctgtcttgccgatcacgcatgagattagcgnagtgcntttgtggctgtcttgcgttgtgactgtgtttgtgtctgatggagtacttcatgatgtgtagccgatcacaccagtctcgcaggacggtgtgtgagntgagttatgncatgttgtacatgtctacttgctgtgatctgtgcggtctctgtgttcactgtgcacgtctgcatgcagcctgcgancgcgtgtgcactgatcacatttgtagancgtggatcgtgtgagcagagaatgatggagtgatgtatgtatgntgtaccgtacgaagatggagacccgcatacagctctcaatctattaatactagagagagtgtgtangagtatactgagctgagccatgagtgatctattantcatatctagcatccctggtagtgcgagcgagggtgcgtgtgcactcgcacggtngagtgtgttatgatgncgntgtcgagcgttntagcgactcttgcactgtaattatcgactgtagtgtcgtcagatacgt

SEQ ID NO: 11192 - DNA, 360 bp, Glycine max
  Coding DNA Sequence Number=SeqID_1413
ttatgacaatgtctacccgacctgactaggctagttgcttgggctttatggctaagcaggtctatgttatttaccgtattcgtgttaggaggggtgggcgacatagaccaattcccacaggaattgtgtatgggaagcccactcaccatggatttacccaactgaacttactgcgaaacaagacgtcagttgcctaggagcgagctggactgaatctgggtggacttagggtcctcattcattactgcgtgaatgatgactctacttataaatactttgacgtgatgctgttggatcttgctaatgctcctatgatacatgatccctgaattcgttgggtcgtcatttctatgcacaatc

SEQ ID NO: 11193 - DNA, 369 bp, Glycine max
  Coding DNA Sequence Number=SeqID_1414
ggacagtgacatccacactggctcggtgcatgggctacttgaccaactgtggtccagtgccatcagactactgctgcgcgggagtcaaagcattgaaccaaatggctcagaccactccggaccgccgacaagtctgtgagtgccttaaagctgcggctaaggatatcactggcctcattaacaccgaccttgtggccacactccctaccacttgtggtgtttcagttccctacccctttcgtttcagcaccaattgtgacactatatcgactgccgtgtgaaggaggctagctagagatgtacgactaatcaaagttgccagccttttaacctagcatcataagtatatcctgcggctttccattttat

SEQ ID NO: 11194 - DNA, 290 bp, Glycine max
  Coding DNA Sequence Number=SeqID_1415
acacatagatttgttgccctagcgaagtttttggttgtcgccctccaaccgatatgaaatgttcaataaagattgggatctccattatgcaggaaggaccattgagccgtttataaaaatggaatcttagaagtattttttacagatatattatttatttatggattaggtaataacaataatggtgggggctgtgtattcaaaattacagttctgaccacaggcttgcattaggcttggcatcctttgtttccgagttactgagatcctggtaaccctccctgaactga

SEQ ID NO: 11195 - DNA, 494 bp, Glycine max
  misc_feature (39)..(39): n is a, c, g, or t
  misc_feature (45)..(47): n is a, c, g, or t
  misc_feature (70)..(70): n is a, c, g, or t
  misc_feature (83)..(83): n is a, c, g, or t
  misc_feature (87)..(87): n is a, c, g, or t
  misc_feature (172)..(172): n is a, c, g, or t
  misc_feature (185)..(186): n is a, c, g, or t
  misc_feature (212)..(212): n is a, c, g, or t
  misc_feature (242)..(242): n is a, c, g, or t
  misc_feature (301)..(301): n is a, c, g, or t
  misc_feature (303)..(303): n is a, c, g, or t
  misc_feature (310)..(310): n is a, c, g, or t
  misc_feature (325)..(326): n is a, c, g, or t
  misc_feature (341)..(341): n is a, c, g, or t
  misc_feature (359)..(359): n is a, c, g, or t
  misc_feature (381)..(381): n is a, c, g, or t
  misc_feature (385)..(385): n is a, c, g, or t
  misc_feature (387)..(387): n is a, c, g, or t
  misc_feature (413)..(413): n is a, c, g, or t
  misc_feature (445)..(445): n is a, c, g, or t
  misc_feature (460)..(460): n is a, c, g, or t
  Coding DNA Sequence Number=SeqID_1416
aaaagtcgttgtagcgagctgatgtgacgagatagcagncacatnnncgtgagtgcgcgcggcgagcggnggcgcgcggcgangtgngcgcgagagagagtgatatcagcgagatgtgctagccgtgatgatttatcagcgtatgtgcgctatactcgtgcacgacgagatngatcgtattcgtnnagatacgatatgtagatggagatgangacgtagtgagatttatcagagatgatcanagcacgacatctactatcattatcctagatctactaacactacacatacacaacgcgcncnctcgtcngtccgacaacacacnncacaccacacagcgnactgtcgcgtgctcgacntgcatgcagcgtgcgagtatcntctngncgattagccgcatatacgtatcgatnatcctcgtcgtatctacagtcatgcgtcgacngctgtagatcgacanaagcagcgcagagagctcgagcacaccaagacca

SEQ ID NO: 11196 - DNA, 507 bp, Glycine max
  misc_feature (43)..(43): n is a, c, g, or t
  misc_feature (70)..(70): n is a, c, g, or t
  misc_feature (111)..(111): n is a, c, g, or t
  misc_feature (159)..(159): n is a, c, g, or t
  misc_feature (214)..(214): n is a, c, g, or t
  misc_feature (247)..(247): n is a, c, g, or t
  misc_feature (256)..(256): n is a, c, g, or t
  misc_feature (298)..(298): n is a, c, g, or t
  misc_feature (321)..(321): n is a, c, g, or t
  misc_feature (327)..(327): n is a, c, g, or t
  misc_feature (355)..(355): n is a, c, g, or t
  misc_feature (369)..(369): n is a, c, g, or t
  misc_feature (413)..(413): n is a, c, g, or t
  misc_feature (418)..(418): n is a, c, g, or t
  misc_feature (434)..(434): n is a, c, g, or t
  misc_feature (452)..(452): n is a, c, g, or t
  misc_feature (475)..(475): n is a, c, g, or t
  Coding DNA Sequence Number=SeqID_1417
acaagacaacagacgacagcatagtcatcgtatgctatactcncgtacgctcgcatctacatgcacttcngccctcgtcctcaacagcagcaccgcctacgtcgcgcactnacgtacacagcactatagccgactttgcgcagactcacctagacacancgcatgcccctacagcgcgagcgccacgtattactgcgcgtggtgcacgtcgcgntgacacccgtgtgcagcgcgccgcacctcgcgncgcgcgatncgtcgcgtcgcgcgctcgtttcgcggcgccgtccgcgtatgnacagcgtatcgcgtcgacgacgnatcgcntcgccggcgcgatcgcgattcgtccgtncgtcggcggcgcgngcgcgcgggccgtacgtcgtaccgatcggcagcgcgcgctcgcnacgtnagtcgcgcggcgtcgnagtcgcgtcgcgacgtancgtacgcgatgcgatcgcgtcgncgtctcgtcggctatcgtcttcgcgcgtctcg

SEQ ID NO: 11197 - DNA, 355 bp, Glycine max
  Coding DNA Sequence Number=SeqID_1418
cactcgtacgcggaatttgtttttgatcattcttgggctaatgcttaccattttaatgtgtccaatgattgccccaagtaacgatcttgtgtccccttcacacctgtaaatggtccaaggatcggcctttgtaacacctccttcaaacatcaagttttcgacattattgtctccgcaatgaagaaactcgctttcacctcccagctttcatcattacatgttgcttttccctctaaaaatgagtggcacaagctctctgagaaaggcttcctccccagtattggaatgcagtgccactggaaaacccgtaactacaaaaattttccccacgtcctcatgggcttgctccaaaaaa

SEQ ID NO: 11198 - DNA, 352 bp, Glycine max
  Coding DNA Sequence Number=SeqID_1419
gtcgtcacatccacctctgaaaagctcgccggcgagatgtcgttccaccgcggcagcagctccggcaccggcggcggcgacggaccgagcgcgtggccgtcgagcctgagcacgccagagacagaggagctgtaccggtttgggctcctcgtgccgccgggttgccgtctgccggacaggaagctcgacaaggacggctacccgaggcgcgggcccggcgccaccgcggaggagaagcggaccggcggccgcaacaacatcgccggccgtcacgcgttctgggacggcaaagactacgccgccgtcattcgcgagtgccggctcacggagtccggcgacacggcagacctcg

SEQ ID NO: 11199 - DNA, 560 bp, Glycine max
  misc_feature (445)..(445): n is a, c, g, or t
  Coding DNA Sequence Number=SeqID_1420
ggtcgtataggcgtagttggctacctccttatcatttccccccagagattatgaggaggtgtgggtagacagcgtattgggtagcgattgaggttgtttggtagattgtcgtgattacactgggtgatataagattcgggggcgataaggagatatattagagaggcggaggtcggcccatggcgcagcgaaagaccggcgagtagtgttcagcgcgcggataaggggaggacgaccgcgtggagaaatggcagagtgaggtgggatagtaaaccgagttgtggatgtgatagggaagcgaccgaaaataatatatggcgtgcagctgatccgttgctaaaggggaatcagcgttggcggtaatataaccgcataatatagaagacccacacctctcctgggcctggattagggggttgatgtaatagatcgacccgagaaattngggaattttcatgtggttataaattgttcttctgcctttccttcgcccacgacaagctttgagtatatgcggggggggacgggggggcgggaacgcaccgggaaacacagatgat

SEQ ID NO: 11200 - DNA, 546 bp, Glycine max
  misc_feature (27)..(27): n is a, c, g, or t
  misc_feature (29)..(29): n is a, c, g, or t
  misc_feature (44)..(44): n is a, c, g, or t
  misc_feature (142)..(142): n is a, c, g, or t
  misc_feature (162)..(162): n is a, c, g, or t
  misc_feature (183)..(183): n is a, c, g, or t
  misc_feature (315)..(315): n is a, c, g, or t
  misc_feature (392)..(392): n is a, c, g, or t
  misc_feature (411)..(413): n is a, c, g, or t
  misc_feature (491)..(491): n is a, c, g, or t
  misc_feature (499)..(499): n is a, c, g, or t
  Coding DNA Sequence Number=SeqID_1421
atgtcgtgtctctctgttctcgcgtcncngcctcgtcgtgtctntctctctgtgccgcgtacgcgctcgcgttgatgtgatgtttgtgaccccccacgtgtgtcgccgcgagcgtgtctcgccgctctacggcgcgtgtgcngtgccgagcgcctgcgcacngcagtctacagtgctcgcttntgtgtgtcgctatcgtcggctctcgtgcctctcctgctctctgtcgccgccgtgatgcgcgtgcggccgctggcctgcgccgtacgatgcgtcgcgcacttgcgctacctcgcggtcctcgtcctgcgcatnttgtctaactcacactctcagagtctcgcattctgacgtggagctagcgcccctcccgcactcctgcccccgttctngctcgtcttttcgtcgccnnntcgagtgtgtgcgcttgtgcgtgccgcacacctacttccatgtgggtcggctctccttgccgcgcctcgtcgtcggcngccgtccntcgtgtctgccctctcctgtgctacatcacgcttacgtttgcacggc

SEQ ID NO: 11201 - DNA, 587 bp, Glycine max
  Coding DNA Sequence Number=SeqID_1422
aaatcttgtgtgctttaattatggaaaaaaataatagaataagaaacagagaaagtgagttggaaagcactttgttgaccaacagtattttagaaaaggaggttttattgttgaaacagaaaatcagtattgggaattcgattgcaagtgagctagtgagtcagaatgaaagtttaaawatcagcaaatytcaacatccaccattggacctgagaaacaagaatcgtatgccaactcctaccaggatgcaaaataccaacgagagctattataaagtcgtaccacaaccattaaactcttctcatagagcaggcagtacaaatgtaagaaggcaagaaaatgaagtgcctggttttgatgaaaatttcagaagtaatacctctgacatcagaaaatattctcacttaactcgaaatccttcagcaaaataaagttttaaaaaatagtctattgttgttattttcatttttatttagtaataattttctcaattttttataatgaaacaaccaacatattttatttatcaatatcaattgtttcatgttgatgatatgaattcactcgtttacttatttatgactctg

SEQ ID NO: 11202 - DNA, 105 bp, Glycine max
  Coding DNA Sequence Number=SeqID_1423
tatcttgggtttggccactcgtttttccttctacaccaaatcaccttaatcatttaactgccacaacacattaatttccgcatttgcaatattccgttggtgctg

SEQ ID NO: 11203 - DNA, 502 bp, Glycine max
  Coding DNA Sequence Number=SeqID_1424
aaatacacctacagaggactctcccttgagcagctcactgaaatgaagaatgagcaactcattgagctcttcgaatccagaattagaagaagattcaacagaggtcttaagcataaataccagagattcgtccaaaagctcagaaagaacaagaagaacctccaacctggtgagaaacccgctccagttaagactcaactcagaaatgccattgttcttcctgaaatggtaggttcagtcgttggtatccacaccggaaaggaatatgccaatgttgaaatcaagttcgatatgattggtaaatatctcggggagttcggtctttcctacaagccaactacccatggtaagccaggtgtcggtgctactaagggttcttccaacactgataagaaataaacaagaaatagaagaaggaaagaagagaagacgtatgggtcttttgttttttcgtggatatttgttgctcacgataatgtaatgttttgtgctcttgcataag

SEQ ID NO: 11204 - DNA, 216 bp, Glycine max
  Coding DNA Sequence Number=SeqID_1425
ggttgtgccgaatgctaatgtgacattgatagccaatgcagcacggaaggcacagacccgaatgggtggtgctctgctgaatggttggtgcatacgtaaacgaattgacaatgagagacagtatgctccgacgtggccggtgctggctttgcttatactatgtagtagttgagggtaatataggtggaatgccatgctggtgtggcgtggactatg

SEQ ID NO: 11205 - DNA, 586 bp, Glycine max
  misc_feature (50)..(50): n is a, c, g, or t
  misc_feature (61)..(61): n is a, c, g, or t
  misc_feature (72)..(72): n is a, c, g, or t
  misc_feature (77)..(77): n is a, c, g, or t
  misc_feature (101)..(101): n is a, c, g, or t
  misc_feature (111)..(111): n is a, c, g, or t
  misc_feature (126)..(126): n is a, c, g, or t
  misc_feature (128)..(128): n is a, c, g, or t
  misc_feature (160)..(163): n is a, c, g, or t
  misc_feature (165)..(168): n is a, c, g, or t
  misc_feature (222)..(222): n is a, c, g, or t
  misc_feature (239)..(239): n is a, c, g, or t
  misc_feature (242)..(242): n is a, c, g, or t
  misc_feature (270)..(270): n is a, c, g, or t
  misc_feature (325)..(327): n is a, c, g, or t
  misc_feature (330)..(330): n is a, c, g, or t
  misc_feature (334)..(334): n is a, c, g, or t
  misc_feature (351)..(351): n is a, c, g, or t
  misc_feature (425)..(425): n is a, c, g, or t
  misc_feature (444)..(444): n is a, c, g, or t
  misc_feature (447)..(447): n is a, c, g, or t
  misc_feature (449)..(449): n is a, c, g, or t
  misc_feature (452)..(452): n is a, c, g, or t
  misc_feature (461)..(461): n is a, c, g, or t
  misc_feature (464)..(464): n is a, c, g, or t
  misc_feature (491)..(491): n is a, c, g, or t
  misc_feature (493)..(493): n is a, c, g, or t
  misc_feature (513)..(513): n is a, c, g, or t
  misc_feature (520)..(521): n is a, c, g, or t
  Coding DNA Sequence Number=SeqID_1426
gtcggaagcgcgtatatctgcacatctactaacgatcggtatgcgtgctncggctgcgagntgatgccgacnaggtntgtagcacacaacgcgcgcagctnttcggcgatnacggatgcgcgactnangctgagacagaagcacggatcgcgcgtcactnnnncnnnncttgctcatgcgcttcccagtgctatagagagtatactaatcgactgatgctgngtcgtgttctggactcncantcgcgcgttcgtaactgagactagacgnacgaatcacatatgatatatacacatgacgatagtgagatatgatcacacgactnnnccnacanctatacatcatatcatnactgggacgtgtagactacgagctgtgtcgcggctgctgcgtgatgcgctgcgtggtatgatagcgagtcgacncatgatcagcgagatatgntgntnggncacttgctncgntcagtgtcgctgcagctacgtacactnangtactgcactgcgatactgntcttacnnctacgatatacacgtagttgcgtgtgtgtgctcacgatgcgatatatctgtgactgatcagcgag

SEQ ID NO: 11206 - DNA, 560 bp, Glycine max
  misc_feature (161)..(161): n is a, c, g, or t
  misc_feature (174)..(178): n is a, c, g, or t
  misc_feature (236)..(236): n is a, c, g, or t
  misc_feature (255)..(255): n is a, c, g, or t
  misc_feature (433)..(433): n is a, c, g, or t
  misc_feature (522)..(522): n is a, c, g, or t
  Coding DNA Sequence Number=SeqID_1427
atggtattgccgcaagccgcacaccaccaccacacccccacacgctatattggtagggtaggtgttgagagattatgaggattatacagatgagatataccctgtgtgtaacccaaatacatcttcttcacaaattaatatggagtgtgtttagtgagtgnagaaattttgtgnnnnnaactgtggtttgaacacccaacacaaaacctgacataatagatagtgtgtgtgcgtgntgctgcccgccccgcgcgnaggggtggaaacaacacatatatgatgatattttatatatgagtaccgagcgtcggaatagtctcgcacttgtatcctctgcttactatccctcagtcttgcagttattagtgtactactctagcgaatattgccctccactccctatcgtccatcactcatcctctgtctgcgtttntttgtgtagcagaatcactcagagcgtaactgtgaagatgtcctcttacacctcgttgcacaccacttcactagttaaactcatcgctnatcctgagtgtcctaacgcgattctctatcctggtgga

SEQ ID NO: 11207 - DNA, 493 bp, Glycine max
  misc_feature (53)..(53): n is a, c, g, or t
  misc_feature (97)..(98): n is a, c, g, or t
  misc_feature (151)..(151): n is a, c, g, or t
  misc_feature (322)..(322): n is a, c, g, or t
  misc_feature (337)..(337): n is a, c, g, or t
  misc_feature (342)..(342): n is a, c, g, or t
  misc_feature (344)..(344): n is a, c, g, or t
  misc_feature (347)..(347): n is a, c, g, or t
  misc_feature (353)..(353): n is a, c, g, or t
  misc_feature (371)..(371): n is a, c, g, or t
  misc_feature (375)..(376): n is a, c, g, or t
  misc_feature (405)..(408): n is a, c, g, or t
  misc_feature (410)..(413): n is a, c, g, or t
  misc_feature (429)..(429): n is a, c, g, or t
  misc_feature (431)..(431): n is a, c, g, or t
  misc_feature (465)..(466): n is a, c, g, or t
  Coding DNA Sequence Number=SeqID_1428
aacgataattcagatgtcacaacattaggagatgaagataaaatgttagactnggggtgtggtggtgttggcgcgtatcacagagtgatgtctgggnntgcgcgcgtcactgtggtgcgatgcacacgggcatgacgacactacaaatatntatgtgtgtatgttgtatgtgcgcgtcgcgcgccatcgtgtctccgcgcgctctttaattataatcggtatatatatgaggtacgcaatactctagtatcgcgctctcgacagacgcgtcgcgcgatagctcatatcgtaaaggtcgcagagcacgggtagtatcatgtcnccgaggtgtgttatnttttntntgncggcgngaccctacacagatacancacnngctcgtcacgccgcggagagtatgagaannnntnnnntgcctacacagagatnanatagaagacacgagagataagagagatataaaannaacagagtcttgtcatttattcagtcg

SEQ ID NO: 11208 - DNA, 118 bp, Glycine max
  Coding DNA Sequence Number=SeqID_1429
aagagaacttacagatcgacttatgtaccagatactacctttaagtttacagatatataactatcatagtagccagaggacacttaaaattattcagcttgggcagaaagctcagctt

SEQ ID NO: 11209 - DNA, 510 bp, Glycine max
  misc_feature (236)..(236): n is a, c, g, or t
  Coding DNA Sequence Number=SeqID_1430
atctatgatgttgccgctcctgagaaaaggaccaaagagtattgagattgtagcagcacgcgatattgtttctgctcttgcacaatcgggtgcttgtgcgggatttatccgagagaccatgcaacggatatgctttttgaatggtacgccggagtgaaagttataagaagcccgttttataacaagaagacccgggcgccctttatcaaagttatccggatatgcgtcacgacaanggcagaggctctttggaagccgctgaaggccccgagggatggaaacctgtgcaggcaggggtacccccaaaatgcctgggttattgggcctttttgggaatccccaaggtcctctggaaagtggcgccgggcttctgagcgaggtttgagatcgaagcaaaaaggggaaggggaattaacaccaatcctgactccaggacagccacctcgccagggcatttggaccagggaaaaacctatccggatggcgggtacctctatctccgggaagaga

SEQ ID NO: 11210 - DNA, 466 bp, Glycine max
  Coding DNA Sequence Number=SeqID_1431
gcgcgcgtccatctgactaggaattcggcctgcgcagttttttttcttttttttggtttttggccatttgtccccttttgcttttattatttccagcgttttagcgtttggagattccgtcgtggacccacgcaacggcaacaacaaaaaaacattgggtcaagtgcaacttcccacctttttttttggattttcagggaggaaacccaacgggttgattttgcaatggaaaaattccttctgacttattagttgaacaattgggtattaaggagtattcgtctgcgtatttggatccgaatctcaaatctagtgatcttgttaccggagtctgctttgcctccggtgcttgaagatacgatcctttgacacccaaaataacgctcgttctatcgttatctactcaacttgacttgttcagggaatacatatgaaagctgaaaggcatttgtggtgagagcagaac

SEQ ID NO: 11211 - DNA, 526 bp, Glycine max
  misc_feature (48)..(48): n is a, c, g, or t
  misc_feature (147)..(147): n is a, c, g, or t
  misc_feature (169)..(169): n is a, c, g, or t
  misc_feature (230)..(230): n is a, c, g, or t
  misc_feature (338)..(339): n is a, c, g, or t
  misc_feature (410)..(410): n is a, c, g, or t
  misc_feature (426)..(426): n is a, c, g, or t
  misc_feature (449)..(449): n is a, c, g, or t
  misc_feature (494)..(494): n is a, c, g, or t
  Coding DNA Sequence Number=SeqID_1432
gattatttatattatccacggccatatctctttactctctagcagagngaggagagccgacacatcactacaaatacccacctccctaccaacaccctcctcagtccagacacttagtagcgtgatgcgaatcactgaggagtgatntatgtgtaatgtagactgaganaattatctctaaatatatcgctcactacacacaatacacccgcgacgctagtgctcatagnatgtatagaagatgtagaataatgtatagaatgactgtcctgaggatctctctactatattcttatattgtcttttgtgtgtgtcaggcgtgagctatctagcttacnngtatatgtataatactacaaatacttatatagaatgtgatagtagtgtgtatactaatcgtcatatcaatncatctcttatctactnattagtaggtctcgttcggttgnggcgctctacgttcacgtagttgtcggtctattctattgtgggtngttccctctcgttttgtgcgttttattaggat

SEQ ID NO: 11212 - DNA, 485 bp, Glycine max
  Coding DNA Sequence Number=SeqID_1433
agtgcctctgtactccctatgggtctcacaccagctcttgagcttgatccgcagaaaatcatagccaaggctaggcctggagttcttctttcccccagtgacatcccttctcagcttccagcacacaaccctgatggacccgttatgttggaccgcattttgcgaatcttggcttgctaaaaaatcctttcttttttctctccgtactgtccctgatggcaaggttgagagggtctatgggctccacccccgttggtaaagagctggtcaagaccgaaaatggcgtcccgactttgctgctcttacccttctcgaaccacggacaaaggccccagggaagagccggcaccatttgggagacatgcctgccgttggcaagggggcaactccgttctagccatacgggtgagggaagggccccccctttggcattagcagtggaaacggtaccccaaggcctgaaacaagggtctttccatcctagg

SEQ ID NO: 11213 - DNA, 544 bp, Glycine max
  misc_feature (304)..(304): n is a, c, g, or t
  misc_feature (339)..(339): n is a, c, g, or t
  misc_feature (365)..(365): n is a, c, g, or t
  misc_feature (416)..(416): n is a, c, g, or t
  misc_feature (498)..(498): n is a, c, g, or t
  misc_feature (519)..(519): n is a, c, g, or t
  Coding DNA Sequence Number=SeqID_1434
gatgcagttgatacgatgcagcgaatgttcatgttatagtgtgttcattgatataagatatctaaattaattatatatattgtatgagactagaatgagagaatcagaataaatgagagatacaactacgcgtacagtctgcgtgacacggacgcttgataggatgttggcgtgcgggtgacagctgcgtcgctctagacacgcatcggaatgcgatgttcaccaggagccaaaagaacaggaacaaacaagacacgacatgagcacggcgcaacagaccacagcctcgcgctctgccgctccncgcagggcaggcggaggaagaagatgagagactantagagcaggtggcatgcgcagagaancgagccgagaagtaggaagagatgagaagaagagagagcacagccgcaacngtgatttactcttatcacgtcgagtggacacctccacgacgtgggtgaggtccgttcgcggctattgctcgccctgactccngccgcgccgcacgtctaccantggttttcagatctgcgtgaagtat

SEQ ID NO: 11214 - DNA, 550 bp, Glycine max
  misc_feature (418)..(419): n is a, c, g, or t
  misc_feature (462)..(462): n is a, c, g, or t
  misc_feature (469)..(470): n is a, c, g, or t
  misc_feature (501)..(501): n is a, c, g, or t
  misc_feature (505)..(505): n is a, c, g, or t
  misc_feature (507)..(507): n is a, c, g, or t
  misc_feature (512)..(513): n is a, c, g, or t
  Coding DNA Sequence Number=SeqID_1435
atagctgttaggatgttcgttcgttgcgttgggttctccgcgccgatgcgtagatgcggttttcgaggcctgcggccggtaagtgtcgtatttctggctagtatagaacttttcgtctgctgggtgcaaaataatgaaagcgcgctggtgttggctgcgctcattgtaactacctccaccttccatgaaagcaggatgcggtgtgtgtgtctttagtgccgactttctttcctacgtgcaattagtatcgtgtgcgccgcttcatcgaagagacgatggatcatcctgccttcgctggtgtgtggtcacatcgtgtgcgactttatgagatacagcgctgtggggcgcggggtgacagtgggtggatgtgtgtctctttcgcacacgcgctttcttgtgctcgctatgctgtcggcanntccgcgctcctctctgttgtggtgaaaacacttcccctctctntctcccnnccccctccttctttttttttgctaacctccncctntnttggnnggggcgcctccccgtgcactctcatatttcgtcatag

SEQ ID NO: 11215 - DNA, 530 bp, Glycine max
  misc_feature (411)..(411): n is a, c, g, or t
  misc_feature (419)..(419): n is a, c, g, or t
  Coding DNA Sequence Number=SeqID_1436
tacccacagctcgtagcggtgttgtgtgcgcggatgacatgcggagccacatttcgtctggcgacgtagagcgtcgggatagcggtgccagcgctagggtgtggcagagagctaggcgtgagatgggttgaggtgtgttgtcggacgcgcactgctcccacccacacggctcgtacacgtgcacgctctctcctcggtcatcatgtcctgctgttgtctgttatcgctatctctccctatgctacgtctcgtgtcgcgatcctacctgccgcagtctcagcgcgatagagtatcaacacccactcgcacccactccacactcactcgctgagcggtgcatgagacatgagtgcgagagtgtgaaatgatatatgagtatatcgcttatcgcgataccccaaacgacgagtngcgagagntaagaacaagaccgtgaatctcgacacagcacggcgccacacgcaccgccacacctcacagctcgccgacatgcgacacgcaacgcacgagaggccgacgtcccgacgact

SEQ ID NO: 11216 - DNA, 584 bp, Glycine max
  misc_feature (548)..(548): n is a, c, g, or t
  Coding DNA Sequence Number=SeqID_1437
ttgcccaagccgtcagatctgatgatctatcatcatcttcaaacattttaagacaacctcaaattccttccagaacattgtcacaagcttcacaattactcaaaaactccatgaaccaaaattccgcaaaccaaccaattgcccaccctgctccagttcatgatgactcagatgatgaggaacagtttgtccttaataaaaagaagattaaattcgaaggaaacaatcatattcgcaatgaaaacaaacaacaatccttcccaaagatccaactccctactcacaacataaataccatccaaactccattatcggaccttgtgtacggaagacaacaaactataagtgcccctagatctcaccatcaggactcaaatggccaaaatcaaatcaatttcccagtctatcaagcccctcaaccaatctatgttccttacatgcaaatccctcaggataacaatcatctcatcaaccaaaatggcctcttcttgacttatcctcaaggcttcaatggtcagaattcaccagttctccaaactacgctctcnacaccaaagctttaatgaagtcccacatcagccact

SEQ ID NO: 11217 - DNA, 461 bp, Glycine max
  Coding DNA Sequence Number=SeqID_1438
ccaagtggtttggaggtctttgcaccagctgttttacaaggaagagtcattggtgggggggttttttttccaagtgggggtccgggcaaggccaattgcaaaagaattcttgggaaaaaaaagagaaaggccaaaaagttgttgaccataaatgagtttttgaagcgggttaatggagagccctacaacccaaggggtggatcccctggaagaggaggacgcagtggtggtcttggccagagggatggaaaagtcaacggagggggaaaccaaaggaatgggggggcctttgctccttgtccaggttttggagacagggctcagttcccatcgttgggcaaataaaggcaccctttttgggccttcaagcatatgcctatgtatggcccctttcttttagtttaagtttgttgttttagttgcccaccattttttgttcccctttcactgcaaaacatgtt

SEQ ID NO: 11218 - DNA, 341 bp, Glycine max
  Coding DNA Sequence Number=SeqID_1439
gcttttgaaagtccattgagcttgaatttaagactcccaaagaagccatcaaaagaacctatattgacaagaagtaccccttcactgacaatgtttccatccataaccatatcttgactaaaacatatcacagtactaagataaacaagactattattattagaaagaattatctccattttatcaaaaagtaccagaaatacgagaagaaacactcaaatattcctactcatatatcacctaccttccatataaaagaaagaaatcacattattattaatcaataccaacctctctctaaaacagtaaaattcaatatcttaaaaataatcccacctaca

SEQ ID NO: 11219 - DNA, 532 bp, Glycine max
  Coding DNA Sequence Number=SeqID_1440
taaatcatctttacacggcagacatatgatgatgtacgaatctctttccaccccacatgttcttccttcttatgaccaagaaaataccccaccacaagcctgcaatcctgaagatcactccgctcccagagactgccgctccgaatgcagaaacgaaagaaatacttatgtattagccgagcgtcttgctgatactaaccaagaagtccttcaaacttctcaagagcaaggcaagacatcaagccaaaaggtaggcgatgaaaacagccaagctgatgctttgaaaaaagatcaattggctcaacttatgcaaaataaaaaacttcaaaagtatacagttaagcaattgcttcacatttcaaagtcacagattgacttcggcactaccttccctggacaaatccttgatgagtcccttgatatcatcaacaagagtaaccaaaatcttgttgttcaaatctctttggagtgcgagaaccctgattttcaagacactgacgaatatgtgtactcaatccgtagaagccattta

SEQ ID NO: 11220 - DNA, 529 bp, Glycine max
  misc_feature (220)..(220): n is a, c, g, or t
  misc_feature (250)..(250): n is a, c, g, or t
  misc_feature (351)..(351): n is a, c, g, or t
  misc_feature (382)..(382): n is a, c, g, or t
  Coding DNA Sequence Number=SeqID_1441
cactacactctctcttatcagatgtagattctatacccacccttctaatatcctatatatacgtacgatcacgactgtcgtctagtgtcatacatctctacgcatcttctttttatgtgtaatactatatatactgggactctatctcattatacacgccactatattcggaatgccagagtcatctgctgtagcgagtaatagagcatagaacccccanccgacactctcagacgccacgtacatgcantctacctctcctctctataagcgccgcacgcgacgacccatacaagagttcaacaatacgtcatactgtcgtctatagcacatgtgaacgtgtgtacgcgngaatggataagttacttccactagagtgttnactccgccactacctcaaccgtcttgataatattatgttatcgcacacgcactcattactctagctgtgatctataaagacgcgcgtagctatacgcgtagatacagttttatgcacaacatttctgtactttatcatacccgtcgc

SEQ ID NO: 11221 - DNA, 358 bp, Glycine max
  Coding DNA Sequence Number=SeqID_1442
gtatctattccatttgtctgtataagtttttggtcactcacagtcgctggtggaactggcttgccttgacgccactcagcagctagcttttgcgtaaggggaccaactgtggttgatgaagattttggactatgtgctttatcagttccatcgcatatgtagaagattgtatctgatctttctctgaatatgcattacattggggtctttggacttattttgttgtcccgcatttggcacaagtatcttaagaagagatgctcaaaggaattaatcatcttctagatatatatgttgagtattaattatttcatttcaacaacataaaagtttcctttctttggctgtgtgtaggcct

SEQ ID NO: 11222 - DNA, 534 bp, Glycine max
  Coding DNA Sequence Number=SeqID_1443
tttgcatgtgttgcttccatgggctgcccttaatgtgatggtcattaagaaggacgctgatctcatagttgccggggtctggtaggctgtaagagaccacatatgtgccatcaccgatatccttaatgttaactttcttaacctcttcgtgtgagcctgaatttacaatcttcacgttgaagctttcacctccctccttcttgtcctcattggcttgtgtctttgtcctgatcacaaacgagaagctgtcgatgtgtgtgttgtcatatgatgcaccctctttcacattaacagtcacaggggtgttgcccacaggcttgtccttcaaccttacatcaaccttgtgctttcctgttccctttggtttgtactccacagagtaggtgccatctccgttgtcaaccaattggtgcatcaagctgctggccattggcgtctgtgactttgacatcgaagtcatctcctcccttggtcatcttctttccatccttgtcgcgagcctcaattgtgaacttgccaggctttgtgttaagt

SEQ ID NO: 11223 - DNA, 247 bp, Glycine max
  Coding DNA Sequence Number=SeqID_1444
tgcgtttcaagcagcctacttcaaactctatttatgatatcaaaaggttcatttagttcttgaagacaaacatcaagcttgttcctttcttgttctttacttttcaataaagctcctttgagctaatcctagtttatgtttcaataaagtctttcagacacaaatctatcttgttctacaaatctcttcatggtatcagagctgcagtcgattcatgggtttatctcttgattcttctccagcttca

SEQ ID NO: 11224 - DNA, 526 bp, Glycine max
  misc_feature (278)..(278): n is a, c, g, or t
  misc_feature (359)..(359): n is a, c, g, or t
  misc_feature (466)..(466): n is a, c, g, or t
  Coding DNA Sequence Number=SeqID_1445
tcgccaccttcattgctgcggcagacgcccatagcactcccgccctcaccgcccccccacgccatcgcccagcccgctccgcgccggcggtcgtacgatgggtcgcaccctacaactaaccgcccgaaatgccgcctcacaccctcaccgtctgtgcgacgctcacacgcgccacacgtcaccatccgtctcactatcgccgccactatcatatgcagacacccctctcacctctccactcgccgaccgacgcgtccatctcctggtatgcgcagtanctctccagccacatacgaaatgacgatcttgcaacagcatgaggcacacacacaccatctcacccgccgctcacctcctgncgaccctctctgtgtacgtacacatctccatgaacatccaccattatcatcatcccacaatccgcgcctacaacactacaccacctctctcacaagttaaacacgtntaacaataagcgtcgtctcatcgtagtcgtgacccagatcaacagatccacactcgactc

SEQ ID NO: 11225 - DNA, 591 bp, Glycine max
  Coding DNA Sequence Number=SeqID_1446
gaatgtattcaagctttcgacaagctcaagatgcataagaacgttagataccttgttttcaaagttgtcggcagtgaagtcgttttggaatcccaaggtgaaagaaacactgattgggaagaattcgttaaagccttacccagagaacaatccagatacgttgtctatgacttcagctacaagaccgaagacaagccccctagagacgtcagcaagttgatcttcatctactggtctcccgatgaggcacccgcaaaggataagatgctctccgccactgctaagggagctttcagaaaggctcttatgggagttgctagagatttccaagcaaaagatattagcgatctcgaatacaaggaagtcagagaaaagttgtaagtgtgaatatgggaatatttcacataaatatcctatgagatgaatcttggaggatttatttgtcttcttacggaagagtaatataaaaaccatttatttgaaactttgagatatatatgctataatcttatatgatacagtcttgcatacagtaaattttttgcaaggctcttatataagtatcctctctccctaaatctctcatgttaa

SEQ ID NO: 11226 - DNA, 409 bp, Glycine max
  Coding DNA Sequence Number=SeqID_1447
acttcaagtgtgcacatgactgcttcgataggcgacggactcaagaggggatcaccagctgtgtagagaactgtggtgtgcccgctctttctgccaacaatgttgttgagaccgagatggccaagttccaggaaaggttgaatcgctcgttgatggtctgccaagacaagtttgaagcagcaaagctccagaagatgaagacagacgcaaccaatgagctggagtcgtgcgtgaacagatccatcgacgacagcatcagggtcctgccccatctggttgagcagatcaagtccaccattaatatgaagtagaggaatcggaaactttccccggctcgtttttgctatcgttagctgaatctatccagagtctctagcaacactagtgtaacatgagcatttacttccat

SEQ ID NO: 11227 - DNA, 596 bp, Glycine max
  misc_feature (377)..(377): n is a, c, g, or t
  Coding DNA Sequence Number=SeqID_1448
gctggctactttgtgcgaacatactatctaccgcgcggttccattctaattatattttcgtctgtgctcctatattgttacttctcccgctgaaactctctcctcctcctacttttttctttgtcatcactctatcttctttatatccgctcttacatatcactgtggtgttttaacacagcatacatagttgtgttgttgtttgtcacacaatatgtgtgcgcgtgtggcgcatataaaatatgtgtgttgtggtgtaaattcatgctgcgattgtcatcacttcgctctataataactatttgtctcttataattcgttggttcttatacataatgtgtgttatacatgtatactgtggggtgggtgacatgttnatattactaatacattgcaacacacatctgtgatgtggctatatttcggggggtggatatatatacaatattggtggccgtcagaagatatattaataatagagaaataatagtgtgaggatgagtcgttgtatataatactatggtaaatataataagtgcggtgtcgctctgtgggtcggcgtttatattttaatctcgtgcatataatctcctcgt

SEQ ID NO: 11228 - DNA, 528 bp, Glycine max
  Coding DNA Sequence Number=SeqID_1449
cttgaagagcagtatccattgtgataacttgtgcctaatatttgtgctttgtagtaattggttattcacgtgctaagtgttgcttgttaggttgggaatatgcctttagggcctgaatttggcaatcaagctggaaatgctacacaagtagacagagggtcttctttgatgcccagtccctcagataacctagctcatctttctggtcctcctggatacgtagtttctgctcagatgggtgctgctaatcagcctcttcggcctcctgtgttgacaccagatttggagaaggcactgcttcaacaggtcacgagcctcaccctggggcagataaatctcctatcaccagaacaaagaaatcaagtgctgcagctacaacaaatgttgcatcaatgatgcaatacacacacaccataaagttaggcaatctttaatccttccagtttggcagagattgttgtgtcatatatatatatatatatatatatatatatatatatattatgtccaaactattggctgccaagt

SEQ ID NO: 11229 - DNA, 402 bp, Glycine max
  Coding DNA Sequence Number=SeqID_1450
gcattggataatcaaaactggttagtggttagggttagacacttagtttaatcaactaccttaattaactaattactgggtttggcctctcttgcaatggagttatcaaaatgatttaagtcttcattatcaaaggaccaatcaacttgagttatcacgtatcacttatcaacctaataagcttatgctgaagtcatgttgatagctagatgaggcgataaagaaacaatagtcgtagtaatttaattcataaggtcactttccttgtaataaaaataaagttactttagtgagtacctgactaaaaaaattatgctactttcttctttaataaaacatttgttagaatgtgatgattttgattttgattttgatttcgcgggtcaattgttactctttaga

SEQ ID NO: 11230 - DNA, 468 bp, Glycine max
  misc_feature (323)..(323): n is a, c, g, or t
  misc_feature (335)..(335): n is a, c, g, or t
  misc_feature (346)..(346): n is a, c, g, or t
  misc_feature (355)..(355): n is a, c, g, or t
  misc_feature (370)..(370): n is a, c, g, or t
  misc_feature (384)..(384): n is a, c, g, or t
  misc_feature (399)..(399): n is a, c, g, or t
  misc_feature (425)..(426): n is a, c, g, or t
  Coding DNA Sequence Number=SeqID_4461
tattttattcggtcatgcagttcagttcaacaacacaatcattttttatatgatcaaattaagtgatggggggaagtttcccagtcatgtgcaaggaatgtgtgcgcggacagtcagatgaatagaaagcttgggataaaaccagtataatgtttttgatgggaagcccaccagattttgaagaaaccaaagagcctggcccaaacgttactcccaagaagagcttgagggctactgaaagattttgtcagaaaagcccttagagactgcccaataaaggaagacccattgaaaaattccaggtaaacggtacaagtgaaggntgacaaaacagncataatgacgnactgcaaanagacttttaaggctncatgggaagtgccntgttgttgaggcacnccctcagaaagcagaggctcagtgtnngctgcccctttgcaaagctggaaagggtttaatgctgtggct

SEQ ID NO: 11231 - DNA, 397 bp, Glycine max
  Coding DNA Sequence Number=SeqID_1452
tccgccgacgacagcaacaatgggtgccaaggcgaagaaagctctgaagaagaacatgaagaagattaccgcttccgctgctgcttcttcctcttctcagctagctgctcccaagaaccccaaaccatcagctgattttctgcctctagaaggcggtccagctcgaaaagctccagcgaccaaacctatcgagaacaaagccacggtgctatacatcggtcgtctccctcacggcttctacgagactgagattgaagctttcttcacgcagtttggaacagtcaaaagagttagagtcgcccgtaacaaaaagactgggaaatcaaaacattttggattcatacagtttgaggaccctgaggtggctgaaattgcagcgggtgcgatgaatgactat

SEQ ID NO: 11232 - DNA, 551 bp, Glycine max
  misc_feature (184)..(184): n is a, c, g, or t
  misc_feature (232)..(232): n is a, c, g, or t
  misc_feature (274)..(274): n is a, c, g, or t
  misc_feature (282)..(282): n is a, c, g, or t
  misc_feature (354)..(354): n is a, c, g, or t
  misc_feature (381)..(381): n is a, c, g, or t
  misc_feature (405)..(405): n is a, c, g, or t
  misc_feature (510)..(510): n is a, c, g, or t
  misc_feature (512)..(513): n is a, c, g, or t
  misc_feature (515)..(515): n is a, c, g, or t
  Coding DNA Sequence Number=SeqID_1453
gatgcgaacggatcagtaatcagatgtgtgtggctgggcgcacgacacattccgtgctaatcaatatttcagtcactgttgctctataagcatctgtatcacatgcctatcgcagagcaagcgcagcgggtcgtgtcaggatgagagaggtctgtgagatgatcgatagtgtggagagagtagngcgagtatgtaatgagatcgaacagagaagcagcgacagtagtagaancatcacagcccagagccttatgcagcacaccagatccgccancttcgagncagtcatgtatcacttcgcgctcgattgcgatgactccaacagtacacacacaagatgatgcacaaagtacnaacctcttctcccgggctatatgatgncgtgcgctccaccccacacacacnacacccacgacggagcacctattaactactagttatatatgtgagtgtgagtccacagacacgtgcgcactcaggtgagtgagattgatgcgcacacctgaatantnnanaatatttgggtatattctctatgtattcgtctctct

SEQ ID NO: 11233 - DNA, 35 bp, Glycine max
  Coding DNA Sequence Number=SeqID_1454
tacatgccgctcttaaattcgcccgccgaataatt

SEQ ID NO: 11234 - DNA, 361 bp, Glycine max
  Coding DNA Sequence Number=SeqID_1455
attgtgaatttctgatggctttgaaattacaattcaatattctgccatgagcatttactatccttaatttgggttttgggctgagtatcttgattcaagctaatcggcagcgcgtagtttctctaaacgtttcaatggtcaaagagttgtggcctcccctggttccaatgctcggtattgcggtgtcccccgcatttccaccctcgatcaagaggtctcctcttatctatcacctggcttcccgagagagtctaatctatctgaccatgctatttgctctagtgaaatccaagtgaatgcaggtgggagctaaatctcttgcgcacatactgaggttgagttctgctgaatgattcttagt

SEQ ID NO: 11235 - DNA, 523 bp, Glycine max
  misc_feature (379)..(379): n is a, c, g, or t
  Coding DNA Sequence Number=SeqID_1456
ttcagcgtagtcgtggaatccaaggttcctgttttgcggtttggaggtagagaggacggcagacgtgacgctatctcccggcgagaagatccagtgagtgagtggcgctatgttaaacgtcttgtctaacgtaagtggccgtttatatggttatgtgctcgaagtcgagttgaatcaatattgatgcgagaggccaatgattgtgtggatgcgtgcatgtaatgatgagaggtcaggtgatgtggttcacgtagtgcaacgacagtatcgcgctaacttgtgaagttatggtgcacatgagtactgtaaatgagccacgaccatggcacatactagtatgtatgtgactatgtgtagatagtggttgctatgcggtacntactattgatgtttgcgtgtggcactagatacaggccagacgaagtaatgcgaaacacagcaaagacaagaaggaaggaggctgtgtgcgaatatcacgtacggaacctacgagggaggggagccagcggtattcacaatgtgt

SEQ ID NO: 11236 - DNA, 327 bp, Glycine max
  Coding DNA Sequence Number=SeqID_1457
acttgtatgtacgtctgttgtttgttttaagcaaaatcgatcactggaggaagctgatatagacctgtggtacgtatttggagtgacacacatacctagattgcacgactggcctgttatgcccgaggaactcattggtttcatgcttataccgcatgggtatttcaattgctcgtctgctgttgatggttcaccaaaccaaaatgatatgtatgactaagagaatggcctgaccgccaagcctatttagaatgggctaattgccaagctttaagaggataaaaaatgaagatgatctgactgcttacacggttatgtttaaattat

SEQ ID NO: 11237 - DNA, 280 bp, Glycine max
  misc_feature (202)..(202): n is a, c, g, or t
  Coding DNA Sequence Number=SeqID_1458
gtccccattctagtgaatgaccacattggtctctataactctttcaccattattatgtatttggaagataagtatcctcacaatcctttactccctcataatatttacgagagagcaatcaattgccaggctactagtgttatttcctcaacagtacagcctctgtataacgtaagtttactaaactacatggggaggaaanttaaccctaatgaagaacttccttgggcccaaactgtaattagaatatactgtgaggcgctgaaaaagctgtgtaagt

SEQ ID NO: 11238 - DNA, 184 bp, Glycine max
  misc_feature (105)..(105): n is a, c, g, or t
  Coding DNA Sequence Number=SeqID_1459
atggttggcccattccccattttgtggaatccccctttccagccttattggttggaaaagaaaaccaggaagaaaaagattctattcctaatctccagaactacnccggtaaagccctgaaatccaagaaatattttggaagcaaaggacaagtttctttgggaaggttccatccctgggcacc

SEQ ID NO: 11239 - DNA, 531 bp, Glycine max
  Coding DNA Sequence Number=SeqID_1460
tctctcttctcttttatcgggtagtgtagtgaccctctctctcattctatcgttcctgcttcttcgccgcctcgacttcttttctcgcggtgctgaaggagctcacgcatggcgactcaacttcttcatcgcgtcagtctctttgtctttttcttctcacactcacacctcactctcttttacgatctgcttgcgatgtcggagtgtccttcgttatcggacatgatcttgatgccacaaccaccgtccgagctaaaggagatcgaagatttgccggcgtcaacgatactatcgcggcttcagctcgttcgtctaatgtcgtcgcaactagttccaaattctctaccgcttcctcctctggcggtgacgctgaacatgaaagttcgaaggtcgcaagatcgcatccctatcgaaatggagaaagtcgaaaccgttctaaatctgaaatggaagatttatgagcacggagacatgcgaggtgttccagcgaagaggatcgtgctacagtcaccatcgatgcgcatgtaatct

SEQ ID NO: 11240 - DNA, 510 bp, Glycine max
  misc_feature (133)..(133): n is a, c, g, or t
  misc_feature (301)..(301): n is a, c, g, or t
  misc_feature (351)..(351): n is a, c, g, or t
  misc_feature (410)..(410): n is a, c, g, or t
  misc_feature (468)..(468): n is a, c, g, or t
  misc_feature (474)..(474): n is a, c, g, or t
  misc_feature (479)..(479): n is a, c, g, or t
  Coding DNA Sequence Number=SeqID_1461
tgacagcaaccagcgactaaacgtagtgcacaggagtgctgtatttgtgggtagataatgtaggagagagaagcgacgaccgaggagaggagagagaagaaatggtatgtgtggaggaaggagaacacacgcntgttgtagatacagtcaacaatcaaaacaatactagacagataatcttgttgcgcgcgctatgtgtctccgcgcacccgatgatgtttgtgtccaagccacccaacgcgtgtttgtgtatttatcgcgcagctgccaggtccgagcagacatttattgtatggtttcnacgactttctcaaaatatacacaaataatttccttcctcgccccccacancaacaagatatcagcacgacgccattatatatttgtgccgcccgccacgcaaagagatngtggtgatgagccgtacgacatatatgtagatcgcacgatcagacgcaacccggtgtntgttgnacaanggagcggacgcgaagaggacgacaaaccaca

SEQ ID NO: 11241 - DNA, 356 bp, Glycine max
  misc_feature (307)..(307): n is a, c, g, or t
  Coding DNA Sequence Number=SeqID_1462
gatctcttcgtgttttacatttccaatggcgtcctcctgtgttgctaatctttctctgtcaggtgtgtctcaatctcattatgtcaaggcaaatggaatgtctaccgcaaagctcaactcgatttgtaaaacctctgcattgagtatccagaagagatcaaaccggagtcgcaagttttcagtttctgcagagtatgggagtaggagaggaagtggtggtggtgatttcgtagctggttttcttcttggtggtgctttgtttggtgctgcagcctatatctttgctccacagatacgaagatcgatnatgagtgaagaagatgagtatggtttcaagaagccagatcaaccaagtt

SEQ ID NO: 11242 - DNA, 453 bp, Glycine max
  misc_feature (47)..(47): n is a, c, g, or t
  misc_feature (51)..(51): n is a, c, g, or t
  misc_feature (313)..(313): n is a, c, g, or t
  misc_feature (335)..(335): n is a, c, g, or t
  Coding DNA Sequence Number=SeqID_1463
gtggtgctcggctcgtcatgcgacagccatgttatctgttgtttgtngccngtcgcacccgcgctgtgcgcggctagctcatgtacccgtgccttggtggcgtgttcttatctgttgtgccaaccgcatttcactaatctccataccgtcctctcactgcgtgcggcggctgcgtggtgccgtggcgctgttcgcgcctgcccacgtgcttcttgtgtcaacgcgatcttgcccatattgtcctgcgcggtggcgtggggtaacacgaacaacacaaccactcacctcacgaataagccagaagaagcacaanaccacaggcgcggtatacccantacactcacacaccacactcatatcacccactaggtcagacacacaccacatctatataatacctacccgcactgaagagtgtggaagataaatcaacccaataacaacgcacgacat

SEQ ID NO: 11243 - DNA, 583 bp, Glycine max
  misc_feature (42)..(42): n is a, c, g, or t
  misc_feature (51)..(51): n is a, c, g, or t
  misc_feature (60)..(60): n is a, c, g, or t
  misc_feature (126)..(126): n is a, c, g, or t
  misc_feature (131)..(132): n is a, c, g, or t
  misc_feature (168)..(168): n is a, c, g, or t
  misc_feature (238)..(238): n is a, c, g, or t
  misc_feature (249)..(249): n is a, c, g, or t
  misc_feature (279)..(280): n is a, c, g, or t
  misc_feature (287)..(287): n is a, c, g, or t
  misc_feature (321)..(321): n is a, c, g, or t
  misc_feature (340)..(340): n is a, c, g, or t
  misc_feature (354)..(354): n is a, c, g, or t
  misc_feature (358)..(358): n is a, c, g, or t
  misc_feature (378)..(378): n is a, c, g, or t
  misc_feature (418)..(418): n is a, c, g, or t
  misc_feature (517)..(517): n is a, c, g, or t
  misc_feature (520)..(520): n is a, c, g, or t
  misc_feature (526)..(526): n is a, c, g, or t
  misc_feature (538)..(538): n is a, c, g, or t
  misc_feature (546)..(546): n is a, c, g, or t
  Coding DNA Sequence Number=SeqID_1464
gaatgacggagctgagccgcgcggtacgacgcggcgttgtgnacgatattnttagtactnactcttgagtctctgctctcgactatacgccctgactcgctacaccacactgcgcgccgacaccantctannagccaccactaccatcacgaacccatctgtgtcgangcgctgtgtgtacgaacacacactggcacgatgcatgcaacgcgcacgtctctccgtctctctgtcgcgnacgcatagtanatgtgctggatcgtgtatgatatatagtcnntgatgtntgatcttgacctcacgtccggcgcggcgatacanggctgacatcgcgcgtgcntgcgtgacatcgcncganacaagtctaatgcacatgantgtactaaatcatcacccacatatcaatgcatcgcaacancgactgctgaatgacatagtgattacacacactccaccatgcgacacctgatcacgatgacacaacaatgatcactcgacgcgcctagtcatcaacatnatncacctnctcatcacactnctcgcacngccgacgctctcgtgtaccgttcgtgcgtcatctcga

SEQ ID NO: 11244 - DNA, 137 bp, Glycine max
  Coding DNA Sequence Number=SeqID_1465
gaaaaggaaaactgtgtcgtctgtattcctgtacagccattgtttcagacgactttgtaaagggggcatgtaattattatgctctgttctcttctctgggctccgtgcaggtgcagctagtggtcagctcccactgt

SEQ ID NO: 11245 - DNA, 565 bp, Glycine max
  misc_feature (53)..(53): n is a, c, g, or t
  misc_feature (77)..(77): n is a, c, g, or t
  misc_feature (102)..(102): n is a, c, g, or t
  misc_feature (109)..(109): n is a, c, g, or t
  misc_feature (121)..(121): n is a, c, g, or t
  misc_feature (146)..(146): n is a, c, g, or t
  misc_feature (157)..(157): n is a, c, g, or t
  misc_feature (169)..(169): n is a, c, g, or t
  misc_feature (184)..(184): n is a, c, g, or t
  misc_feature (213)..(213): n is a, c, g, or t
  misc_feature (218)..(218): n is a, c, g, or t
  misc_feature (220)..(220): n is a, c, g, or t
  misc_feature (227)..(227): n is a, c, g, or t
  misc_feature (241)..(241): n is a, c, g, or t
  misc_feature (250)..(250): n is a, c, g, or t
  misc_feature (264)..(264): n is a, c, g, or t
  misc_feature (269)..(269): n is a, c, g, or t
  misc_feature (288)..(288): n is a, c, g, or t
  misc_feature (306)..(306): n is a, c, g, or t
  misc_feature (326)..(326): n is a, c, g, or t
  misc_feature (345)..(345): n is a, c, g, or t
  misc_feature (347)..(347): n is a, c, g, or t
  misc_feature (350)..(350): n is a, c, g, or t
  misc_feature (376)..(376): n is a, c, g, or t
  misc_feature (381)..(382): n is a, c, g, or t
  misc_feature (425)..(425): n is a, c, g, or t
  misc_feature (512)..(512): n is a, c, g, or t
  Coding DNA Sequence Number=SeqID_1466
tgacactcatacatcagacacacacaagtcttaactatctctctactgcctcntcatatcagcactatatatctctnctctcacaatcgctatgtatcgcanactccantatcatactcantcgatagtactgaattgtgttatantatagactctnagtctacttgtntaattcgtcactcantcaagctcgtccgtagcctatcatatctntcgananacgtctnacactgcccgatantaacccaantatcccacctcttnataancaaattacatactattganaccacgtcacaccgtgtnatactcgtcaccattataantcacacatatcatctacanantanttacaccatacatacacgctcgcacntctcnntcataactatatactcctctcatcaccacctccatctcatctnctccatcagactcgactactgacaatcacgtatcatgcgatctgtgatactctatttcatctctctttatcatcatcatatcactanacgcaactatgcaactacaatatatacacacatatcatctgactacgcatata

SEQ ID NO: 11246 - DNA, 414 bp, Glycine max
  Coding DNA Sequence Number=SeqID_1467
tacagggttgacaggtggagcacatcagcaacaagtgaatggtggtgaggtacaaactagccgtagggcattgctttcacttgttgctgctggtggagccggtggctcttttgttcaaaccttgctctctgatgccaagcctatcaaagttggaccgcctccaccaccttctggctgattacctggaacgttgaactcagatgagccgagacaccttcagctgtcgttgatagatactttcttccttcggccattgtctgccactgattctccccaatgcgcaaggggagtgagccaggagcttgttggcgtatagaagttgattgagccggaggcttggccatgtggtgcggatggtctgcgtctcaaggacaaatatctgcgctgggatctcgacagctggctatcttgcgg

SEQ ID NO: 11247 - DNA, 173 bp, Glycine max
  Coding DNA Sequence Number=SeqID_1468
aaaaagggaaatgccgcgccatattggttaggtcacctgtagcgataccgatatggttttcgcccattaatttcccttatctttgggcaccgtaagcaagtcatgcacggcctacttggtcaggttcgctgtccgcattatccctggttcagctcacaggctcacatacagat

SEQ ID NO: 11248 - DNA, 409 bp, Glycine max
  misc_feature (28)..(28): n is a, c, g, or t
  misc_feature (49)..(49): n is a, c, g, or t
  misc_feature (64)..(64): n is a, c, g, or t
  misc_feature (85)..(85): n is a, c, g, or t
  misc_feature (91)..(91): n is a, c, g, or t
  misc_feature (103)..(103): n is a, c, g, or t
  misc_feature (120)..(120): n is a, c, g, or t
  misc_feature (128)..(128): n is a, c, g, or t
  misc_feature (130)..(130): n is a, c, g, or t
  misc_feature (132)..(132): n is a, c, g, or t
  misc_feature (138)..(138): n is a, c, g, or t
  misc_feature (143)..(144): n is a, c, g, or t
  misc_feature (157)..(157): n is a, c, g, or t
  misc_feature (182)..(182): n is a, c, g, or t
  misc_feature (203)..(203): n is a, c, g, or t
  misc_feature (205)..(205): n is a, c, g, or t
  misc_feature (208)..(208): n is a, c, g, or t
  misc_feature (210)..(210): n is a, c, g, or t
  misc_feature (221)..(221): n is a, c, g, or t
  misc_feature (275)..(275): n is a, c, g, or t
  misc_feature (292)..(292): n is a, c, g, or t
  misc_feature (315)..(315): n is a, c, g, or t
  misc_feature (336)..(336): n is a, c, g, or t
  misc_feature (364)..(364): n is a, c, g, or t
  misc_feature (367)..(367): n is a, c, g, or t
  misc_feature (373)..(373): n is a, c, g, or t
  Coding DNA Sequence Number=SeqID_1469
ctagctatccgtcatgctcgtgatatgntaatagtatatgatactgacnaccacacgtagtgcncatcgatctgcaggtagtttncatgcngatgacgtagcnacgatgagtagcgtatngatgatantnancgggancgctnnagagaagtaaaantcacacactgacacgtcgtacaacnattcagatcaatctgaccacnancancnacattctcatntctcgtctcttccacgtctactctcaacataccatgatgaatcatctatttacntatgatatattaaatantgaatatatgatctagaagtcgnttgattgcattagcttcgttnctgaccgtcatgtctatcttcctttatntcntgactncctatcactactcgtcgactatcgttcctgactggt

SEQ ID NO: 11249 - DNA, 547 bp, Glycine max
  misc_feature (50)..(50): n is a, c, g, or t
  misc_feature (250)..(250): n is a, c, g, or t
  misc_feature (271)..(271): n is a, c, g, or t
  misc_feature (327)..(327): n is a, c, g, or t
  misc_feature (416)..(417): n is a, c, g, or t
  misc_feature (448)..(448): n is a, c, g, or t
  misc_feature (503)..(503): n is a, c, g, or t
  Coding DNA Sequence Number=SeqID_1470
gatagataattacagcgacgccgtatatgacttagatgaatgatatcagncacgactcacatgcacactgtgctagcagacgatacgcaatacaacaagagagcacggtatatcgagagttagttatcgctagcgtgtctggctaggacaaatagaagtagatcgacaggttcgtacaatccgacatatatgaggcaagcgcatgcacgcggatatgaaaaggagcgacatgccacaacacacctagacnatctatgatacatgactcgcnctcactcgagatgtacgatacgagtatacgtgtgcatggcgagctgcactgctagngtgagatgagttggatgctgagacgcgatcagttgggccgatactagaatgaggaggatatcgtgcagatactatcactgatgtacagnntcagataaaagcaagctggtctagtagtatnacgccttaaaaatcaccgacgctccgtggcgaatgcactgaaaaactgactctangatatactatcaatacatcctgactgccatgacgttgcatgaga

SEQ ID NO: 11250 - DNA, 464 bp, Glycine max
  Coding DNA Sequence Number=SeqID_1471
atcgatacttggacagataactggcagtactagctcagtgagtgactgcacactcagtcatgtactgcaagaagatgctcacttcactgctcatggcggccctcctcttgtgctcctgcgccacgtccgtcggcaaatcgcgctacaccgttggcacgagcggcgtagccaaggtgtgaagcgcggtgccattggcggcggagggagcccatggtggccgcagaactgcagcgaggggagcgaggtctctggggcagagggtgccggtgaaggcgccccctccgccgaaggccaagcctccgcggccgcggccgccggcgtcacctccgccgtgtactccggtggcagatggtagattcggttgatatgctgctttagcttttacagtggccttttctgtttgcgttgctgctgcggacgtcgttacggccacacgcgcatcgccttgtatgtgtttctttgtc

SEQ ID NO: 11251 - DNA, 540 bp, Glycine max
  Coding DNA Sequence Number=SeqID_1472
tctctccttaggattcatggcttccatggctgctgcctctacttccctgcaggctcgtcctcgccaaatggtaactgcggttaaatgttttagccagggaagcagaagcaatctttcttttacgcttcgccctcttcctacccgcctgagcgtctcttgcgcggcaaaacctgagacagtggacaaagtgtgtgaagtggtcaaaaagcaactctcacttaaagagggcgaccaagttacggctgccaccaaatttgctgaacttggtgctgattctcttgatacggtggagattgtgatgggcctcgaggaagcgttcgatatagaaatggaggaggacaaagcacaggcgattgagacagtcgaggaagcagctgagctcattgaggagattttgaaagcaaaggcttaattaagtccacatcatttattacaaaaccaaacgatggaaaccccactaaacccaaacccactgtcttgttattgtttggttagctagagaccactttatgtttgttgagatttatgttcgtttgggca

SEQ ID NO: 11252 - DNA, 574 bp, Glycine max
  misc_feature (26)..(26): n is a, c, g, or t
  misc_feature (55)..(55): n is a, c, g, or t
  misc_feature (67)..(67): n is a, c, g, or t
  misc_feature (83)..(83): n is a, c, g, or t
  misc_feature (266)..(266): n is a, c, g, or t
  misc_feature (345)..(345): n is a, c, g, or t
  misc_feature (347)..(347): n is a, c, g, or t
  misc_feature (356)..(356): n is a, c, g, or t
  misc_feature (358)..(358): n is a, c, g, or t
  misc_feature (375)..(375): n is a, c, g, or t
  misc_feature (472)..(472): n is a, c, g, or t
  misc_feature (503)..(503): n is a, c, g, or t
  misc_feature (520)..(521): n is a, c, g, or t
  misc_feature (533)..(533): n is a, c, g, or t
  Coding DNA Sequence Number=SeqID_1473
gtcgcacgagtcgatataggcgtctnttccataaacacacacacctgaggcgcgncggcgtgcggtntggcgagcgcaagcgngcacggtatacctatattctctatgtaactatcaacggcagggctcatcatagttcaatgaatgtctagtattggcgcacagctcactacatcacaatacctcacgcggcacgctagagagtatatcttgatatcgtcgctgtatgtccctctcgattcacgacagccaggtaaaagaatganccgcaacggttctacacgaactatcatcgtgacagcgagaatagatggcctacgggtcggtgtgttggggctgtgaatnanagtgattananattataagagaaatgangtacattgtgttcctttgctcgtcgccgcggcgcgccgcgtgtagtgcgcatacatctatgtctaaggtagtgatagaggatcgccgcgctctcatncctacccgcgcgagagagggtggcgtcatcncctattgttctacttgnnaggtcatagagnggtaatgagtgcgatacaggcagtcgatacgggctaggtct

SEQ ID NO: 11253 - DNA, 531 bp, Glycine max
  misc_feature (46)..(46): n is a, c, g, or t
  misc_feature (69)..(69): n is a, c, g, or t
  misc_feature (77)..(77): n is a, c, g, or t
  misc_feature (86)..(86): n is a, c, g, or t
  misc_feature (88)..(88): n is a, c, g, or t
  misc_feature (108)..(108): n is a, c, g, or t
  misc_feature (113)..(113): n is a, c, g, or t
  misc_feature (134)..(134): n is a, c, g, or t
  misc_feature (143)..(143): n is a, c, g, or t
  misc_feature (147)..(147): n is a, c, g, or t
  misc_feature (149)..(149): n is a, c, g, or t
  misc_feature (151)..(151): n is a, c, g, or t
  misc_feature (163)..(163): n is a, c, g, or t
  misc_feature (178)..(178): n is a, c, g, or t
  misc_feature (201)..(201): n is a, c, g, or t
  misc_feature (204)..(204): n is a, c, g, or t
  misc_feature (230)..(230): n is a, c, g, or t
  misc_feature (235)..(235): n is a, c, g, or t
  misc_feature (241)..(241): n is a, c, g, or t
  misc_feature (246)..(246): n is a, c, g, or t
  misc_feature (254)..(254): n is a, c, g, or t
  misc_feature (287)..(287): n is a, c, g, or t
  misc_feature (289)..(289): n is a, c, g, or t
  misc_feature (294)..(294): n is a, c, g, or t
  misc_feature (314)..(314): n is a, c, g, or t
  misc_feature (317)..(317): n is a, c, g, or t
  misc_feature (340)..(340): n is a, c, g, or t
  misc_feature (352)..(352): n is a, c, g, or t
  misc_feature (361)..(361): n is a, c, g, or t
  misc_feature (369)..(369): n is a, c, g, or t
  misc_feature (387)..(387): n is a, c, g, or t
  misc_feature (390)..(390): n is a, c, g, or t
  misc_feature (393)..(393): n is a, c, g, or t
  misc_feature (395)..(395): n is a, c, g, or t
  misc_feature (421)..(421): n is a, c, g, or t
  misc_feature (438)..(438): n is a, c, g, or t
  misc_feature (443)..(443): n is a, c, g, or t
  misc_feature (454)..(454): n is a, c, g, or t
  misc_feature (466)..(466): n is a, c, g, or t
  misc_feature (469)..(469): n is a, c, g, or t
  misc_feature (472)..(472): n is a, c, g, or t
  misc_feature (492)..(492): n is a, c, g, or t
  misc_feature (495)..(495): n is a, c, g, or t
  Coding DNA Sequence Number=SeqID_1474
tacgtcacgatcagtacggacgcgcacgtgcgacatagtaggagantgcgcgcattcagactatcgatncgtagtgncgtcgacgntngatctgtctcgtagctagancgtgntgtatgctcacggcctcacgnctagtgaangtcncnantcgatgtaaagntggatggtgagcacntactgcgatacgaagacatacgntanaagttgacgtatcgagtcacgactcnaaggntcgtgncggcncgtctcgntggtgatcagaaggggatgagatgagtagtgantnatcanctacactcatgttcgatctncantatgagacatcatcaagctagantactttgatganagctcactnctgtctgntgactatgatcagtgcantancgnantagtacatatgcaacgactagtgtancgtgacagctactaatncaacntcgcaggtgancgacgcatcaantantancatgtatgaactatattganagnctactacagcatgaccctcggatcacatcgtcggtg

SEQ ID NO: 11254 - DNA, 555 bp, Glycine max
  Coding DNA Sequence Number=SeqID_1475
ggatccaccgtcattgccgagggctgcgacgccgccagctccgtctcctggatccacgcctggaccgtgtcgcatggggtaatcactcaggtgagggagtactcgaacacctcgctcacggttacgcggatcggtagcgtcgtctccgggcgctctgcggagatcagggcgtcgcattgcccctccgtgtgggaaagcaaattctcgggtcgggctggaaaatccgtcccgggtctggttcttgcgatttgaggatttggtaaaggttattgctgcagccacgtcagattaataactaaataaaggctgttgcttacgtgtcggtgtgtggttggtttgttgttttatgggttgaaaggatttgtgcggttgagacgcggtgtgggctaacgcttaaaggtcgcgttttggtcgtcgcttttcttctcttgttttttttttttttttttattattagctttaagttcgtgcctttgtttggggttttagtgcgtacaagcatggggaaacccatattgacttgcgccgttgtgtctgatgtaacgtttggctatg

SEQ ID NO: 11255 - DNA, 390 bp, Glycine max
  Coding DNA Sequence Number=SeqID_1476
ctaattatggtcatttgggctaaacaagaaaaaaaaacatttaaaaaaaggggaactttcatcagacttattcttattttagaaacccaaataaaattttcccgttttatttaccgggaccactatatatatagctcgcgacatacaagaatcatgatacaccagaccacttgtgttgtcacctgtgcctatcttatcttatttatataaaaaaaatcttaattttctatctctcatgtataatttgttataaagatgtgatgtgtaaataataacaaattaattaaaatagtgacagtgaaattcactaaaaacagtgaccgccgattctacgtatgatcgataaaattaaaaagtaactaattaacgagagcgtcgtaccaaacagaa

SEQ ID NO: 11256 - DNA, 577 bp, Glycine max
  misc_feature (141)..(141): n is a, c, g, or t
  misc_feature (203)..(203): n is a, c, g, or t
  misc_feature (346)..(346): n is a, c, g, or t
  misc_feature (437)..(437): n is a, c, g, or t
  misc_feature (489)..(490): n is a, c, g, or t
  Coding DNA Sequence Number=SeqID_1477
gagtgcacagccagacgtcttagtatcaagacgcatgttatgcgaagctgctggaagtctccgccccgcgcatgtacctacaatagtgtaagctaatcacttctatatgcacgcctgtcactcacgcgcacacaaacaggncactctacatagtacgactcttctgctattgtaagagtcgcatgtcgcagcggagggagacnctagagtgtgatgcgcgcagcaactagaatacagtaggcgctctgccgcatcatccacacacggtaccacctagcgagcgtgcttgtggaacatatcaccatctgattgtgaccgagctatgaattgatataataataataantacagatctgtacagatacttcacgctctctctcgcggctacaccacgtttttctactgtcctatgtcgacgagtgtgtgtgtcgtacgtnatatagagagatgtgagagagcatggagaatatggagacgcctacgccggcnntgtgactactctcgcgcactttgatgactactctctctcatgatacgaacatgcaccgtgacacgctacatctcattcacaatctga

SEQ ID NO: 11257 - DNA, 294 bp, Glycine max
  Coding DNA Sequence Number=SeqID_1478
gtcacgtggattgctattataccttgcaacccttcttgtccagagagccgtttttttgatctaaaaggccacccttgaaatatagtttagatttgtctactatgcaccatgccaaacaacaatactaaaggcttgactgggtaatgaatatgaaaagaaggtttataaatcaatagcatagccaaagggtgaaaggcattcttatcacaggcgcttctgtgaggtgaattgtcaatcaccttggaaccttacttgctatattcgaatttttgataagaatgagtcgtccagacg

SEQ ID NO: 11258 - DNA, 540 bp, Glycine max
  Coding DNA Sequence Number=SeqID_1479
ttaacccagatcacccaagaagcttggccctgttcccagcacccttttggtaaatacatcccaaatcaaactccttccacctatatattatttttaacatgtaagccacagcccctccaaaacccttagaaaagattctccgggaacatactataccctcatctttctacaacataaaatgctatcctagggcaaccgttgatctgttacacatctacgcttcagtctgcgagttcttgcttcttgccccgaccactatagccaaagcggcatcggtgtcgccgtgcgtggcgcccaggggctggaggacgacgaatacggggccgaagagcaagagagaacgaaagggcctcatcggaatcgcaagaaagcaaaagtcaaagtccgaagggaaaggaagagtgggagaaggttccggcgagaattgacgacgagttttgcattgaaggaaaagggtggcggggttgcggtgccggcggagagcggtggtggtggcggttgatctcggaagggaaaggattgagtcaactcggagcgagt

SEQ ID NO: 11259 - DNA, 596 bp, Glycine max
  misc_feature (51)..(51): n is a, c, g, or t
  misc_feature (280)..(280): n is a, c, g, or t
  misc_feature (374)..(374): n is a, c, g, or t
  misc_feature (498)..(498): n is a, c, g, or t
  Coding DNA Sequence Number=SeqID_1480
acaacctcacagcaatcgactttattatttctttacacccaacacccactnccacgcctgtctttcagtcataattatacatcgcttatccttctcgccttgctactctttgacctcgcaactaaaatcgagtgtgtgaccttccccgtcgccagtaaacgcaaaacaaacatcacacttgcgattaccttgatcaataatatattctggcatctttaatatactatcgctccgtgtctctctctgttcgtctatcttctctcatgctctcatcttctcntctcctcgacatgccgcccacaccgcgctccacactcccttcatctacacactgccatccgcactctcaccgtctccacttcatctcatctcantcccacctccaactccgcgctcaacaatcaaccatcacatcgctcccacaccttctcctcacctgcctctctcactctcaatctctccatcctctccaccacctcgctcattctctccaacctncgctccacgcagcatctacattctatacacttacccatagtacgcgctcgtcctctcacacaagactattactcatatacaatatagtcctcccgaca

SEQ ID NO: 11260 - DNA, 432 bp, Glycine max
  Coding DNA Sequence Number=SeqID_1481
tgaatgtgccatcaaacgacagccacccctctcttccatctcccctgttgcttcccgacggcggcggcgctttagatccggtggcaagcgcctcccttccccttcccagctactcttactcaaggccacctgactcctcctggccgccgtcacggcggtgaaccccggggccctgctcctgtaggcgcctaggaggcgtggcattccctgtgcccgcctccggcgcatctacagcgagaatgagctcgtgctgtctgcgcccaagctgcaaggctgatgctaatctgaagccatctttgatgctaatttggagccattttctttgccgctatgcacagtccagagctggagccatgccctttagtttgtagttcgttaatctgtcagtattgagattacattgattttgaagcgtgttaaggatgcattgtt

SEQ ID NO: 11261 - DNA, 495 bp, Glycine max
  misc_feature (50)..(50): n is a, c, g, or t
  misc_feature (77)..(77): n is a, c, g, or t
  misc_feature (347)..(347): n is a, c, g, or t
  misc_feature (404)..(404): n is a, c, g, or t
  Coding DNA Sequence Number=SeqID_1482
acaatacatgtgtcacgtcgcggctccgacgtacaaaatacgtgcgctgnctcgtgcgtgcgtcgtcgtccgacgtnactctcgagataaaaatacatacgcgacggcggcgcacataaatatcgctcgcgggcgcgtcgtgagcacacaatggcgagtgaatacgacgctgctcaccgtcgcgcggccggacgctagtaattgatatacaaatatagtataggtgggctcaaaaaaattaggctcggtcggcgcgtcgctctgctatctgcgcctagaacaataatatacgctgcgctggctgtgcgcgcggaggatatgtgataaatcacacgctcacgtacacnggcggacgtggtagctagctacagtcccatcgatatatatcgatcactagaggttgnatactacgatgcggcggcgccagcgctgcgcgcatctaattacagtgaagtaatgaagcgcggcgcgcgacacgtcgcgatccatagatac

SEQ ID NO: 11262 - DNA, 328 bp, Glycine max
  Coding DNA Sequence Number=SeqID_1483
ctttaaaatgaactattcagtgtcaaaattatatgtgtctttggactgtacatatggtgtgcagcagcagatccagcagatccaggggtttttaagtccaaaaagtatcttaaaatcccagacagtaaaaagcttgctgaactaaagaattctaaactaggaggggaatcaacttcgtcgatgcatgatggaaatgcttcaactgttgttcaagtaacgaatcttctgaacaacaagcaagtgaagatggcatgttctattgcagtttgtgtgaagttgaggtgagcagaagttctattttacaagtgctcatcttgaaatgcatata

SEQ ID NO: 11263 - DNA, 584 bp, Glycine max
  misc_feature (44)..(44): n is a, c, g, or t
  misc_feature (95)..(95): n is a, c, g, or t
  misc_feature (267)..(267): n is a, c, g, or t
  misc_feature (278)..(278): n is a, c, g, or t
  misc_feature (450)..(450): n is a, c, g, or t
  misc_feature (483)..(484): n is a, c, g, or t
  misc_feature (487)..(487): n is a, c, g, or t
  misc_feature (493)..(493): n is a, c, g, or t
  misc_feature (508)..(508): n is a, c, g, or t
  misc_feature (534)..(534): n is a, c, g, or t
  Coding DNA Sequence Number=SeqID_1484
gatactctcacgatcgagacgctgattctacgagcgcaaccgtnattcagaactcacacaacgtacataccgaagcgtcccgtgtgccagacgcngaacgcagagatattaacatacactccagacctgtgtcacaatagtctcggctgcgcatcgccgctctactctacttctgaccgacgcgtgtaagcgcgcgcgtgtgtcatgtgtcgactgcgacggctcgctgtcgtcgttggatggctatagtctggtgcgtcgctctantgcagagtagntatatgcgtgactactctgagtctgcatgtctttaaccggttgcgcacgagtgtgcgacgcgacgacacgcgcgagagagcgtctgtttatgatacgctgctgccactactcgctcctatacatatactctttgccatatgacgcatgtcctacgtgacctgcgaattacgncataaccgaccgccacgcatgaggaggtctccnngtntgtgtncggcgcgctatgatnacgagatttcgacgcgtagaggaatnacaggcgtatgattctcagttgcacgatactgccggaagagcccgttgat

SEQ ID NO: 11264 - DNA, 540 bp, Glycine max
  misc_feature (42)..(42): n is a, c, g, or t
  misc_feature (115)..(115): n is a, c, g, or t
  misc_feature (180)..(180): n is a, c, g, or t
  misc_feature (302)..(302): n is a, c, g, or t
  misc_feature (364)..(366): n is a, c, g, or t
  misc_feature (368)..(368): n is a, c, g, or t
  misc_feature (476)..(477): n is a, c, g, or t
  misc_feature (483)..(483): n is a, c, g, or t
  misc_feature (490)..(490): n is a, c, g, or t
  misc_feature (496)..(496): n is a, c, g, or t
  misc_feature (503)..(504): n is a, c, g, or t
  misc_feature (506)..(515): n is a, c, g, or t
  Coding DNA Sequence Number=SeqID_1485
tattgggccttctctactagtttaattttatcaggatgtcangatttcattttgagattatcgggtgtatggaagaatatgctagcccctagtagtatcaatatagcagacctgntttggagttcttatttggttgcaaacccagttgtaactatactttctttttctttaaaaaaaaanaaaaaaaaactgagggggccggacccatttcgcctatgtagcgattcgcccctaatggcgcgttacacgctgactgaaaccctgctaccactatcgctgagacatcccttcgcactgctaanacaagccgacgacgcttcccacgtgcaacttaaatgatgacccttgacgcatataagcgggnnngngggggtcaacaactagctacccctcttcttttctttttcccggccgttccagcttaaggggctctagtcaagtcgcctacaaacaatagggagtaggcccccgagtgnncttgcngcatttngatcanacaacannannnnnnnnnntcttttgtagtctcctgaaggcaac

SEQ ID NO: 11265 - DNA, 424 bp, Glycine max
  Coding DNA Sequence Number=SeqID_1486
gaaagtttcccacaatgtcatcacttctctatatctccctcctcttagccgtctttatcagccacaccacggaagccgctctcgaaccagtaaccgacatcgacggtggacgtctcacatcaggcaccaaatactacatcttgcctgtgctccgcggtcgcggcggcggactaaccatgtccaaacccgaaaacaaaacatgtcctaaaagcgttatccaagaccaatacgaagtctccaaaggcctaccgttggagttctcaccatcagacaattcaagaatcatccgcgtctcaaccgatctcaacttcaagttctgtgcggcttcggtctggaacttagacaactacgatgagatgacgaatcagtggttcgttacagcttgtggcgttgcagggaatcctggtcaggcaacggttgataa

SEQ ID NO: 11266 - DNA, 238 bp, Glycine max
  misc_feature (33)..(33): n is a, c, g, or t
  misc_feature (37)..(37): n is a, c, g, or t
  misc_feature (65)..(65): n is a, c, g, or t
  misc_feature (79)..(79): n is a, c, g, or t
  misc_feature (106)..(106): n is a, c, g, or t
  misc_feature (154)..(154): n is a, c, g, or t
  Coding DNA Sequence Number=SeqID_1487
tgagcttcatctttcgatctcgacttgaacttnaacntgatcttgttgatgttgttcctgaactnaacatcaatgattntggattcttcttgtcttgaagtttttntgaggcaactttcgttcttcatatctttgtagagcaaaaacttgtttntgacttcatatggttcttctagatctttagcttggggtatctgatattaaatatttcatcagcatcttgacatttaagatttga

SEQ ID NO: 11267 - DNA, 565 bp, Glycine max
  misc_feature (230)..(230): n is a, c, g, or t
  Coding DNA Sequence Number=SeqID_1488
agtgctgagccatcgctgcgcgtgctgcctgcgttgttagtggctgttctgtttgttgcggcggcgcttagtcttgagttgcgataatctcacacatagataaaagaatgattgatattactataagtgattaagtgatgactcttgtattagtgattggcggtgcgcgcactgcgcacgacgggtggtcgcggcgcgggcggcgcccgcggtcgtcttggagtggatgntcgtgcgatggtggatcaaccaacgcgtgaccatgccccacacataccgtgctcatcgtacacatcatgcggattgatgtataataatatattatgatatgtagatagaatataatattatgttgtgttggtgcgttgccgctcttacttggcgtggtgttgtgatttagtattatgagtgtggtgactacgagtgtgagttgtggtccacgtcgtatactcagacgagcaggtacatacacgcttctatggtgcatagcgagagtctatctatgtaacaattttgatatctaatctaatacacactgcaagaggcaatgagagacgcgatatat

SEQ ID NO: 11268 - DNA, 548 bp, Glycine max
  misc_feature (34)..(34): n is a, c, g, or t
  misc_feature (71)..(71): n is a, c, g, or t
  misc_feature (131)..(131): n is a, c, g, or t
  misc_feature (185)..(185): n is a, c, g, or t
  misc_feature (296)..(296): n is a, c, g, or t
  misc_feature (304)..(304): n is a, c, g, or t
  misc_feature (322)..(322): n is a, c, g, or t
  misc_feature (415)..(415): n is a, c, g, or t
  misc_feature (435)..(435): n is a, c, g, or t
  misc_feature (438)..(438): n is a, c, g, or t
  Coding DNA Sequence Number=SeqID_1489
tatctttatacattacgtccgcgcgaatgatgcntcgtctgtactctcgttatgtgcatcgctcgtctcgntgacatccatagacggatgatgtcgcgtatgtcgtcgatacatacggactatgctatcantttgtcgagcacttgtaggtaactatgtcccgacgctcgttgcgtcgatactanctgatatgcgcagacaagtcactgacgaccctacgaaacgcatgtggtagtcgtgagactgtgctatgatcaccacgatatactacatcatcatgactgtacactcatacngctgtgangtgatactgaaccgcgtnatgagcgagttggactgctagacatcatgcgctgtatgatgctacgtcatgagtacgaatcaatcagacctcacatgacaagtagcatcagtnaataccctactacactacanttntcaacatgaatgacgcgacataaatgggttggacggcgactgactataagaccggatgataaaatcacccggcagctagggggcaaatgacggcatgatggtctgcgtgc

SEQ ID NO: 11269 - DNA, 392 bp, Glycine max
  Coding DNA Sequence Number=SeqID_1490
ctcatttggagatcacgacaacggatcgaccaactggggagctgggagaaccatcaaacaccctgtctaaatggccaacttcgcatatgactggctagtcattgcagggaagcttctggagcgaacttacgtgcagtatgttattgcgagctactacgatggctacaaggatgctggcgttgatgccgctgaggctacagatggacctgaatgaccatatcactctgatagagaggactagcctgagccatcaccagagggtcgtttgcccgatgccactaatggttatgaccataagagagatggtgtttgcaaagctatggggcttacatgccaagatatcggtgctctatctgggggcacactattggagctgccacaaaggagcgtct

SEQ ID NO: 11270 - DNA, 83 bp, Glycine max
  Coding DNA Sequence Number=SeqID_1491
tagcatacgtgtggttcattaataatagagccctttagcccagctcctttgagtaagtattctgaggttctaagtaccaacca

SEQ ID NO: 11271 - DNA, 559 bp, Glycine max
  misc_feature (221)..(221): n is a, c, g, or t
  misc_feature (245)..(245): n is a, c, g, or t
  Coding DNA Sequence Number=SeqID_1492
cagtggcggcagtaagggtgcacgtggaatattcaacataggaaaagcccatactaaagtagacaaaaatgccaaaaacaaggtctattttaaagatgttgctggttgtgatgaggcgaagcaagaaattatggagtttgtccacttcctcaagaacccaaagaaatatgaagaactcggtgcaaagattcccaaaggtgctctcttggccggtcctccangcacaggaaaaacccttttagcanaagctacagcaggggagtctggtgtaccctttctttgtttatctggttctgatttcatggaaatgtttgttggtgttggaccatctagggtgagaaacttgtttcaggaagcaagacagtgttcacctagtatcatatttattgatgagattgatgcatttggtcgatcaaagtggccgtgtggtttttcttgatgcaaatgatgtacgtagacagcctttctaatacctgtttgtggtgatggaggtcttgagtaatacctttgagtttaatatatggattcagctgtgcgtcagattgatgtctctgtgtta

SEQ ID NO: 11272 - DNA, 124 bp, Glycine max
  Coding DNA Sequence Number=SeqID_1493
gagttgatcactgggatttcccccctcttagatctgcaataaactcttttactcggtatcagttcagatcaagggcgtaattcatttgattatgctcctatgaaaactgccatgctttttgttt

SEQ ID NO: 11273 - DNA, 534 bp, Glycine max
  Coding DNA Sequence Number=SeqID_1494
gttttggcggactggcccagtgataaaccgcagcaacacactacctggccgcgtgctgtccaccacatcacacacgcaccacctcggcaccaaaccagcaaactatccccactaaacaacacaccacctgctcccactccatctcctctctctgtctatttgcgcatcattcccttcacattcatccatccgcacgtgcacccaactattattgtttatatccaacacaaaccacaacatccgctgctacatcagatctatatacataactctccaaaactctatctttacacatcacacaccacccgagcagcctatcacctaataatctttaagaccgcagctacctcagcgtgggcgtgaagatggtgagaatccggattaattgtttgatactgttgtgctacggcgatgtgaattagcgagccgcttctttctcggcgctctatgggggggaacaagcaacataataacacacaatacccacaaacttacgcataacgcatcctcgagttcgtctttctctttggaggg

SEQ ID NO: 11274 - DNA, 275 bp, Glycine max
  Coding DNA Sequence Number=SeqID_1495
gaggatttctggttgctaacattaataagccggttgaaattgagggaagataaaaggtccgaggcagcaaataagcgaaaaatgcccttttgatgagaaaacctagagcctcttcatatttctaataaccaaagggattggttcaacccgcagaaaatgaaaatgtggctgactcttgagacttgagaacccccaccctccaagcccattctcaacaaccaacaagtgatggttccaaaggaatcattagaagttagtgcttctttcccatgctt

SEQ ID NO: 11275 - DNA, 504 bp, Glycine max
  misc_feature (28)..(28): n is a, c, g, or t
  misc_feature (145)..(145): n is a, c, g, or t
  misc_feature (159)..(159): n is a, c, g, or t
  misc_feature (170)..(170): n is a, c, g, or t
  misc_feature (183)..(183): n is a, c, g, or t
  misc_feature (194)..(194): n is a, c, g, or t
  misc_feature (257)..(257): n is a, c, g, or t
  misc_feature (266)..(266): n is a, c, g, or t
  misc_feature (389)..(389): n is a, c, g, or t
  misc_feature (401)..(401): n is a, c, g, or t
  Coding DNA Sequence Number=SeqID_1496
atctgcgctcgtaagaggatgtcgaganaggattcactattattcgctagtgtgccatgtatgttatactcatccattcagcatcatgcgatgagcatcgatcaagagaagagctaggcgagatcgtacgagttgtatggtttgnatcacgtcgaatgngcggtacgcangtctgtcatcgtncagttcatgcnactaatatacagtaattggatccgatctgacagtgtggatacatgtacagtcgcgcacactancactgcacnatcacagtctatgatcacgcatactaagactcatagagatcatctatatacagcagtacgaacgtccgattagcacagatcgagagactatacgcataatgcatagcacggactacatgaatngatgatacagantactacatcgacgagctctcatgaagcgaagtgatgatgcacgacgagagcattcagacgacgcatgatatgatatgagagtatatgcacacacatgagatgt

SEQ ID NO: 11276 - DNA, 565 bp, Glycine max
  misc_feature (391)..(391): n is a, c, g, or t
  misc_feature (429)..(429): n is a, c, g, or t
  Coding DNA Sequence Number=SeqID_1497
gaagacgcaagctctgttggacagtccagtcccggcgtgtctagaaacaagataagtcgcgtaagcatggcgtaacgagcacgcgcacctcaaataatatgttgtgatggcgaaatatatctctcttaacatatagcactctatgcgagtcgacatactcgatcttctagcttcacgaagcaaagacactcaaatgttatactgaccgcggtgtgataacgcgcgtatagcgtatgtgtgttatagttcccccgctaggtgagaaggagatatctccacgactcacatgacgatcgcgcagccgacgaagcatagtacgagagtagtgacacacaactcatgtcgtgtcgtactcgtgacgagaagcgtatatctctcacgatggagcganaaccctgatacaaatagctgcgcactgcgagtctgcgncgtgtataacacgagacacccgaacacacaggagagacacatcatgcacctatgtgacgatatgttgcatagtataccctcatcaccagtcatcatgaagctccacagcgcgtgtataacaacagaccgtcgtgct

SEQ ID NO: 11277 - DNA, 492 bp, Glycine max
  misc_feature (401)..(401): n is a, c, g, or t
  Coding DNA Sequence Number=SeqID_1498
ctcgttgtcgtgttcgggctgattagtcgcggtatacctttcatctcaaaatatatatagctctgtgttcggctcaggaccacggacacgtcagtgcgcgccagcctcttactagtcccacatacaggagccgataacgaacgcgatagcacaatcgatattatacgcatacgacgcatgtgagcaaatgaggtacgaagtatctcgcgcgttggtatgtagggagtgagtagatagtgtgtggcacttcggacagtacacaagagagccaagattcagtgtccaggtacgtcgtcttaaataacataccacaaatacaagataggggacggcgcgtgtgtgtatggcggaggccggaagaggattataaccaaccatataacagccctcacacctgcggnccgcttttctgcgttatgcgatctacgtatattgtaaatcgccttcttatcggattacttaagattcttgttattatctacgaggtcgcgt

SEQ ID NO: 11278 - DNA, 557 bp, Glycine max
  misc_feature (54)..(54): n is a, c, g, or t
  misc_feature (61)..(61): n is a, c, g, or t
  misc_feature (63)..(63): n is a, c, g, or t
  misc_feature (72)..(72): n is a, c, g, or t
  misc_feature (131)..(131): n is a, c, g, or t
  misc_feature (165)..(165): n is a, c, g, or t
  misc_feature (190)..(190): n is a, c, g, or t
  misc_feature (215)..(215): n is a, c, g, or t
  misc_feature (232)..(232): n is a, c, g, or t
  misc_feature (272)..(272): n is a, c, g, or t
  misc_feature (318)..(318): n is a, c, g, or t
  misc_feature (321)..(321): n is a, c, g, or t
  misc_feature (323)..(323): n is a, c, g, or t
  misc_feature (356)..(356): n is a, c, g, or t
  misc_feature (379)..(379): n is a, c, g, or t
  misc_feature (381)..(381): n is a, c, g, or t
  misc_feature (439)..(439): n is a, c, g, or t
  misc_feature (498)..(498): n is a, c, g, or t
  misc_feature (519)..(520): n is a, c, g, or t
  Coding DNA Sequence Number=SeqID_1499
tgagcgatccgcgaactacgacgattcagtaccgagagctgtatgctcagaganagagacntnagattgtangcgtgagcgctgagcagtggcttactagacaaacgagtgtagctgacgtgggtgtgcanctatacttagaataatcgcacttggaggtgtcancgagaggactgacgactttagctgnattcacgagctataggtaggactcnaccgtgtagtaacatcngcgtagtaatactctctgtatatctcctaataccgactgngtatgtagtgatcgtgaatagagcagacatagcgattcggcttatntangncgtgttgcctgagcgatcgactgatacagcatntgcgatgagcgactgaggctgangntgagatagtcgtcggagtagacgacaagatatatcgagcgagttcgctgcggtgaccngacatgctatatatctactggcgatattagcgttttgatcatctcgtatggtgctggtngtatcttgctcgcttctcgcnngtctgatttatgttatattcactgacagtagagtcgc

SEQ ID NO: 11279 - DNA, 445 bp, Glycine max
  Coding DNA Sequence Number=SeqID_1500
acagctgctagtaattcggctcgcggcccactgaggagctttttttgtgaatgcatcgcctccaaccaaaagaggacacccctttctggatcaatctacggaagacggtacaaaatctggcaggcaaaacaaatctaagcctgctggtgaaggcgcttcagaagccaaagatgcttcaaaatcagagtccactagccactcatgtgctaaccgtcatcaggcagctgttgagacgcaacggcagacgcttaaaaagacgatggacgagcttaatgaggagggagatggccgcgcacccattgtcaagcttggggaggcctcaatggcatgtccattcactgctaagcatgcatctgtggctcccaccactgatataattcgacatggtaggagtaccctagtgacaaccctccagatgttgaaaattctgggactcaattgcctt

SEQ ID NO: 11280 - DNA, 243 bp, Glycine max
  Coding DNA Sequence Number=SeqID_1501
aagaaagaaagcacgtggagactgtgcggagcagctcgagaactggtacctcctcgccggaataactacaaagggttcacgggaaccagttcccggaggtcgaaagagcctcccaaaaacacggaactgatctgggcgaagaaaacgctcgtttacacggccgggaaagaacccctgggagaacctgaaaacctgaataaaggcatgaactgtggctcttcttccccacccagagataccttt

SEQ ID NO: 11281 - DNA, 545 bp, Glycine max
  Coding DNA Sequence Number=SeqID_1502
agttctgggctaacactcaccacttcggctacctcagcgtcatgctctgggtagcgctctacgaccgcgccatcgtcctgcttgcgcgccgcctcacagggcaccaccgcaggttcacccaactggcgcgcatgggcatcggcttcgtcatactcatggtcgccatgcttgccgccggcatgctcggcgccgcgtcgtcgcgcgccatggcatacacgtcatcagcgccgacggggcggagtacgtgccgatgtcgatcttctggtaggtgccacagtacgtggtgttgggggcggcggaggtgttcacgttcatcgggcagatggagttcttctatgaccaggcgccagacgccatgcgcagcgtctgctcagggctctgcaccgcgttcgcgatgggcaactacgcgagctcggcgctcatcagcgtggtggtgcgtgccaccatgaggggcggacggcccgggtggattcccgacgacatcaacgagggccacctagaatacttctgttaagttgggaagcgttcctactcctcgatgagga

SEQ ID NO: 11282 - DNA, 422 bp, Glycine max
  misc_feature (375)..(375): n is a, c, g, or t
  Coding DNA Sequence Number=SeqID_1503
agcgatctgctattatctcgatctgatctgttcgccatggaagagaagaaggcagaatcgacgaacaagaatgttaagaaggcaaatctgttggagcacaactcgatcaagcacatcctcgacgaatccgtctctgacatcgttaagagccgtggatacaaggaggacgtgaggctgagcaacctgaagctgatcttagggacggttatcatcgtggttgctctcgttgctcagttctacaacaagaagtttccggagaacagagactttttgattggatgcatcgcatcgtatgtagtgctgaatggggtgttgcagctgattctgtatactaaggagaagaatgctatattgttcaccaatcctcctgagggntcattcaccagcactggcttggttatgtcttcaaaggctgccgagat

SEQ ID NO: 11283 - DNA, 563 bp, Glycine max
  misc_feature (159)..(159): n is a, c, g, or t
  misc_feature (377)..(377): n is a, c, g, or t
  misc_feature (397)..(397): n is a, c, g, or t
  Coding DNA Sequence Number=SeqID_1504
aatataccacaacactaacgcgaatgtgcggtaaatcagactactgtcaccgcgtgttcgtctatggtgcgcggccgcgcggcgcggacgcacgcgcgcgccgcggatcgtatatatacgccgacgcgaggaacactagaagccgatatccacgaatangggagaaccgcgaatattatataatacgtatagcggggcgacgcatagatgcgatatagatcaatacataaagaccggcggtattagtagatcgagcgtagagcatcgagttcgtctaacatatttatatatatatacacgcagcaacatacaagcatggagcgcgcgaggagtacaattatgctatatatataatatgcagcgcgctgcatacacancaccagcgcctcgtcagatngcgcgcgccactcgccacacgatcctccttcttacacactcactcgtcgttgagatacgcagcatcagaatacatattaaatgcgggtaattgtcacgccgggacacgtggtatggcaacaccgacaacggaaacagatggagaggcacgtttatctgcgcggtac

SEQ ID NO: 11284 - DNA, 456 bp, Glycine max
  misc_feature (50)..(50): n is a, c, g, or t
  misc_feature (207)..(207): n is a, c, g, or t
  misc_feature (212)..(212): n is a, c, g, or t
  misc_feature (243)..(243): n is a, c, g, or t
  misc_feature (365)..(365): n is a, c, g, or t
  misc_feature (405)..(405): n is a, c, g, or t
  misc_feature (424)..(424): n is a, c, g, or t
  Coding DNA Sequence Number=SeqID_1505
atatgagtgacatgcatcggacgagggtatgccactgcacttccttacanatagtcagccacgcctataccatacgcgagagatgacacttactatcccgagacaatgagtatggtagctgctaactcacagactgatgactagtgagatgctgtggtcgatcctattgatgcgtgtattatatgttgtgaacagattgctgtgcantatanatttaatactgcacatataatatcatgttgncggtgatatgatcacagtcatcgtgcgtgtaactgtacgatagcgtggtgtatgtgcgtgatgctgctcattcgacatgagactcctacatgttatcacgactcccatcgctgttgattganctatgagattgtccctgagctgcatgcagcgtgcacgctncgtgtgagccgtgacacanagatagatactcacattgtatgactctgctcc

SEQ ID NO: 11285 - DNA, 522 bp, Glycine max
  Coding DNA Sequence Number=SeqID_1506
gaacgtcagaatgaacatacagcatttatatataaatttgaagctacattactaagcaagtataccggctgtgatggttgtatgaggatggccgagttttcaccaacctatactgaagccaccccaatctcgcctcctccctctatttctctgctgcctttcaccccggtgccggcccctttgtgccttccgccgcttttgctctgatgggtacttccaatcttctattgctcttctctctggtgagtctgtctgctatggccgctcccatgggcggtcttatcggcattatcgtcccctctctccttcgttcagagcggagcgcatcttgccccagcagtcaagggtcctggttcagttccaatctgaaatttcgtgcacccattcgatttgccgccttttcaacaccctcaactgaaacaatctttctggcgctacctcactctttcctcttcatgctctccgcccacgtcgctttgcctttgtgctgtccgaaccttttgctcggtcggtttgaaattg

SEQ ID NO: 11286 - DNA, 596 bp, Glycine max
  Coding DNA Sequence Number=SeqID_1507
gcaacaagtgcgatctcgacggcgagaggcaagtgtcgacacaagagggccagactctggcgcggaactttggctgcaaattcatcgagacttcggcgaaatcccgcatcaacgttgacaacgccttctacgacatcgtccgagaaatccgcagatacaacaaggaaatgtcctcgtacacaggcgcccctggctcaaacggcaacgggccccagaagacgacattcgacacggacgaccaggcggagaagaagggatgctgtggatgcgtggtaatgtaaggatatggaagccactgtcgttgttgtcgttgttgtcgcgcacgctgtcagagagatacctacaccgctgggttcggttacccgccctggccattggcggtgctgcttggtccagcagaagaaaacacgcgatgctgctgttgcgtactgccagtacaccttctcttcgatactgtcactttgggttcgcattacggggtaacggattcacgtctgctggatgcgcctccgaacaccctacttctactactggtatcgactccatctttcctatctggtggcgctcttcgtattcgccttcatcatctatctaga

SEQ ID NO: 11287 - DNA, 130 bp, Glycine max
  misc_feature (31)..(35): n is a, c, g, or t
  Coding DNA Sequence Number=SeqID_1508
ttgcaggtccacataaagcgtctgtaagatnnnnncaacagctgtgtcaaataagacatcattcgtatgcgagataggaagtcgggcatttagtatagtcaaccacaaggttgctcttcggagtaaggtg

SEQ ID NO: 11288 - DNA, 401 bp, Glycine max
  Coding DNA Sequence Number=SeqID_1509
agcgtactagtgtagtctctctcttctcaatctcatctctcttagttgacaaaaaactatcatatgcaaaatggttgaccgggtggacagtaatgaacaatgatgctttctaataagggtttttgttctctcccctttttggtttaaagtttaaactctctagctagcaccgtaacttgaagctgaaatacatagcaagatatttatggttatttgtgaaaattgttcaagggacctctattctctggcgtgtgaatggagttagctagaggaagaagggctggtcccccacctcataaacacataaaacaaaaactctgttctgacaagtgccataatggacctgcctcacacggctcatgcctcaggtttgcgcggtcgtgacctaacattcccgtctc

SEQ ID NO: 11289 - DNA, 544 bp, Glycine max
  misc_feature (105)..(105): n is a, c, g, or t
  misc_feature (111)..(111): n is a, c, g, or t
  misc_feature (323)..(323): n is a, c, g, or t
  misc_feature (364)..(364): n is a, c, g, or t
  misc_feature (399)..(399): n is a, c, g, or t
  misc_feature (476)..(476): n is a, c, g, or t
  misc_feature (512)..(512): n is a, c, g, or t
  Coding DNA Sequence Number=SeqID_1510
acacgatacgacactcacattatgacaatgatatacacggactccgtaacgtacacatatcagagcgcttacatcgaccatcagctcactgcagcgatgtgtaantgtcantatatcatctgtattctgtactcgacgcacaaccacaatgatcctctgtatattactgagactcaccgcgactctgataccgcgatcatcgcactctgttcagatacatcctctacacgatacactaccaatgcttactatcctctagaatcgacaatcaagtctcatccatacctttgatcactaacatcaccgtatacacactccaatcnctctcatcgcatcacttcttctattaccgtcaccacatcgnacctacaaccgtctttctgctcggtcctctatccntatcaaatacctatcatctcggtagttcatcttactattatcactataatggatctgactatcacgaatcgttagtncatgtgaatctctctgtctatatcatcatgcttctntactcatgcactcgacatcattagcacacatg

SEQ ID NO: 11290 - DNA, 413 bp, Glycine max
  Coding DNA Sequence Number=SeqID_1511
aagtcttcgaagagcagccacaacaacaaactcccatctccttctctctctctcgcatctctcctcttttgtttttagggttttcttaaaaacggagaaaagatgttcagaagaggaccttcgagcaagagcgacaacaccaagttctacgagatcctcggcgtccccaagaccgcctcacctgaagatctcaaaaaggcttacaagaaagccgccatcaaaaaccatcccgacaagggtggagatccagaaaagttcaaggagctagctcaggcttatgaggttctcagcgatccggagaagcgtgagatctatgatcagtacggtgaggatgcgctcaaggaaggaatgggtggtggaggcggtggtcatgacccctttgacatcttctcctccttctttggtggtggcgg

SEQ ID NO: 11291 - DNA, 549 bp, Glycine max
  misc_feature (488)..(488): n is a, c, g, or t
  Coding DNA Sequence Number=SeqID_1512
atacgccgtcatatatagtgttctgctacctattagtacaatatacagacttcaacacctgtcctcgcatactaacgctcgtatcctacatatacttctcgaaccctacccgtcctgtcctccgtcgtgacgcataattgctacatattttatatccatccctcttcctcctcctactcctccatctcacaccatcttatctccttcatactgtttactcttctaacattattaaatatcatagacctcttatagtaatacatattcatcctatactatgataaataccttaacctctagttcgttaattgctctaaatagatactctatccacgtgcgctattttattatggtgtggtaaataactacttcatttctctcaccacctctttcttatttcatacctaccttattactcttccccactaattataggagaatgcacccgcccctctcgctatccctctcttgtggaaaaaactttttcncccctcctcctctctctctttcaaaaattcttatttatatttcgttcttgttgtttttgct

SEQ ID NO: 11292 - DNA, 518 bp, Glycine max
  misc_feature (67)..(67): n is a, c, g, or t
  misc_feature (102)..(102): n is a, c, g, or t
  misc_feature (147)..(147): n is a, c, g, or t
  misc_feature (176)..(176): n is a, c, g, or t
  misc_feature (215)..(215): n is a, c, g, or t
  misc_feature (324)..(324): n is a, c, g, or t
  misc_feature (333)..(333): n is a, c, g, or t
  misc_feature (410)..(410): n is a, c, g, or t
  misc_feature (434)..(434): n is a, c, g, or t
  Coding DNA Sequence Number=SeqID_1513
gagatatatcgatcgcgcacgtaaactatgtcgcgagatattacctattatgtctgacggtatacgngtgtctctatatctcccgccgtctacgcgtgcacncctatggcgcttcctctctcttcgcgccgcatatgttctagtcgnatgcagtttctgcgtatggatgtcgagcnatcgtcatatagcaatacaagcgcgccgataatctagtntgcgcgttcgccttcctatctcgctatatacatatcgtatcatattatcgccatggcatacgctgtttgctcggcgagttgccggctaggagataataagcaccatacnacatacgcngtacgtccctcgcgactgatattactgtctatatgctatgtcgcatcaacattatcacgcaagttgacgagcatgtnttacgacacacggtacaccacccnctcacgccgcgcttcgttcctttgctgtgatatgtgcggcgcgacactactcgcgactcaactcacaccgtcttcttggcagat

SEQ ID NO: 11293 - DNA, 402 bp, Glycine max
  Coding DNA Sequence Number=SeqID_1514
atctttggaaagtccgcgaccgtgatccaaaactctctaatcctcatccgaaagggtagccagggacaggcccattacgttacagccgacggtaacgagaaaggtgcagcagtcaagatcggtatcgttcttcagaactgccgtatcatggctgacaaagacctcgaagctgaaaagctaaccaccaaatcgtacctaggacggccgtggaagaaattttccaccaccgtaattattggaactgagattagtgatgtgattaagccagaaggatggtccgaatggaaaggagaagctaaccacaaaaccgctaaatacattgagttcaataaccgtggaccaggagctaacactgctgctagggttccttgggccacgatcgctaagtctgcggctgaggtt

SEQ ID NO: 11294 - DNA, 457 bp, Glycine max
  misc_feature (71)..(71): n is a, c, g, or t
  misc_feature (111)..(111): n is a, c, g, or t
  misc_feature (122)..(122): n is a, c, g, or t
  misc_feature (158)..(158): n is a, c, g, or t
  Coding DNA Sequence Number=SeqID_1515
aaattcactgtaacacatctcgccaccacatcaccggcaatggcgccacccatcgcggcgtacatcacggncttctccccctctcatcacgtcgtctccgccgccgaaaancggtacataancacaactgtcgtggcgcccgccgatgggtctttaanttcaccaccaaacaaacgccaacaaatatcctcttgggtttttaatcaaactttgacttgggggatatttccattttcaaaacaaatccaaccaaaagggggttttaatttttaaaaaaagactatttgtattgggcccccataatttccaaaagggaacttcttgtgaaaaaagggaaaaccggggttttccaaaaaaattaaaaaggttgggccgctggacaaaaatggggcgaaaaaattttttttctccaaacacccgaaaaaagtgaagaggcccaaacagagtttgggtgcaa

SEQ ID NO: 11295 - DNA, 387 bp, Glycine max
  Coding DNA Sequence Number=SeqID_1516
gttcagggtgttttctattgcctcgctttgataatcacgatagctaatcaattgattatttatcatctgctaatttcgcgtcgaacattttaatcaatttgtctaaggtggcatcaccaaccaaagacgccgggttatttccttcaattgtattcatctgataagacgaataaccgcccggagtggtggaaccgttaacgaatttaccgccattgagtaaattagaataaacccattcgttagaatccgtctgcctccctctacgtgcgcccccgcgaaattggcgttccaatttggaaaggggcgcggaaaatagatttttgggaaaatagtttattattcttttgcggttttcgccttatgacaatcctcacacaataactgtaa

SEQ ID NO: 11296 - DNA, 474 bp, Glycine max
  Coding DNA Sequence Number=SeqID_1517
tcacgcgacgcctgatgctgaggtcgctcccttacgtatttctgcgtgcggggcgtgtagaggatgtcacataggcgacgggggcgcgcatcgagagtattcactatatacggcgagaggcggggtagggccagcactgaggcagtcagagctgggaggtaaataaaataagatacaattaatcagagcgtgcgccggtgtagacagccccgtgtgggaaaatcgaacgtcacgtgacagtgcagtgtcgttgtgtagtgcgggcggataagagctgtggatttaatgaggggcgacgaggggcggcgagcgcacagcgccgacgcgcaatgtgtgttgagtgcccctgtcgcaggcgcggacattacatggcatgggatgatagcagcgtcattagtcacggctactttataccgcgcccgcgacgacatcgcgcgccgcgaaccggtcttggttccaataaggtacatgcct

SEQ ID NO: 11297 - DNA, 550 bp, Glycine max
  misc_feature (29)..(29): n is a, c, g, or t
  misc_feature (207)..(207): n is a, c, g, or t
  misc_feature (356)..(356): n is a, c, g, or t
  misc_feature (358)..(358): n is a, c, g, or t
  misc_feature (360)..(360): n is a, c, g, or t
  misc_feature (511)..(511): n is a, c, g, or t
  Coding DNA Sequence Number=SeqID_1518
ctggtgcgtgtagctaattacttacgttncgtctgtgtctgcccctcgaccttgtgcatctcagtctctctcagcgagtatgggcggtgtccgccaacgcgcacggttgtgactgcgggggccgcccactagacagcgtgcgtatagcgtcttagatgtcaccatgtgttacctcctcgcgacacatctcgattctagatccgctcncggcctctccctcgctacgctcactatgtcatcgacacactctgccccctgatgcgacaccgcgccgcatcgatccgccgcgaatgcgcgcgcttcgtctgctactcacaccacacgtgggtgcgcgacgagacgtgtgcgggccaaanangnagagacaacccaggcgcgacataataatactcgcgctaaatactatacacctgtcgtgatatagagaaaagcgcggccgtaccgaccactctcctgcgcgcaacgaaacatgatatatatgtaccagtgccatcccttctgacccggatangacgccgccatcgctcgtccacactctcatgtagataga

SEQ ID NO: 11298 - DNA, 163 bp, Glycine max
  Coding DNA Sequence Number=SeqID_1519
agttcaatacacttactgacttacacgaccacacgtataatctgtagatcgatcgctgttcgtaccaccacaatggagtaccaggggcagcacggccacgccaccgacaaggtggaggagtacggccagcctgtggccgggcacggcggtttcaccggcaggc

SEQ ID NO: 11299 - DNA, 107 bp, Glycine max
  Coding DNA Sequence Number=SeqID_1520
gtattataactgatgctgatgagagaacggaaaatgtctgaggaataggatctgatggtgaacggacttagctacatgatatgataacttgtcagtactctgaatat

SEQ ID NO: 11300 - DNA, 586 bp, Glycine max
  misc_feature (138)..(138): n is a, c, g, or t
  misc_feature (215)..(215): n is a, c, g, or t
  misc_feature (235)..(235): n is a, c, g, or t
  misc_feature (348)..(348): n is a, c, g, or t
  misc_feature (353)..(353): n is a, c, g, or t
  misc_feature (465)..(465): n is a, c, g, or t
  misc_feature (468)..(468): n is a, c, g, or t
  misc_feature (507)..(507): n is a, c, g, or t
  misc_feature (536)..(536): n is a, c, g, or t
  Coding DNA Sequence Number=SeqID_1521
ggatctgacagtcgacgcgtacgaacattatcatcataaacggcgggggtggcgtccgtcgcggctgcatctacagcgatattaaagcgccgctctcgttcatatcatgtgccgcgcgtactgacattactcatttcntattaatctataatatacatgcgtgcgcttatcaagataggtatataaggatcagacaaagttgacaaccgatacanaacgtgttcgagactaacantaacacactatgcctaacacggtagcctacaaggcgtacacatgaattatgcgcggacgacggcgcgcgatataaacatatatatatcgtcgcaccacgtgacacgttgcggngtcgntatacagtataagtagttaggcctcccgtactacatatcagtaacgccagcgtgcaacaatgcgggagcgcgtgtgagtcgggagtggggagtcgacgattgatgtgtgggncgntgatcatatgtatcaggagcgagatgaccgagcgcgcgncactgtgctgcccctgtcgctgctgtatnttctacgctgtatatcatattataggtcctaatcggtacatggcggcggc

SEQ ID NO: 11301 - DNA, 325 bp, Glycine max
  Coding DNA Sequence Number=SeqID_1522
acctagctgtatagcaccatactgccaggcagcgcgtatttaccttcgagttcaatctcactttctcctatctagactactcccattcaagtccatccaataggtattgcttatgtcgcgactaacagcgttccacccagacatctacagcaatggaagaatatgtcttgacattctcaaggagcaatggagcccatccctaaccatttccaaggtccttttgacaatttgctcattgttgacggatcccaaacctgatgatccactcttaccaaaaattgcacacatgtactagactgacagggacaaggatgaagataccgcc

SEQ ID NO: 11302 - DNA, 552 bp, Glycine max
  misc_feature (49)..(49): n is a, c, g, or t
  misc_feature (342)..(342): n is a, c, g, or t
  misc_feature (465)..(465): n is a, c, g, or t
  misc_feature (473)..(473): n is a, c, g, or t
  Coding DNA Sequence Number=SeqID_1523
attccatatgtacatcgtcagcgagacaattagctacgtagcttcgtancagtcattcaggagcacgcatgaaccgagagatcaatcgaactatacgcttcgcatcagtgtctgaagctcgatgccacatatcatcagcatttgacgaactatcaacttcgcacttgaccgtgcacatgagcatccaccaatagtggctccgatatggcatctatcgctatcataactgactcgcagtcataccgtactctcgacaatatataaccatgtgagtatagtacggagacaatacatgagatatggacatatcatactctagtcatctcacccgctctgatcgantctcagacgtctcgacatgccggaacgagatagcgtgaattatcagctactgcgcctggatccgtgctccaactgtcgcatcgtgaaactaacgactcacagagtgatatcaatcagtgtgcnaacatggncgatagagacactgcgatactagcaccgttcagttcaggtgtgcgattcgagtatatgctgtgagctgctatcgctagt

SEQ ID NO: 11303 - DNA, 519 bp, Glycine max
  Coding DNA Sequence Number=SeqID_1524
gctcccgatattctcttgggatctaaaaactactccacctctgtcgacatctggagtatcggctgtatctttgttgaaatgttgaaccaaaagcccctcttccctggaagctctgaacaagatcaattgaagaagatcttcaaaatcatgggaactcccgatgctactaaatggcccggtatcactgatctccctgattggaaggctgaaaactttgaaaagtaccctggtgaatctcttagcaagatctgccctaagcttgatgctgatggtcttgatttacttgacaaaatgttgagatgcaaccctactgaaagaatctccgctaaaactgccttgagccacccattcttcaaggatatccctgagaacctcaagaagttgtacaacaactaagttcactttcagaatttgatctactctttgttgagagaggaactgaactgcagtgttattcaccatcatgatcatattatataaatgggttttttctaaaatctggctgtacaagtctctata

SEQ ID NO: 11304 - DNA, 478 bp, Glycine max
  misc_feature (158)..(158): n is a, c, g, or t
  misc_feature (299)..(299): n is a, c, g, or t
  misc_feature (356)..(356): n is a, c, g, or t
  misc_feature (445)..(445): n is a, c, g, or t
  Coding DNA Sequence Number=SeqID_1525
atatgaatatgactgcgcgcggcgacacataatatatatgtcgcgtattctcgcctacttgcgccgataacacgcgcacgattagttattatctacgcgcgtgcctcatgtcgcgcggcgctatgtgtgcgtacacacacacttatatatttatattnattatgtcccacatatttgtgcgccgctccgcgccggcgcccacgatattatacacggcggtgtcggcgctcgggcgattatgagcacctctagatatgagacgggagtgggggccgagaatatcgataattccggcgatngtctatatccgcgtgcgacatatataaagttgataatgacatcgcgacgcggagtangtagaacgagaattatgcgcggtgagagcatacgctgcgcgagtatatataccaggatatttcgcgcgcgctgtgacgtgtgataacgncggtatatatacgcgctgcgatagagttgtgtt

SEQ ID NO: 11305 - DNA, 492 bp, Glycine max
  misc_feature (29)..(29): n is a, c, g, or t
  misc_feature (65)..(65): n is a, c, g, or t
  misc_feature (265)..(265): n is a, c, g, or t
  misc_feature (385)..(385): n is a, c, g, or t
  misc_feature (465)..(465): n is a, c, g, or t
  Coding DNA Sequence Number=SeqID_1526
atactgctcatattctcactatcacatcntaatcacctatagcgtgagcatgcgccgagtggagncgcggcgacgatcgtgtgcgcgtccggccggatgagaagttaacataatatatctatattgtcctaccagaggcaatatgctagttaatacataagattaacaggtcagacgcctcgcggctaatactgatatgatgtcaatggatgtcgatagagacaaatacataatctacattcacacacacaacaacacggccaantaataactatatgagatggagcgacacaccagacaacaacacgacccgcactatatacatatagcagtacgagagttgaatagatacacaacagagacaatagaagatcacgcgaacaanaacatgggaatctggatgcgtgaccatattcccgcgttgttcgaaactctgtgtgttcgttgcggtgcgatgtatatctngtgtgaactatccgactagtcttatga

SEQ ID NO: 11306 - DNA, 522 bp, Glycine max
  misc_feature (35)..(35): n is a, c, g, or t
  misc_feature (121)..(121): n is a, c, g, or t
  misc_feature (167)..(167): n is a, c, g, or t
  misc_feature (190)..(190): n is a, c, g, or t
  misc_feature (212)..(212): n is a, c, g, or t
  misc_feature (223)..(223): n is a, c, g, or t
  misc_feature (368)..(368): n is a, c, g, or t
  misc_feature (484)..(484): n is a, c, g, or t
  misc_feature (494)..(494): n is a, c, g, or t
  Coding DNA Sequence Number=SeqID_1527
cgcgcatgatgttacagaactgtcatgtataatgntgacggttatgtagtatcgaataagtgaggtgcgaggatggggccgtctagagcatatatgtgggtcatgacagtactattgatgntgcgactgcagtcaataagcaatacacaatagtatatcagagatgngatacagcaatgcatgtgcgtgncgatgtgagagaggatgaccanagcagcccatnagtagatagggctgtgatattcgcagtgtatggtcgtcatctgcgaatagagtgttcgagtcgtataagcatagtgcagtagctctgagaggtgatatatacctgctggtgctagacttgagatgctgtcgagctgatctcgatncgagacatcctaactcgatgatgacataagagggatcacaccactatgcgacgctcgagcgggcgttcatagtgcgtgcggtagtatctcataggacagaataaccatcgcactcnccggacgcgncgtgaagatcacgcgcaggtacacaccc

SEQ ID NO: 11307 - DNA, 462 bp, Glycine max
  Coding DNA Sequence Number=SeqID_1528
tagtagaggacatgccccagttgctggtgcttgggttgctcttcaatatactggttacaacggttatatggataaggctggaaagattattgaagctaccagaagagttgccaagaaaatctctgaaatccctgaacttcaagtcgtcggaaatcctcaattgggatctgttgcttttgtcaccaagactaacaagttgagcatttatgatttggttgataagattggacaaagaggctggaaattagctgccctccaattgcctcctgctgttcatttgtccattaccaactacaatatcggccaaattgaagactttatcgcttctgttaaatggggtgtcactgaacttttgaaggctggcccacccaaggtccaaggagaattagcccaaatttacggttccaatgccaagttacccgagagtataatgcaagatggtgccaaagtcatccttgaagg

SEQ ID NO: 11308 - DNA, 535 bp, Glycine max
  misc_feature (68)..(68): n is a, c, g, or t
  misc_feature (108)..(108): n is a, c, g, or t
  misc_feature (113)..(113): n is a, c, g, or t
  misc_feature (148)..(148): n is a, c, g, or t
  misc_feature (212)..(212): n is a, c, g, or t
  misc_feature (238)..(238): n is a, c, g, or t
  misc_feature (249)..(249): n is a, c, g, or t
  misc_feature (253)..(253): n is a, c, g, or t
  misc_feature (328)..(328): n is a, c, g, or t
  misc_feature (338)..(338): n is a, c, g, or t
  misc_feature (439)..(439): n is a, c, g, or t
  misc_feature (481)..(481): n is a, c, g, or t
  misc_feature (498)..(498): n is a, c, g, or t
  Coding DNA Sequence Number=SeqID_1529
tatcgtctccgtactctatgatcgtgcttatctcggcgcgccgcccctgctgagtacagctacaatancacggacagtaccagtgcgctctgctacactactgatggncgtgngtagtagcccagagaagactaaataatagcaatanatcacagatgtcgtcggatgtattccacgtcataaggtagatagtgtacagatggatagagatnatattgtctgatggacgaagcgggantctgttgcatnatcnacgcgtatctctgacgacttacatatcgagctgcgacgacatatatgataattgatatctgtgttctagtgtccngcatggcagnagtcatgacgcacacgtcatactcatgtggtgcgccgcgtgcagagaggtagtgcatatccactgacacacagaccacataggcacctgctgctagccggncttcgttgcactgatacgcatatatcaatgtgcatctaccangcgctctatcgacagtncgggagcagcgaatagatcgacttcatatcccatgcg

SEQ ID NO: 11309 - DNA, 328 bp, Glycine max
  Coding DNA Sequence Number=SeqID_1530
aagaacgtcagatgatccctttgccaagaaagattggtgtgacaatatagctccttctgttgtttgagtgaaagaggggtggcaacaccctccttctccgtactccggaaccaggatggcttgtgaaggactcacgcttacagtgctcgaggtgtccttggctgatcttcaaggggatgaggatcatgcattcaataagattatgttgagagctgatgatgtgcaagggaagaatgttctgacaaatttctggtgaatggatttcacaacagacaagctgaggtcattggtgcgaaaatggtcatctcttattgattcccatgtggat

SEQ ID NO: 11310 - DNA, 501 bp, Glycine max
  Coding DNA Sequence Number=SeqID_1531
aatattcatcttttacaaattactaccattcaccttgattcaacaaagcagacactcaacagccaccaagcagatttgcttatttgtttatgcaataaattttttatgactagatgtggcaaacggggggggggcctacgtagctgacgtcgagggggggtcccggtacattcttttcgcaaacattcaccccctttttacatgtctgcagtcagctattatatagcaatttgtttttttcttttttgtaaattgtagtcaataatctgtttatagattttgtgtaatgtgtttgagggaaaattagatcattagtgatcgaatgtttttcctcctggatcatctattgtacaggtgatcatttttccatagtttttgtctaaatggtgtttaaaagatcatttacatagtaatttgccaaacaagggagaaatgaaataacacctggtttgatgcataatggattatgtttgaaagtcatcatactgtttatcatctata

SEQ ID NO: 11311 - DNA, 223 bp, Glycine max
  Coding DNA Sequence Number=SeqID_1532
gggcacatatgttccatgtaagacaccccccttaactcccggagacccacctgtcccaaaggcaccttccccccagcaagattcttgccccaacgacactgttaagattgttgtgtgagcagatgtgttaggcctgattaacgtgcaactatggaaggcaccaaaaaccccatgctgcagcctcattcagggttttggtgatcttgaaactgcagtgaggctt

SEQ ID NO: 11312 - DNA, 507 bp, Glycine max
  misc_feature (68)..(68): n is a, c, g, or t
  Coding DNA Sequence Number=SeqID_1533
gcggcaggtttccttttgccttgaactggagtcatgttggtattccccgatatttaaagatttttatntggaatatttttccttttctcagttattccccaacatggagttgctggtgaccgggactcctatcagtacttagttgagagtatccggcgtttcccctcacaggaaaaatttgcatcgatgattgcggatgcagggttccagaaagtagagtatgagaatctagttgggggagtggttgctatccattcagggttaaaaatctgatatattttttaactttcctctcgattattattatgtctaataattcatgcattttttctccaccgtctataagcatggagactgaagatcaaatgtaatgttattagaattcatagagaagatttgagttgtcagaatgtgtactgtaatttcgatagtatggcgtctgcaattttttttacagggactcaagtttttcttgaaacatgtatatacgcctatcatacgaagagt

SEQ ID NO: 11313 - DNA, 480 bp, Glycine max
  Coding DNA Sequence Number=SeqID_1534
aggactgtggtttgttcgaaatctccaagatcggtgatgaatacttcacttacttccttgaatgcaaggctcccaaggcctgtactatcctcttgagaggtgcctcaaaggacgtcctcaatgagctcgaaagaaacctccacgatgctctcgctgtcggcagaaacatcatccaaaaccccagactcgttcccggtggtggtgccatcgaaatggaacttgcccacagactccaagaaaaggcaaagaccattgaaggtctccaacaactccccttgaaggccctctcttatgccttggaagttatccccagaactttggctaccaactgtggtgctgatgtcgttagaatcatcactgaattgagatccaagcacgctggtgaaggtggcaaattctttggtatagacggtaacgccggcaagattgctgatatgagagaagccaacgtttgggaacccgcagttgtcaagatccaaa

SEQ ID NO: 11314 - DNA, 552 bp, Glycine max
  misc_feature (172)..(172): n is a, c, g, or t
  misc_feature (237)..(237): n is a, c, g, or t
  misc_feature (307)..(307): n is a, c, g, or t
  misc_feature (326)..(326): n is a, c, g, or t
  misc_feature (387)..(387): n is a, c, g, or t
  misc_feature (394)..(394): n is a, c, g, or t
  misc_feature (419)..(419): n is a, c, g, or t
  misc_feature (463)..(463): n is a, c, g, or t
  Coding DNA Sequence Number=SeqID_1535
tatcgactgctgtctatcgtataatgacacaccgcatatggtatgcagctccgaggatccagctgcacgcatctgtatctatacccacacacggagagcacactctacgctcaccatccgacactgtaatctgcatatgtgtgcagactctcacatcgacccactcacagtnctactcgcacatcgcacacgcaccgcactcacctctctcgcatcgccccgcgtcgtgtattctgntttgctatcgtcatactgcgtcgctaactactcatatgttatctcagtgatgcctcgctcgcttgatgtnatattatgcgactcgtaangacgcattgtctcaatgtgtatgatgacggcatctgacggcacgtgtaggactagatcgtncgtgctncgatgacgtcatgatgcgctctcantgtgacagtgtgtgatcatcactgcccaagcgagagagatgtantatctgactgacacgaaccacgatagatgatcgtcgagtagcgagagacgagcatatatactagctaccagatatacttcaactcacat

SEQ ID NO: 11315 - DNA, 476 bp, Glycine max
  misc_feature (398)..(398): n is a, c, g, or t
  misc_feature (404)..(404): n is a, c, g, or t
  misc_feature (447)..(447): n is a, c, g, or t
  Coding DNA Sequence Number=SeqID_1536
agggttgtactataaatagctcacaaatactatattatctcattataagatgaatacttcgacatctactctataatatatcctgtctatggtatggtttcagactagaatatcttcagtgagcaagtcgagatggcgctacgtgtagcgatcacgacgccctccgaatatggctgtcttagttgagtagctagacttcatagaatatacatatgactatttaatcatatatatttggatagacagaataaggactaaagaaaggctgacatagagcacattatatctaacatatacatgtatcgtagtgagatgtaagggttgagttctagtgcatcgtagatagctcacactattgatgacatatatctcacgtgtgcgtatctgtgtgtatgtancatacnaatcatggtgctatccccagcgggttgaggcgtgggtgggggngggcggaggccactccacaacgataaagt

SEQ ID NO: 11316 - DNA, 550 bp, Glycine max
  Coding DNA Sequence Number=SeqID_1537
atgagctcgtggcataaacagcattggcagaaaaaccccatccggtgtcgcattctatactgcgaggtgtgtagtttgccccccgaatactggaaattcgcatccgatttcgagaaatgcaaaccctggatgatccaaaacgtccctgacctataccctgatcttctcacagaggcaaatgataatgaagttgataaagttgctgacaaactacacagtaccgctatatcacgagctgccgatgtcgctgcttcctcagcaccgaagcaagaagatgtgacgcgtcttcctgtagtgaagattaagatagatgataaccacgaggttgttattgactacggtgtacgtaacaagcgaaagtgtatcagcactgtgaaaggactgaaactcttcggagttatgctcaccgatgcttccatgagactcgggaaaaagtttgctacaggtatcctccgttctaaggggaccaactgaaaaagaacaaattgctgcttcagggggagataagctaagactcctcggattttccttaaggaaacctgggcctgat

SEQ ID NO: 11317 - DNA, 570 bp, Glycine max
  misc_feature (106)..(106): n is a, c, g, or t
  misc_feature (179)..(179): n is a, c, g, or t
  misc_feature (279)..(279): n is a, c, g, or t
  misc_feature (424)..(424): n is a, c, g, or t
  misc_feature (450)..(450): n is a, c, g, or t
  Coding DNA Sequence Number=SeqID_1538
aggcacacatctctgggtgggcacattcaccccaccccgcgtgacaggttctcctctcattcttcttttggcggcacagaccctccccactccctatatggtgtgnagagtggagtatgcacacagatcgacatctaatctccggcggtgccactatagaatgatgtactgcctctctntatacactgcgtggatgcctatcataacacacttatatctcttcgcccccataccccatacatattcttcacactgccgcacccgttctctcgccactanccactccgcactcaccgcgcgcatcttccgcgcggctctgaactacctattaagagctcactcaccacctctctactacctcacgcacacttcgcaccatctagcgaatgcacgacctcctcacaacgatccaacaccacacaanatacatccacgtgagagattagtaanaaactaatcttatcacgcggctgactctaacgcacgatcttaatgcgagacatctcagaatataacgtatgcgtgcgcgagtggcgtcgctactatactcctcatcatacacacgacata

SEQ ID NO: 11318 - DNA, 572 bp, Glycine max
  misc_feature (156)..(156): n is a, c, g, or t
  misc_feature (180)..(180): n is a, c, g, or t
  misc_feature (399)..(399): n is a, c, g, or t
  Coding DNA Sequence Number=SeqID_1539
gctgccccgataatactgttttgactctagtgttatactagtgagacgaagccgtgtgaggctcggaataatacgcgccatgagtaatacacgcacggcgtcatgcgactcgacccccactctacgacctattatttataacacatcaccggcagnattcctgcgtgtgcgttactagtnatatatattgataacgcgtcggccggggaacgtatacacgccgcggtgcgcgcgggaacacgcgtcgagtgtgtcatagtcggtgcgctagccgcgcttgcgtcgcgacagatattataacatatcaaatattgtgtgtgtaataaaaggcgtgcgtcgcggccgtatgtgttggtgggtaatgaaatatacactcgcgcgggatactgaacgcgtggntacgtgtaatacagatcacttatatgtggtacgaggctgcgtatgtcgtcgtcggtgtttaataatgtgtgtcgatatattattacgcgcgggccgcgcgcagaggatgatcgcgaggagcgtggcattgtggctgcgtgcgcgccgcatccgacgtccgtacgactatgagt

SEQ ID NO: 11319 - DNA, 401 bp, Glycine max
  misc_feature (100)..(100): n is a, c, g, or t
  misc_feature (123)..(123): n is a, c, g, or t
  misc_feature (260)..(260): n is a, c, g, or t
  Coding DNA Sequence Number=SeqID_1540
tagagatcatacacacacgtccatctagacatcacacacagcgagcgaacgcgtcctgcacgcgcgctctgcggccactaactacaccatccatattganacatacacactaatctctatctncctcatctacatatgatgactgtatctaagtaaatatgacatatacatatacaagaaagccgttcgacgcacgaaacgcaggtgaacgatggcgacatgtgcagtcgcagccacagacgagagatggaatacacacntactatgtattgcatatagacgagacgcgatacatacgtacacacactcgagcaatatctgctagactattcagtacacactacgatacgcttatcagagcgggcgatgtctcgatcgattcactgtgtagcgcgctataa

SEQ ID NO: 11320 - DNA, 371 bp, Glycine max
  misc_feature (40)..(40): n is a, c, g, or t
  Coding DNA Sequence Number=SeqID_1541
gggcctcaaaataatgtgtgacatgttcttcctatcatantcaatttttctcagtataagtcatggcgtgttcgttacatggttgctaatcaactatatgagctatgtcaatctttttttcctgaccccaccaagtcagaattggtccctgcatatcttcgtctgctgcgttataatcaggctgaattacgtcttgttgctgcttggaaagtaactaatttttccctcattttaaatccttacctttccatacatcatattctaccattttttaagtgattatcttcaaattcattttaacatgttctctcttcacttacttctgattttatatgaattgcaccacttatatgtaatgtatcttcacttta

SEQ ID NO: 11321 - DNA, 469 bp, Glycine max
  Coding DNA Sequence Number=SeqID_1542
atgcctaaactattatctggagtcttttataaaaatttacattccaaaataaaaacgatccctgcttagatcaagaaagcatcatcaacaagagctttttgtgagatgtttctttctccaaagaatgatctgatccatgcgaaagctttattggtgaaatatgaagcaaagatagcaataaaggtgttcttgaagatcatgtcccacatggtcaggatgacaatatcaaaaatgatcaaagcgaattcatttccatagaagatagtattttggaatccatagccaggatctctgtagaacaagggatttccttggaaagtttcgatatcaattggtggaataccaaagaatctcatagcaggagtcttttctctaataagcttggcactttcgaccttaactccttcaatataaagcttcaaatgttcttgaataacaagtcttcttccttcaagtctagcgtaatcga

SEQ ID NO: 11322 - DNA, 459 bp, Glycine max
  Coding DNA Sequence Number=SeqID_1543
taaaggcatggtgatgtcatctagtacgatgctaacaagtaaggtgaagtatctcaactatggagctctcaaacatgatacgccaccggcagcgtctagtggtggaggaagagtcatgcctcctccgtcgaacaggtaccaccgtggccatcccaagtactacagatgcaggggttgaagtgaaaaatctccggagattaatctgttctcgaattaataaatgaatgataaataagtttggtaagtatatatatttactttccatgcaaaatgtttcaccatgtgcttgtaagttgtaatttctgttgcgaaatatttgatatctaagagaaaaaaataatatgaatgatcatccagtacttatttagtaatttggtcacttggtccgattttagaaagcaatgtattggttctttgctggaaaccgcggaatcaagtacatgacacgcccttagttta

SEQ ID NO: 11323 - DNA, 508 bp, Glycine max
  misc_feature (45)..(46): n is a, c, g, or t
  misc_feature (92)..(96): n is a, c, g, or t
  misc_feature (103)..(103): n is a, c, g, or t
  misc_feature (174)..(174): n is a, c, g, or t
  misc_feature (176)..(176): n is a, c, g, or t
  misc_feature (179)..(179): n is a, c, g, or t
  misc_feature (208)..(208): n is a, c, g, or t
  misc_feature (224)..(224): n is a, c, g, or t
  misc_feature (271)..(271): n is a, c, g, or t
  misc_feature (275)..(275): n is a, c, g, or t
  misc_feature (289)..(289): n is a, c, g, or t
  misc_feature (299)..(305): n is a, c, g, or t
  misc_feature (361)..(361): n is a, c, g, or t
  misc_feature (363)..(366): n is a, c, g, or t
  Coding DNA Sequence Number=SeqID_1544
gttgttgtgttggtctgttttgtcattatggtgcgcgctactttnnacacacgccgacagagagacatagggaccccgaagaaaacaggttnnnnnatatatnacactcacacaccaccagaagacagaccactgtccagactacaaccaacaaaaggagaggtcgcatccacnanaantataaattcacaaggagtgtaataaatantaacaacacagcatanacgctatacagaaagcgaccagagagaggagccacacaagaaacaanaaancgcgatagaacaangaaatcgatnnnnnnngaaacaccccacgcaccgcgcgaccaaccgcccccacgagacacccaccgaccacnannnnttgcggcgccacgagcgagtgttcgagaccctagtgggagagagagagggcggccgaatcaccctgaacaagagagagaaggatgtaggccatcataatggttgaggagtgtagtaagaagaatgaacacgcccacaccaat

SEQ ID NO: 11324 - DNA, 347 bp, Glycine max
  misc_feature (42)..(42): n is a, c, g, or t
  misc_feature (56)..(56): n is a, c, g, or t
  misc_feature (79)..(79): n is a, c, g, or t
  misc_feature (81)..(81): n is a, c, g, or t
  misc_feature (87)..(87): n is a, c, g, or t
  misc_feature (150)..(150): n is a, c, g, or t
  misc_feature (181)..(181): n is a, c, g, or t
  misc_feature (260)..(260): n is a, c, g, or t
  misc_feature (270)..(271): n is a, c, g, or t
  misc_feature (273)..(273): n is a, c, g, or t
  misc_feature (275)..(275): n is a, c, g, or t
  misc_feature (277)..(277): n is a, c, g, or t
  misc_feature (279)..(279): n is a, c, g, or t
  misc_feature (304)..(304): n is a, c, g, or t
  Coding DNA Sequence Number=SeqID_1545
gatcgtatcatgctatctactcgactctcactccatatcgtnttagagtgcgcatnaaggatcacacacagccgatacntnactcantgtcgtgtgctatgcctatacgtcgtgacgttcgttgtgtgtgtgtgcggtcggggcgactcngtcacacactatgtgttcataatacgtgagntagtatagattagtctacctattcactagtggtcttctgactatatcacaatcacaatatcatctcgcacacactcacnctaagagcgnnangngngncgactatctgatagcataaacagtncatactatatagaggatatgcaaggtgtcgcacgcccaaccag

SEQ ID NO: 11325 - DNA, 386 bp, Glycine max
  misc_feature (225)..(225): n is a, c, g, or t
  misc_feature (281)..(281): n is a, c, g, or t
  misc_feature (319)..(319): n is a, c, g, or t
  misc_feature (351)..(351): n is a, c, g, or t
  Coding DNA Sequence Number=SeqID_1546
gggtatccggatttgaatttctctctcaacttaagttaggtccattccaagaagtgggaaccccatttcgtgggaaattaatatatgcgccggccgtgttcgatccatctcggccaatggcccatacccagccttttcgggtgatcccaagccaggatcctctttataaccactgcgtgtgattccagccaattcttgaaagttgaatagttgagagagtggggnttatccacttcccaataaagaggcttgatttcgatcccgaaggagcagagcaaaanccttctttcagcaaatgcatacttgaacaaccccagancaaggagaaggacaaagatgctcctcattttncagatgagaaaacgagaaactgttttggactgaga

SEQ ID NO: 11326 - DNA, 556 bp, Glycine max
  Coding DNA Sequence Number=SeqID_1547
gatcttgccgaacaatgttgcggttattgtggagtgtgagacggatagcaagctcaggacgctggcgaacatcaagttgattattaaggacagtggtggaacggcgacgccttcgagctatctgtttgaaaagaagggacgcatcgtgtttgacaagaaagatggtgtcgggctggacgaggctatggacccagctttggaggcaggcgcgacggacatcgatgtgctggaagacgactgcgtggtcgttttcactgcgccagaggagacgacagctgtcggggaggctgtctccagtgcccttggcttgtcaatcaaaacttcagacatcttctgggaccccaacgaggatactaagacaaccgtgagcgatgatgcagcccaagatctggccgtgttcatggacgctatggtcgaaggcgaatccaccgttcaggctatctcgatgaatgttgcgcaaggagacctaagcatcgaatcctggaaagaactgcaggccagactatcctagggaaacgatgctgcttactagacgggaagccgagtgtaccattac

SEQ ID NO: 11327 - DNA, 555 bp, Glycine max
  Coding DNA Sequence Number=SeqID_1548
gaccaagttacatcacgcgacgatatggtatagagatagaggaagatatcgcgctggtggtcggttagtctgaacaacagcgagtaggtggctagagtgtggccgatatgcgtggtggagaacgggggcacgatcgacctggcgtatgcagacgcatgatgtccgggtcgcagcaaggcgtgaccacttcgcacgccgacattctcggcgacgccgagtgccgatcgtaatcatatttaggtcctgctatccccgcggataagggtgcaatgtctattagatcattccagacgtgtcggcgtgtccggtgtgtctgtttctacagcaaatgccggctacggccggtggtagagctccgtgcgtagtactatattatgctccagatctcgctacagccccgtcgatatgtgccggagtgtgtatcaacgcctcactcttagtaaccatcacactccgttgagagagggtggggggcggaggtcccctcgcgctcacctcacctccgacgaggggggcaccacagcaccccaatatttgattctggctgtcgttcgc

SEQ ID NO: 11328 - DNA, 426 bp, Glycine max
  misc_feature (63)..(64): n is a, c, g, or t
  misc_feature (66)..(69): n is a, c, g, or t
  misc_feature (75)..(75): n is a, c, g, or t
  misc_feature (78)..(78): n is a, c, g, or t
  Coding DNA Sequence Number=SeqID_1549
atcactcaagtatagctctgtaattaatgtgacttcacttacaatttgaaacacgacctgcanncnnnnattcgnaanttttgatgggtgaacgaaacatggcatctcggcaacacaacaagcaagagcttgatgaaagtggcaaggcccggagagactgttgttccgggtggcactggtggcatgagcactggaggcccagcaacaccttgcttgaaggaaggagcaggggagggctaacaaggaagagagcagctggggacagaagggtaccatgaaatgggacgcaaaggagggttgtgcactttggacaaatcatgagaagaacgtgcttaagaggaaggcattgtcatcgaataagtccaagttcaggactggtaataacaagaaccatattcatgaactgaagtaccagtgattaagttg

SEQ ID NO: 11329 - DNA, 441 bp, Glycine max
  misc_feature (35)..(35): n is a, c, g, or t
  misc_feature (114)..(114): n is a, c, g, or t
  misc_feature (152)..(152): n is a, c, g, or t
  misc_feature (212)..(212): n is a, c, g, or t
  misc_feature (324)..(324): n is a, c, g, or t
  misc_feature (388)..(388): n is a, c, g, or t
  Coding DNA Sequence Number=SeqID_1550
ttgtatctctcacactagaatcatgtgaattagangctatctgagagagtcataaacaactcgagacacgagcaacgcagaagactacatgatttcttctcgatctctatacgncttcgatactaaaacataataacaaagaatgatcagantatatatatttcttgtctgtctttggacgtgagtatttcaaatactgaatctaaaatatntatattctgttcttatatgtttgttatgtttgtgcgcctatatataactttgtgcgtgatttacatactacattatgtataggtgatgttgatatgttgagagatcacttcnacacaataaatatacctttatttggtagaatgaggggtggttcgcgctcgcctcttcttctagnccagactcctcatctccagaagggtagtggccctccactgtacatgtatgtgt

SEQ ID NO: 11330 - DNA, 407 bp, Glycine max
  Coding DNA Sequence Number=SeqID_1551
gaacattttgttatcatcgccgtcgtcaagatgccgccggccggagaactccaacatcaatccccatcaaaagacaaacaacccaccgatactcaatctgccgaagcagctgcggcagcgattgccgcggctgcggcggatgcggaagctgcgggattatggacacagatcaaggcggaggctcgccgtgacgctgaggcggagccggcgctagctagctacctttactcgacgattctttctcactcgtctctcgagcgatccatctcgtttcatttgggaaacaagctctgctcatcgacgcttctctccacgcttctatacgatctgttcttgaacacgttcacctccgatccttctctccgcaacgccaccgtcgcggatctccgtgctgctcgtgttcgtga

SEQ ID NO: 11331 - DNA, 346 bp, Glycine max
  Coding DNA Sequence Number=SeqID_1552
gcgatggtctccagcgcccgtagttccggcggcatggctcactcggcttccaacagcgccggaagcgcaggttccccctccggcggcatcgggcccggcaatggggttgcggcggcggccgccacgacctcggcgtcagcgtccacgccggccagcgggagcaccgttgcccgccgcctcaatgatctcgaaattcagggagatgacgcgccatcgtcgcagcccgccgctagcaagaagaaaaagaaaggaacacgcgtagtaggtcccgataaaggtaaccgtggattgcgccaattcagtatgaaagtctgtgagaaagttgaaggcaaagggagaacaacct

SEQ ID NO: 11332 - DNA, 575 bp, Glycine max
  misc_feature (167)..(167): n is a, c, g, or t
  misc_feature (172)..(172): n is a, c, g, or t
  misc_feature (221)..(221): n is a, c, g, or t
  misc_feature (416)..(416): n is a, c, g, or t
  misc_feature (418)..(418): n is a, c, g, or t
  misc_feature (433)..(433): n is a, c, g, or t
  misc_feature (511)..(511): n is a, c, g, or t
  misc_feature (541)..(541): n is a, c, g, or t
  Coding DNA Sequence Number=SeqID_1553
gcgtctttgcacgatcattctggaccctcgtcactacgcttcgcctcccccacagctcgcgcatcgagcacctccgtgccgggtgaccacatgaacgacatataacattaccactgtttacgaagtgaggctgatcagagctttggtagtccgacgcatcgatatcnattanctctcctcctccccagctgcgagcaaacgagaatgctgccgacgccagnagacagtttgcacgtacatcgcagtgtgctatgactcgcagttgtgcggggcacaccgtggctagactctactacatggttgacaggcctccctatcagagatggctgagtgctctcttgtccaggaggctgagcgcatcgctttactgagagtgatagtgagttgctccggtggcagcatatgtcgccgtcgcnangccacggcgtggtgngtatgcgcacgcgtagtcttcattaggtaagacggaacgccgccgcagtcccgtgcgggtggcgaggctgtcagcatnttatgttatatagaatgggagtagacacgncggaacggctgtacgatgcgcagccgattagata

SEQ ID NO: 11333 - DNA, 520 bp, Glycine max
  misc_feature (90)..(90): n is a, c, g, or t
  misc_feature (416)..(416): n is a, c, g, or t
  Coding DNA Sequence Number=SeqID_1554
tacaatccacattagtcaggcctcagacatgtagtgagtctcagccgtctatagtgctgagtaatgagccagacggtgtgtgtactgtgntaagtacacatccacaccccggttgtttctgttcggagcatactgaacagacattttgacactgtcgagatggtgaattgaatgatagcgatagtacagaaccatcagagccacgacaaagtaacacgacggacaggtggtacgactatatagagaaaacaagtgatagaaacatgagagtaggagaaatgcgcccgacagttatcctctctttatatggaagagaaggaccagcgagaagcaatgataaaatgacaagtcggtatattgtgtatagtagagccccccggtggaagaagagtgcgaaacctaagatggtagaaggngaggaagtcacgtaagtgtgcggtgccggtttgggattgaggagttaatttaccatgggcattcatcctgcgtgacgtgcaggtgggtatctgcctagtgttta

SEQ ID NO: 11334 - DNA, 550 bp, Glycine max
  misc_feature (71)..(71): n is a, c, g, or t
  misc_feature (93)..(93): n is a, c, g, or t
  misc_feature (146)..(146): n is a, c, g, or t
  misc_feature (151)..(151): n is a, c, g, or t
  misc_feature (170)..(170): n is a, c, g, or t
  misc_feature (208)..(208): n is a, c, g, or t
  misc_feature (314)..(314): n is a, c, g, or t
  misc_feature (338)..(338): n is a, c, g, or t
  misc_feature (377)..(377): n is a, c, g, or t
  misc_feature (379)..(379): n is a, c, g, or t
  misc_feature (401)..(401): n is a, c, g, or t
  misc_feature (420)..(420): n is a, c, g, or t
  misc_feature (428)..(428): n is a, c, g, or t
  misc_feature (431)..(431): n is a, c, g, or t
  misc_feature (483)..(483): n is a, c, g, or t
  misc_feature (485)..(485): n is a, c, g, or t
  Coding DNA Sequence Number=SeqID_1555
gcagtagcgtctgtgtattagatacgtactgtatatgtcatgctacgtcgtcatctcagataacacgtacngactctacgtcgtcctaatgtncgagcaaatgagacgctgacatacagcagaagcgacgtcgtcgatctcgctantgatnagcgacgatagatatactncaagctcactcatgcatgaaatgactgctactatggantggcacgcacgtttaatagagagagtacaggagcgcgatcgtgactttggtacgatgtctatcgagcgtagtgtgagctacggtgacgtgctgaagacgttcggcngacgaatatatgtgacagcgacgncgtagtcgcacgtgatgctgtacgatgacggagacggcncnaacctgatatagcaatagaganatgacacatgacgcattancggacggnctngacattcgatatgaggcgtatgtctctacagagtacgataacacgtcgtcgnanctacttctgtatgtatcgctaatcgtgtactctgttgacgaacactcactgttagcattgcggta

SEQ ID NO: 11335 - DNA, 212 bp, Glycine max
  misc_feature (165)..(187): n is a, c, g, or t
  Coding DNA Sequence Number=SeqID_1556
tggtacagatggtggcccttcttaaggctcaagatctgagccagatgcaactcttgataatgctaatttacacttacaatattaacttatcaggcatatcattaacaatacatagtgggactcctaagcaacctggaattgcacttagcacgtatatttatgagnnnnnnnnnnnnnnnnnnnnnnnagatctgtcagaaaataactaaggg

SEQ ID NO: 11336 - DNA, 507 bp, Glycine max
  misc_feature (102)..(102): n is a, c, g, or t
  misc_feature (132)..(132): n is a, c, g, or t
  misc_feature (305)..(305): n is a, c, g, or t
  misc_feature (432)..(432): n is a, c, g, or t
  Coding DNA Sequence Number=SeqID_1557
tgtcgcgtgttctcactacagaatatagattacagtaagagaggatcgataagatattatgtatagtagcagcgcgcgacggacataacaagacaggacacnctcaatattatcagcgcgtgaagtgagtanatcctacatacgcgttaatatgctgtaaagtgcctggtatattgttcgataccatttgcgcgagcgaatatgatctagaagataataggagatctacggtccagtcacgttcactgatatgcgacaaatgcagacacgtcggcgtccagtaagcgacgtagatgctagtctgnttgtgtccttcattacatcaactattgcgtctcgtgagactgtctctcgatataagcaacagatacaccgctatattttcttatgtcgagccctctctgttgagtcgtaatccaactaacggtccgngagaatgctcggccgccgccgcaccgcgtccgggtggaggtcgtcgccaggcttctttaaaaggccgactggcag

SEQ ID NO: 11337 - DNA, 535 bp, Glycine max
  misc_feature (29)..(29): n is a, c, g, or t
  misc_feature (106)..(106): n is a, c, g, or t
  misc_feature (127)..(127): n is a, c, g, or t
  misc_feature (199)..(199): n is a, c, g, or t
  misc_feature (204)..(204): n is a, c, g, or t
  misc_feature (210)..(210): n is a, c, g, or t
  misc_feature (305)..(305): n is a, c, g, or t
  misc_feature (326)..(326): n is a, c, g, or t
  misc_feature (374)..(374): n is a, c, g, or t
  misc_feature (419)..(419): n is a, c, g, or t
  misc_feature (435)..(435): n is a, c, g, or t
  misc_feature (437)..(437): n is a, c, g, or t
  misc_feature (442)..(442): n is a, c, g, or t
  misc_feature (447)..(447): n is a, c, g, or t
  misc_feature (486)..(486): n is a, c, g, or t
  misc_feature (488)..(488): n is a, c, g, or t
  misc_feature (508)..(508): n is a, c, g, or t
  Coding DNA Sequence Number=SeqID_1558
tagtgagatagcgatcgcgcaccgcgtcncgttgcgtcgcgcgtgtgatacacgcgttcggtcgtctctcgattcgtattcgcgatgtcgctgtgcttgctctgtnctccgatgtgtcgataatctnatcgctgatagtactagcgcgtcggtgccgtacgctgatgatatcgcacattgcgcgctgcgcgcgagactncgacnctcgtntacacgtcatacacactgtgctactgctatcgtagtggtataccgcgcgcgtgtcgacagataatgcatcgcgacggtgatcgtaattcgagcgngacggacggcacgatgcgcgnctcgtcatgctggtgttaacgcagaacagctcgcgcacttgccgctgnctcacatatgaactcgcgtgcgtgtctacttgctgacgagagttntccgcacgcgcccgcngngatgncaacnatcgcgatagcacggctcgccgcgagctgcgcgatacangntgagcgcgacgcggtgtagntgagctaggttacatgcgtggtgctat

SEQ ID NO: 11338 - DNA, 414 bp, Glycine max
  Coding DNA Sequence Number=SeqID_1559
agatttgacagcaagttcgaccggggaggcagtgtcgggggggggggaatagtcaggctgcgtttggtgcgcgggggggggtaaaggctgccctggagggaagtaaaagcttcgtgccagagcctcgcagggatgaactccaagtatgtgggcgagcagcagcaacggccgccgttcagcgctggccgatacggcgcggtgaccaaggtctatgtgattgtcaatcaggaccagtccatggtcgaggagtaccagaggcagattatcgcaggcatccccgtggctgaggtgagtgagatgtctgacgccgaccacatggccatgctctccgcgccggaggaacttgcgggccacctcgccgacatcgccaacaactacacttgatcgatttgcggagcctacttgtactgttcc

SEQ ID NO: 11339 - DNA, 462 bp, Glycine max
  Coding DNA Sequence Number=SeqID_1560
atgagatggtggctcacctcgatgaggtgaccagtgttgcctgtgatccaaatggactccacttactcactggtagtcatgattgtagcgtcagactgtggaactcttgattctagaacttgtgtacaagaaataacctcacatagagaaaagtttgacgaggcaatatttgatgttacctttcacccttctaaacctttcttcgccagcgccggtgcagatgccttggccaaagtttttatatgaacataagttgttcttctctaatcacaaccatcaacatctacgaaacaagttacaaaaaagattgactattgtaacaccaatcatcaccaattgattcgcgcaaacaaactttttcctgattatttccacttcgtggcgttgataatacttttactctcactttctttcctttctttctgtctttctctctctctcctcactcatattgtcacagtt

SEQ ID NO: 11340 - DNA, 521 bp, Glycine max
  Coding DNA Sequence Number=SeqID_1561
ggtcacaatgttggcttgctaatgggtggtcttatgcctcaagaaagaagtgaaatcttgaactcatttagagaatctaagattaaagtcctgattacaaccaatcttttggcaagaggatttgatcaaagatccattggacttgttatcaacttagacgttcctagacactttggagcagaaaataataaagctgattgcgagacttacttatatagagttggaagaacaggaagatttggagacgtcggattagcaattaacttatattcaaaagaagatgaaaaagacttaatcgatcaagttgaaaagttctacaccgtagaaatcaaggatctttcaaaggaaagtggtgataatgaatttgatttaatcaacgataagcttggaaaagttgtcaagattaatagcaaaaagcgtgaagaaaacagggaaaaaatcgttaaatcctaaacctatctataaaatagttatgcgtttatttcataatatacatgcgtttacgtaaactagtttcatgt

SEQ ID NO: 11341 - DNA, 560 bp, Glycine max
  misc_feature (87)..(87): n is a, c, g, or t
  misc_feature (105)..(105): n is a, c, g, or t
  misc_feature (197)..(197): n is a, c, g, or t
  misc_feature (483)..(483): n is a, c, g, or t
  Coding DNA Sequence Number=SeqID_1562
gtaggcgcgttacgctgcacacatcactctgaggtgtggatagaattaatgaaataggtatgaacaagggacgatgtgtatatcagntctatcatatatatctgncgcctattatatgatgatattttatactgcaaacatctttcagttatgttatattatctgtagtatatacacatagacagatcaataccganaatactaggtgtttactcttctattcaacgctctattgtccggttctcacttgatgagtaggcctatatctttatagaggtgtaaagtccgcgcactactcactatagacgggtaagtcgccatctctctcatcgacggcatactgccaagacacgccgcagagagacataggtgcgtgacagagcaggacgcaccgcggatgtgagggcgtgtgatctcctgatccgtgttgacgagcgatagcgcaatcgcacgtctactcctcctatttcaattgtataatgngataatatatcatatataggaatgagtgtctattaatacgtggataaaatcggcgtcgccagttacgggttgtatat

SEQ ID NO: 11342 - DNA, 338 bp, Glycine max
  Coding DNA Sequence Number=SeqID_1563
tatatattacactcatcatttcatttattgttgtgtatgcaaatcatgacaaacttcggagaagaagcgaataaatataaaaatacagacactctttatatttgatcttggcagcctaaagaaatacaaaaattaaaataagtacataataaatgatagcagtataatttagaccaaaagaagtagaaattgaactttgactgtaaaatacattgaaattcacaagtgcaagttttgtgtcagcttgacagtagtagcatggattgttcggacactagtatcaaagtcctgatgggtcatttgatgtcctatgaagcctacaagtgatcagttttggg

SEQ ID NO: 11343 - DNA, 431 bp, Glycine max
  misc_feature (278)..(278): n is a, c, g, or t
  Coding DNA Sequence Number=SeqID_1564
atcctcgtgtcccagaagaacaatggcgagtccttattgcatattggaatacggaaaaggcaaaggccagaagtgctgcaggtaaagcttgtcgggcgaaatcaacctatatcactaaaaccggatcaaagagctttgcacgtatatttgaagaagagtcacgatctggtgaccctgctcttgagaatccagaaagcccagaagatgattatgcacctgccatgggtgcaaaaaggagggctagtgcacgcacgtatacacctgcgccctcccccaangacctacaggaaaggtcagacccgcaagctgcgagggccaaacgaaaggctggagatgaagtctccacaccgagaaagaaggtggtagtaacagaggaaagtcgccccaaaaactctcaggaaaatgcagtcttggaagctgcgagggctaaa

SEQ ID NO: 11344 - DNA, 266 bp, Glycine max
  misc_feature (129)..(129): n is a, c, g, or t
  Coding DNA Sequence Number=SeqID_1565
agaacgcgtcacacgcagcccaaagaaaagcgacttccagtaaccgggcccattctacagacttccgacttccctacaacaaacggtccgcgggcttcccgacgcgaattacctatttcagaccccgcnccaaacttgccgcgcccaaagccctggccatctaccttcctcgcactcccggccaggccggtccgcctccctcccccaccatttgcataattggttctaaccccaacctcagaaacccattccatctcaacaattct

SEQ ID NO: 11345 - DNA, 491 bp, Glycine max
  misc_feature (56)..(57): n is a, c, g, or t
  misc_feature (89)..(89): n is a, c, g, or t
  misc_feature (162)..(162): n is a, c, g, or t
  misc_feature (224)..(224): n is a, c, g, or t
  misc_feature (235)..(235): n is a, c, g, or t
  misc_feature (259)..(259): n is a, c, g, or t
  misc_feature (329)..(329): n is a, c, g, or t
  misc_feature (384)..(384): n is a, c, g, or t
  Coding DNA Sequence Number=SeqID_1566
tcttcttgtttatttagtgcgccccgcgagtgcggcgcgcgtagtttgtgtgtgtnnctatactcgccagataacgagacgaactatangggcatatccccacccgattatgtcagcacgtttaactcacatatggtagtgagcaagcgttccgacagttgngagtgttacacaacgagtatcgactattctaccggagttgattatatctcacgatatcccanacagtctcacnttgttaggcccgcatgacgcgacngttccctcacttacgatgacatgtctcacgccacgcgacgatatagatgagattgttatgtttctctatnttgactcacatcgtcaacaaatcacgactatatatctacgtacacacattacatntatctcgaagtatataaacacgtttttgacgatccatcacactaccaccagatagggggggtggtgtgcgtgccttctatctttgtttcttgtatcttggtgtgggt

SEQ ID NO: 11346 - DNA, 578 bp, Glycine max
  misc_feature (84)..(84): n is a, c, g, or t
  misc_feature (277)..(277): n is a, c, g, or t
  misc_feature (375)..(375): n is a, c, g, or t
  misc_feature (442)..(442): n is a, c, g, or t
  misc_feature (444)..(444): n is a, c, g, or t
  Coding DNA Sequence Number=SeqID_1567
gcgagacataacaatacgacctgctatctatccttgacacgctagacgcactctgcgcgacccatttcttagcgcctccacacntaaatctctcctaccatcaatctagtatttatacacaccatcctcaccctacatcagcctgtctaaatcgataccttacatcatctacctcccgccctcactctgcccacacatatatagacatgatgacagactctatatgtatatttctgttatatctacactctctttctgaccattacacactatcatnacacccacgcacgcacacacctcgactacacacacgagcacagccaacaccacccgccccccacaccccacgccaccacacctcgcacgacctaccgntcctccaaccacctcagaaggaccagcaataccaaagatgctagattcccacaatacaccgcgcaanantattcccgcctaccctatcttcatcactcaccactaaacacaccgctatctctcttactgcgcccgcgccgcctatttatcgaatacctcccaactcctcacaatataatgtgtctctatatctgcacacccgt

SEQ ID NO: 11347 - DNA, 380 bp, Glycine max
  Coding DNA Sequence Number=SeqID_1568
gactcatcgaaggacagatctcaaaagttcaatgtcagccgccagaatcagtcttccgctccgccgcaagccgagcatccgccgcggcgtcaagattctccaccggacccaagcctacgccgtcatcttctcggcctgcgtttcggatgcctaaacagagccctctttcaaaccgcattttcaggtctccggttgaattgagctgctgcgtggagacgatgctcccttaccacacggccactgcttccgctctgctcaattcgatgctctccgcttctcgccgtggttggatcgtcgaaggtctagacgagactagatgaagatctttcaacaaaaaatgatatggatgactctccttctcaccgttgcagtaaactgga

SEQ ID NO: 11348 - DNA, 163 bp, Glycine max
  Coding DNA Sequence Number=SeqID_1569
tggtggctctactatgaagttggtaatggaagctgttgctgaaagccatgctgacttggtatcctatggtcttctttttatttctcattcagactatggtttatagctcatgctacatgcacctcttacaaagtttaataggatgacattttacaccgaggat

SEQ ID NO: 11349 - DNA, 353 bp, Glycine max
  misc_feature (38)..(38): n is a, c, g, or t
  misc_feature (42)..(42): n is a, c, g, or t
  misc_feature (97)..(98): n is a, c, g, or t
  misc_feature (100)..(100): n is a, c, g, or t
  misc_feature (105)..(105): n is a, c, g, or t
  misc_feature (108)..(109): n is a, c, g, or t
  misc_feature (117)..(117): n is a, c, g, or t
  misc_feature (127)..(127): n is a, c, g, or t
  misc_feature (141)..(141): n is a, c, g, or t
  misc_feature (150)..(150): n is a, c, g, or t
  misc_feature (170)..(170): n is a, c, g, or t
  misc_feature (188)..(188): n is a, c, g, or t
  misc_feature (191)..(191): n is a, c, g, or t
  misc_feature (204)..(204): n is a, c, g, or t
  misc_feature (211)..(211): n is a, c, g, or t
  misc_feature (231)..(231): n is a, c, g, or t
  misc_feature (250)..(250): n is a, c, g, or t
  misc_feature (271)..(271): n is a, c, g, or t
  misc_feature (291)..(291): n is a, c, g, or t
  misc_feature (294)..(294): n is a, c, g, or t
  misc_feature (303)..(303): n is a, c, g, or t
  Coding DNA Sequence Number=SeqID_1570
acatatgtgactgtctattcccgtcactgcgctctaancggncgaagtgatgtacgataactatcgtgtcctgtacacacagtagatatgcaatctnnantatcngannctactatntaccatcgtncagagtactagagnacggatcgngcagctgaccgtgcgtgacngctgcgatcatacgtacntancgtcgtcctacgnctacatngtaagcatgcgtactgtgtngatatcaactaaattactngtctgatgggtcgatgactgntgtcgtagatttagtagtcngantgcgagtgngacgatcgtcgtagtgtcgtacgcagatgcatcataaacactatcgatct

SEQ ID NO: 11350 - DNA, 519 bp, Glycine max
  misc_feature (47)..(47): n is a, c, g, or t
  misc_feature (365)..(365): n is a, c, g, or t
  misc_feature (392)..(392): n is a, c, g, or t
  misc_feature (437)..(437): n is a, c, g, or t
  misc_feature (445)..(445): n is a, c, g, or t
  misc_feature (491)..(491): n is a, c, g, or t
  Coding DNA Sequence Number=SeqID_1571
aatgtggagactctcgtcgagcagcgtctcgctgctgtggcgcgtgntacgctagactctcgagtcgcgtcgcgtgcgctgcgctcttatgtcgagcgcgcagtcgtcgtctgcgctgagagcgagtcgagtccacgcgtgcgcgtaggcatcgatgtgtctgctatgcgatgcatgacatctatagccatcgctatctacagtaaatatgtgtacactcgcgatcacgctgcgagtgtgtgctctgacacaggtgtgtgtacgcgtcggtaatacgctgcacaatagctcatcgtctgatatataaccaccacgctgatcacacagacgatacatgacgcatctagatgagatacatacgctangtgcttgatcggatgagcgtgcgctcnggtcataacgcacctgattagcgcgaatagcgtacccacacaganagatggcncatgactcgtctgtctgtgctcagcactcgatgtacgcgacaatgngcagtgtgtattgctgcgagttgtctgc

SEQ ID NO: 11351 - DNA, 543 bp, Glycine max
  misc_feature (434)..(434): n is a, c, g, or t
  misc_feature (447)..(447): n is a, c, g, or t
  misc_feature (454)..(454): n is a, c, g, or t
  Coding DNA Sequence Number=SeqID_1572
gatcctttggttgggagaaaatatcaattttatacaagatcctctttcctaccttctcttcatttccccctttctggtaatttgttatttacatgaggaagtcttataattcttatgtaggttcggctgataccttacaagcccgactatcttgatgagtctattctatggactgaaagccgtgacttaggagatggccacagagctataaggatggtcgtgatggcactacaatagtcctctgggactggaacaaaggtgataaccagcagtggaagatcttaccttactgatttcaattgacgaaattatcaatggctttgaagatgcatcaagttaagaggatagttggcccttgtatttgagtggtttggtgttgcctagagtatggaatggtgtgtagtgcattagcttgtaccaggcgtcggcttttntcattagattaanttgcgtntgtgtcagtgttatcgctgcatgtgacactgttaatgtgcccgtggccgtagttatattgatattccgttgatgttgtgcgtatgtcta

SEQ ID NO: 11352 - DNA, 308 bp, Glycine max
  Coding DNA Sequence Number=SeqID_1573
gtgggagactttctcgccattcaaaagttattttagtttattcaggggtataagccactcgcaactatccatggctcctgtaagtaaatatgcggccactaatgctggttatagatcataggttaaatgcccttattccagcatcgtcggttcttgaagagaaattaaattctggagatgatccttgcaccgcttttgttctctcctctgaagctgcattggctggagctcagtcaacggtagacatgcaagcacaggtgacaacttattaatgattttaagtgagagaaattttgtggtgtagatgc

SEQ ID NO: 11353 - DNA, 548 bp, Glycine max
  misc_feature (456)..(456): n is a, c, g, or t
  misc_feature (465)..(465): n is a, c, g, or t
  misc_feature (468)..(468): n is a, c, g, or t
  misc_feature (472)..(472): n is a, c, g, or t
  misc_feature (475)..(475): n is a, c, g, or t
  misc_feature (479)..(480): n is a, c, g, or t
  misc_feature (495)..(495): n is a, c, g, or t
  misc_feature (497)..(498): n is a, c, g, or t
  misc_feature (509)..(509): n is a, c, g, or t
  misc_feature (511)..(512): n is a, c, g, or t
  Coding DNA Sequence Number=SeqID_1574
agctcctctaagtttttgctccaaggactaaggactaaggactaatacctagcagcttttcacaagaaggatctattaagcaggctaacttaaagataatgactagatcaagagcctatacaagcagttaaaagcccttaataatgataagaaatggaagagctcgagtttttggtcgccaagacacctaataattaacaagagattgacagcatcaagctcggcctccccggctttgctcaatcggctcggagcttccttccaagttaataataataagacgggcaaataagactaattgttgttggctagaagtcagattaagtgagagtttagtgtttactaagatgtagatggctatattaatatagttagtctgtatataagatagttatatactagcaatatataaccgtccatatactgcataatgactatattatattgaattgaacngatgagacnggngacnggngatnngggacccccggaccnanncctcggacccngnnccagatgggtcagactcagaccgacccagggcaaga

SEQ ID NO: 11354 - DNA, 450 bp, Glycine max
  Coding DNA Sequence Number=SeqID_1575
ttcgccgatgtttcacatgcccagacaacatgaagggaaggttcatgtttctgtcggggctcctttgtgccacttttcatgtctccttctctattatcgacgggttagttgccaacgggagctttgagttgggtccaaagccctgcggcctaaaaggaacagtggtggtgggcggtatccactcgatcccagaatgggagatctgcggctttgtggagggcatgaaatgcgcccaaaagcaaggggacatgttgctcgtcgtgccagagggtgcctacgcggtgcgcctagggaacgaggcctgcatgaagcagagaatcaaggcgatcaagggcatgtactactggatcaccttgatgggggctcgcgcgggtggccaagaggagaggctgaacattgccgggactgctggattgggggggatggctattgggactttgggcacgagga

SEQ ID NO: 11355 - DNA, 320 bp, Glycine max
  Coding DNA Sequence Number=SeqID_1576
ctcgatggccgtgtttattttttcggacccgccgtcgaccgggctgttcaacccggttctgcaagacactctgaaacagctggtggcgcttctgaaagacaacaaatcgacgctcactatgaacccgtacccgttcttcacttaccagaacgacccaaaatccgagacgctggggttttgcctcttccaggccaactcgaggcggatcaactcaagccacgagaagcttgtcccaaacatgttcaatgctcaggactatgcggtacattctgctttgaacgccaagacgttcgcggaccctgagattgtggctgattaca

SEQ ID NO: 11356 - DNA, 249 bp, Glycine max
  Coding DNA Sequence Number=SeqID_1577
gctgcagaggagttgttgactattctacaagcaacaatatttagaggttgttcaaaaggtttatgatatgagggggccacaggttccagtattaacaaatttgtcaaatataaatgcttaggaaaaagcaaaagaaaatgatgtcccaatgccaaaaattgaacataatgtaacgttaatagtttggttgcctgaggctgacatccaatagattgattcatattagatgagcgagataaatactaaact

SEQ ID NO: 11357 - DNA, 571 bp, Glycine max
  misc_feature (204)..(204): n is a, c, g, or t
  misc_feature (466)..(466): n is a, c, g, or t
  misc_feature (515)..(515): n is a, c, g, or t
  misc_feature (517)..(521): n is a, c, g, or t
  Coding DNA Sequence Number=SeqID_1578
gtgcgagagctcagtactactagtatagaatcctaagtcatacgcttcgtcaggccccggtcaaggattgcaagaacgcaagtggtctcactgtcacacacacttctcagtcttctcgctgtatacggagagaacaacaatacctccccgaaccgtctcgactctcatacagctgcgagataatgcgttacataaatctatatnaacacaatagtcgggagggacatcagcaaatacgaacagggtcagccgggtggagacagcgccgcacacagagaggggacgagttataataggcgtattttatgtagccgtactacacagctggaaagagcgcgcgggagtgctctgcgtggtgtatcatagctatctctctcacgtgtatggagagcagagagggggagaagaggcgtttatacaagagagcaaggctgtcgcacaccccacccgacagaaacggagcgancccgggggagcgcacagcgtcacctcacgaccattattctcgcagtgtngnnnnnggtagacatgttggtgtgcgtcgctgagctcgtcacagtaattcatcaat

SEQ ID NO: 11358 - DNA, 297 bp, Glycine max
  Coding DNA Sequence Number=SeqID_1579
agaaagccgccgtcgtcaatcaattcatcgagaatcactacaaaaactatcttcaacgattgcaggatctcaaagacagacgcatagcgctttatataaaaatgcatgactctcatatatcggctgaggagcaggaggaaatgatgaggaacttgtagcgccgagaaactgcgtacatgaggcgtcgagagacgtaaaattggaatggatgacttcgacccttatacggagaaagaacaaggtcctttcaaggagaataggagagtggattctcgccatcatggcagagatttttgc

SEQ ID NO: 11359 - DNA, 166 bp, Glycine max
  Coding DNA Sequence Number=SeqID_1580
gcaaacaactgaatccctaggagcacccgccctgaagataaatcctgacagttactccattgcggtgctcctcctagggacagccctcatcctggcttttcctttgacaaagggctttatcaagacgaagctgaatgctagaggcaccttgtctgccattgctcca

SEQ ID NO: 11360 - DNA, 519 bp, Glycine max
  misc_feature (32)..(32): n is a, c, g, or t
  misc_feature (153)..(153): n is a, c, g, or t
  misc_feature (223)..(223): n is a, c, g, or t
  misc_feature (255)..(255): n is a, c, g, or t
  misc_feature (275)..(275): n is a, c, g, or t
  misc_feature (356)..(356): n is a, c, g, or t
  misc_feature (381)..(381): n is a, c, g, or t
  misc_feature (386)..(387): n is a, c, g, or t
  misc_feature (401)..(401): n is a, c, g, or t
  misc_feature (407)..(407): n is a, c, g, or t
  misc_feature (412)..(412): n is a, c, g, or t
  misc_feature (422)..(422): n is a, c, g, or t
  misc_feature (432)..(435): n is a, c, g, or t
  misc_feature (439)..(439): n is a, c, g, or t
  misc_feature (454)..(454): n is a, c, g, or t
  misc_feature (469)..(469): n is a, c, g, or t
  Coding DNA Sequence Number=SeqID_1581
gttcttcttaatacgtatctacttactatacntctatccataagtcatcgattggtcgtgtgtgtggtgcgcgtcagcgactgatcagatacctcatcacttcgtctcctgttatcgatcctactctctcgttcgtctatgtcttcgcctcgntagtgttttgtggggtgtcgtgtaatacatgcatgtgtatatggtaagtattgtgagaggtattagtatntgtagagaatgagtgtgtggtctatctatgtnttattatatatatatgacantaataatgataatatgagtatgaagcgtgcgtatgcagagatatgtgacgtcatcatcgataatactgtagtagaataatncacgtgtatcagatacaacttattntatannaatataataacacncgctanacacnacatatcacntcctccgtgnnnngcgnggttgcgctctcctncacctttatattctntgctctctgccactcgctctgcagcactcaacacaatccctctgaagaca

SEQ ID NO: 11361 - DNA, 154 bp, Glycine max
  Coding DNA Sequence Number=SeqID_1582
gggatgcactttggtgccacacattggttatggttgatacaggaagacccgccactatctccgtaatggttttaggaaatttggtgttcacagtgagaaggacttggaactgctcatgatgcacgacaggacttactgggctgagatgggccag

SEQ ID NO: 11362 - DNA, 511 bp, Glycine max
  misc_feature (71)..(71): n is a, c, g, or t
  misc_feature (85)..(85): n is a, c, g, or t
  misc_feature (168)..(168): n is a, c, g, or t
  misc_feature (253)..(253): n is a, c, g, or t
  misc_feature (290)..(290): n is a, c, g, or t
  misc_feature (339)..(339): n is a, c, g, or t
  misc_feature (444)..(444): n is a, c, g, or t
  misc_feature (466)..(466): n is a, c, g, or t
  Coding DNA Sequence Number=SeqID_1583
cgatctcttgcgtcaactactatgataatgacgcgcgcagctgtgtctttcgtcgccagactaccgccctntatagtctacactntacgagctgatgaatacgcgtgtctgacgcgtggtatctaacctcaccataactagcgacggtgcgtgcgcgctcaactcatntgaatatgtacaacaatatattctgtcgtcccaatcacttctccccacatatgaccgcccgcacgccacgcatacatatagccgngcctgccagattagtaacgcataccactcacagagtnagaatgatggtgtgccgcgcactgcgccgcacatatgtcgcgtatatgnacacgccgaacctcgagaaatgaaatcgtgatacaagaaacttggatacgggacgaatgtagtctgaccagacggcggtcgctgcgacgggtcggagatacatanagtagtgcgtatgcacatctanttcgctctgatcttcgcgacagtgctgcaatatcacgctgcatga

SEQ ID NO: 11363 - DNA, 481 bp, Glycine max
  Coding DNA Sequence Number=SeqID_1584
gacaggcttgaagactccatcagaagatcaggtgttcaacaaagccaaaaacttgagagacagaatattcccgaacctgcttactatcatgaaaaggacaatgaagagtatggagttcctcctccaagatctgaaatgaaacaagataagcttgaaggttcaatcagaagctctaaagtgcaaggacagaacatacctgaacctgcttattatcatcaagatgaaagtgaggattatggagtccctccaccaaaatctgagaagaagcaagatagacttgatgcctctttgagaggttcgaaagtgcaagcacagaatatacctgaacctgcttattatcaccaagatgaaaatgaggattacggagtccctcctccaagatcaggacaaaatcaacagcaagaccaacttagggcttctttaagaagctcaaagatgcaagggcagaatgttcctgagcctgcttactactatcaagacg

SEQ ID NO: 11364 - DNA, 353 bp, Glycine max
  misc_feature (92)..(93): n is a, c, g, or t
  Coding DNA Sequence Number=SeqID_1585
gtatgaaaagaaggccttggaggttgttggcaaaaggctcaaaaagaacagtgtctctcttgacgtcgtcaattttggagatgatgacgatnnggataagcctctcaaactggaggccctcctttcttctgtcaataacaacgatggtagccacattgttcatgttccttctggtcccaacgccctctctgatgtccttctcagcacacctgtattcactggtgatgagggtgcaagtgggtatgtttctgccgcagctgctgctgctgctgccggtggtgactttgactttggtgttgatccaaatatcgatccagagcttgctctcgcccttcgggtctccatggaagagg

SEQ ID NO: 11365 - DNA, 370 bp, Glycine max
  misc_feature (217)..(217): n is a, c, g, or t
  misc_feature (219)..(219): n is a, c, g, or t
  misc_feature (341)..(341): n is a, c, g, or t
  Coding DNA Sequence Number=SeqID_1586
ttattcgtttagaactttacgctatatacataagacagttagaaacttcgataaactcatacgccgaatatttgaaaataatacgagaatactcataacttgttatttatattccttcacgcttgctcttttatttacaagtgcttgtgagcgtgcttttcagtaccgctgatcataccgtgcttgttgaaagcggtcatataggccttgtcgccananagtcttctggcttcgtgccatctccatctttcttcttcgctgaggttgagtctctccttttcggtcatagccaaatatctggttctttcttcttcagtgagggtgacttggctgtatctggngctgagttctctgaactcaccgatatagg

SEQ ID NO: 11366 - DNA, 482 bp, Glycine max
  misc_feature (62)..(62): n is a, c, g, or t
  misc_feature (96)..(96): n is a, c, g, or t
  misc_feature (137)..(137): n is a, c, g, or t
  misc_feature (159)..(161): n is a, c, g, or t
  misc_feature (200)..(200): n is a, c, g, or t
  misc_feature (260)..(260): n is a, c, g, or t
  misc_feature (272)..(272): n is a, c, g, or t
  misc_feature (276)..(276): n is a, c, g, or t
  misc_feature (364)..(365): n is a, c, g, or t
  misc_feature (427)..(427): n is a, c, g, or t
  misc_feature (429)..(429): n is a, c, g, or t
  misc_feature (434)..(434): n is a, c, g, or t
  misc_feature (436)..(437): n is a, c, g, or t
  misc_feature (447)..(447): n is a, c, g, or t
  Coding DNA Sequence Number=SeqID_1587
ctccgccgcgcgtttataaataatttgcgtacgctcgctcgcactttgtttcactgcccccncgtctacgcgggataatatgggggataggaaccncaccgctcggcgcgcgaagcacccacccgatgttcacaccnaacactctcaattgagtgcgtnnnatcttccgacactgctcaatccgcgcgccacggacggcngagcaacgggcggtatcaattctacttattaggtgggacgttgtcgcgcgagtcacgacnctactcgaaagntgantaagcacacataaaggccggagacaaaccatcgctgcagggagaagtctagtcgccaagatctgtagattcgttatgcttaaagatanntgtttgacttctgtacttcttgacatccgcgagtgagatgctacccacacattaaacaccancnccgcncnnttacagcggnggtgaatgtgtacattcattcacaacaacacacgc

SEQ ID NO: 11367 - DNA, 488 bp, Glycine max
  misc_feature (75)..(75): n is a, c, g, or t
  Coding DNA Sequence Number=SeqID_1588
ctggcgttgattgccgaacagccgtgccacggctacgacctgatccgccagatcgaaggcatgttcgacggtgcntacagcccgagccccggcgtgatctacccgaccctgaccttcctcgaagaaagcgaaatgatcctcggcgacgcggctgccgggaaaaagagctacagcgtgaccgacgccggacgtcagtccctgatcgaacaggccgtggccctcgatggcgtacgcatgcgcatcgatgtcagcaagcgttcgctgcgcggccatgaacggccgctggaaatccacgaggcggtgcacaacctgcgccacgccctgcaactgcacaacggtcgctggagcccggaagaaatccttcgggttcgcgacctgctgaacaacaccgccaaggccatcgtcgatgggccagcatccgctccatcctgctcggagaaaccggaatgaatgcagtcaatcaacaagggattcaccgtgtcatgcac

SEQ ID NO: 11368 - DNA, 458 bp, Glycine max
  Coding DNA Sequence Number=SeqID_1589
agaggaggcaccatgcacaacgcatctctctctgtccatttgctttgtcttgactctctcctcccttctttacttcacatccttcatattccttcttcaccagtctccaaaccctgcaacaagatgaacataggtcaacagcgaaaataaatgggtctataccacggcctaggagaaacttgacgctacctctgggtgtggcatatggcaacacccattgatgactcgccggagtgtgccaccccaactggcagcagaacaggcccaggctaactgactgcgcaatagggcatccgcaagaacgccatcggtggaagggacagcctgatctacgtggcggaccacaaccgcgatgaccatgccgtaaacccgaacccgggaagccttcggcacgccgagatccaagacgagcccttatggataatcttagacagatacatggcgatccagctgaagga

SEQ ID NO: 11369 - DNA, 142 bp, Glycine max
  Coding DNA Sequence Number=SeqID_1590
catcgtaatttttcaactcttcgccaagtgttgattcagcggctccttctttctgaggtgttggaaaacctggtggaaaattcattgccttatctcaagtatatctataaaaagtacagggttcaacacatgatgaatgaga

SEQ ID NO: 11370 - DNA, 515 bp, Glycine max
  Coding DNA Sequence Number=SeqID_1591
ccccagctgcaaaaatcttatatgaagaagatttctcaacaaaggacaagtcttttaaagatttctacaatagatatcttatcccaatgagagaaaaaattgaagaatatgcggaaaagataaacaatatagtgaaagagaaagagctagagttctttaatatgaatgaaattacacaaagattaatcacagacttctccaaagaaaaacgcgaattagaagctacacttcgtgaaagaaatattgctattgctaacctcagagaaacaatcgaaaatcttcagaatagaagtgtgcatagtggaggaaatagtggcagagtccattctcaagataacattgatttaccaagacaagtgaatgcgaataacctgcgagtgaatacatggacaccagataagctttattcattcagagcaaagagcagtgcgaataaagatagcagactacagactatccagaaattgcaaagccagaaattgagacataagaatagctcggaagattcagcaaat

SEQ ID NO: 11371 - DNA, 518 bp, Glycine max
  misc_feature (297)..(297): n is a, c, g, or t
  Coding DNA Sequence Number=SeqID_1592
ttatcttacgacacacctatatccgtacactgaaaaaagcaatacaccacactttacatctcctcatagcatgtgagaacctttcatagcatcactactctcgccctccaccctcggggttgatgtgtgtactagacttctagtcactctataaaacacaaaactccgcggactgatcatctcacggtatcgccacaattacacaaacttcgtgatgtttatccgcctcgtcgcgttgttattggttcaccccccacatgcctaccttcacaatcactgtcactaacgagtgagttngacggcatcacaatgctcatcatataccaagcctaccgcctcgcagttaccctcgcgaggtcacgtcggcgcacactctcttaaattctatatatcgcgctctcatcacatcacgctccttccacgctcctagagacagctgcctctacgaacaatgctatcatatgacatatattagtagatatcaccacgagaagacgcgtaattcatatcgtgaccat

SEQ ID NO: 11372 - DNA, 272 bp, Glycine max
  Coding DNA Sequence Number=SeqID_1593
taatgggtcctgtgatagaaccctatgaagagagggaattccaggtcattattcactttctccggaataatcgtttaacacctcccaaggtggcatttaggactaaagtgtttcatccggacatcaacagcaatggtaacatttgtcttgatatcattaaggagcagtggaaccctgcactcaccatctttaaggaactgctttgaatttgatcaacacagagtgatacaaatccgtatgatcaatttgatccggaaatcgcttatatgtac

SEQ ID NO: 11373 - DNA, 567 bp, Glycine max
  misc_feature (194)..(194): n is a, c, g, or t
  misc_feature (201)..(201): n is a, c, g, or t
  misc_feature (295)..(295): n is a, c, g, or t
  Coding DNA Sequence Number=SeqID_1594
tccccagaaaccctttcaggtatgatttttcgggtacggtgataagcaaaatggaccccccaatgcacttttctgccagaaggtccttgcttacaacctccgtaatagtccgtatcccttcgatatgtcgttcttttccctgtcgtagtagacccctagtccagctccagtgagaccaccaagagaaagctcanccagaanccagcccctccacgacagattttcccagcatcacttttctgatcctgtcctcctccactcccagactctctctctttgccagacccatctttgncagattgatctgaatccaatgctggtttttctccactaacattagcagcagaagcatcagaagaagaagaagaagatagaagccttgggcacaaccccaacgacccatttccataaccttgattcccaacctggtgagggtgatggagtggttgaagatgagaagagaagggtggtaaaagcgtggagggtctgccatggcgaagaaggtgtgagaagagaaggcgcgtggaatagcgaaattggttaaccttgctggatacgatgtacgcc

SEQ ID NO: 11374 - DNA, 525 bp, Glycine max
  misc_feature (309)..(309): n is a, c, g, or t
  misc_feature (423)..(423): n is a, c, g, or t
  misc_feature (430)..(430): n is a, c, g, or t
  Coding DNA Sequence Number=SeqID_1595
ccccacaaattagcttatgtttgagctaaatttagcttatgaataaacttttatatttttttaattttcttaccctagaaataatatggagaagtttatcaaaatagactgtaaccatatgaaactctaaatgttgattaataaacaacactaaaagtacttaagcagcgatgtctttaagtattatcctcaatattagagtttcatttcgataatcggtatgtttctattaaaagttaacatagaataacaaagtaaaactccaattttaattcaagaacaaaatcaaaagcacttagaaacctgtantctaagttttgtgctaattttaaatcctcctatatccttttctttttcctattaatccttgtacttgctaaataaagaaaaaagttaaatgaagtttatatttgatgcaaatgnaaatagncttcagtttgtctcccagattgtcctaaaaggtgttgggttccaatgaattttatactttgggagatgcaaaatggagagagagaaccctgtgag

SEQ ID NO: 11375 - DNA, 573 bp, Glycine max
  misc_feature (35)..(35): n is a, c, g, or t
  misc_feature (85)..(85): n is a, c, g, or t
  misc_feature (542)..(542): n is a, c, g, or t
  Coding DNA Sequence Number=SeqID_1596
taggtcgtatgactcttcgcgtcgacaccttttcncgcggtaatcacgcgtgcgccgactgttttgtatatttatcagacggcgncaggaaagcgcgccgtcagtatcaatatatacccgcgctccgtccaacacctcacactaatatctagtatataacgtgctccagctcacacgccactatcgcacatagcggccggcgatgtagcgcctcggctgtcgtgatatcagcgataggtactgttgactgtttgctatccactcgcgcgcctgtcgctctatgtactgatatatagattagattttctccgtctcgctgctcagcaagtgagcaaacgcgagactgcgctgccgccgtcacgcacacactctaccagttgcggtatccctatgagagcgagagatgtggtcggcaggtggtgcggtcgcgtgcatgacgacgcgccctccagctaaagataggcaagcgcgtatacttgatgcccaacacctacgtaccccccgctgcgcgtaaataccccacttccacctataagcggggnggtctgagatatgcaccctctactctatgag

SEQ ID NO: 11376 - DNA, 479 bp, Glycine max
  misc_feature (130)..(131): n is a, c, g, or t
  misc_feature (166)..(166): n is a, c, g, or t
  misc_feature (168)..(168): n is a, c, g, or t
  Coding DNA Sequence Number=SeqID_1597
taatatcaaaactcacatcgctcagtagactctatcaggtataacatatatagagttcagtgatgataggcgggaggcgcgaaagcgatagagagaaaaaaaaagtataaagatataaataagagagagnngagcgacagagagaagcaggagcgcagaagtagantnattatatactatctgttagaagatgagtaatacatagacgagagtaagagtggtaggaaagtgatagatgattgtgagtttagaggtatctgtcactgatgacaccgtctggttggtctgttattgagttgataacaatatagtatatcatgtttttacaggcagcgttgacatggtagttctgcattggagtggcacattagacattaaagacagcgacttaatacgcgtaaggagaaagagtattacttgtattgaggtagtagaagatgtgtatccgcctacaggcgcccactctaatatatttaatg

SEQ ID NO: 11377 - DNA, 579 bp, Glycine max
  misc_feature (504)..(504): n is a, c, g, or t
  misc_feature (548)..(548): n is a, c, g, or t
  Coding DNA Sequence Number=SeqID_1598
gccgtgtcggtgtttgtgatgttatatgtatagcgctatagtgtggcggtagtagatatgatgcgcaggagcaataacaaaaatagagggcacgcgaaggcgcggcaggtcgtaatggtagggtgggtgggtaggtggataattagttaatgcgttagcgcgcggccgttccacgatcagaaattgcgaatatgaacgacgccataaccgcaccgggcgcgcgctagacccacgcgcccgtctcctggttcgacgcccggcgagcatgcaacgttgcgctcccagtgacccacaccatacgtaacacgggcctcccgccgcacgcgcgcgtcgtcgtagctcgggcggcgcggtgacgtggcgcccaataatatcttctgtatataaaaatatagtgcatcgtcgtcttgactctttccactttcttcccgctttcaattatggagaacaccacgcgagagcagtacgccaccatagtcgtattggtgggaaaaaaatcactcntccctctcccccctcggcctatcacccccccctccaccacaccncctaccttttccgcatattcccctacgaacg

SEQ ID NO: 11378 - DNA, 530 bp, Glycine max
  Coding DNA Sequence Number=SeqID_1599
ccgaacggccgagggcaaggaatcaattaacgaggaaacggaaaaacccccaatttgcaaaaccccttttcccgggggttgggcgatttatttaatcaactggcccgacaggttttccgacttgaaaacgggccgtgagcgccacccaatttatttgagttagctccctcctttggcccccccgggttttcccttttttctttcgggttgttttttttttggaattttgaacggattacaattttcccccgggaacaaaaaataccctggtttcccccaacttgaaatttacccccccttaaggggacaaaaactgggggttccccccggggggggccccttttaaaattatggattccccggggtgcaggaaattttttttttttttttttttttttttttttttttttttttttttttttttttttttttttttttttttttttttttttttttttttttgtgttttattttttttttacaaactaattagtactttttacattcccaaagccattgtaaaggaaaat

SEQ ID NO: 11379 - DNA, 530 bp, Glycine max
  Coding DNA Sequence Number=SeqID_1600
ggctagattatcgtcctcataaggtaggtggtgccacatgacaccagtagttagtactacgactagatttttgagtcgacggggtgatgtttactactggttgtgggcgcacagtggatgaggtggtgaaaaagaggcgacgagtcacgtgccactcagtgtaacactatgttttagtctcaagataataacttcctttcatataataccatgcgaggagatggagacagtaatgtgcacttctggccgtgggtgatcgattggtgccgggcggtggctttatcaatacgatggatccagcgagggcaggctcataatacatagtatcctcgccctggcatgatataatataataataccattcaccttcggagtgtctcgttattagattgtcgtggtcagcggtagagatgataggtaatgaagagtggcccctagcaccttacgcatacatacctcctgtgttgccatgtgtatgtccttccatacagacaagtacaataatatattgattttcagcacctggcgcg

SEQ ID NO: 11380 - DNA, 446 bp, Glycine max
  misc_feature (59)..(59): n is a, c, g, or t
  misc_feature (200)..(200): n is a, c, g, or t
  misc_feature (205)..(205): n is a, c, g, or t
  misc_feature (250)..(250): n is a, c, g, or t
  misc_feature (328)..(328): n is a, c, g, or t
  misc_feature (331)..(331): n is a, c, g, or t
  misc_feature (355)..(355): n is a, c, g, or t
  Coding DNA Sequence Number=SeqID_1601
cgtgtctgcataccccgctatactacacccaataccaatttgtatgatcgtccgggcgngtaatcctttgtgacctcccctcgctcgcttttctaccaaaccaatatattccatgctctgcgcctgtgtgtgttgcccggcgccccgcctactaatcccacccgccacaatataccctagacatgtgtttggaagatganatcangcacacaataccacatacaaagtaccactcggggagcggatgacnaacagactatatgccactcgccccgtgtttatcttgcctgagtcgttgattgtaaagaataatagaagaaagatatanagnatatatatctttctctagtctcgncgcgcgagcgattctctatattattatatatatgcacaacgtcgcaccccctacccttagatcgccgacacccgcccagcttttgtttggg

SEQ ID NO: 11381 - DNA, 569 bp, Glycine max
  Coding DNA Sequence Number=SeqID_1602
aaagactcaccttaccttacagtgctgaagaacctagctgctcaaagatatagatacgtgattttgaaggaaacagaagagaagggtaaaggcaaaattgcaacagggtattatgatactacaaatgtcactgattttattgggcaatttcatgaaggacaacaaagagttggatatataactgtgggtcctgaaggatatgaattgatttatttgatcatctataatcccgagaatatcaaggttcaagaaattttggataatgtgtytgctccaggtgatgaaaaagccttggcagaatttgatattaagaatttcaaaaaaattgttgtaaagaaaatcgatgatatcgagaagaaaattgttattcctgaagctcctcctgttgtcactaaagaaagtgaataattttgaaattggcttgatytgaaraagactggataattttcaaatgaagaaatggttatatcaaaggaataagagagatgatatgatagtaagtttattgattatgaattyttatttgtttaacttattawatatgggtggatttttattccattctgatg

SEQ ID NO: 11382 - DNA, 544 bp, Glycine max
  misc_feature (26)..(26): n is a, c, g, or t
  misc_feature (31)..(31): n is a, c, g, or t
  misc_feature (47)..(47): n is a, c, g, or t
  misc_feature (68)..(68): n is a, c, g, or t
  misc_feature (72)..(72): n is a, c, g, or t
  misc_feature (84)..(84): n is a, c, g, or t
  misc_feature (137)..(137): n is a, c, g, or t
  misc_feature (147)..(147): n is a, c, g, or t
  misc_feature (149)..(149): n is a, c, g, or t
  misc_feature (206)..(206): n is a, c, g, or t
  misc_feature (390)..(390): n is a, c, g, or t
  misc_feature (392)..(392): n is a, c, g, or t
  misc_feature (394)..(394): n is a, c, g, or t
  misc_feature (440)..(440): n is a, c, g, or t
  misc_feature (449)..(449): n is a, c, g, or t
  misc_feature (496)..(496): n is a, c, g, or t
  Coding DNA Sequence Number=SeqID_1603
cgaccttcagtacacactcgatcatnaggtngtgaacgagatgctcnaaattcgttgaactagtgatncganagatgcgtgtgntgtcgtcgtcgcatcgcatgtcatacgtgatacatacctacgacgatatgcgncaggcattgnanatgtatcgcgctaccactcgcagagcttatcgtaagatgtgtctataatgtgctagntctgcactcagcttaagagaatcacggtgaggaagggagtacacggtcaatgatcacatacggacggtgtctgcgagagactagacgcggcgacacacacatgactgtgtgtgtgacgtgacaggagtaggagacggacactactcgagagtgtcgactgctcgtcagctggttactcgttagntntncagacgcactgctatatcgcgctgtgtgtgctagatctctcggtgnagctcgtcntctccgcgacgagcgcgctcatactgctgactcgcggagtgtcgctngatgagcaatactaacatcgtgcagacttacgcctcgtgcgatcacag

SEQ ID NO: 11383 - DNA, 517 bp, Glycine max
  misc_feature (113)..(113): n is a, c, g, or t
  misc_feature (128)..(128): n is a, c, g, or t
  misc_feature (178)..(178): n is a, c, g, or t
  misc_feature (244)..(244): n is a, c, g, or t
  misc_feature (336)..(336): n is a, c, g, or t
  misc_feature (348)..(348): n is a, c, g, or t
  misc_feature (375)..(375): n is a, c, g, or t
  misc_feature (423)..(423): n is a, c, g, or t
  Coding DNA Sequence Number=SeqID_1604
agcgtgtctgtactcacctgatatgctccaactacgtagacgggtgctgtgacgtgacgttgctgctacatgtgttgtgtgagggtctctccatctcgacaatactctcactntgacatgcatgttanctacctgactgtcataactcactgttgtggaacgtgcgctgttgagtgcngacgtgatcgcatagaggacgagatgccacattgcgtcgcggcgtgtggtcgtctgtcgactcgtntgccgcgctagctgagtgatggtgcggtgcactcggtgtgtagcgtcttggcgtcgagcgagtcgcgatatcgtgatcttcgagctgtgccncagtccaactangacgtaaaacgaagcgcacgagcgccnattatgcatgatatacctgcactcttagctcgtggtgtgtctgcgtcntccacggattatagcgccgccacgatatcaactcacacacacagcggacgttcgcagttgttatatcatgtattcttagcttcgatgtatctct

SEQ ID NO: 11384 - DNA, 518 bp, Glycine max
  misc_feature (53)..(53): n is a, c, g, or t
  misc_feature (61)..(61): n is a, c, g, or t
  misc_feature (115)..(115): n is a, c, g, or t
  misc_feature (117)..(117): n is a, c, g, or t
  misc_feature (119)..(119): n is a, c, g, or t
  misc_feature (154)..(154): n is a, c, g, or t
  misc_feature (225)..(225): n is a, c, g, or t
  misc_feature (293)..(293): n is a, c, g, or t
  misc_feature (328)..(328): n is a, c, g, or t
  misc_feature (362)..(362): n is a, c, g, or t
  misc_feature (387)..(387): n is a, c, g, or t
  misc_feature (389)..(389): n is a, c, g, or t
  misc_feature (393)..(393): n is a, c, g, or t
  Coding DNA Sequence Number=SeqID_1605
acaacatacacacggatgcgcagatacactatgacactaaatagtctctctcnttctacantcgatacttgcattatctgtatacgctaaccagcgccctcctgcaccttatatntncngctacttgcctctctggcgttttcatcctctctcnctcctcacacgctcgcggacatatgtgaccaactcatatactcttctgtgtcagcacgcgaacgagcaccngcgcgcgggtgcatgttatgtgaacgcgactcatccacacacgtctcacacgacactacttacgaganagacactgatattccattacacattgatactgtanagattactatgactatcgttgctctatagtaaantatcatcaaagtagcgaatacattnanacancacccggctagcgcagtcagcaatctgccgtactcatcaatcacaacacgctgcccacgcgactctgccgatcaataactgactctctactgcgccatgcgtgactagcacctcactacacatgg

SEQ ID NO: 11385 - DNA, 583 bp, Glycine max
  Coding DNA Sequence Number=SeqID_1606
atttccgttaccaggttggcgccagcatcagccattacaagaatgaagtaatcaaactcaacgatgatcccaatgcaacattgtttggtttcagtacacgtctcccgcccatctccgctactaaaagaggtctgcctattgccggcttctacggttatattgtagatggtgtgatcaaagacgatgcagaagccgccactgcacctaaattcggcacctatacccgtgcaggaacctttaagttcagggatgtgaatggcgatggcgtgatcactgctgccgaccgtaccatactgggtaatccgcatccggatttcacttacggactgaacctgaatgtaggatataagaactgggatctgactgtattcggacagggatcgcagggcaataagatattcaactatgtaagatactggaccgatttcaatacgttccagggtaaccgttccaaagacatcctgtacaattcctggaagaagcagggcgatatagccaaactgccccgcctgaattcaggagatgcgaccagtcagcaagtgtcttcttattttatcgaagacggttcttacatgcgcatcaa

SEQ ID NO: 11386 - DNA, 417 bp, Glycine max
  Coding DNA Sequence Number=SeqID_1607
tcttctttgccggaaactcctttctccctcccgaagcctttccttcttcttcttctcttctatcattccactccctcgccgccccgctcactcccccagacgctgacaccaatgctctccacgcgctcatggaagtcaagatcagagcgaggtcgagaaccatggcggtggctccaagctcgaggtcgaggatggcagaggcgcgctcctcactctgatctccctcgccgattcaacgtcaccatgattggagatttctgatttgggggtggggattttctgattcgggagttaggatttggcttggctacttagagatggtggacttttgttggctgtttggtgccggtgtggtggtgatggtggttcaagtgtcgtggtgatggttcatatggtggctcgttttttatatatata

SEQ ID NO: 11387 - DNA, 542 bp, Glycine max
  misc_feature (234)..(234): n is a, c, g, or t
  Coding DNA Sequence Number=SeqID_1608
tattaatacattagccgcgtggcacaacatatagcataggataatatccgatatcgagctatttgcagcacgtcacgcgcactggtcgcgcggcggcgtctataatctgccccacgttgctataatgtattcatcaactacaataaatttatgagtccgcaccacagccaccgcacccaacacatcgcacaagaggagggagtaacaaattctgtagtcccgacttcctgcaanagaaaatatgtcattcgattacccaggtgtcggggtgtgagatgagtgaccctaatctgtagacgccatactgaagaagagtcttatgacacccctcaaaacacccgacatcttcgggtgcgtgggcgttgttgcgtggctatgcccctttctccagtgcatacatatatcatcctattatttctattagaaacagtgaatatattagacattggagggtcagtcgggcaacctattatcattacacccaatactataaggaggagaatgagacgagcaaaataaccaattcgagatcggacgagaca

SEQ ID NO: 11388 - DNA, 510 bp, Glycine max
  misc_feature (200)..(200): n is a, c, g, or t
  misc_feature (345)..(345): n is a, c, g, or t
  Coding DNA Sequence Number=SeqID_1609
tccttttttgttgcattccctcctgctctctcctcgtcctcctttattcttgttgctttcttatctatatatctgtctgttaccaattaaaactgggtgcgtccgtgctcaccatcaaatattgcgtgtcgtctctgttcctcatactcgtctgtcttgtggtggtatatgacttatttgctaccatcttcctacgtccngatctactctccctcacccacctcacctcctcccatctctcatctacccacccccactctctctcttgatctaactctctctcctgcgctccaccacatcctctcgcgcgctcacactccacttctagctctctatgcacctcgncgacccgctacttcgctcaacgctcagctcgcgctcccttaccctcgcgtcgctgtgtgcctctcccgctatctcgatcacagttctcgtctgctctctctcgcgcgcgctccgagatacatactatcacttgtgccctctctcatttgcgtgtagtgtctgtat

SEQ ID NO: 11389 - DNA, 429 bp, Glycine max
  misc_feature (346)..(346): n is a, c, g, or t
  misc_feature (357)..(357): n is a, c, g, or t
  misc_feature (368)..(368): n is a, c, g, or t
  Coding DNA Sequence Number=SeqID_1610
tagggttttccaaactttctgagtgttatcacgccgtccgtcttcgtcttcgtcttcgtcttctagattcgcattagaagatcatgggtttcgctgcgatttggaactctcatcccaagaagtacgggcctggttcccgcacctgccgtgtttgcggaaactcgcatgggctgattaggaagtatggtcttaactgctgtagacagtgcttccgcagcaacgccaaagaaattggattcatcaagtaccgttaaagaagatccgtggttgtttgagcaggaagagtcatttgcggttttaagttttactttaatcttgtaatggatcttataaatgtttttttagnttcaacaaggnatttaagctgntgaacattttagcttccttggtttatcaaacatcctgattctactaccatttgattatcat

SEQ ID NO: 11390 - DNA, 284 bp, Glycine max
  misc_feature (155)..(155): n is a, c, g, or t
  misc_feature (160)..(160): n is a, c, g, or t
  misc_feature (179)..(179): n is a, c, g, or t
  misc_feature (213)..(213): n is a, c, g, or t
  misc_feature (229)..(229): n is a, c, g, or t
  misc_feature (259)..(259): n is a, c, g, or t
  Coding DNA Sequence Number=SeqID_1611
caaggatcttagataatcatctgatcaatcacaaatcacctatggtagttcaaggaatggctgtttacactttataagcataactctcaaattaaaattgtttgcaacataaaaaaaaaaacatcatatctcataaacaacgacattctatccanaaaanaacgtgaccccaacggatntatataaatggaacaggaaaacaaaaggcgacanaataattcaaaacggnggaaggaacaaacaaaacggaaaaagcgcncgcggacgttattctcggggtcttg

SEQ ID NO: 11391 - DNA, 368 bp, Glycine max
  Coding DNA Sequence Number=SeqID_1612
ttagggtttcttcaccgacaacactctcttactcgctcgctctcgaaaacatgactgcggaattgaaagaggagatcctcgccgccaaattagaggagcagaagatcgatctcgatacacctgaagttgaagacgataatgatgaggatgatgattccgaggatggcgacgagggggatggacatgatgatgatggagagtccggtggtggtcggtctaagcaaagcagaagcgagaagaagagtcgtaaagctatgcttaagcttggcatgaaacccatcactggtgttagccgtgtcaccatcaaaaagagcaagaacatcttgtttgtgatatcgaagcctgacgtgttcaagagcccagcctca

SEQ ID NO: 11392 - DNA, 315 bp, Glycine max
  Coding DNA Sequence Number=SeqID_1613
ggcagagaaaacaccgccctcgcgaagatcccacacgatgaaaaacatggagagggggtggaggaatctaatgaaaccttatatgatgaaggggctaacaagggcgacgcaccggcagtgccagagacgctaaaaaagtacaacaagctgttgtctcttggcatcaagattgaaggcgcgtcaggaagatagcgtgacaaaagggccggaacagaagcaaacctaaagaaggctggcttccacacaggggagcagttaagtctcaaggatccacagcggagcacgccaaatgcacttacagacaaatcagcaaag

SEQ ID NO: 11393 - DNA, 523 bp, Glycine max
  misc_feature (373)..(373): n is a, c, g, or t
  Coding DNA Sequence Number=SeqID_1614
agtatgtgcggcagagcagaagaaagcgggttgagagcgcggcatggttagacgcgcgagcgaatagattccgtcagtggtaattctttatactgttgatagatttatgtttgtatggtaaaatatatcattcgtaggtattaatattctagcaggctgtggaatgtaatggggagtgtgggaagatataaaagagggaggagggggaagtgtagagcgtgtaggatatatcgatgccgcactatgcttattatatcgatggggagcgattggggtgaatagtaacagaataagtagcaacgatgacacgggtaaaagcaaaaagagcgcgacgagataagagagaacgatcggtggatcaaactcgagctgncaccctcttcctatactctaccgttgagataagttatctgttattgtagaaaagaagatttatgatactaccaaattatatttaatggtggatgtgaggggagtgagctcacttatagaggggtgtagggataatagaccggagctgtgt

SEQ ID NO: 11394 - DNA, 409 bp, Glycine max
  Coding DNA Sequence Number=SeqID_1615
agccaaacacgccaaccagacttgttccgacaccaacagaagagcaaatctaacaccctctccggctaaatgctcccttcccgggagcctaacggcaacaacgatggcgcaaaacgtgaatcgtgatcgtcatcactcttttttgctacactctcattttttaatcactcagaatggcggtgtggcgacgaacgctggtgcggcggtggtgaagagggtgctgaagcgctttgaagagcttctgatggtttgaaacaaagcgatagagggaaaagacgcatggtactgaacgcatctagaacctttgttggttcacaacatcgaaatgggactccccgaagcagtaaaggaatttcttggcgatttggtctacgagccttgtgtcgctgcttctttcttgagtttggag

SEQ ID NO: 11395 - DNA, 584 bp, Glycine max
  misc_feature (52)..(52): n is a, c, g, or t
  misc_feature (67)..(67): n is a, c, g, or t
  misc_feature (108)..(108): n is a, c, g, or t
  misc_feature (266)..(266): n is a, c, g, or t
  misc_feature (278)..(278): n is a, c, g, or t
  misc_feature (293)..(293): n is a, c, g, or t
  misc_feature (315)..(315): n is a, c, g, or t
  misc_feature (353)..(353): n is a, c, g, or t
  misc_feature (367)..(367): n is a, c, g, or t
  misc_feature (418)..(418): n is a, c, g, or t
  misc_feature (424)..(424): n is a, c, g, or t
  misc_feature (444)..(444): n is a, c, g, or t
  misc_feature (450)..(450): n is a, c, g, or t
  misc_feature (469)..(469): n is a, c, g, or t
  misc_feature (496)..(496): n is a, c, g, or t
  misc_feature (555)..(555): n is a, c, g, or t
  Coding DNA Sequence Number=SeqID_1616
tgcgtcgcactaccttatcgaatatcgtgcgcacatccttctcgctgctctnattctcatctgtcgntgtcctcgatgcttcatggacctattcgacatgctcggctngtgtgatactctcgcgcactgcgctcatcatcaactgaaacttatactctctggtatcagtgtcgtgatcatatgcttcgctgtcgcacgagctcgcctcgtggcgtgttggctgtgtgctgggttgtatgtgcggttgtgagcgtgtcttgcgtcgncgtcgctgaccncagtctgcatactcnactcatgcacatcctcagcacnctcactggtgcacgtagctcagcatgcgcatatgcagncacgacctacgctntcgctttacgatgtagtagctgggtcgcaggcgcgcctctgagcgcactgngcagtncgtagcgatgtgagaccatnatgacntctagaccagtggctgccntcgatgcgcatgcgtgtccgtgcgacnccgtcgtgcgtcgtcgtcgagacgtttgtctatgtgtgctctcatctcacacgctacgncatcattactccgattctactgacagctc

SEQ ID NO: 11396 - DNA, 441 bp, Glycine max
  misc_feature (34)..(34): n is a, c, g, or t
  misc_feature (109)..(109): n is a, c, g, or t
  Coding DNA Sequence Number=SeqID_1617
gaactacgtttaatcactactacaatacgagaanagttatatacgctatcgatgatatgatgatcgcatattgatacgttacactaactgtatggatgatattaatgantagaacagatatgaaacgatagtcgtgctacatacttatggtcgtacgcataagcgagcattcgcacttgcacgtgtagcgaacgacgacacgctgtgtatagccacagtctgtaatatgtagacggttgactcgggtgtatgagtttatgtgtgtagtcaatgatatattatcataacatcacatcgtaacaacgtaaaatacgctcggctactttaagtctcctgtgtactagacctataatattaaccatgacataatgcagccctcatgccggtaatataatgatatattatcagctcgcgcgaagcacgatccgctactcggacgta

SEQ ID NO: 11397 - DNA, 448 bp, Glycine max
  Coding DNA Sequence Number=SeqID_1618
tttactctagggttctcaagcttccctctccgatccgtttctttctccaagctcaggtcaagatgcaagctgtgattcgttcgtttgtgtccggtggaaatgttgtgagatcatctctgctgcagcatctccgtgtggtcaacccggcgattcagccttccgtgttgtctactcgctctgagtccactcagcctgctcgtatggaggagcatgggttcgagagcacaaccatttctgatgttatgaacgccaaaggcaaaagcgctgatggatcttggctttggtgtaccactgatgactctgtttacgatgctgttaaatccatgacacaacacaatgttggtgccttggtggttgtgaaacctggtgagcaacaatctcttgctggaatcattacagagagagattatctgaggaagatcatagtgcaaggcagatcatccaaatc

SEQ ID NO: 11398 - DNA, 533 bp, Glycine max
  misc_feature (32)..(32): n is a, c, g, or t
  misc_feature (492)..(492): n is a, c, g, or t
  Coding DNA Sequence Number=SeqID_1619
gctaccgtacatgacggactaccgacaagtgncaaatcaatcagcgcagcaatcacacgtccgacacgtcacgcatctcatagtacaactacgcgcatatataatggcccctgcatatatataggtaatcaagtacatatatagattgtagatgcaagcataagtaatgctgagcgatatgagtattagttatttgtagtggtatgtctggtattacttcgctcgtgcgcaggtactagcgcgcatggatattattttatatattatggtcgtaagaggcatataggtgcaagtatatagatatcctaggagtctacagaacatatacacgactgaccgagctacagtacatatgagccatcgtcgcgtgcgctgccctgtgtcacactatcgtgctcttcattgctcactctcatctatacttgggtgtctgtagttattgtagtatgctgagagtcgagaagtatgagtgtatctgggcgtagacgacancaccagtacagtacactatcgccgacagcaatacagaacct

SEQ ID NO: 11399 - DNA, 540 bp, Glycine max
  Coding DNA Sequence Number=SeqID_1620
gtccgcagagatgggcagagcttctctgattccagatggctggatgccttgtcggccatctttgtccttttaagggaacggtgaaaaccttggacgcaaaaccatggctgaagaagattcatgaagctggacccataattcccgtgagtaacaacgctgactctctatcttcccccgagacatgctcccagcgaaagggttcgtgctcggctggacgatgagaggccgcaaccagcgcatcgaggatatagggctgatagaaagggtggaggaatatcctcagggcaaggggcaaggtgaggttttgagatgagaggtcagaaatctcgatctggacctgacgttaagaaagcttacgaaggtggacatatgccgctttataggcgaatacccaaactcagatgaattgcaggaggtatgcatgcggcattgcccaaatatgtccatgaacttctgagagacatagatgatgctcaatttaaggaatgaggatacgcgtatctagagtgactgaaggcgactggtgagattaatccatca

SEQ ID NO: 11400 - DNA, 412 bp, Glycine max
  Coding DNA Sequence Number=SeqID_1621
gtcgcatcttggtggactccggccagcgaggggaagagaagcagccgccgtcgtctcgatctcgggatctctcgtcgccggcgcgcgtggggaggggagctgcggaggggtggttgcgagggaagtgtggtggtggtgtaggaggaggaggaggaggatgagcgagagcgagcagaggccggtgccgaggcgggagagcccgtggggcttgccggagggggacaagcggcagcccaaggcgcaccgctgcaacgaccgcgtcgaggatgtcgtccaggctgcctttgaagggaatccattcaagacagttccaggcccattcaaggtcttttggcaatgcatgcgctcgaaacctggggaggaaccaactgtaccatttacttacctgcagctggatcctccgaagagggta

SEQ ID NO: 11401 - DNA, 250 bp, Glycine max
  Coding DNA Sequence Number=SeqID_1622
tctttcttttgttcgcgcttttccttcttcaaccaccccctaccccgatcttttttttttgggccctcctctccatccctccctctctggtgtcatcagcggggtcccccccgccccctcacaatcaaccaccttctcttcgcccgtcactctttctccccctctcacagtccgccctcccccttcagccccccccctccccctctcgcgcgccataacgcccccgcactcacctatgtgtcgtctcccc

SEQ ID NO: 11402 - DNA, 391 bp, Glycine max
  Coding DNA Sequence Number=SeqID_1623
gaacggatagaactgggtctcttgaatacctaggtgaaggagagggagaattgaggggaaaaggtgccagctgtgatggtggctatggagggtagggctcttggttggtttagaaggtgggaatcttgctcaccattctttcatggaagggtttctaaatagcagtaatgaggccatttcagccttccatgaatagaaactcgtgcattgctgctgggtttgaagctgactatcacagtggagtatttcagggagtgattcaagttgtatgctgacctgctggggtgcaccgaacttattattttttgcatcttctggtgaactgaaattcatgtgaattcttgatctgcagtacacttctgttctttagctcatcgttactactgaagat

SEQ ID NO: 11403 - DNA, 415 bp, Glycine max
  Coding DNA Sequence Number=SeqID_1624
cggtcttccggacggaggcatcctcctgctcctgtcaggactgacactggctggaactctcaccgggctggtggtggcaacaccgatcttcatcatcttcagtccggtgctgattccagacacggtctctattggcctgaacgtggccggagtcatgaagactgcacaatatgctatgactgcgctgctttcatccacgttgattgtgttatacatcaagaagacgcaaacggagacggagaaaatggcagctgatggtaattatcatctcgatgaagtcattcatcacttggtgataaaaaccaaaaaagtagggggcagcacccacgaaggagcgcaggatattcacaacagcgtagaacatacaaggcaattaattgcaacaacatcaatacattccatgggagcaccctgc

SEQ ID NO: 11404 - DNA, 278 bp, Glycine max
  Coding DNA Sequence Number=SeqID_1625
ataccggaggaagggtagaccgcatgagaaggatcggttgtttccgcgaagcgctgctggcctgcgctcctgatcgatgcgcgttcgtcttatgtttggtgcgttgtgtggcttaatcatcttgagaacaagatgctgaggtttctgccgaactttactttcaagtttgtgttctcgtaatattctttcatcagaagcaaaaaataaaaggagcagaaaaaatcaatgactatgtacccgggctcacattacagatttcgcgcaaacaacagttgtta

SEQ ID NO: 11405 - DNA, 212 bp, Glycine max
  Coding DNA Sequence Number=SeqID_1626
ctctctctagggtcttttcatattcggcggtggtgctctcgtcttctcggtttcgaaatggcgaagagaacgaagaaggtaggaatcgtcggcaagtacggaactcgttatggagcgagtatcaggaagcagattaagaagatggaggtcagccagcacagcaagtacttctgtgagttctgcggcaagtacggagtgaagcgaaacgcagt

SEQ ID NO: 11406 - DNA, 590 bp, Glycine max
  Coding DNA Sequence Number=SeqID_1627
gggtataggtcgctcatcttcattctgtgcgcggagaaccacatgtgtagtagtgttcgagtttgctctttcgtaattaacgaccacccctcaaccctttatatcgactaattgtatagagaggttaatgtccacctgtcctgatcacggttattcatgttatgggttttatttcggttggatgcgaaggtcccctctctctccacgtgctagaggtaaaggaaacccgaagactcgctcgcggtttccccttatctctcctgctgatggtccgaactgttcccgtttatatttatacgttccagaaattcgtttcctgcccgcctcccttatgggaagcggcaagtacgtccaacactccattcatattggtagcttctatccaaggctgaacgcctcccctcttggaaccttctgtgcggggaggaaataaacaggaattaaataagaagaaaccaaacaataagtaaaattgtaaattaaacaaatataaataagtaattccctgcagcccccggcgggataccacttagttgctagaggcggccgccccatccgccggtggagctcccagcttttgaacatgtctt

SEQ ID NO: 11407 - DNA, 564 bp, Glycine max
  misc_feature (69)..(69): n is a, c, g, or t
  misc_feature (76)..(76): n is a, c, g, or t
  misc_feature (86)..(86): n is a, c, g, or t
  misc_feature (149)..(149): n is a, c, g, or t
  misc_feature (154)..(154): n is a, c, g, or t
  misc_feature (168)..(168): n is a, c, g, or t
  misc_feature (186)..(186): n is a, c, g, or t
  misc_feature (203)..(203): n is a, c, g, or t
  misc_feature (264)..(264): n is a, c, g, or t
  misc_feature (277)..(277): n is a, c, g, or t
  misc_feature (326)..(326): n is a, c, g, or t
  misc_feature (335)..(335): n is a, c, g, or t
  misc_feature (351)..(351): n is a, c, g, or t
  misc_feature (366)..(366): n is a, c, g, or t
  misc_feature (368)..(368): n is a, c, g, or t
  misc_feature (419)..(419): n is a, c, g, or t
  misc_feature (442)..(442): n is a, c, g, or t
  misc_feature (516)..(516): n is a, c, g, or t
  Coding DNA Sequence Number=SeqID_1628
gagcagtagcgtgcacacgacgcgtgtaatgagatctgagtagagctatcaatgagtgatgtactgtanacagcanacgtcagtancttactgcactgcgttacgcatagacatagacgcagaactgacgagatgtaggaagtagaatngaaantcatgtccgatagntatacactctcaatggtngtcaagatgtatgcgangcccaagatagaacacatagatgagcgacgacacgcagatacatgtgagtcaaagatcgangaacagatctgtntacggtagcatgtagatacacatgtgtgctgcgtacatatagtccatancttatatcntgacgctatacgatanaagcgcaacttatanantatagctgtgcgtgatgacatacgtatatagactattgatgctaacgttanagaaacgaagcagatgatatgcngatacgcacataatgcagtagaagtctcgaatcaacaatgatgaactatcgactgatcgacgatagtgctctancaacgcgtctcagataacggctactgggcacgggcttcatcgtcgtac

SEQ ID NO: 11408 - DNA, 560 bp, Glycine max
  Coding DNA Sequence Number=SeqID_1629
tgaagacccaatgactataagtagaaggtcaagtcccagaaaattctttggactggcagctttaaatacaaaattgaaagaatttgcacaagtaagcagccaaaaccattccgaagcttctagtgctactagtatattgatgctggattgttcccctatcaaaatctaaagttactagaaatgacttttaagattatactcagaaatcatgagttgtgttgcaaaccaaaaatttgaaaactttttatcaaagaccttttcattaacagaaggttagtgtctaatgctggattatttcttgtttttatttgatttaactaactaataaaattttttattaacttaaaattcttaataatagtggcactgagagctaaagagctaaaatcctgtatacctgactctttaagttcgagtgccgctttactctataggtttttatttatcctatattaataactagtagttagtataagtaattagatcttgtactagattctataacatgccagtttttatttacaattctgcatgaacatgtgtgtgttattatcctgaac

SEQ ID NO: 11409 - DNA, 499 bp, Glycine max
  Coding DNA Sequence Number=SeqID_1630
ggctttcccaacaatctccatagtacgggctcgatatgtaatgataacgaggacgcgtcggtggccctcccacagcacagcatatctccggtggattacatagctccggctcatgtggttggtggggatggaggccatagatccggtgtagcacgtcacttctccacatcttaacttcttgtttccattacttaactccaactatagcatcaatggtggctctcaattcccatgacggtgactccgatcaaggatggtgatggtagtgactcatggtggcacacggctaatccccatcgagttatggatcaaacgataggtggtttgtgatgaatggtggcttggcgttgcttctccttctgatggttaaatatttcaagcatctctatcacgacgtccatggtgataaacgatacaacatgaaggttaaggagatggataacgatgatagcacaaggcggtagaacatgatagtggcggctctttcacaatgtggatt

SEQ ID NO: 11410 - DNA, 275 bp, Glycine max
  misc_feature (43)..(45): n is a, c, g, or t
  misc_feature (89)..(89): n is a, c, g, or t
  misc_feature (92)..(92): n is a, c, g, or t
  misc_feature (176)..(176): n is a, c, g, or t
  Coding DNA Sequence Number=SeqID_1631
aagaggttagatggatcgtgacagtaatgatgatggacgtatnnngttttaggagcctttcttgctaccaagagatttgtaggcttgcngangaggattgtcacttctcatcaattccaagatatccgcttttcgtgagagacgtgtatgatatggtggatgatccttcaactgantcagttgtctcgtggagtgatagtggtaagagcttcatcatttggaaggaatctgagttcctaggagatgtttttcctaggtgcttttcctgcgattac

SEQ ID NO: 11411 - DNA, 151 bp, Glycine max
  Coding DNA Sequence Number=SeqID_1632
accatcatcactctggagttttttccacacagcctcgcgatggaggcacttggaacatcaatggtgtggggccccacggtattgcgtccgcaactcagcgccattgagtgctggactgtacgtgtgcgacttagagcaatgagcgttcgat

SEQ ID NO: 11412 - DNA, 551 bp, Glycine max
  misc_feature (29)..(29): n is a, c, g, or t
  misc_feature (99)..(99): n is a, c, g, or t
  misc_feature (107)..(107): n is a, c, g, or t
  misc_feature (162)..(162): n is a, c, g, or t
  misc_feature (173)..(173): n is a, c, g, or t
  misc_feature (245)..(245): n is a, c, g, or t
  misc_feature (257)..(257): n is a, c, g, or t
  misc_feature (378)..(378): n is a, c, g, or t
  Coding DNA Sequence Number=SeqID_1633
gatataatgatctgcttgcgcgcgcgggnagtgagatcgaccagggtgtcgtatgagagaaattgagtgattacggttatgtaggattcaccggcgatncatatgtnagacgtcgctgagagactacgacatgagcatagtgacgacatgtagagatatgangaattatagtnggggctctgattagcatatatattccttcctatagcgagactactgcgtgatcgcttgtgttattacgatgnagattgtatggnaacttacggtctaagacctagtgtgagataaatcgctgtgctataaatgcagatggatggagagattatgtgtttagatgtcgttgtatggatgagccatattgtgcgtagtatatttatnacatactgtagcggtgggtcgaatgaatgattagatagtaaagatatatgtacattgtcagtgtactagagcgcgcgggattggtatacacgagcttagtgtagattagcaggccgcgcctctgacctactggggcggtacgagaagtcgtctaagtcttttgtgtatcgtgt

SEQ ID NO: 11413 - DNA, 592 bp, Glycine max
  misc_feature (453)..(453): n is a, c, g, or t
  misc_feature (527)..(527): n is a, c, g, or t
  Coding DNA Sequence Number=SeqID_1634
ggcacgtgtggagctgacatgctaaacccagctatttcgttgacgttctctcagcgcgctttcacttcccttcatcttcctctccctctctccattccccctcggctcccacatgcctccgtcttctgtctatagaaacgtggtgacggctcgacgacgcgcggaggtggtgcgggtagaggtacgagatagcagatgcgctagacgtaatagatgataggaagacgagatagcgagatctacagacatcacctcacacactaaagattcgtgtcacctcgatggtgcgaagaggcgcgacggcggtgccgcgcgtagagcgcgtgcacgtcatgatatagcaaagggttcggagtattagataagacaacctttacgtacgctcgcagcttcatgtacctcatcacgtacgtctcgtccgcacaccctgatcgtcgtcctccgcgtctgtcngtcttgtcggcgtcgctccatatactcattaaactcctgtatagagttaattgagaaatcctgcgtggcgcctnatgtccgtcctctgccgcgaggtgtcgacacccttgggccgtacgtgtccgctgtttacgactat

SEQ ID NO: 11414 - DNA, 464 bp, Glycine max
  Coding DNA Sequence Number=SeqID_1635
gtcgtttctagggtggtgctcttttggatgagtgctctcgtggtgtctggtattctgtgctcttggtgtatatcgggggcgcagaggcaggacacgcggttcgcgcgtcgcaccagcttctgccgcatatcggccaggctaacgtcggatcctcgtgtgacgagatccatcttctactcgactcatagataaatgggttgcgataaattaaatactaatattaataatctaattacacggccgacgactaacgacattaactatattaatcatcgcagcatcgacaacacagaaacaccaaacagaccagctcaacacataaccacaaaggagaaacgaaagcctatacaacgcgaacttctatacagcgaatagcgtatgtatgccatgtgtcgtgggtataagcgatcaatccttaccataatatcaaaataccaccaaaccttactcccatacatggcggg

SEQ ID NO: 11415 - DNA, 454 bp, Glycine max
  misc_feature (67)..(67): n is a, c, g, or t
  misc_feature (237)..(237): n is a, c, g, or t
  misc_feature (276)..(276): n is a, c, g, or t
  misc_feature (326)..(326): n is a, c, g, or t
  misc_feature (336)..(336): n is a, c, g, or t
  misc_feature (409)..(409): n is a, c, g, or t
  misc_feature (415)..(415): n is a, c, g, or t
  Coding DNA Sequence Number=SeqID_1636
atgaaattagactgtgtccgtctgtctaccactcacacttgccgtagtaacattcttactgcacagncaccatgctacgaaactcattctatatcagaagcgcagactcacgtgtctctaccacgtgtctctatctctctgactgagaacctattcatcaatctcattgcttcttgtctatggcagtgagctgtggctcgtacgttttgtctgctagcgctctcccgacatatgtgncacactcgcatgcagtgcagtattatatgatcgcgtccnacgcgtctacgcctatctgagcaactaacatcgtgacgagtgtgcctatntctatactancaccatgctctctcacactgtatatatgtgagaagttgaatgatgatgtgtgtcgacgtcccgtcacttattntgtacngcgttatacgagactacactgacatattctactgagagc

SEQ ID NO: 11416 - DNA, 550 bp, Glycine max
  misc_feature (279)..(279): n is a, c, g, or t
  misc_feature (283)..(283): n is a, c, g, or t
  misc_feature (323)..(323): n is a, c, g, or t
  misc_feature (421)..(421): n is a, c, g, or t
  misc_feature (513)..(515): n is a, c, g, or t
  misc_feature (519)..(520): n is a, c, g, or t
  Coding DNA Sequence Number=SeqID_1637
acacacacattattaagaagactaatattaatacatctgctacacagctccctctcactcaatcctctcccatacctatctcccccactatacatcatccacaccaatttaatattttgtttgttgtcttgtttattgtttttctgtcttctcccgtctctcttttttctcctttttttgtctgcttctccccccgtgcactcctgtcagaaccgtcacacacccaacgcacacaccacataaacacccccccactcagcaccccagcacaacctcaancccnaactaccccgcccctaacgaacactaaaaagaaacaaaantatatccatacaatatcatttatattttatatttgtataagtaaacgcactctacccttcattttctcattttttcttttttctctttctcgattttntacctgtgtggtcttaggttggttatatttcccgcaccacccacacacaactccatattgtaatccattcaagcgttttttttgttcggggnnngggnngggggtgtgggggcttctcatggtcctacc

SEQ ID NO: 11417 - DNA, 226 bp, Glycine max
  Coding DNA Sequence Number=SeqID_1638
attttttccaatacctagctcacctgaaccgatgtgggttaccctggaggcctttggatagacgcccttgtatggtgaaccggttctgctcagacgatcaaggacttgagagctatggaaatcaaaaatggctcactggccatgcatgctatcatgggtgcatggtctcagaacatctacactgactgcggtcctattgacgacgtctttgcctaccttgcagatg

SEQ ID NO: 11418 - DNA, 583 bp, Glycine max
  misc_feature (202)..(202): n is a, c, g, or t
  Coding DNA Sequence Number=SeqID_1639
aaaagggcattcaggtggcgctttgggcatgaaggtcccgacattggtgtcgatgcccaaggagtggctctgagcccacaggcctggtcagccgcccgcggccgaaggagcatggacctcattcgagctgggtaatcttggtgcatgggagaggagctaatttgtctctgccggatgccgggctgagcaagcgggcgccganagcggcgcgggcgcgggccgaggggggatgtggactggctgatgggcggagcgccccgtcaaggtcataaccttgtatcagcattcccttcaagatcacaacggccatcatcttcgaatacgtaaaatgccaaagattgtttgaggtttcttgcactcatttatgattgtatgagctcttatgctgagttacttttggttgtgtttatttgaggtactggtgtggtagttaaattagtttgtagctgtccataagtaaacagcgtagctgcttaattaggaggtctgaaatgatgaaatagtttgtattgttattgcagaaggtaggttttattcagtatttcattctattgcaatggctgaatttaatgctcatccgctt

SEQ ID NO: 11419 - DNA, 507 bp, Glycine max
  Coding DNA Sequence Number=SeqID_1640
caagcagggttcagagccagctaaggctagtgattaggcacatgtatcaaagtcgtcccattcatggtgcatcctttgtgggtgccattctcaaggactggaatctgttccagtgctggaatattgagtttaaggtaatgtttgtttgcatgatcagtatgcgccaagttcttttccatgctttatgtttcaaaggcactccaggggatggaagtctcattatcatgcagattgcaatgttttctttatgtggattgaattcggaacaagtttccttcatgcatatagagttctatatacacatgacgtctcatggtagaattagcatggttggtctcagttcagactttgtcccacttgttgtggattcgatacatgcacctgtaaccccagttgtctataacatgttgacgacagttttcaccatgttccctagtcccgataggaggacttgccatctgttttgtttaatcattgcctacgtcctctatgcatacgttttatttg

SEQ ID NO: 11420 - DNA, 591 bp, Glycine max
  misc_feature (286)..(286): n is a, c, g, or t
  misc_feature (457)..(457): n is a, c, g, or t
  Coding DNA Sequence Number=SeqID_1641
acacaccgtgcctgtacatatattatattatttatttacttatgttatataagtagaaatcattgtaagttgcggacaactcctccacaatatatatttctgcgtcaattgctctgcgagattcctcgcgcacccttcatttatgcccagcaccgcagtccgcgctgcacgccgtattgcggtggaatataaatatacgcgcgggccgaacaatatatagtgcggctcgtcgccacgtaaaatgattgagaataatataatccgtctcgaagacccgcccgccgcngcctacatatgtataaaatatatatgtgttgtgtataacaacggcgcacgtcttggtacctcgcatactctcattcaaacaaataatacggacgccgtgtgtctcgcgagataacgtcaattagcgagacgtaatatctgatctcgcgccgcgcagacgacgcgcggaganatatagcgagctacagtattcttcagtccccacgcgcgcgcaggatcaagtatagctatacagtgaaccacggctgcgtcgctgtgccgtcgatacgtagactcacactctgtgttctacttgcacgcattaca

SEQ ID NO: 11421 - DNA, 563 bp, Glycine max
  Coding DNA Sequence Number=SeqID_1642
taatccatcgatgttctctccagaactcaatgattttctcgcacaatgcttgcagatagacccaaaaaagaggatgtctgcttcagaactgctaaggcatccttttatgctaaaatataagggagacttatccaatataaggaaacagttctgtcaagaaagactaccaaagatagaagagcataaaaagcatgtaatcactagaggcaaggatgagggttcaaagatcttggatggagactctatggctggagataccgccagaagtagagctaatggggagcaacgctttcaacacccttcacaagatgattatgagaataacagtgttatcgaacacccttcccatataactgaagaagcaaatctaacttgtattgagaaatcaggaatagacttaggtgaaggctctgagctatatcaaaatcaaggcatatatgaaaggcatgcgcctgtatcttctaatcttaagtttgctattcaatatttacaatctacccagccggaaacaaaagaaacagaaaggcattctgataataatcatttgatccttagagaaactg

SEQ ID NO: 11422 - DNA, 482 bp, Glycine max
  misc_feature (78)..(78): n is a, c, g, or t
  misc_feature (126)..(126): n is a, c, g, or t
  misc_feature (190)..(190): n is a, c, g, or t
  misc_feature (228)..(228): n is a, c, g, or t
  misc_feature (304)..(305): n is a, c, g, or t
  misc_feature (315)..(315): n is a, c, g, or t
  misc_feature (346)..(346): n is a, c, g, or t
  misc_feature (360)..(360): n is a, c, g, or t
  Coding DNA Sequence Number=SeqID_1643
ggcagagcacatataacagcgcattgacgacaattaacatagtagagtgagagtgagataggacagtaaagtaaatanagagggtttagatactaaagagtggatgaccagttgtagtattagacnagagagagcgcacatttatagtacaagaacaaagaggcagacgataagatcacacaatacagcnaagaaaaatatatatgtactctgtgtctcgctctctgnctctttcttcttttagtccgtccgcattgcactttcttctctcctccgttcgattcactgggtgtgctgagctccnnattcgtgatngtctgcgtgtggcgcggcctcctacgcgcantgaggtgatgtcancggacagcgcgcgtgcgagcggtgtatgttggacagtttgtattcgcacgtggcaaaacgaacataataaaatgagactcctcccaccatctctctagcgacattacacacctacataatat

SEQ ID NO: 11423 - DNA, 539 bp, Glycine max
  misc_feature (206)..(206): n is a, c, g, or t
  misc_feature (260)..(260): n is a, c, g, or t
  Coding DNA Sequence Number=SeqID_1644
aaagagacgcacgatttacgcacccacgcatatagcagctcacgtattatggagagaatcatgtaggggaccaccgaatatcagccaccagtatactttcttccgcgctcacacttatttgtattgtttagacttcgctggattaggacgtcgcgcacgctctcgttgtgttattaccacgtgcatagatgtggtcgactatgctngtatagatgaacctacgtccgcaccgtcgctgccggaatcacacgatagaaagnccgcgcgtagctgtcacgacccatctcctatacaccactatatattatatataatatgtaagatataagtattatggtatacattagagtaattgtacgtgcatatatatactacgctacacacaagacagataagacaataagcacacaatacatctcactacatatctataccaaccaactcaccaagatgtgtgtatcatgccacctccacctgatattgtatctgaagcgcacgctcgtcgcgcctgtgatgagaggaatacgacaccgcgctcc

SEQ ID NO: 11424 - DNA, 442 bp, Glycine max
  misc_feature (26)..(26): n is a, c, g, or t
  misc_feature (30)..(30): n is a, c, g, or t
  misc_feature (86)..(86): n is a, c, g, or t
  misc_feature (102)..(102): n is a, c, g, or t
  misc_feature (125)..(125): n is a, c, g, or t
  misc_feature (166)..(169): n is a, c, g, or t
  misc_feature (175)..(175): n is a, c, g, or t
  misc_feature (307)..(308): n is a, c, g, or t
  misc_feature (312)..(315): n is a, c, g, or t
  misc_feature (317)..(317): n is a, c, g, or t
  misc_feature (347)..(347): n is a, c, g, or t
  misc_feature (353)..(354): n is a, c, g, or t
  misc_feature (397)..(398): n is a, c, g, or t
  Coding DNA Sequence Number=SeqID_1645
atctctttctagttattctgtcacancatngcagacgatacacacgctacacaatccacagtatacagcattcgccacgatgatantgatccatatcacgtncctccatccagactgcgacatanatcacatctgttagagtcatcaggacagccgctgttgttannnnttcttntatcactacacagcacacatgacaaatcagatatatagacgttcttgttgcgtgctcgccgacactaccagagttgggggtgagagtgccgacagtatgggatacacatcaaactctcctctattcctcctnncttnnnncncctcccccatcaccgcgcgcgcctcgccgntttctnntttttgataatgtgtttgatttctttttctatctatatatatnntgtgtgtggttgtgttgggattatgtgtgtgtgctgtcttgtga

SEQ ID NO: 11425 - DNA, 428 bp, Glycine max
  Coding DNA Sequence Number=SeqID_1646
taaatccctaattccgaagaatctaagctcgatctaaaggttttggagatggcatcgaaacggattttgaaggaattgaaggatcttcagaaggatcctcctacttcctgcagcgcaggacccgctgctgaagacatgtttcattggcaagctacgataatgggtccttccgacagcccatactctggtggtgtgtttcttgtaaccattcatttccctccagattacccctttaaacctcttaaggtggcttttaggacgaaggtgttccacccaaacatcaacagcaatgggagcatctgcctcgacatcttgaaggagcagtggagtcctgcactcactatctccaaggtgctgctatcgatctgttcgttgttaactgatccaaacccggatgatcccttggttccggagatagctcacatgta

SEQ ID NO: 11426 - DNA, 535 bp, Glycine max
  misc_feature (454)..(454): n is a, c, g, or t
  Coding DNA Sequence Number=SeqID_1647
actcatctatgtccgctttatacttacgtcgttcactttattcgctctatcgccgccttagacatccacctggctatccttccacacacccttctgtatcgcactttatgttctttcacctataaccacttaattcatcccttctcctatctctcccctccgccccatagttacatcggtaatcgcgggggtggctacatcttcgatctacgcatatattatatttgcgcgcatatatctgaccagttacacgcagcccgcaccattctatatcccgcgccatatcataatcctaccctaacactatttattattatcacgcctcccgccgccacttttctagcttatgttcgccaacgccagacccacctagataactatattacgctccggtcaaagaacgccctcctccgcactcgcgacgcacacacatgatctctaatctcactgtatncatagtacgccaagaaccctcacactccctcatacataccactatgtgtctacacacatgtgattatacgtctatctccac

SEQ ID NO: 11427 - DNA, 425 bp, Glycine max
  Coding DNA Sequence Number=SeqID_1648
gaaccaaaccttcaccatggtcagcaaggtcgtaatcgtcgccttcgtcgctctgtgctgcgcacaggcgctggctgctcctcgcgaggagaagctggagctggagagcgcaaacctcaacatgaacatcatcaagtgcacgaaatcagtgatcaaggccgttggagttgtgaaggacacactcgccgttgttaaagacttcacgaccatcgtcaagaacggtcaggccgcgaaggctacctgcaagtctaacgaggccgccaccgccgaggagatcgaggcctgcgtcaacgccgccaaaaccgcagagatcaacgagatcttcgctgaggtcaatgttgctgtccagaaggctgcaaccgcttacgaagaaatcaaggacgtcatcgacgagtgcacttaaatctctaatcaccctaattccc

SEQ ID NO: 11428 - DNA, 541 bp, Glycine max
  misc_feature (77)..(77): n is a, c, g, or t
  misc_feature (79)..(79): n is a, c, g, or t
  misc_feature (121)..(121): n is a, c, g, or t
  misc_feature (129)..(129): n is a, c, g, or t
  misc_feature (135)..(137): n is a, c, g, or t
  misc_feature (140)..(140): n is a, c, g, or t
  misc_feature (164)..(164): n is a, c, g, or t
  misc_feature (183)..(183): n is a, c, g, or t
  misc_feature (185)..(185): n is a, c, g, or t
  misc_feature (188)..(188): n is a, c, g, or t
  misc_feature (211)..(211): n is a, c, g, or t
  misc_feature (214)..(214): n is a, c, g, or t
  misc_feature (217)..(218): n is a, c, g, or t
  misc_feature (221)..(222): n is a, c, g, or t
  misc_feature (235)..(238): n is a, c, g, or t
  misc_feature (240)..(240): n is a, c, g, or t
  misc_feature (278)..(278): n is a, c, g, or t
  misc_feature (329)..(329): n is a, c, g, or t
  misc_feature (349)..(349): n is a, c, g, or t
  misc_feature (351)..(351): n is a, c, g, or t
  misc_feature (379)..(379): n is a, c, g, or t
  misc_feature (382)..(382): n is a, c, g, or t
  misc_feature (384)..(384): n is a, c, g, or t
  misc_feature (401)..(401): n is a, c, g, or t
  misc_feature (406)..(406): n is a, c, g, or t
  misc_feature (408)..(411): n is a, c, g, or t
  misc_feature (506)..(506): n is a, c, g, or t
  misc_feature (516)..(516): n is a, c, g, or t
  Coding DNA Sequence Number=SeqID_1649
ggagtcgatgtcatagcgtgactacgagcatcagttagttgaatctactacagtcactacggtcaatgagctgaccncntacagcatcatcacaacagatacgatgacgatcgactactantcgagtanactgcnnncanattcgcgatactaacacagtccgnacaatactcacgtcgtcgntntgngggtaacttcgtgcacactgcgnganggnnggnncgcgatgaatacnnnnanactatttgatgtatgatatagatttcataattcatgangtgtgatgtggtgactgcagcgcagccctctgatatctactatcactcttncttcaacacgcgtggagtcntnatctgcatgatatcatatcagatgtctncgnancagaccacaacagcganctccncnnnnccctccgcttagtctatcatctattctatcgcgcgtcacagcatatgtatcatctgcagataggcatctatgcccagtggcgccgtatcatcacnactactacangcacatcgtctgacatgatgcgtac

SEQ ID NO: 11429 - DNA, 582 bp, Glycine max
  misc_feature (557)..(557): n is a, c, g, or t
  Coding DNA Sequence Number=SeqID_1650
tataatgcctgctcatttctcgtgccccatatccaccacttctaataaagtaagacaattagaggcggcttcgcacattctgttgctcttgccaacgaggtccgcagctaaaggtagcggagacatgtccttgcatcaatcaaactcacaactcggaccttggtcgacggagtgttcgctatctcgcatgcgtgacaccatgtagtttcgcgaataatacgttcaccatctctcgtgcctatccgctccctgtgtgaaatagactgaggtatcagcttatgctaaggtggtccaatatatgaagaaaataagactccgtcacaacggccaagcgtggtgcgcggggtatacgcacctctgacggctcttatatgtggtcactaattgtcgacatgctatctgggttatgtctttcttgttttatatacgaatatacacatacaaaccttcccagacatgttccctggcaggcacgcgcgcgtgatctccttcctaagtcagtagtaggtcgtctcgagcgctggagggcggtgagagacttcctatataattgacgnaactgagccggagcgcgatgattgc

SEQ ID NO: 11430 - DNA, 425 bp, Glycine max
  misc_feature (287)..(287): n is a, c, g, or t
  misc_feature (345)..(345): n is a, c, g, or t
  misc_feature (349)..(349): n is a, c, g, or t
  misc_feature (363)..(363): n is a, c, g, or t
  misc_feature (384)..(384): n is a, c, g, or t
  Coding DNA Sequence Number=SeqID_1651
gacaacgtcaagacctgcatcgccaccgaccaagttatcatcaccgacatcatcactggtgttgaagatatccaaactaaggtcgcttccaaggtccaagaaggtattgccctcatcggtaaggccgtcgaaatcatccccactgccgttcaacaatgcaaggttgctgaagctgatatcaagaccctcatcaagatggtcaactccttcaagaaccccgcctctttcttgtactatgttggcaagagcatcctcatcaacagagttgatgtcttcaaggaggtcancagcgctgtcaaggcttaccaaactggagatttcaccaacttcggatactggatcggnaganctatggacaccatnttcatcggacaaaaggctctncaagtccaagacacccaaaccgatgtcctcaacttcgccag

SEQ ID NO: 11431 - DNA, 359 bp, Glycine max
  misc_feature (39)..(39): n is a, c, g, or t
  Coding DNA Sequence Number=SeqID_1652
gggttcacaattgttgctttaaatcctacctttaagaanctctctataaatcacattacctctacatatacatatacacacaatcaattaatccttttaaactactataacaccataataccgcgaacaacaatcaatactccgaacaaagaatgtattactatcttaaattatttatacagtaatccttcaaacatgaggtgcattatgaacaagcaagataaaaattacttaagcaagtaatcttctcgattttaaaaattagatgtctgttctaagcaccattaccttacttagaagtgggataccgcttttacttaaacgactagatatttcttcattggacataacaaagtgct

SEQ ID NO: 11432 - DNA, 574 bp, Glycine max
  Coding DNA Sequence Number=SeqID_1653
agctgagctgtcctcacttcttatccagcgacattgaactctctctcagctgtcggattctactcgctgttgatcgatcacgtatggcctatagaggttggataggggagtgtgtatgggatgctggtgagctgttgtgcgcgaggttgacttgtggtctgcgtataggcgggtgcgggcgttgggtgaagataatcactacgggaagacaggtcgagaatggatatcgtgcgtgttgccgcgcttttgatagagtaattcagaagagacgtgggcaggcacgcatatcgcgcgtcatcgcgtcctcacacgcgccacagtagcaacgtccatagccagacctatcatcccactttcgaagaacgttatgaagagggttgcgaagatgagaagggaactctggttattatgtggtataattattgtgttgttatctcgttctgatagctgtttgatacgcattcgggcgtccttccttgataaagatataagagaagaacactcttatctttattctgtcgcctcgtcaagcgggcgccccgcttcaccacattgcgcgcgttcgatccacaga

SEQ ID NO: 11433 - DNA, 257 bp, Glycine max
  misc_feature (47)..(47): n is a, c, g, or t
  Coding DNA Sequence Number=SeqID_1654
gatcaagaaatttcagggtttctggggcacccttggtcacatatggntgccaattttcttcttcccctaggtctagggttgctagcttcagaaaaaaaaaatttattgggatttccccttacaacaagaacgatccttaggaagaacccaactacccagattccttcccgaggggtaataaccacagcccactggcctggagtttttacaagaaagactaaagagcccaaccatttttcaagcgcaaaccaccttct

SEQ ID NO: 11434 - DNA, 338 bp, Glycine max
  Coding DNA Sequence Number=SeqID_1655
tagggttttagagctgccgtgttccgccggatcatcaccgttgcaacctcaaggctcaagttcaccgttcgagagcttaagatgccgtcgcacaagacgttcataatcaagaagaagctggggaagaagatgaggcaaaacaggcctatccctggctggatccgtctccgtaccgataacaagatcaggtacaacgctaagcgtaggcattggcgccgtaccaagctcgggttctagatcatccgagctcgctgccatgactcttattcgttcgagttttgctattttactttcggaattgtggttaaagttttagtttttatcttctggatcttaaa

SEQ ID NO: 11435 - DNA, 508 bp, Glycine max
  Coding DNA Sequence Number=SeqID_1656
accggtccggttggtgttgctatgttgggctttcttatctataaaagaccagatacagggaaagccggagccaaacaccatgcttctacaaaccggtgttgcgtgtggttcgtccctctccctcttcagcccgaacgccgaacctccccgtcgggtcccgctcgtggattggggttcgcgcagcgaaaggatccacgaaccaccgcgccctgaccggagtgatttttgaaccgttcgaagaggcgaacaaggagcctcgatctcgggcgcaccgcgccgcaagcttctctcgcgcgccaaaaatacgtcgacgaatctgaggccgccgttaacgaacaaatcactgaggagtataacgtttcgtacggttaccatgccccgcccgcgcacttcaataggaacaacgcaccctgacagccactgccaagtttttttaaggaaatccctgaacaaaaaagaaagcatgttgggaccccgccgcgggtatagaacaacacgggcggccaac

SEQ ID NO: 11436 - DNA, 491 bp, Glycine max
  misc_feature (288)..(290): n is a, c, g, or t
  misc_feature (419)..(419): n is a, c, g, or t
  misc_feature (422)..(423): n is a, c, g, or t
  Coding DNA Sequence Number=SeqID_1657
tgggagggtagcctttttcgactcacccggacgccgcgcgggttgggcgcggcgcgccccgcccgccgccggctggggtgggtgtgagtgatctgtgcgctgtttgttgctcgcaaacgcgccggtgatgttctttagatgtgatgtaagtgtactaatgctcctcgtgatgtcagccacgaattattgataatgacccgccagtataggtggatgtaggccgctgatggtgcggtgggggtgtggcgggtgctagcaggcgcacgggggaggggtggcgtggctggnnntatgggaagacagaggaagagagagagtgaggagcgccaacatgatgtaatagcgcaagcggacgcgatgaggtggagtgttagagggagggcggtgagcacgtgtcgcccgtcgccgttccgatctcnctnnaaaaagagcgggaggtggagtgaccgcgcgcacccccccatactattttaccactaacccctatctca

SEQ ID NO: 11437 - DNA, 472 bp, Glycine max
  Coding DNA Sequence Number=SeqID_1658
agcagccgcggcagcattacagaagcaaaaggcgttattacagagagtagagactgacatcacatctgtcgtcgataacttcacccaaatcgtcaatgtcgcgagggtgagcgatcttccggtgaagaactcgcaagaagcatacatgatggagatgcgagcttctaaaatggttcaagcagctgattctattttgaagctcgtatcggagctgaagcaaacagcgatcttctctggatttgcatcacttaacgaccatgtcgagcaaaggatcgcagagtttgatcaagaggctgagaagacaaatcgattgttggctagaataggggatgatgcatcagcgagtcttaaagagcttgaggcgcactattactcttctgctcagaggttgactccagacgtttaaagggatttagttaaatagcccaaatatttaggccactattcactagtctcggatcaaactctggtt

SEQ ID NO: 11438 - DNA, 593 bp, Glycine max
  misc_feature (44)..(44): n is a, c, g, or t
  misc_feature (47)..(47): n is a, c, g, or t
  misc_feature (250)..(250): n is a, c, g, or t
  misc_feature (257)..(257): n is a, c, g, or t
  misc_feature (318)..(318): n is a, c, g, or t
  misc_feature (422)..(422): n is a, c, g, or t
  misc_feature (464)..(464): n is a, c, g, or t
  Coding DNA Sequence Number=SeqID_1659
aaaactactcattacaactgtgctgaaattgcaaccaccccagncgngccccccgccaccacccccaccacaccccacgttcgataatattctcagatatcctcctctcctactactacagacacacgagctctactgcccctcttcctatgaactctccacaccaccactaacatcaactttagaccgcacacaactattttgcgcttatgatacgcacacgtgcgctcactctcacaccacgcccgangctacanactcatgttgtctctctcttagagtcttcccccttctaatattgcatctatctctctcagngtcacacacagctcgcctgtctactagcttatgctcttctgttctcgaggaggctcactcttcctcacgtgcgctgccgcgcccactctactgcctcggcactngctctacgatcgcctaaacgcctgcctcactgctagctctanattcacaatgatattgtacacgcagcgcacgcgcgctgcttgtcacattatatcacagcgcgacgacactgcctcactacgttgatgctgcgcatggtactggcgtgtgtcgcctgtcgtctactacgt

SEQ ID NO: 11439 - DNA, 252 bp, Glycine max
  Coding DNA Sequence Number=SeqID_1660
gaagagctcatatgcagagtagttagagagacctgcaaaaccgcccttgctggttatcatacaaccattgaagaggatcaaaagttgaaagaagcaaagctagattcaaggcatgctatagcagttggaattagacacagggagaacaccctcctacaccaaatttgcccagatcttcaaggaataacacttgcaatggggggggggggaaattatcaagaagggacgcccacggaccttggattttcgagg

SEQ ID NO: 11440 - DNA, 136 bp, Glycine max
  Coding DNA Sequence Number=SeqID_1661
taaacacaattttacctgcgtgggaagtgcttaccggtagaagagatggcacagtatccgtaagtggtgaagccttggccaatctgccggcacctttctacaatttcaccacgctcaaagcaagctttgctagtaa

SEQ ID NO: 11441 - DNA, 548 bp, Glycine max
  misc_feature (59)..(59): n is a, c, g, or t
  misc_feature (281)..(281): n is a, c, g, or t
  misc_feature (440)..(440): n is a, c, g, or t
  misc_feature (457)..(457): n is a, c, g, or t
  Coding DNA Sequence Number=SeqID_1662
tacagtcgactataccgacctactgccctacattatgtaagtgtgtgttgggtgatgtncaacaatagagtccctaccgccgaccggcgcgccaatgcgtgctgtgttagagtccacccacaagctcgagcacatgctataccatcctcctctctcatacatctcatcaccctatctagtacttatatctatactccacctactccatcacccgacgtcgctctcagcgcgcctgctcgctgtccgtaagcacgttcgtcacgacgctcacggtaatagantcacgcagtctgacacgagacactaccgagccgagaggagatgacgtatcatcacactaacatatgccacgaagcaaggaactgtgtaccagagatgcattgcatcacctcaatccacacactaacaatgccgaactctcgaattatttatataatacnctatggactgactatanacaccgacatttcactacacactctctagatacagcaacacacaacagagctaaggactcctcatcgacactagtcatacaccagtgctgc

SEQ ID NO: 11442 - DNA, 550 bp, Glycine max
  misc_feature (27)..(27): n is a, c, g, or t
  misc_feature (48)..(48): n is a, c, g, or t
  misc_feature (51)..(51): n is a, c, g, or t
  misc_feature (54)..(54): n is a, c, g, or t
  misc_feature (58)..(58): n is a, c, g, or t
  misc_feature (168)..(168): n is a, c, g, or t
  misc_feature (268)..(268): n is a, c, g, or t
  misc_feature (273)..(273): n is a, c, g, or t
  misc_feature (281)..(281): n is a, c, g, or t
  misc_feature (388)..(388): n is a, c, g, or t
  misc_feature (398)..(398): n is a, c, g, or t
  misc_feature (433)..(433): n is a, c, g, or t
  misc_feature (435)..(435): n is a, c, g, or t
  misc_feature (442)..(442): n is a, c, g, or t
  misc_feature (498)..(498): n is a, c, g, or t
  misc_feature (512)..(512): n is a, c, g, or t
  misc_feature (514)..(515): n is a, c, g, or t
  Coding DNA Sequence Number=SeqID_1663
aaacagtacgcagcgcgcgagcataanaaaacgacgcgcgcgagatantgnggntagnaagcgcgacagaatgcgggcataaggtcggcggcatacgccgcccatcatctcacctcacgcagtcttagcgtgtcgcacgcgtcagatgcctgttcagtatccttatgnatatcacttcatagtatgtctgtatattgcacgataatgagaaactatctcaagacgctgtatcctgtgctatataatctgtgtattgcaccaggcgggnccagntggcgtgngtgttgcgtctcataaccagtgcgccgatcacgctcaccgcgcgcgtacgcgcgctacaccagatgccacgtaggagacgtccagcgtagcaggcgttgcctagatntagtgttagngtggagcgggtatgtgcgaggtggggggggggagngngtgaganacacgacgattatcaccgccgctcgtcaggtgacgacgagtggagtcggtatagtntgtgagaagagagnannttgatcgtgcatgaccagtggcacagttctcgtgt

SEQ ID NO: 11443 - DNA, 520 bp, Glycine max
  misc_feature (395)..(395): n is a, c, g, or t
  Coding DNA Sequence Number=SeqID_1664
caccagagacagacgccgtgcgagacggggtaggggagtgaggacaacaatctaagagtggtattgtatttatatcctcatggtttcaatcacccccagacccccgcacaatcaaccacaaggacggagaagacaaaaaacagcagacaccagtggtaagggcaataggaagaagaaaaagcgcgcgtattgactgcgatactcagatcaaaaaacaaatcacagcagaaaaacataggaataaaacggggggagcgcagaaaaaagaaagatgtaggtacgacggagagagaggaagacattaaaagagatatgaattgagagtgggcgcgaatgtagagaaagaaaggaggcgtggtgtcacggggttcagagaggagaacaaaacgaatacntaagggtaaaaaaagcgtaacacaatttggaaagtagccacacctcctataatccctctctccccctactaggaggaagtgagtcgctatcgtagaacacaacaaaaacacaacagacgaggagg

SEQ ID NO: 11444 - DNA, 482 bp, Glycine max
  Coding DNA Sequence Number=SeqID_1665
aatccccaaggtctctgctaaaactctcagaaaaagaaaggaaaaaaagagactctcttacatcaacgtctattctagtgaatataccggagaagctcctcttcatgcttggatggaccctaaaagagtcaaagccttaatgaccgcataccaagactctagaaatactcacagattcaatagaattgttgatcctaaagataaagagattattgaagaaaagaataaggaatttggtgacttctattatcacaaatggagagcagaactcctcagagaaaaccaacttttagccaaggctcgtgaagctttagatgaaataaacaaccttccttattatctcagagatgaaatgaatgtgaatagaggccccaagcttgatactgtcatccctgaaaaccatcactttataaatatgtataatgagcaaattctgagaacacatcctgaagaaatcgcaatcagaatgcaactcggtgaaa

SEQ ID NO: 11445 - DNA, 475 bp, Glycine max
  Coding DNA Sequence Number=SeqID_1666
ttccgattccaatctggtctcgccgggcctggcggcgagggagagatggggaagaaccaggcgtacaaggcgatgcagcgggcgcggttggggtcctcgtccggcgcgccgggcgccgccgacgcccccgaagacggcatggaagaggaactgaaaaggggcgagctggaggctgacccagaccaaatgatgagagagtatagagctcaactggatgctgaaagagctcaaaagctagccaaccggaagaaatccactcaggggcaaactcaaaatcatcatcttccacgaaaagaaagcaaccataaggacgcaaagaaaagcaagcaaacggagcaccaagcccacaagttcccccacagcccaggatccaagatcaatcttcagaatctttcaagcagcctaccgatggaggcctagggcgctcccaggaaagtaccagaatgccggcggcgaagatctaggcggcgtcccc

SEQ ID NO: 11446 - DNA, 327 bp, Glycine max
  Coding DNA Sequence Number=SeqID_1667
atatccatgagaaggttttaccacgtggatacgttcttgaatgcaaccttagcttgcattggacgtgaccagttatcaaccggtttcgatagaggcctgagaataactagatatcaatttaccaggctcattattagtgcgcccatgtaacccacaccggattaatagtatatgggccggagtgcatcatcctttttgaagtggatgaattaggaaccaacgaagtcgcatgtatgaacaaagagtaatattccttccccatctagccaatataagttagagggtgggtattctgaggggaaggtagcgacaccatcacataattag

SEQ ID NO: 11447 - DNA, 536 bp, Glycine max
  misc_feature (32)..(32): n is a, c, g, or t
  misc_feature (68)..(68): n is a, c, g, or t
  misc_feature (82)..(82): n is a, c, g, or t
  misc_feature (116)..(116): n is a, c, g, or t
  misc_feature (139)..(139): n is a, c, g, or t
  misc_feature (163)..(163): n is a, c, g, or t
  misc_feature (192)..(192): n is a, c, g, or t
  misc_feature (237)..(237): n is a, c, g, or t
  misc_feature (240)..(240): n is a, c, g, or t
  misc_feature (248)..(248): n is a, c, g, or t
  misc_feature (298)..(298): n is a, c, g, or t
  misc_feature (329)..(329): n is a, c, g, or t
  misc_feature (372)..(372): n is a, c, g, or t
  misc_feature (495)..(495): n is a, c, g, or t
  Coding DNA Sequence Number=SeqID_1668
tctcagacggctcatgcgcgtcactcgatgcncactcactcatctacacaggcgtctaggaaggcacngcaggcgactatcntcatacgtatcggcatgttctcgatcgtatagtngcgttgcgtcgtctcctcatagngtaggtaagacacgatgctttctncacgtcaactctttctgcagagatagatngtgtgtggagccgagcgctcacactactacgacactctctcctcngtnccgtcgtncactatacgtatcgctgcttctagtgcctttgtcttatctgtgcatgagncaacgcatctcacgcgagatatgacgtaaantgtccatttatcgcgcgtctccaacaggcactagctctcgtantacgctcgtcgccttctatgacgccaccatcgacgagccgttgatatcgatagtgtcttccttctattacacaacacgacataggcaaatataactatacacgagcaagttcacatcccctangtcgcgtcggcgtgatctatatcgatctaattcggctgagg

SEQ ID NO: 11448 - DNA, 569 bp, Glycine max
  misc_feature (353)..(353): n is a, c, g, or t
  misc_feature (399)..(399): n is a, c, g, or t
  misc_feature (403)..(403): n is a, c, g, or t
  misc_feature (421)..(421): n is a, c, g, or t
  Coding DNA Sequence Number=SeqID_1669
acacaagacgggtccgcaacgatgcggacacaccatcagcacaggcgcgcacatcacgccgaaacataaacacactctaaacaccaacatcagagcgggccggggcgaatgtcgccgccaccacacgcgcaatcagcattcagcgctccgcaccacactaacgaaacaaacagccgggggccacgcgagaaatcacacaaaaaacgcaaacaacaccgcatacgcgacgtgaggccgccgcgcgcgagtcgggggagagaaacatactacaaaagtaaacggcgcgcgaggagtcagagcggcgcgatggagataaaatatagaatgagaagaagaaagaaggagtgaaggcncgcgcgcgcgcccgacattaaaaccgaccgcgcacgcagcagcgcnctcncaacaccaccaacgtgtngtacacgagaccaacacgcaatactatatcagacacacattacacagacgatagagaggaataacatcgaggacgcagcgaatcggcccgaccagccacgtgtgtacaatcgaaaagaaaacaaaaactccaaccagtcacaacagaa

SEQ ID NO: 11449 - DNA, 545 bp, Glycine max
  Coding DNA Sequence Number=SeqID_1670
cgcgttgcggtttaataatcaaatacaaattaagcgattcgaggaaattcgagcaagtaaccaaaccaaacaatgtcttatttttaaaccaaacaattcctcgggggaagacagatgaactggcctccaggctaaagtgtatgagagtaataatctgcttgtgctatcttttaataatggtttaagacaactaataagttgctacattgaagtgacaccatgtagttaaagataatcagtgttgaatgtgtttaaacactttatgttggatgtaggctactgctactactaagttccaaagtcgttttctagattctaattgtggatggtgtcactctcttatgctatagtttaaactgccactctaacattagtggcatcaaccaatgcttgtagtgggtgtttaatttagttcacaggcatggcaaattccacctaactcagccccaccccacatggggtgggttaaaggacacagcaagacaaggtggagttcaggagtagtgattgtggagtatggtaaatgtaccacaccccctatataa

SEQ ID NO: 11450 - DNA, 463 bp, Glycine max
  misc_feature (163)..(163): n is a, c, g, or t
  misc_feature (214)..(214): n is a, c, g, or t
  misc_feature (381)..(381): n is a, c, g, or t
  misc_feature (398)..(398): n is a, c, g, or t
  misc_feature (420)..(422): n is a, c, g, or t
  misc_feature (436)..(436): n is a, c, g, or t
  Coding DNA Sequence Number=SeqID_1671
gtcatcggcagttgtgtacgtatcagtgagtgacgccagtgtgttctcacgatcatctcatacataataccatgatgtcgtgtgtgacactgtcgagatgtgagtgttgatgtcgcgtcagacgatctacataatgtgagacgaccaacagtgcgacacatcnataccaccacaacgacaacataatctaaaatatatatgtaacatatacatnaagatactgtgacctacagcgagtattacacgaggctgcggcgagagagtacgcgcagcatcacgagtcgacgccagcaggcggcgtaccgagagcgagacgaggtagtatgatcgttggatgatgctgagaatagtggcgacgtaccagactaatcactatcgcanttcgtgcacacaccacncgcaccacactaccaagcgccnnncgcgcacggtcacntcccattccgcatctttcatattattc

SEQ ID NO: 11451 - DNA, 217 bp, Glycine max
  Coding DNA Sequence Number=SeqID_1672
gaaagtctgcagtgcgctgtgttttcggatcaaatcgaagggatagtctaagtctttaaaatggacatcacgccaggcccggtccgaggtccatttaggaagaatcagcccagtgtggcaggtcaatcgtctctaatatgcagatttgttgcctatggtcccctacataaaccggtccaagccacccagtcttcgggtcaaggtggtcgcctgaaaa

SEQ ID NO: 11452 - DNA, 519 bp, Glycine max
  misc_feature (98)..(98): n is a, c, g, or t
  misc_feature (102)..(102): n is a, c, g, or t
  misc_feature (105)..(105): n is a, c, g, or t
  misc_feature (216)..(216): n is a, c, g, or t
  misc_feature (218)..(218): n is a, c, g, or t
  misc_feature (287)..(287): n is a, c, g, or t
  misc_feature (300)..(300): n is a, c, g, or t
  misc_feature (477)..(477): n is a, c, g, or t
  Coding DNA Sequence Number=SeqID_1673
agatgtgtgtgtcatcgcctgtgacgttcaggattggtatacgtctactccacgtacgccctcgtgcgctgccgccttattcgtctcgtcctcatctnctcnatnatctgttatgtcgtcgcgttgcttcgatgtgactcccgcgcgtctcatgcatcactcatcactgcgagcgctctgctctctcttctctactgtattctcttcgctcatcgntntttgctaagaccgatacttgcgatcatgcgatgtgattatgtcgcatgagtagtggtagagcagactgncgactcagtgtcnattctacgattattgatatgtcattagagctatgcttatatatatgtcatgcactcatctatgatagaggcatagtgtatgcggattcaccatgtatggtgggtgctgacgtcgacccgctagctgttatcgagcatacacactctctgggctatgtcataatgtgcatcgtaaagngcacaccgcgccggcggcgacacgcagagctagtgcgacgat

SEQ ID NO: 11453 - DNA, 514 bp, Glycine max
  misc_feature (468)..(468): n is a, c, g, or t
  Coding DNA Sequence Number=SeqID_1674
cacagctgattcaccatcgagacattaatagtattagttgccttcgcgcgtgtgtattgtatgactgggatttgtacataggtgtgtgttattatcgccatgcaccacgcacgctttatgagcaaaccgcgacaaagatatgctacaactacacctatctattctcgcccatcgttacgtagaaacgtcgacttactttctgactttaaccttacatgtaatcagtgtatgttatggtctaggcgcttttccatctccttcatgcgacgctgagtgttttgactcatactgctcggccccgactgtcaattatattattgattgaaataggtggagcatacgaactccagttttaccagagcggccacttagtctgcttatctgcactacattcacatcgccgcttatgtttgtctccctgaatgcataacacacagtatagttagaatcttcacgcctattctctcngctggtctcatcctatgcgccaacctcgttcgtctgcaatatttac

SEQ ID NO: 11454 - DNA, 374 bp, Glycine max
  Coding DNA Sequence Number=SeqID_1675
cggagaaaacgaatctgcccctcaaaccactctgaaaaataatgaaatagcttcaggtttttcagtctcaccaaatctttcaagccaaagtcaatcagctagcgtccgggataaattcatcaaccttgaattgaataatctgaaatcttacggatattactatggcatctattgtgttccaagacactttaagccttacatttgggatggaataatcattatcagagcaggcttatacaaaaatgcaaaactcaaattttatctcgaactcccccgtggattccctaaaactaaaccagaactttacttcgtttccaaagtttaccacccacttgtcaactatgaaactggacacctcgatacaaagttgttga

SEQ ID NO: 11455 - DNA, 519 bp, Glycine max
  misc_feature (55)..(62): n is a, c, g, or t
  misc_feature (67)..(68): n is a, c, g, or t
  misc_feature (117)..(117): n is a, c, g, or t
  Coding DNA Sequence Number=SeqID_1676
ccctttgctggatctctttttttcttcttctcgtccttcttcttttctctctctnnnnnnnnctccnncatcgacatcctcagtcttttggacttcctggtcggcctgagtatgatncgtcatccaagtctttcaaaggggtctttgggccacttccatctgatgttgcaatggagctcagtaatgtccttaacaatctgaatggtacaaaagaatccatcaaaggtgcaaaactttggttcatccagagatttgcatttgcggcagccctagcagaggctcttagagatagggtctttgcattggatgaaggtgagagacaatttcacataatatgccttgccaatgacattatttgggtcatcttaaataggaggacaatcagtaatgaccttggccatgaagctacttgcctttagagatgttttaggttccattcttggaagagtttatcatgatgcataaagtaatgcgggattcaggaaaagcaatcacacgggatggctggagttgtaatat

SEQ ID NO: 11456 - DNA, 509 bp, Glycine max
  misc_feature (49)..(49): n is a, c, g, or t
  misc_feature (86)..(86): n is a, c, g, or t
  misc_feature (261)..(261): n is a, c, g, or t
  misc_feature (263)..(263): n is a, c, g, or t
  misc_feature (270)..(270): n is a, c, g, or t
  misc_feature (279)..(279): n is a, c, g, or t
  misc_feature (281)..(281): n is a, c, g, or t
  misc_feature (283)..(283): n is a, c, g, or t
  misc_feature (311)..(311): n is a, c, g, or t
  misc_feature (383)..(383): n is a, c, g, or t
  misc_feature (462)..(462): n is a, c, g, or t
  Coding DNA Sequence Number=SeqID_1677
tacatacccaaatcaacatacctcactctcaggctcaggcgtctgtctntccttatatctctgtagtctatggcgctctctatatngagtgtctccatactgatatgcgtctattagttctaattgtagtccgacatcatgattaacgcctacagctccagttcaataccgagagccattcacgcgctccggggcgttttatatatattcgtcggcacgattactctcgaggaactcacgcgtacggtgtcgcggtcttgncngaggatntgcgtatananantgagttgtttatagtgggagtacgtggngagggatctaatgtatttgagatagagatcctcgctttcgacatagagtgtctcgatgagagtcctctctantacctgtcgcgctcaaaccacataagtaagggaattcacaaggaggtagtgcgttcccttatatattattgggtggtgngggggggacgaccccacggcagacaatagtacactctcgtcgtgcgg

SEQ ID NO: 11457 - DNA, 591 bp, Glycine max
  misc_feature (33)..(33): n is a, c, g, or t
  misc_feature (118)..(119): n is a, c, g, or t
  misc_feature (123)..(124): n is a, c, g, or t
  misc_feature (126)..(126): n is a, c, g, or t
  misc_feature (129)..(129): n is a, c, g, or t
  misc_feature (201)..(201): n is a, c, g, or t
  misc_feature (331)..(331): n is a, c, g, or t
  misc_feature (535)..(535): n is a, c, g, or t
  Coding DNA Sequence Number=SeqID_1678
tatacgactctagcgtatgacgccgccgcgctngcttcaaccgcggtcagcgtccagtcgcggacgctgcgaggacgcatcgatgcgcactatacacacgtacagatagagtagtgannaaannanaanccatacgtcgatcaacgcaacaccagcgatgtgtcaatcaaccgtctatggatatatgcactctaccagacncgacacagatatcatagtggtagtgtgctcgatgcagcatctgtcacgacggcacggagagcgtgacgagcgacggtacactgcgcagactcaccgcgagccgagtagctgatacgagagctcaccatanactctgatgaggcgtgcgacagacatgcgtgacatctaccgctctagactctgtagtctgcacggcacgtcgtgtagtgcgcactgcgctccactctccccatactcagacatcacgatgactacttcgtacggtcggcacacgccatgctacgggactctgctatggtctgactcgagcgtacatccttcagtcacgatgcantgaccgcggcgctcagccacaccgcgagagagaggcgagacggacactcagaacaa

SEQ ID NO: 11458 - DNA, 520 bp, Glycine max
  misc_feature (66)..(66): n is a, c, g, or t
  misc_feature (126)..(126): n is a, c, g, or t
  misc_feature (143)..(143): n is a, c, g, or t
  misc_feature (165)..(165): n is a, c, g, or t
  misc_feature (186)..(186): n is a, c, g, or t
  misc_feature (189)..(189): n is a, c, g, or t
  misc_feature (207)..(207): n is a, c, g, or t
  misc_feature (234)..(234): n is a, c, g, or t
  misc_feature (247)..(247): n is a, c, g, or t
  misc_feature (330)..(330): n is a, c, g, or t
  misc_feature (376)..(376): n is a, c, g, or t
  misc_feature (399)..(399): n is a, c, g, or t
  misc_feature (403)..(403): n is a, c, g, or t
  misc_feature (421)..(421): n is a, c, g, or t
  misc_feature (424)..(424): n is a, c, g, or t
  misc_feature (443)..(443): n is a, c, g, or t
  Coding DNA Sequence Number=SeqID_1679
gaacacgagaactctatagtcgcgatgacgacatcactgatattactcgccgcacacgaagcgatnctgtgcatgtgagtagtatcatatatgtatgtgagcagactacctgtgtgccgtagatantgatgcgcgcgtatganagcatcagcgctcataggaacngagtacataagctcagacagnctnatatagagttgtgtaganagacatcatagtgcagatacacgtaantcgaatagcatanacgatagtatgatgtgtgtgacgataactcgagtgtagtgtatcgtatcgtagatgtcacgcatatgatatagtcgtatcaancatatagcatgcataggcggtatacacgagacgtatcgctagatgntgcgtgcatgacagacagtaggnaggnagtttactagataggcgncgncgcacgatagcgtcatcgntcgatgtacgatcgaccgacgtcgcgagacgagcgatccgcatgtatctgtgatccgactagagtcgttcggacgaa

SEQ ID NO: 11459 - DNA, 560 bp, Glycine max
  misc_feature (371)..(371): n is a, c, g, or t
  Coding DNA Sequence Number=SeqID_1680
tatgtatcggtgttttgctgtggtaggcaacacggtctcgtgtggagaaagcactatggtctatgaatacatagaatacacgggtgctagcaaccggataatcttaaattctgacttctacacatctttaatacaacttgaatcgatgcaaaatctcacgatatattcgcgagtacgaccgcggaatgcagctggaggaatacaattactgcgcgtccgatgcgcgttgcaggcgggagaaaccaatgcgcggcgggcgtctggcgtatctcaactgtgtgcttcacagactatactatatatgtcgattcgatagagcctgctactattgtattattaaatagataggtacatgacatgcgtagaggccnaaatagtggtgggcaggcgtcataatacaagttgccgtggcgcgatcacaactacatcattgtatctccttgataatgcacttgttacaaaatatgtggcatgctccctatgtatgcgtaatgcctattgatactttctatccacacgacgtagttatcactgagtaggcggctgtagtctggtataac

SEQ ID NO: 11460 - DNA, 571 bp, Glycine max
  misc_feature (103)..(103): n is a, c, g, or t
  misc_feature (113)..(113): n is a, c, g, or t
  misc_feature (265)..(265): n is a, c, g, or t
  misc_feature (401)..(401): n is a, c, g, or t
  misc_feature (491)..(491): n is a, c, g, or t
  Coding DNA Sequence Number=SeqID_1681
aatagcaccgatgacgcagacacgcatgtcctgcgacacacgacatcacgcaaggcaggctgagcatgtagcgtgcatgtactcgctgcggagcgccggaggngcagtgtgtnccaagaaagcaccagcttaaaccggcgtaacacgaataggtcgtatacctcgctagtctgcgctctgatactctggctcgctgggtagcgatctacaagtgagcgtacgtgacgccccgctcacaacgcatcgtctgtcttaagaaagacgngagggccctcgcacgtccagcgctacgtgcgcttcagacgcagatagatacgcacatctgatataaagacttcccgactatgtctatgagaccggatctgcgcgagcgatggagacacaggttcttccccagaganagagtgtctctcattctacatctctcttagtgacatctttaataatagaaatagaagggcttggagctgatatacactctcccccccttnttgagcggcgaagaagcgcggtacatattataacgcgttattataagttgagttattgatatgagtgtgacgccgcgcgc

SEQ ID NO: 11461 - DNA, 384 bp, Glycine max
  Coding DNA Sequence Number=SeqID_1682
taatgtccttagtttcttgccagagttctatcatatttgatgaccatattttttgatatttctccaatacatcatactcaggattttccttccattcttcactatccttatgcacgtcacttgctgcaaacactgcctccttattctgtaccgacactgtcttctcaaaatccggaacaaacatattcaaatgtctatagttctctttactgaattttaaggcttcattaggttgctgtctctgttttgttagcttctccttaaattcttttttatagttcactattcttgcatgtgctatctttttaaaagcctcaggatccccaaatgccttcatgtccttgtataaagtctcagcaaagggcgaaatccacttgtctctta

SEQ ID NO: 11462 - DNA, 569 bp, Glycine max
  misc_feature (39)..(39): n is a, c, g, or t
  misc_feature (101)..(101): n is a, c, g, or t
  misc_feature (104)..(104): n is a, c, g, or t
  misc_feature (164)..(164): n is a, c, g, or t
  misc_feature (166)..(166): n is a, c, g, or t
  misc_feature (174)..(174): n is a, c, g, or t
  misc_feature (181)..(181): n is a, c, g, or t
  misc_feature (246)..(246): n is a, c, g, or t
  misc_feature (255)..(255): n is a, c, g, or t
  misc_feature (267)..(267): n is a, c, g, or t
  misc_feature (279)..(279): n is a, c, g, or t
  misc_feature (293)..(293): n is a, c, g, or t
  misc_feature (304)..(304): n is a, c, g, or t
  misc_feature (309)..(309): n is a, c, g, or t
  misc_feature (329)..(329): n is a, c, g, or t
  misc_feature (379)..(380): n is a, c, g, or t
  misc_feature (387)..(387): n is a, c, g, or t
  misc_feature (402)..(402): n is a, c, g, or t
  misc_feature (417)..(417): n is a, c, g, or t
  misc_feature (420)..(420): n is a, c, g, or t
  misc_feature (445)..(445): n is a, c, g, or t
  misc_feature (447)..(447): n is a, c, g, or t
  misc_feature (450)..(450): n is a, c, g, or t
  misc_feature (477)..(477): n is a, c, g, or t
  misc_feature (525)..(525): n is a, c, g, or t
  misc_feature (529)..(529): n is a, c, g, or t
  misc_feature (544)..(544): n is a, c, g, or t
  Coding DNA Sequence Number=SeqID_1683
gactgacattatctgtaccctcatacaccgtaattttantcattattatgacgtgtcggcgacgttacactatgtaggctgcgaatgacacagtgcacatncanatctgactactatatagttactgtgtcatgagactagctacgacacgcgtcgtgcagttngntctgtgtncgaggtntatagattctatgtacgcatgtcaggcacgatctgcgccgcgtcacatgatgtcgtcgtatgtgncgcagtgcnctagcacgttancatgtgctcggncgggatgccgcggnaccggatgttncgcgnagacactcgtgcacgctcgncagtatgacgctagagcgatgagccgccgtgatcggtgacggacgagtgnnctcgctncttctctaattatgncatgatctcgcgtangtncggtgtcgaatggtgcgtgatgagngnatngaagcagcgatcttcagtgcatctgancgacgtgcctcgctacgcgtgtcgatgagctaagcagactactaagtntcgncttgatgtgcactgnctcaacagtcatcgagatcatatcg

SEQ ID NO: 11463 - DNA, 374 bp, Glycine max
  Coding DNA Sequence Number=SeqID_1684
ttagaaattctaacctgaccctcgtcgttttgatttgctttgtgcttatagcttcaaggctgcgttccgtcagttcttctgtgtacaacccacacaacaccctaaagaagcagtttgggaagtggcttcaataccacggaaaatcatatggaggaaaggatgagtggatgttcaggtttgggatattccagtctaatctccagttcattgactacatcaactccctccacttgccctttaagttagcggagaacagatttgcggacatgaccaactccgagtttaaggcccatttcctcgggttaaacacgtcttcctcgaggttacacagcaaccatagttgtgacccatcagcatcaggcaatgttccggac

SEQ ID NO: 11464 - DNA, 495 bp, Glycine max
  misc_feature (52)..(52): n is a, c, g, or t
  misc_feature (54)..(54): n is a, c, g, or t
  misc_feature (158)..(158): n is a, c, g, or t
  misc_feature (231)..(231): n is a, c, g, or t
  misc_feature (233)..(233): n is a, c, g, or t
  misc_feature (252)..(252): n is a, c, g, or t
  misc_feature (275)..(275): n is a, c, g, or t
  misc_feature (352)..(352): n is a, c, g, or t
  misc_feature (357)..(357): n is a, c, g, or t
  Coding DNA Sequence Number=SeqID_1685
tagtccatctcgtacatcgcggattgagataatcgagagagatagatgacanangtcgacactaaggacacacacaccagcagctgagattccgcatgacatctctctacgactcatgtgcgactatacctctgatatttcaccatagttgtctacgntgctagtgacactcgcgacactatctctctctgtcgtgaggcgctatagtaacttctagccgctctagataananatatacatgaggcatacanaacactagtgccacatttcatangcaccctcactacctcagtcgaagacatacacgctcgtagcacatagacaaactacatcaagtctcctccgtctagncatcncctacagcgtctcaccatagagagagaaaaacgacacagcacgagacacctcagccgtctaaagcatcattgttatctgatccacactcgtcggttcctgcttgtccgatccgagtgccgtgacctcagcttgggtgt

SEQ ID NO: 11465 - DNA, 300 bp, Glycine max
  Coding DNA Sequence Number=SeqID_1686
gtacttagccaacatgctgctgggaaagaattcccgacgtgacgccaggaagttgtccaactactgttcaacgacctctgtcgctgtgtacgctgcattgatgtgtaaaagccgtgatgcatagcaacgtcaatccattgttccaaatatgcactttatcccttccgggatctagagacctgaaaccccttaatggcgggtttaacaattggcacaacaatgttcgataaagccccttcaaatgtgggaaaaaaaaaaaaaaaaatcccgccccccgccccaatatttacagtctctttt

SEQ ID NO: 11466 - DNA, 505 bp, Glycine max
  misc_feature (133)..(133): n is a, c, g, or t
  misc_feature (152)..(152): n is a, c, g, or t
  misc_feature (323)..(323): n is a, c, g, or t
  misc_feature (369)..(369): n is a, c, g, or t
  misc_feature (428)..(428): n is a, c, g, or t
  misc_feature (439)..(439): n is a, c, g, or t
  misc_feature (444)..(444): n is a, c, g, or t
  misc_feature (454)..(455): n is a, c, g, or t
  Coding DNA Sequence Number=SeqID_1687
tacactctttgcctggcgcctggaacgtagcctttactactcataatcttaacaacttgctagaagaagataaagaaagagaaaaagtgtgtgtgtgtgagagagagcaatggctggctcgtgggcacgccgntctctgatttttttttttntcatttccttcggttgtgtgtgggcggtttccattgctaaggaggaagccacaaaattggggacggtcatcgggattgatcttggaacgacctattcatgtgttggtgtttacaagaacggccatgttgaaatcatagccaatgatcaaggtgaccgtgtcaccccatcgngggttgctttcaccgacagtgggagactaattggagaggctgccgngaatctggcgggtgtcaacccagaaaggaccatgtttggtgtcaagaggcttgttgggngaaaggtcggngatgnggaagttganngagatgtgaagcttggtccttgttggattgtcgacatgggtgggaagcct

SEQ ID NO: 11467 - DNA, 562 bp, Glycine max
  misc_feature (58)..(58): n is a, c, g, or t
  misc_feature (356)..(357): n is a, c, g, or t
  misc_feature (371)..(371): n is a, c, g, or t
  misc_feature (373)..(375): n is a, c, g, or t
  misc_feature (420)..(420): n is a, c, g, or t
  Coding DNA Sequence Number=SeqID_1688
gttgggcggtgtgtatagatataatatataagatatactatacctaactcatatcctnctatacatttatattgtagctatgaaagatagggtgatatactcaatttattatatacagaccagaggataaatgagaaagtaatgtaagaatgaaagaggcagagtggtagtaatgtggggggatatcgtgttatggtatattgttgttgttgtgtttattcttcttccggtctgccgtgtggcgccctcacccccgtttgtgttgtgtttctttcactctgctcactcgcctctcttttcctgcgccccccttgccgtgctcccgtggctcctcttcctcctgtctctcctcttcnnttagattataacangnnnatagagtggtccaaagagagataacacaaccataacaacactctnaattgcactcaaaggaaggacagcccagtaagagacaaccaaagaaaaaacttagcaaaccgacaaggtcgaaggaggagaaaagacgaggatgtttatgttgtgtatatgcttattatacttcgatccttatccacacgac

SEQ ID NO: 11468 - DNA, 542 bp, Glycine max
  misc_feature (58)..(58): n is a, c, g, or t
  misc_feature (112)..(112): n is a, c, g, or t
  misc_feature (177)..(177): n is a, c, g, or t
  misc_feature (182)..(182): n is a, c, g, or t
  misc_feature (448)..(448): n is a, c, g, or t
  Coding DNA Sequence Number=SeqID_1689
gccggcacctacagggaggaacgaacacacagaagggcgacaccagcagagacacaancacacaacaaccaacacacacacggcgccaccaccaccggagacgccgcccgcncacatcccgccacaccacaaagccggccgagagcgcggctaccgcgcaacacagaacacgaccanaagcnggaagcagagaagaggagagaggaagaaaaagcaggaagggcagaagagggggcagcgaagagcggcggctgcgcgacagaggagggggagcgccggagcggacgaggcgcagcgcgccgccgagcccaggcgcggaccgccgcgcgtgaagcgggacgactaaacaaaccacgccaacaaacgcgagagagaagaaagaaacagcggcggcgggcgacgacgcgcggcaccacgccacactaagcagaactaggagagaaggtangataggaggaaataccagaaccaaagaaaaaaacgagggaacaacaaaagacaaaacaactcgggagcacccacagacagcaaaagattacaag

SEQ ID NO: 11469 - DNA, 583 bp, Glycine max
  misc_feature (505)..(505): n is a, c, g, or t
  Coding DNA Sequence Number=SeqID_1690
cccatactcgtttgggcagagtcacgtagcagccaaccaacaataaacttacaaaattttctacacacatttacttgtgttttagttttgggatttttattcatctgttcagttcagtacccaataaaacggccgccattttgaaaaattcaatacaaaaccgcagtcgaggcaaaacggaaagaagaaaaaaaaacgaaataatagaaatctgtatagtcagtcaaaaaataaaatttgtgaaaattcaacatttaagtgcagccaaattttaaaaaatcggcatcaatttctttctttctcagttggaacaaattttaatttcgttctgtttttttacgtaattcacattaaattaacacaaaaaaccataccaaaatttcatcaaacgtggtacaaaattttgaaattccaaattacaaaagagtgaatagagtatagtaaaaaaaaatcatttttttaatataactacaacacaatacaacgtaaaaaaagaacgttcttngtttctacacatccaatataagcatttcttcgggttttttcgatcaaaaaaaaatatctaagaactgtgactcaacga

SEQ ID NO: 11470 - DNA, 482 bp, Glycine max
  Coding DNA Sequence Number=SeqID_1691
aggtactggcttcatttgcatcattcacagtgttttcacctcgtacttcagcgttctcctcccattggtggtatccgtcactgttcttttgctcacggtatcccacaacatcagcgtttagagcggctcgatatcagaatatgtctagtcaaccattgcttgatcggagcccagaggaggggtcaggagacagctatgggagcaaaaaccggcgtcagcgcggtttcctatcgcctttcgcagccatgtcgcacatcagcctgttccaaggctcaacgaccacctatgaagctataagcttaatgcttaatgccgaagactcggaccagcaggacgagctgaccaggacttggcgtgatcacaagcttgaggagctcaatttccttggcacggtgggtgctctattcgctagctgtctcagcacaactggttcctggcccgatgtgttgaacaacggaaacgacaagccatggtctgtccgc

SEQ ID NO: 11471 - DNA, 367 bp, Glycine max
  Coding DNA Sequence Number=SeqID_1692
attcttgttagccactctcattctgtggctcgcttccctttgttcccagattttcttcaacaaacgttgggagcttctctctgttatcgcgggttgtttcttctatcagacatctaactgcctcattctacttttcttgtccacccataaagaccctctcttcgttaacacctctgtctttcttctccactctttcttaacctccgcttcagtgatcttcatcttgcccaccgagttattcaatgcgccctgtggactgttgcccactcaaacttggttgacaatgttttgcccctgctcactttaagcgttaacctcttcatccgcatactttgtatttgatcagtgggattttgtttctgccctc

SEQ ID NO: 11472 - DNA, 590 bp, Glycine max
  Coding DNA Sequence Number=SeqID_1693
aggctatagccaccagccttgctgaagaagaaatggaaaatagcatggatggagaggaggatgatactggagatgaagacaaaaggaagagagtgatggagagagctagaggtcctaacacagaacgtgttcccttgcggctgtgcctggtcgataggtgcactgctaacttaactgaggccaagcagtattaccgcagacacaaagtctgtgaggttcatgcaaaggcatcttctgcaactgttgctggagtcaagcaacgtttttgtcaacaatgcagcaggttccatgagctagcagagtttgatgaaactaaaagaaagtgcaggaggcgcttagctggacacaatgagaggaggcggaagatatctggtgacagttacggagaagggtcaggccggagagcggttagcttgacacagactcaagaaagaaacaggatagacatgaaacttcctatgactaactcaccattcacgcgacccacggatcagataaaaccaacatcaaaacacccaaccgactctctctcctctgtcatccacttatgctcaaatatccccgcctcctctagctatcccaaaaacgga

SEQ ID NO: 11473 - DNA, 504 bp, Glycine max
  Coding DNA Sequence Number=SeqID_1694
ggacggtctacagggcgaccttcgcggaggagcgacagcgtctgtcgccggcgttcatcaaggccgcttcgtccgtccatcctcgccgcttctcatcgcagggtggcgatgatgatccgctcacatctgaagagaaaatgagactatttaaaaggggcgctcacttgatcttcaggatgacaaaagccatctccaccgttgtggcctgcggaatagtcatcaagtggtcagtaacagaggtgttccgtccttacccgacaagcgattgtgcacgtgctgttcgcaaatgccgtgagatgctacagggtctacggggcaaccctccagcattggaggttggtcctgtgctgggtgatgagatgctggcggcggaggtggcggagttcaagtccatggtgaaaggatatgaaagcggcgagccagcggaagagactggaaggattgagtccagcttgggaaaaatatgcaccctggtttctcaaggctattcatgacccattgtgg

SEQ ID NO: 11474 - DNA, 552 bp, Glycine max
  Coding DNA Sequence Number=SeqID_1695
ccccgatactcaattgactggtgaaattgaactcttgaaacagaaacttagctctaatatctcgaccatcaatgaaataaataataaacacaaacaagttttatcagagaaagataacttaaataagcaactagaaaatgtgagaaatgaattagaaaaagtaaatagagagctagaaaatgccaagagaggacttgaagccaatgagcatgaaaagaaaaagagacaaaccgagcatgatagaacaatcgcatacctcaaagacgaactagaaaatgctgaacaatctcaaaagagagctacagagactcttcaaaaagaaataacaaacttgaaggagcagcttgatgaagtgaattcatcaaatttaacaaaggatactgagatacagagcctcagaggaacacttgaggagctgacacaaggtagtaagtcaagtaaaggggttctgcagacattggaggctcaagtgaaagaactgaagacgacttgtgatatcaagaatgatcagatccaatcattgaagagtattcaagcgtcgttgacttcaga

SEQ ID NO: 11475 - DNA, 317 bp, Glycine max
  misc_feature (84)..(84): n is a, c, g, or t
  misc_feature (118)..(118): n is a, c, g, or t
  misc_feature (124)..(124): n is a, c, g, or t
  misc_feature (210)..(210): n is a, c, g, or t
  Coding DNA Sequence Number=SeqID_1696
aaggagatgggctcttttgtagaagaatctgtttgaggagggtgtattgaagcgcgaggatttgtggatacatctaaactctgnaatactgatcatgctcccgaaaatgtaccactgncactgnacgggaccctgaaagatttccacctggataatgaaaatttgtatcttatccactggccctgctccaatgaagaaagaatcagctgncttttaaacctagaaattcttggggcaaccaaacataccctaaccccctggaaagggggatggaaacccctccttatgaattctgggcagaggctcgcgaccaattc

SEQ ID NO: 11476 - DNA, 256 bp, Glycine max
  Coding DNA Sequence Number=SeqID_1697
attactattcagaaactctattgtgtgtgttgtgtcatttattttgcgtcttcgttaatcttccgttcctccctctttctcttcctcatcttctcctcttttcatccgcttaagggtcttctttgttcgatttttttttcactttggtttttatattgcttttgacagaaaaaggtgtgacctttgtcttttttattccttttttttgtctaattttttgtggtgatttttgggacaggctaacggcggtgttgaa

SEQ ID NO: 11477 - DNA, 594 bp, Glycine max
  misc_feature (182)..(182): n is a, c, g, or t
  misc_feature (201)..(201): n is a, c, g, or t
  misc_feature (213)..(213): n is a, c, g, or t
  misc_feature (219)..(219): n is a, c, g, or t
  misc_feature (252)..(252): n is a, c, g, or t
  misc_feature (265)..(265): n is a, c, g, or t
  misc_feature (287)..(287): n is a, c, g, or t
  misc_feature (340)..(340): n is a, c, g, or t
  misc_feature (348)..(348): n is a, c, g, or t
  misc_feature (354)..(356): n is a, c, g, or t
  misc_feature (364)..(364): n is a, c, g, or t
  misc_feature (367)..(367): n is a, c, g, or t
  misc_feature (385)..(385): n is a, c, g, or t
  misc_feature (545)..(545): n is a, c, g, or t
  Coding DNA Sequence Number=SeqID_1698
gacagctactcaccttacattacacactctctgctctgccctcacacacacacacagacacatagagagatgacatgtgcacaggcttgttgtatccgtgtagtgtgtcgttttctgattgtctgttgtcgtcgcgcactagtgcacgtcgcccagatccgagcttctacgtacagcgttcncatcgcatagacgctagtnctatctggacgnatctcncctagccaacacacacacttacctcgtatctantgcgacgcgtgcnactccgccacgaacgctatganctagtgtctgttgctccgcttgactggtagagtgatgatatgatgatatatancatgttgnactggnnnaaacaccntanaccacctgtgtacagcgntactgtgcatcagtgctgtgcgatgcgtgtcacgctgtattagttctcgatactctgtttactagcatactctgtcatatcagtcctggctcaatgatccctactgtcctcgctcctagctaaacggggcacgctgttcgggacgcagaagctagagaanagagatctatctggcaactcaaccgactacccataaccgtatctaactg

SEQ ID NO: 11478 - DNA, 248 bp, Glycine max
  Coding DNA Sequence Number=SeqID_1699
caatcagactagactcagttcaaagtcaaaagttatatcaaaattcaaataactactctgatgctttatatgttgtttttttagttgtttattactattagtcattctgctcctagatgtagtctcaattccataagcatgttataaatttacgaacggggattgatgcgcatatttgagtttatttttgtgactgtatttttatttcttttggtgtttcctcgtatttggtgcagtcgagaaaagtt

SEQ ID NO: 11479 - DNA, 552 bp, Glycine max
  Coding DNA Sequence Number=SeqID_1700
gggtttcgtcacctcatgggtaagatcgggttcttgaaagcttcgtcggacgaagctttgttcatggatgttgaagagatgaggcgtttgtgctgtgtggtggtgactagtggtgaaaaagggtgcaggatttatgacaaggatgatgagacggtggttcctccgttcgtggcgaagcaggtggatcctacgggcgctggagatagttttcttggaggtttggtggttggtcttgtggagggtttggatgttcctgatgctgctttgttggggaacctctttggttccgtcactgttgagcacattggtcagcctaagttcgatttgacgatgcttcagagagtaaaggatgaggtacagaggaggaagaagcaatgtaatctctcaagtagccacaacaatgatcatgacgagttccatgcgcgtctaagtccagctcggtttcaggagtctccacttcaaccaaagatattggtcaatggtcacttgtgtgaccggtcatgattggttcctgcaaatacgaatcttttaatcactaacaacgctcttctg

SEQ ID NO: 11480 - DNA, 392 bp, Glycine max
  misc_feature (96)..(96): n is a, c, g, or t
  Coding DNA Sequence Number=SeqID_1701
cattttcagccatgagactcagtgttattttaatggtttcttgtgttctcacatttctcattttaaataatggtaaagtagaggtggaagccggcntgagaaaacttggctgcgaaacattaccaagcaattatcttggaacatgcggaaaaaatggaattaatttatgtgtagatgacgtaaaaaaaatgattgtcaaaaatactggaaaagctgtgccaaaaggttatggagtacgttgtgacaaatgtattgatgaacctcccaagccaggttatgctcgcatgcataaatgtgtatgtcgatatgattgctaaattttaaaatatctatataagcataatctctttactaataaaaatcattgtaagggagagttttttggcgtagat

SEQ ID NO: 11481 - DNA, 590 bp, Glycine max
  misc_feature (31)..(31): n is a, c, g, or t
  misc_feature (91)..(91): n is a, c, g, or t
  misc_feature (111)..(111): n is a, c, g, or t
  misc_feature (141)..(141): n is a, c, g, or t
  misc_feature (179)..(179): n is a, c, g, or t
  misc_feature (251)..(251): n is a, c, g, or t
  misc_feature (266)..(266): n is a, c, g, or t
  misc_feature (287)..(287): n is a, c, g, or t
  misc_feature (330)..(330): n is a, c, g, or t
  misc_feature (466)..(466): n is a, c, g, or t
  misc_feature (468)..(468): n is a, c, g, or t
  misc_feature (480)..(480): n is a, c, g, or t
  Coding DNA Sequence Number=SeqID_1702
tctatctcgctctcacatatcgtatcctatntgactcatatactcatctacacgcagcagaggactagacgacgctcaaatgtatcaaagngtatagacggcgcgggttgntactgtatctgtcgctcccatcactaaccnacctctaacttatacgatgtatctccagcggtctccangcactagctctatgaagcgtagatttacgcagaacagtcgtggtcgtgacgttctaatgctcgaccacaccncgacgcgtgaactcntgcggcgtcgttaccgctccngcgactgaccaagccacgcgcgcggcctgcgccacgacacgcngacactcaagagacgcagatgaagctatattatccgataatcttgagcgtatattctatcatctctacaccagtcacgacgaagagacatgacgacgatacacctgctctatacgtcaatataaacgacaagactnanatactcaacacncgctggacgagaaccatagtgacataagagtatagttagagtatatcaaacgacgaaatctagtagacatgcgcgtgcacagagacagtaggatacagcacacgatgatt

SEQ ID NO: 11482 - DNA, 588 bp, Glycine max
  Coding DNA Sequence Number=SeqID_1703
gtactcgcctcacctaatcgaaagtcagtgagcgatggtccatcacacgtgattctactagtaaagagatagatgcttgcattaacaatgtaggtattgtcgttattactgtgcatcgccgtcttcgtcagctgctacccgcccgcgcgcgctctctccccgccgaccgccccgatcacgcccccgctcctctcccacccacccgcccaccggcccgccgcctatcgctctacccacgagtcgatatgaagttaaatgacattggtctgctctactctactagtttatgcgcgctatgatgaccgacgaaaggatgaatgtgagacgtctcgaacccgacatgttagccctcgacaccacacaagcactagacacgcataactaccccaccacttcaccacccctccacacccactcacgcctcgccccgagcctattcgatgtggcacgcgctctccgggatcaagtggacaacgggagtgagatatgtcattgagtcggtcggtagtgctgagttctcagcgatcatacaccgttctgccaccgtccctctccccttctctgtcggctttcgaggcatatgctgag

SEQ ID NO: 11483 - DNA, 473 bp, Glycine max
  misc_feature (80)..(80): n is a, c, g, or t
  misc_feature (82)..(82): n is a, c, g, or t
  misc_feature (97)..(97): n is a, c, g, or t
  misc_feature (121)..(121): n is a, c, g, or t
  misc_feature (133)..(133): n is a, c, g, or t
  misc_feature (135)..(135): n is a, c, g, or t
  misc_feature (166)..(166): n is a, c, g, or t
  misc_feature (215)..(215): n is a, c, g, or t
  misc_feature (302)..(302): n is a, c, g, or t
  misc_feature (313)..(313): n is a, c, g, or t
  misc_feature (342)..(342): n is a, c, g, or t
  misc_feature (350)..(350): n is a, c, g, or t
  misc_feature (354)..(354): n is a, c, g, or t
  Coding DNA Sequence Number=SeqID_1704
tatataagcgcggtccctctatcgacgcgatactctcaacactatctcattatcgactcatcacccaccaccgagacgancncagcaaaggagtctnatcacagacactcgctcactattntgctcgcttcantntattcgacttactccctcacattagttacantcctgtatactcacacactctctacgacaccatcactagatacaacatncactctcctctctcactccatcacaatcgatctacgctacggactatgcatacgacctatcacgccgtgagtgtgttcgattattcncattctctacntgatacatgagagcgcgctgccccgcacntcctccanccancacgacttaaataagaccttatcactgaatatatatatgacacgtacatactcacacttgcaaacactcccgtcacactctctctttatgatacttccacacaaacatctcctacagag

SEQ ID NO: 11484 - DNA, 219 bp, Glycine max
  Coding DNA Sequence Number=SeqID_1705
gatctttaggcacaccttctatttatactcttctctcttgcctttcctttttatagactttcataatggacctatcatataactagcaaaacatgttgatactttgaaactgttgcaaatttttaaatcctggatagcggagcttacgtagaagcggccagcaaccctgactcaggatgttgttaaatggcgggcatggcggcgccatggcggtttttc

SEQ ID NO: 11485 - DNA, 416 bp, Glycine max
  Coding DNA Sequence Number=SeqID_1706
ccatcctgggctggaaaggccgggaagctgggcccatcacccccaaaagggggaagggggagcttgaggaaaaccgtcaccaagcaggccccctcaggaagcccagggaacggcccaaaccgagtcaagaactggggccctttctcgggcgagcccccgtcctacctaaccggggagttcccaggcaactacggtggggacacggcggggctttccgcaaacccaaaaaccttcgccagaaaccgggaactcaaagggatccactccaggggggccaggctcggagcctggggctgcgtcttccgggagttgctgccccgcaacggggtgaaatcgaaaaaaccggtgggggtcaggccgggccccaaattctcggcgggggggggctcaaacaactgggcaaccccagcctggat

SEQ ID NO: 11486 - DNA, 578 bp, Glycine max
  misc_feature (452)..(452): n is a, c, g, or t
  misc_feature (538)..(538): n is a, c, g, or t
  Coding DNA Sequence Number=SeqID_1707
tagcataccgctatcttattaatgatattacacagtgtagtgtcaagtatgggaagcgacatactatgcacgtgatcactcccactacctctgcgagccagccccggcaacatcagcaggcgacggtgccgcgacttcgcatagggaggtgtcattgatgaacgtactgcaaccgtcgtgacgctgaagtactgcatgatcatcaaaacacaaatagagggcgtgacgaggtgtgagagtatcgtctggagtagcatcaattaaatataccgcgcgagcctcggatgaagtatgctcgtagcagactcgctagcgaaatgcgtctgcaccttcacgattgtctcttacttctgctctgagtgcggcactacacagctccacggtcgagccatgctcatatatctactaatagaatagagggtaagacgtgtatgcagcagctcctggacggnatctcctgcgagtcattagtgaggagaggatgagagcgcctcactataatagatgggagaggtatatgagaggagtggatcgtttnacaccacacctcgtgtccagtatcggttcgggcggattcg

SEQ ID NO: 11487 - DNA, 306 bp, Glycine max
  Coding DNA Sequence Number=SeqID_1708
gacatctcaccgatctccggcgaatccccggtccccactttcttccctcgaaatgaatcccgagtatgattatctggtcaagctccttcttattggagactctgggggtgggaaatcatgccttcttctgagatttgctggtgattccgacatcgagagcttcataagcaccattgggggtggtttttaaataacctcccggtgagccgggtgggaagaacatttaacccccgaacggttggatttgaatgggccttggggccctttattcattgggggacaccagccggccagaaccaattaagg

SEQ ID NO: 11488 - DNA, 594 bp, Glycine max
  misc_feature (127)..(127): n is a, c, g, or t
  misc_feature (129)..(129): n is a, c, g, or t
  misc_feature (148)..(148): n is a, c, g, or t
  misc_feature (150)..(150): n is a, c, g, or t
  misc_feature (156)..(156): n is a, c, g, or t
  misc_feature (226)..(226): n is a, c, g, or t
  misc_feature (321)..(321): n is a, c, g, or t
  misc_feature (349)..(349): n is a, c, g, or t
  misc_feature (366)..(366): n is a, c, g, or t
  misc_feature (379)..(379): n is a, c, g, or t
  misc_feature (398)..(398): n is a, c, g, or t
  misc_feature (413)..(413): n is a, c, g, or t
  misc_feature (489)..(489): n is a, c, g, or t
  misc_feature (501)..(501): n is a, c, g, or t
  misc_feature (520)..(520): n is a, c, g, or t
  misc_feature (543)..(543): n is a, c, g, or t
  misc_feature (555)..(555): n is a, c, g, or t
  misc_feature (565)..(565): n is a, c, g, or t
  Coding DNA Sequence Number=SeqID_1709
atgtctccgtccgtgtcgtatttacgtgtctcggatcttcgttctgatctctatactgatactttactcggacgcacatacagccgatgtgtgcagatgatacgatcgcagacgtgtgagtgatctngncgacgattgacgacatatncnagcgantggatgtatctagacataaatactagatgactacgcatacgatctgctagtatactcatcgatatgctgngatactagatcgatagcattgcgctgatgacagatgcgtcatatcatgacatctagatatgcaagatgttagcatatacaaactcatatacgctnattacgactatgttactagcatctctantggtctcttacagttcntcgtcattctgcntctactgatctgtctactntctatgactaatgtnatataacttaagctatgctcgagctcatgatcatatgatcgagccatgtagcgtgcgtcacgagagtgagtgttantgctgatgctangatgtgaagtagcacagtnataaggacgctatgagctactangagtgatcgacngacgacgtcnagtagtacgtatcgacgatcattactgtt

SEQ ID NO: 11489 - DNA, 292 bp, Glycine max
  Coding DNA Sequence Number=SeqID_1710
tccacttgaagatgcccctctcatttaccgagctggagaatctgctctggcagcgatagatgatatgagagctgatggatatgaaccatcaagagagatgctagatcaggtcagacagccatgcacacgagagatggtacaatgaaagcgatgccagagagcactcagtgaataatgccttgaattaccagcagggagcagataaccgacgggacatatctgcctaatcttagtatacagagttggagatgctgcaatggaatacctctgcctattataggctgctgcatca

SEQ ID NO: 11490 - DNA, 486 bp, Glycine max
  misc_feature (88)..(88): n is a, c, g, or t
  misc_feature (91)..(91): n is a, c, g, or t
  misc_feature (187)..(187): n is a, c, g, or t
  misc_feature (324)..(324): n is a, c, g, or t
  Coding DNA Sequence Number=SeqID_1711
ctatcactgatcacacatcgtacacaccctacaccacatatccagcttgatcacactctagtcgcgcgcagttctcgtctcactctgnctnagactgagtcatggtactcatcgcggtcacacacgtcatgacgttacgactcgataacaacactatggacctccacacacacatacacactctacngctatgtaccatactctctcaaccctcgcgacgtctccctctcgccgcgactcgcctctagagtagcacatagcctgctctccacacacacgagcgtctcagtacacactctcactgcggatatactcatgcacganttcaatacttacctcatcaaccatgtactcctatatgatcgcttgtatctacaacacacgcatgatcaacacaaccacactgacactcaacgtcgaacgacaccagcaccctatacacatacacaacgactgatatgagtagagactagaccgcagcgcaca

SEQ ID NO: 11491 - DNA, 293 bp, Glycine max
  Coding DNA Sequence Number=SeqID_1712
agttgtggcgccagcgctccgtttcgtagctgctccattttttccacaccccattataaattttagttttttctttttaaatttttaatctttttgggttttgctgaatacccatttaactttgatgatttagttgcaatgatttcgacccaccgggtactattaagggaagatggaggctttagaattttgttgggttgaggagttacttactattaagttacaaaaaccaatatttatgtcagaatctctgaggataggcctgaatagagtacttgttatagactattaaa

SEQ ID NO: 11492 - DNA, 314 bp, Glycine max
  Coding DNA Sequence Number=SeqID_1713
tgaaccgaccaactctagccataaagtttatcccaactgaaggaacccaagattatgatgagatggttattaatcctcaaaaggcttatctgataacaatcacatccaagtttgagacccttattgatctttcactgatagagatattgtcaaggcatgctttagatgagatatatcttggatagagggagactccaacttgcactattgataataatgcattagaagctttcaaaacgttcggatgcatactgactggaattgaacgactagtcatcgcacggaacattgatccaggtcttgataaacctaga

SEQ ID NO: 11493 - DNA, 585 bp, Glycine max
  Coding DNA Sequence Number=SeqID_1714
tgatttctggcgctgggcttcaaaagcgcataaagtgaaaactgaaacccggtcaccagttttgcacataaggctgtatccgtttcggggctttggccgttagcttatatttgttttcatggcaaaccgtttaaaaaagaaaacgccatcaccgcccagcccggagcaactaactccagataaggaaacacaggtaactgttaccgaagtggtgaaagatgaacgtactgccaagatcattggagcggtgagcctcttgcttacagtctttcttttcgtagcattcacttcctatcttttcacctggcaggaagaccaggataaagtataccgtttcggtattaaaatttttgctacggatgatgtgcacgtcagcaacctcttgggtgtactaggggcttatgtagcgcacctgcttttttacaaaggattcggactggcatcctatctcttttgtactttcttctttgtgttgggggttaatctcctgttcggaaaaaaaatattcaacctggtacgcaacctcaaatatgtactcgcaggtttactggtattgagtatgggctttgcatttgtagcgagaaa

SEQ ID NO: 11494 - DNA, 512 bp, Glycine max
  misc_feature (270)..(270): n is a, c, g, or t
  misc_feature (284)..(284): n is a, c, g, or t
  misc_feature (291)..(291): n is a, c, g, or t
  misc_feature (339)..(339): n is a, c, g, or t
  misc_feature (377)..(377): n is a, c, g, or t
  misc_feature (413)..(413): n is a, c, g, or t
  misc_feature (415)..(415): n is a, c, g, or t
  Coding DNA Sequence Number=SeqID_1715
ggtggtgcgattcatatcatgctgtatcttcactaacggctacatgtgctctcatactccgcatctgacaatccgtgcgcggacagagtgtaagagcgacgcatacgtcctatagagatgagtctcgccgatatcgttctgaccttgcggtacttgtgttaaccgacgtaatacttctcacacagcgataagtaatgtacatagatgcgtggctcttatcatacgagtaccgtacttcgtcgatggacctcttcataatccattagatcnaccgagtagagcgntccgtcntctcgtcatgtatggagcatactgcgacgatgtctgtgatgtcccgcngtccgcagtgtgtgaataggtggtgtctagcatcagtnagtgtgtccgcactcgcgtcgctgttggaagtcttntntatatacatgagccactggatcgacgtgctcacatatactcactcatctatcatcgatgcacgcgtgttaatgtgtatgctcatatgtgctattatc

SEQ ID NO: 11495 - DNA, 564 bp, Glycine max
  misc_feature (26)..(26): n is a, c, g, or t
  misc_feature (202)..(202): n is a, c, g, or t
  misc_feature (207)..(207): n is a, c, g, or t
  misc_feature (288)..(288): n is a, c, g, or t
  misc_feature (304)..(304): n is a, c, g, or t
  misc_feature (417)..(418): n is a, c, g, or t
  misc_feature (425)..(425): n is a, c, g, or t
  misc_feature (427)..(427): n is a, c, g, or t
  misc_feature (434)..(434): n is a, c, g, or t
  misc_feature (484)..(484): n is a, c, g, or t
  misc_feature (490)..(490): n is a, c, g, or t
  misc_feature (492)..(492): n is a, c, g, or t
  misc_feature (503)..(503): n is a, c, g, or t
  misc_feature (506)..(506): n is a, c, g, or t
  misc_feature (508)..(508): n is a, c, g, or t
  Coding DNA Sequence Number=SeqID_1716
gattctagtctagtgtgttgggtcgntgtgtgttgttcagttgtatgctagtgtttgtgtatacgctgtgtgatgtcgtcacgtacgagtctcacgagcgtgctgtgcgatactatcatcactaccgtgccagctgccacgctcgtgccgcaacctcacgtaatatgtcgtgcgccggcacagagatcactgagttgatgcnaccgnagtgtcgacgagtacgaggtcgagtgatagtcaggacggagctgcggtgacgatagatgagtagtgcatggacatagagtntgcagtgacgcagtgnacgagtacgcgtacttcatatatttcgatcgcgtgtggcgtgagtacgtgtatagtactatagttagtgtattaattactgcatacatgtctatccgtcctctcgtatcaganntctcgcnanatgttcntcttgtacatataatgactattaacatctctgagaagatgagtagagctntattananatattggttantantntataagctcgactgctacagcacctgctactgattgctgtctacgtacatgcacta

SEQ ID NO: 11496 - DNA, 363 bp, Glycine max
  Coding DNA Sequence Number=SeqID_1717
gatagttcctcgaccctagttcgttcgacgagggaattcttcgggtggctgcaggagatggcggcgttcctgaggtcaaagtgctcctcagttgggcgtacgttgatgggaagcgttggaaacaatctgaatgggggtatcaattcctctgctgaaactgtgacaagaccatctcactgtgatgctatcagccagcaaatcaggacattcatccagatgagaaccaacctcaaggtggtagacaactctggagccaaacgggtcatgtgcatacagtccttgagggggaagaaaggagcaaggctaggggacatgataattggttctgtgaaggaagcgcaacctcgcggcaaggtcaagaaa

SEQ ID NO: 11497 - DNA, 356 bp, Glycine max
  Coding DNA Sequence Number=SeqID_1718
gaactcagcctaccagcgcagaagtacacgcgcagtcaggttggagcaggggaggtcgatctggtagcggagccggtcgaatgccttttggcggagggcctgacggaggaggaggggacgctgcaggggatgaggggctgcgtcgtagacctcaagctccgggccgtagggccgcggtggctcacggggatcgagggatccatcgcctgccatcactctaggcccctcatgatgaccagcgtcggtcgcatccacgccaggcttcacgctcaggccctcacacgttcaggattaggtttgttcggcgctgctggagtactatgaccaccagacagactcagcaaaaaggactccgt

SEQ ID NO: 11498 - DNA, 566 bp, Glycine max
  Coding DNA Sequence Number=SeqID_1719
agtacttgtttcacttgcattaccactcttttatctattgctgttattgtctatgtcatgtggtataccaagaagattctcaatgatcttgataatgaagttgttcacctcaataaatctgttgatcatcatcatgatattcaggatattgaatcaggtattcccgttgagaaaaaagaaactaaagaaactgcaagttctgaacgtaaaagtgctgacagtaacagccctccaagagtggatcaatttaaacttataaaaaaccaaagaggatcactcgagatggtagaaccatatcttgataatttagcttgctaatttcagctaaaattgaaaatgaaaaggatctgaagaccctggtttaatatctacatcaagatatctttatatcaccttgcctttataatgctctctgggaaattttgactttaacagagagaaaaattgcattgagttgtgtcgaatgtatttttatttgcattgtttttatggatttatcaatgttatttatgaccatgagcctttgagattttaccttaaaggctctctggttaacttacaaagtc

SEQ ID NO: 11499 - DNA, 585 bp, Glycine max
  misc_feature (40)..(40): n is a, c, g, or t
  Coding DNA Sequence Number=SeqID_1720
agtggaccgtaccacactccaaaagactaagcaaactctnccgtgctgccgcacaatacaatcagagagagacgcgacgctagaatacaaaaacatatacttggtctgtaggagcgccagtaggaataatagagaggtggggcatctactagtttttccctaatcgaagatagaaacaacacttataagtgtgaacatacagtataatacgacgtcgagcgtttggtgtgaagggtacctttatatatatatctagagccgatgagtggatatcgcatagtgttctcgatgtgatatcacgcaagcgagcagggagagatggtctatattgatctggtcatatggttgttaaataacaaagatgtattggtaatgtctttttcgagattttgtttttatgagtatataaggagatagtaatgaatgttgcgcggaaaaagaggaggcaataaacggaaattcgcccttctctccccagctcaccgggggagtatctccattaatttttgaggggggcgcgaccgccaacacaggggggggtaggctccttattttttgtttagggtgtgtcatcttaattacgga

SEQ ID NO: 11500 - DNA, 487 bp, Glycine max
  misc_feature (26)..(26): n is a, c, g, or t
  misc_feature (39)..(39): n is a, c, g, or t
  misc_feature (48)..(48): n is a, c, g, or t
  misc_feature (87)..(87): n is a, c, g, or t
  misc_feature (151)..(151): n is a, c, g, or t
  misc_feature (158)..(158): n is a, c, g, or t
  misc_feature (169)..(169): n is a, c, g, or t
  misc_feature (175)..(175): n is a, c, g, or t
  misc_feature (179)..(179): n is a, c, g, or t
  misc_feature (188)..(188): n is a, c, g, or t
  misc_feature (190)..(190): n is a, c, g, or t
  misc_feature (205)..(205): n is a, c, g, or t
  misc_feature (209)..(209): n is a, c, g, or t
  misc_feature (214)..(214): n is a, c, g, or t
  misc_feature (231)..(231): n is a, c, g, or t
  misc_feature (264)..(264): n is a, c, g, or t
  misc_feature (283)..(283): n is a, c, g, or t
  misc_feature (285)..(285): n is a, c, g, or t
  misc_feature (287)..(287): n is a, c, g, or t
  misc_feature (289)..(289): n is a, c, g, or t
  misc_feature (318)..(318): n is a, c, g, or t
  misc_feature (326)..(326): n is a, c, g, or t
  misc_feature (338)..(338): n is a, c, g, or t
  misc_feature (346)..(346): n is a, c, g, or t
  misc_feature (348)..(348): n is a, c, g, or t
  misc_feature (358)..(358): n is a, c, g, or t
  Coding DNA Sequence Number=SeqID_1721
gtgcggtatgtctctcttattctatncttctggtgtgcntctgtgtgntgtggtatagtgtagagcgcgtcagtgtacacgatcgangctagaggatgtgtatattatctcgtattgagtaggactcagacaccgtgtggtccttctttcntatgtanagatatatganacatanagantaaatagananacataatactgatantcgngtganatagaggtactgagagngagggatgatagacagcgagacagagacagtanagatatacagatactcacnanancnacctagacacatacatagacgagagatanactggganagagagagaganatatcgtntnagtgagacanagtgatatatttctctcgtgcatctcgctgcgtgcgtgcggatgcgtcatacataggtgagcgatatgtagtgctgagatactgcagcggtggcgttcgtggtgtgatgattgcccgagtcctcttagc

SEQ ID NO: 11501 - DNA, 558 bp, Glycine max
  misc_feature (60)..(60): n is a, c, g, or t
  misc_feature (219)..(219): n is a, c, g, or t
  misc_feature (223)..(223): n is a, c, g, or t
  misc_feature (256)..(256): n is a, c, g, or t
  misc_feature (259)..(259): n is a, c, g, or t
  misc_feature (362)..(362): n is a, c, g, or t
  misc_feature (370)..(371): n is a, c, g, or t
  misc_feature (376)..(376): n is a, c, g, or t
  misc_feature (409)..(409): n is a, c, g, or t
  misc_feature (421)..(421): n is a, c, g, or t
  misc_feature (471)..(471): n is a, c, g, or t
  misc_feature (479)..(479): n is a, c, g, or t
  misc_feature (486)..(486): n is a, c, g, or t
  misc_feature (524)..(524): n is a, c, g, or t
  Coding DNA Sequence Number=SeqID_1722
cacatacacatcacatgactcgactatctacattacgctcacactcctactcatctatcncgattacacatccgcatcatcaccatagctatcaacacactccacactctacctatatctcactcactctactatatcgtcatatctctctcatctcttagattcgtcgctacatcactcatactactctacctacgcttctctatatatcatctcgcntgtncgtcactcttatctctctctcaccacatctctnctntctctacctactctgctcatcacactcctctctctactcctatgattcgtcttaaccacctctccaactgctagctgcgcgctcttagctactatgttgacancatgccanntaaangtgtcaactctcgatatcagactctacaagctnatctactatatnatccacactacctgtcatctcatgacgatgtactttcatgacatcactanctcgccgntcctagnacactgatgtatgacactcaacgtctactgcctttacntatccactctccgtcccgtattattttactgctc

SEQ ID NO: 11502 - DNA, 553 bp, Glycine max
  misc_feature (28)..(28): n is a, c, g, or t
  misc_feature (42)..(42): n is a, c, g, or t
  misc_feature (270)..(270): n is a, c, g, or t
  misc_feature (295)..(295): n is a, c, g, or t
  misc_feature (325)..(325): n is a, c, g, or t
  misc_feature (334)..(334): n is a, c, g, or t
  misc_feature (403)..(403): n is a, c, g, or t
  misc_feature (438)..(438): n is a, c, g, or t
  misc_feature (441)..(441): n is a, c, g, or t
  Coding DNA Sequence Number=SeqID_1723
accgcactccagtcgtcatgtgcagctnccccccatacacanacacacagctctagcatcatcgtcgctatcgtgatcacacctcattctcacccgctactacttacaatcatcaccgaccacgcaaatcgtcgctcgtctccacactaactctctctctccatgtccatatgctactcatatatctcctacacagcatcaacactacgattcacaaacgaaaatatctcttagctacgactattatccacactacacccctaccgtgtnctagatgtctagcaccgaaaatctntagcactctgttgagagtcgctgtatcatntcttcactnttcgcttacgcagtgactcatgcattatcttctcctatctatcacacactctctctgttgcgcgacctnccccaactctcactatcacacacacactcacaccntcncacgcacacaccccgacaccgtatatatgactctaaccattatctctactaccatcatcatcatctacaccaccctgatcaatataataatattaacctcgtgaagcacaca

SEQ ID NO: 11503 - DNA, 484 bp, Glycine max
  misc_feature (80)..(80): n is a, c, g, or t
  misc_feature (95)..(95): n is a, c, g, or t
  misc_feature (184)..(184): n is a, c, g, or t
  misc_feature (219)..(220): n is a, c, g, or t
  misc_feature (238)..(238): n is a, c, g, or t
  misc_feature (260)..(260): n is a, c, g, or t
  misc_feature (266)..(267): n is a, c, g, or t
  misc_feature (278)..(278): n is a, c, g, or t
  misc_feature (349)..(349): n is a, c, g, or t
  misc_feature (363)..(363): n is a, c, g, or t
  misc_feature (370)..(371): n is a, c, g, or t
  misc_feature (394)..(394): n is a, c, g, or t
  misc_feature (402)..(402): n is a, c, g, or t
  misc_feature (438)..(438): n is a, c, g, or t
  misc_feature (440)..(440): n is a, c, g, or t
  misc_feature (450)..(450): n is a, c, g, or t
  Coding DNA Sequence Number=SeqID_1724
agttgagatatattgatgttgggtatgagtggtatgtaggtattaatggtaatttattacttgtagttagtaagagttanatatataataagaanaagaagaagtctatagatgagaggagcatatgaagttgtctcgatggggttgtgtgtgttttatgttttatgtcggcgtatctacaatntttcttttatagatggtatagataacagatatganntcggtcaatataagatgnataagacaccaataacaagagnaatcgnngcaagatattnagaaattagaaaaaaagacgcaacgcgactagacgtacacgtctcgctgttctgtgattaatttttgcatnagataccctctgantctttanntgtgtgtgcacgggcgaggtgtngaggtggngtatagatactaggatgcgcttgagagggtgagacngnagcaagcagnctgtaccaggccaccttccgcgatataaaatgaa

SEQ ID NO: 11504 - DNA, 376 bp, Glycine max
  Coding DNA Sequence Number=SeqID_1725
ttaaactcactcaactttaagctgcctttgctgttcaaggtcttgacactactgatcttaatgcactcttaagggctcatacatttggaagagctcactgctctttatttctttggcgaatgttcaattttaatgggccaaggaaacctgttcaactttttggccaatttaattggaaaaattgggccaaaatttcccaatggggacccacaaaccttggaattttaccctttcactcctaaaaaaatgaaaggtctacttttccattcttaggtcaagaaggggtgcttaaaaggatcataactgttttttaacccgtgccgataccatccattggcataagtttagcaggaacaaaagttttctttatgccttg

SEQ ID NO: 11505 - DNA, 590 bp, Glycine max
  misc_feature (41)..(41): n is a, c, g, or t
  misc_feature (224)..(224): n is a, c, g, or t
  misc_feature (277)..(277): n is a, c, g, or t
  misc_feature (288)..(288): n is a, c, g, or t
  misc_feature (351)..(351): n is a, c, g, or t
  misc_feature (360)..(360): n is a, c, g, or t
  misc_feature (440)..(440): n is a, c, g, or t
  misc_feature (456)..(456): n is a, c, g, or t
  misc_feature (520)..(520): n is a, c, g, or t
  misc_feature (522)..(522): n is a, c, g, or t
  misc_feature (529)..(529): n is a, c, g, or t
  misc_feature (542)..(542): n is a, c, g, or t
  misc_feature (565)..(565): n is a, c, g, or t
  Coding DNA Sequence Number=SeqID_1726
gcggagtgatacgttaagtgtctacatgacgctcttctgtnagtcacaactcttatattatggctagttatattatagtaaccatttgcgatgcaactcgagtcatacactaatagtgctgtcgagtgcagtagcaatgttagtgtgtctgcatgactactatatctcacgatagtttgaatagttcggcacataagactgtgtgcatactagagagtgtgcgngctcgtatgatacgcacgcaagctctgatcgagtgatgaggtcgtgtcataanagatttgatgncagtcggatgcgggacagagagcacgtcgaatcgtacgagcgatcgtgctagcgcgcgcacgngtagatgtncacatatacatgctagggatggcagggtgtcggtcacacgctgagcagcagagagtgatgtggtgaagatatatcatgtngattgctcgtcatagnacagagtgcaaatgcaaatcatataaatataaatagacagaatgtcggcgaatcgacagggagnanaatcaanagcagatgatatntgcacacgtgtgcaatgacacancgcgactcgtagactgatagatcta

SEQ ID NO: 11506 - DNA, 364 bp, Glycine max
  misc_feature (44)..(44): n is a, c, g, or t
  Coding DNA Sequence Number=SeqID_1727
gcaaatcctagcttttttatctggctttcgaatatttatcgaanaaaccaaaaatagcttcctctctttctcctccgttcttcaccgccactgtaatcgcttcgcctccgacgtctcctccttttcgccaaatccctaaccactcggtgtttctctcctcctccaccgttcacctcggcctcacagtcctacaaaccttccgctggaacctcgtctgctttgaatcaatctcagtagcgaaagctcttgactagctgatacctcggtctttacgtttctggctttaagagctcttgattccctaatatcatcccttcaggcgcgtctgcacagtagagaattgaaacccaatgctaaggagaga

SEQ ID NO: 11507 - DNA, 537 bp, Glycine max
  misc_feature (39)..(39): n is a, c, g, or t
  misc_feature (41)..(41): n is a, c, g, or t
  misc_feature (64)..(64): n is a, c, g, or t
  misc_feature (132)..(132): n is a, c, g, or t
  misc_feature (208)..(208): n is a, c, g, or t
  misc_feature (353)..(353): n is a, c, g, or t
  misc_feature (412)..(413): n is a, c, g, or t
  misc_feature (423)..(423): n is a, c, g, or t
  misc_feature (461)..(461): n is a, c, g, or t
  misc_feature (477)..(477): n is a, c, g, or t
  misc_feature (498)..(499): n is a, c, g, or t
  Coding DNA Sequence Number=SeqID_1728
atacaagcgttgattacagatgctggagtatgtgtatgncncatcacgccatctgaagttaatntattacatacacatcagatgttggaggatgggtacttacgatgagagaggcagcacgcgtgcacgtgnggccaacactgtatatagtagggttggtatgtatctgtctaggtagaggagaatcagagcagtcacaatgagtcgntctcatgtgttggatggagtgataagaaacagagggacactccgcaggtcgtcggcgggcgtgaggcgaggcgcacaacggacgagataacgagcacgatagtaagcggagagtctatggtgcacacaccgcgcgacgcaggctncgcccggcgcagtcgcgcgagtagagagctatcgacatgtatactcgctctgtgtcttnntctcacgagncacggtcataatcatacgactgagtatgcgaagggagnggctttactcagatancacacgcgatgatctgttgtnncgcggtcgagatagatgctataagagatcgagccggag

SEQ ID NO: 11508 - DNA, 267 bp, Glycine max
  Coding DNA Sequence Number=SeqID_1729
gccgaggctccaggtttcctcaaagctcccggcggcgctccggctatcgtcgccatcaccgtttcttgcctcggtggacgatccgccttcatcgtaaaactcggcgacgacgagttcggacacatgttggctgggatcctgaggaaaaacggcgtcgctgatcaggggatcaacttcgataccggagccagaaccgccttggcgttcgtgacgttgaaggccgacggtgatcgggaatttatgttttaccggaatcatagcgccgat

SEQ ID NO: 11509 - DNA, 563 bp, Glycine max
  misc_feature (118)..(118): n is a, c, g, or t
  misc_feature (139)..(139): n is a, c, g, or t
  misc_feature (186)..(186): n is a, c, g, or t
  misc_feature (208)..(208): n is a, c, g, or t
  misc_feature (268)..(268): n is a, c, g, or t
  misc_feature (283)..(283): n is a, c, g, or t
  misc_feature (331)..(331): n is a, c, g, or t
  misc_feature (496)..(496): n is a, c, g, or t
  misc_feature (498)..(499): n is a, c, g, or t
  misc_feature (536)..(536): n is a, c, g, or t
  Coding DNA Sequence Number=SeqID_1730
gtgtacagacacgtaggatccttctcgccgagccgcacatgttctagcgcgcgccgtactcagctggtaaaatgcggatggacgcacataggagttcgccatgcatgagatatacacntcatataaatgataaaagaanaaataatataccacacacaaacacaataatcacatatacatcacatnatcatcaagcagcgcgagacgncgtagactacacgctcagtgtcacgcatgcgccgcactgtcgactgcttcgacctcagantcttccttcactctnactatatagctgctcttctatgtacagtcagactatctctcattcacncgcgtgagcgcgagccgtggcgctccctgtagagaagtagacgctaatcatagtctgttgtagagtctcctttagccactcacacactacgcctatgttagctggtaccatcatagaatcattagctcatgttagagaatatgacacatcttctcacctaccatngnnaaggaaacacaacacatcagcaccccaccacgggcgnacacaagcgcagatccgcgagaccaca

SEQ ID NO: 11510 - DNA, 332 bp, Glycine max
  misc_feature (101)..(102): n is a, c, g, or t
  misc_feature (104)..(104): n is a, c, g, or t
  misc_feature (128)..(128): n is a, c, g, or t
  misc_feature (215)..(215): n is a, c, g, or t
  misc_feature (235)..(235): n is a, c, g, or t
  misc_feature (240)..(240): n is a, c, g, or t
  misc_feature (246)..(246): n is a, c, g, or t
  Coding DNA Sequence Number=SeqID_1731
atcaacagcagatacatacatgacaataaactgagagtgagcataatataatatccacgagcgatcactacatatcgtgatgatctacagacacttctatnncnaataataatacatatacgtaaatnttagtgacgatactcgcgtcatcagcgcggtcgactctactatcgtctagttgatatcatcagcatctcacaacgtcatcattatanaccatataatagagagtcantgctncgactnctgacgtagacgctaactaatactgagactcatatcactcacctacatgagtatagtcagtgcagtcgctagaatctccacagtta

SEQ ID NO: 11511 - DNA, 348 bp, Glycine max
  Coding DNA Sequence Number=SeqID_1732
cacttttcaagagtcgtgagcgatggggaagtgttacccaactgggagtgctgattaccagagggggcggtgagaaggcgaagaagaagcgcagaggcgtcatcgctgagaagagaggcgctccgcgggggcgccgtttggggtggggctctgctgggacctttgacaagggcgcgaagagccgggggacccttcgggaccatcaagcaccctgccgaactgggtcacagcgctaacaacgggcttgacatcgctgtgaggcttttgggagccactcaaggcggaggtccctattgtgagcgtacgccgatttctaccaggggggtggcgtggttgccggtgaggtca

SEQ ID NO: 11512 - DNA, 448 bp, Glycine max
  misc_feature (64)..(64): n is a, c, g, or t
  misc_feature (73)..(74): n is a, c, g, or t
  misc_feature (109)..(109): n is a, c, g, or t
  misc_feature (112)..(113): n is a, c, g, or t
  misc_feature (155)..(156): n is a, c, g, or t
  misc_feature (201)..(201): n is a, c, g, or t
  Coding DNA Sequence Number=SeqID_1733
tgcgcatcaaggcttcggtgaaaaacgttgtagtcgctgttgtggcctctaccgcgagtgcatngctggctannagctccatggccactgcagtggtcctgggtggtgntgnngggtctctggctttcagttcccagcaatttctccgtggcctnnggggagaagatagtgttcataagcaacgcaggttccccccccaangtcgtgttggtcgagaacgagattcctatcggcgtggatgcagggacaatctccatgagcgatgaaggccttctcaatgcgcctggtgcgacttacaacgttactttgtatgttaagggagcgtacagtttgttctgttcgcctctccaaggagctggtatggtgggaaaatgtccctgttaattgaatattgtctcaagggctcgtctcctccgtctaagttgtcatatggttccttgttctaata

SEQ ID NO: 11513 - DNA, 510 bp, Glycine max
  misc_feature (179)..(179): n is a, c, g, or t
  misc_feature (193)..(193): n is a, c, g, or t
  misc_feature (195)..(195): n is a, c, g, or t
  misc_feature (476)..(476): n is a, c, g, or t
  Coding DNA Sequence Number=SeqID_1734
agattgatctgatacggcgttccctctcgaggctacagacgcgacaattagcatgtaggcgacactgtcacagattaccgtcgtctctaagctgcgtagatacgtgccactgctggacatcagatgacagtcacagtccacagctggtggtgtcgccgcagagacgccgccgagctgtncgctctacgagggnanagttcgaggcgcaactgatgtgcagggtcgcttcagcatgagatagtatacctcccatgctcacacgagtacatacatacatctgcatgcacattcctcactcagtcacgcgcagcacacctagctatgtcgtactacgcacagtgcaacagacacacagagacacacacagcagagagagatctctctatctgcctctcgcctatgtctctgcgagcgagtgtattctctacgctcacgttctcctgagttacgaccggcctcacgactcgagcccgtgncgcgtgcgcagtcttgctccgttcttgtacagcc

SEQ ID NO: 11514 - DNA, 513 bp, Glycine max
  Coding DNA Sequence Number=SeqID_1735
gtttctccccgctttatatacaaagcaaccaaccaagccatataaggacaatcacgtcaaaaaaagacagagaaaaagcaaaagaaacaaatgccgacaacgacggatcaatgaaaacgaagaagcctcgcgatcgctgcgcccaccgggatcttccactaggctccaagactccgaagcaccggaacctatcaacacctccaaaaaggatcgcgacgatgacgacgctgctgccaagggtttcccccgatacacgacgaggcgagaggaagggtagcccccggcgccctcccggaaggtcaggtggcacccacaggcgccaccgcgccggtgtcggccaagccgacaggggtttcccccgatcccaacccgcacctcaggcgctccggagccagccaccaaaccaaccaccccccagcgccaacacggtcaagaggcccccacgctgtctcaccacgacaccgcgaagtaaggacaacacggcgaagaatcagagccggaactagggcatca

SEQ ID NO: 11515 - DNA, 491 bp, Glycine max
  misc_feature (45)..(45): n is a, c, g, or t
  misc_feature (174)..(174): n is a, c, g, or t
  misc_feature (255)..(255): n is a, c, g, or t
  misc_feature (293)..(293): n is a, c, g, or t
  misc_feature (371)..(372): n is a, c, g, or t
  misc_feature (374)..(374): n is a, c, g, or t
  misc_feature (393)..(393): n is a, c, g, or t
  misc_feature (434)..(434): n is a, c, g, or t
  misc_feature (443)..(443): n is a, c, g, or t
  misc_feature (466)..(466): n is a, c, g, or t
  Coding DNA Sequence Number=SeqID_1736
agagtctgggcgtgctcatctcgctcgcgcggcgccgcgtaaacncggccggctgacagctgctcgcttcgtgacgacgtcccgtgtggcgcccggcggtcagtatgagagagatagagacacacatagaacgcgatcaatatatatgtctcgagatcatatgcactaaagtanttcatattaattcatatacctgataactctgatgatgatctctggtgatgtgtatagtatctacagacaggcccgtagtangatactacaaaggagatgaagtaatcgcgcaggatagncacgcgctagtgacgacgacattatgcaccaccccacatataccttcatataatcatacagcgacgcggggagtaganngnagactgctatgaaccccgncacgctgttattatgacgtctgctttgtctctgtcattaantagagatanaaaggagggcgttaaaatctacnatatagccccgcaagtgcggaggag

SEQ ID NO: 11516 - DNA, 422 bp, Glycine max
  misc_feature (26)..(26): n is a, c, g, or t
  misc_feature (28)..(28): n is a, c, g, or t
  misc_feature (102)..(102): n is a, c, g, or t
  misc_feature (116)..(116): n is a, c, g, or t
  misc_feature (169)..(169): n is a, c, g, or t
  misc_feature (202)..(202): n is a, c, g, or t
  misc_feature (345)..(345): n is a, c, g, or t
  misc_feature (387)..(387): n is a, c, g, or t
  Coding DNA Sequence Number=SeqID_1737
cggctctgcgctgtctgttcgtatanantaagccatcgaagagacgatcaggctgatatgttactacaccgtgcgagcgggagcgattcagataacgtgtantgatgagatgactnctgctacttcctcatcactcatatgatcgcgtcagctaggacgcgcagcctgnctacactctgcatgtggaacgctgactatgcgngaccagagaggagagactgactagcattgagatatgctgcgtatgagcgtatacgtatcgctctgatgcgttgactacatgtgacacgcatacgagacagtagcgctagtgtgcagcacaacattgacgaccagtagcacacngcaccgtggcgctgtgtagctcaacgctcatgaccagtaaanagtgatatgcgatgctgcgtttactccgagaagga

SEQ ID NO: 11517 - DNA, 525 bp, Glycine max
  Coding DNA Sequence Number=SeqID_1738
aactcatggtcacaatacgactcatacaacgactgtactcaaggagtctgcaatatcaactgcccgtaatggcgatacctaatcttcgctccacctcctccttccttactcgacgaagaagactcatcctctccctccaggttctcccctctcctcatcgccctaatcgagatcctcctcaccgcctatatcctcgacgattactacactctccactctaaataatgaagccgtcaccgccgcgaaacctcctcctcagaactttcccggcgagtatccagctccaaagcattggcgagtgtacatgttctcaacgacgctctgattatatcgattaccgtttataagtatccaaaggtagatgaaaactggaaactcccacattagctccgatagaagaaaagatatctaacacaaccaaagcttagaaactgttgcccaagtgaaaccacgcgaattcctcttccgaagaatcaacacttgggagagaggctcactataactgaccatctctgccgaaatttt

SEQ ID NO: 11518 - DNA, 555 bp, Glycine max
  misc_feature (77)..(77): n is a, c, g, or t
  misc_feature (111)..(111): n is a, c, g, or t
  misc_feature (199)..(199): n is a, c, g, or t
  Coding DNA Sequence Number=SeqID_1739
gtcctatgaccgtctagagggcacggaacgctctagcgtcatcacgatataggcacgccgctgcgtggcgcggtaanacggacggactacgttacgctccacaataaccgnccacgacctgtatgcatataagctccgagcgagttggagacggagatcggatcacgtgatgactaagcctgaggcggagagatgaaantcgcacgacagagatacactgtcagatgtcgagaatgtcagcctggcgagctcgacggtgacgcacgcagcaacttcgatgagagagaatcgagcattgcgccgagcagcgttatcgcatcagtacacaaacgggcaaacgtctcctgtactatcctacaatatccaacagagatgagccaaaagctgtctgcgatgtagtacaacagcgctgtgcttgactccaccaacgtcaccgatgtaatattacctcacgagagaatagagatctgataaatgtgttgcgcaatatacttatctcgtgtacgacgagttgtacctcggcagctcttgacctcggcgattgtgagtcactcg

SEQ ID NO: 11519 - DNA, 477 bp, Glycine max
  misc_feature (40)..(40): n is a, c, g, or t
  misc_feature (135)..(135): n is a, c, g, or t
  misc_feature (169)..(169): n is a, c, g, or t
  misc_feature (232)..(232): n is a, c, g, or t
  misc_feature (245)..(245): n is a, c, g, or t
  misc_feature (311)..(311): n is a, c, g, or t
  misc_feature (358)..(358): n is a, c, g, or t
  misc_feature (363)..(363): n is a, c, g, or t
  misc_feature (390)..(390): n is a, c, g, or t
  misc_feature (425)..(425): n is a, c, g, or t
  Coding DNA Sequence Number=SeqID_1740
gacgttacttacgactatatcggacgtatacactatcacngctcgcacacagagagatatagtgacatcaatatcacatgtcgcttatacatatcatatactacgtaatgtcgtcgaatcttcgcgtactcactntgtccttctgtactgcagtatgtcgtacacgacntccttcattacccgcatctgctctcactcacaccactacagccatcatatactgtcaccacangcatactcactanctactcgacgtcgccaggataattcgctaatcattcctcatactcaactcgtcgtatgtcacgatnactaactcatagtcagtgtctcacatacatggctgactgaaagatcntactncagatatgcgatcgcgacattcacacntgacactgacactctactatacttccgccgctccnctgcacgttcaccatgattacacgtgcgatgcgcgagcgatcacgacgtgaa

SEQ ID NO: 11520 - DNA, 227 bp, Glycine max
  Coding DNA Sequence Number=SeqID_1741
tcgagcaggaccctgactgcatagttgcctgcgaaacatgcaccaaaaccaactgggccatggacataggacaaaccacgaccacggtcactgctgactgatagaggatagcgcctgacacctgatggaacatcggctacatgatgaatgacgggatactggctgccgacaagtgctaggtcctagtgaacattgaacacctgagccctgatattgcgcacgcggtc

SEQ ID NO: 11521 - DNA, 570 bp, Glycine max
  misc_feature (85)..(85): n is a, c, g, or t
  misc_feature (89)..(89): n is a, c, g, or t
  misc_feature (126)..(126): n is a, c, g, or t
  misc_feature (139)..(139): n is a, c, g, or t
  misc_feature (143)..(143): n is a, c, g, or t
  misc_feature (161)..(161): n is a, c, g, or t
  misc_feature (190)..(190): n is a, c, g, or t
  misc_feature (216)..(216): n is a, c, g, or t
  misc_feature (222)..(222): n is a, c, g, or t
  misc_feature (255)..(255): n is a, c, g, or t
  misc_feature (258)..(258): n is a, c, g, or t
  misc_feature (299)..(299): n is a, c, g, or t
  misc_feature (397)..(397): n is a, c, g, or t
  misc_feature (427)..(427): n is a, c, g, or t
  misc_feature (438)..(438): n is a, c, g, or t
  misc_feature (441)..(441): n is a, c, g, or t
  misc_feature (453)..(454): n is a, c, g, or t
  misc_feature (507)..(507): n is a, c, g, or t
  misc_feature (511)..(511): n is a, c, g, or t
  Coding DNA Sequence Number=SeqID_1742
actgttatcgttcacacctctatgttcctcgcgatacgcgcacacacatgacgctcctgttccatctttctacttacatagcgantcancgccgggctcgatgcacgctcctgtggcggcctatancacactgactcanccantgatacgtgacgctgttnctacgatgcagccactgctcacatcagantctcagtcacgaccgcgctagcgtcncgactnctatcacgaccatgaatcgtcgtcatctaccgngtntattcgtaccgatctgacttcatcattcagctacgctacgntcgagtatactgcacttgacgatatactcatatgatatagcgaccccatcgtttgtgttgtgacgacttgtagctagtacgtgtattactatatgatncgctctcgttgccgtctctggtgttcacgntcactagccanctnctccgttacggnncatggtatgttacgtcgtgtgtcggtgattgatcatgatgtgtgaatgctgancaantaataaatggtgtaactggcggagacagacagaagtgttaggtaaaaggtcgtcatccg

SEQ ID NO: 11522 - DNA, 541 bp, Glycine max
  Coding DNA Sequence Number=SeqID_1743
atagtagcatcctctgtttgttctgcttttaattctcttgttcaaaaacatattttaaatggaggatatcatcctcttgtagttcaaacttatgttgttactagtggtgcacttatgttcatgattacctacactccatttggtctatttgattctaataaatggattctctcttcttctatttggatttatgtttctattgttggaattattgcaactggattaccttggtgtttgggaattattgctttgaaacatactagtcctatgactactagtgtgtatgtagtattacaaccactgattgcagtattagttggatttgttcttaatggtgaagttctcacctgggttcaaatgctggggagtgctcttgtattattaggtctcgtttgtgtaaatgccactcctgttgttgaacgtgcagtcaaatatttcacacaacgtgcaattgcaaaatcaaaacaatttgaacttattaataatgaagaagaagagaaagaagtggaattgaatatattatccgaatcctcatcagaag

SEQ ID NO: 11523 - DNA, 565 bp, Glycine max
  misc_feature (49)..(49): n is a, c, g, or t
  misc_feature (130)..(130): n is a, c, g, or t
  misc_feature (135)..(135): n is a, c, g, or t
  misc_feature (350)..(350): n is a, c, g, or t
  misc_feature (356)..(356): n is a, c, g, or t
  misc_feature (380)..(380): n is a, c, g, or t
  misc_feature (392)..(392): n is a, c, g, or t
  misc_feature (421)..(421): n is a, c, g, or t
  misc_feature (502)..(502): n is a, c, g, or t
  Coding DNA Sequence Number=SeqID_1744
agcgcggagagtgtcgttctcgacatccagcacgtcagatcgagaatantatagtcacacgtgagactcagtaaacatcaacgacgcacaacgctcgcacagatatcacgcaatttccctcgcacatatnactangcgcacgcctctacgcctaccgcgcatatatatacgaggtcttctctgagtgagctggcgcgcgtttgacgatgagatacacacatctcgcgacacgtgctgactacatgtgtcatgtagtctatacagacctgtcttctacctctccctcatccctgtaccgcttatgcacatctgaccggtcctcacgcactacacaatattgtacattcgcnatcgtnctacattcgatacattcttgtctnccggtgctatcnctccctacgtcatcgttctatcagtctcncaccggtgtagatactctgatcacatgcgtgctgtctgatgcctgtaatgcacacgacaggcatgtgtatccgacacaaantatatgcacgcggacgagatatggcgacgcgagataccacagaacgcacgtatatcgccctcg

SEQ ID NO: 11524 - DNA, 371 bp, Glycine max
  Coding DNA Sequence Number=SeqID_1745
aaatggcttcatattcttcgtcctctctttctagaatctcaactctccagaatcatatctcccctcttgaagccaacaacaagctacggagtctggtcaagatatctccacaagtgctctgaagccatagccagtggacgtgctgtggtcgctcttgagtcaaccattatctcacatgggatgccttaccctcaaaacctgcaaacagcaaaagaggtggagtcaattgtgagagagaatggagcagtccctgcaacaatagctatattaaacggagtaccttgcataggtctgaacgaagaagaactagaacgtcttgcatctctgggcaaaagtgtccaaaagactgcaggcagggacataccacatgt

SEQ ID NO: 11525 - DNA, 435 bp, Glycine max
  misc_feature (74)..(74): n is a, c, g, or t
  misc_feature (211)..(211): n is a, c, g, or t
  misc_feature (243)..(243): n is a, c, g, or t
  misc_feature (247)..(247): n is a, c, g, or t
  misc_feature (297)..(297): n is a, c, g, or t
  misc_feature (300)..(300): n is a, c, g, or t
  misc_feature (307)..(308): n is a, c, g, or t
  misc_feature (311)..(311): n is a, c, g, or t
  misc_feature (321)..(321): n is a, c, g, or t
  misc_feature (342)..(342): n is a, c, g, or t
  misc_feature (344)..(344): n is a, c, g, or t
  Coding DNA Sequence Number=SeqID_1746
ggactgtcgagttctttgtatgttaagtaatctcctatctcagcgtgtctcggcgagtgtgagccgtggatcgngagtttcgtgtcgtgcgcatcacccggcactcacgcgcatcattatattatataatgttccacgccacgcatcgtctcgcgcctaccacactatctagagtataacactagacaataatgagaagagatgctccgtnacgtggagtgatctcatacaatacatcatgancgcnaacgcgcattacgctcaatcgagacgccgcgcagaccgagaggcgtgcgnccngccgccnnctnatagtgtatntctttgcattatatcatctgngnctgtcgcgcgcgcgcgtatcagtatatagcgcgcgccgcgagagctagcacacgcactatgcgagatgccgcagtggctagttagtcatat

SEQ ID NO: 11526 - DNA, 542 bp, Glycine max
  Coding DNA Sequence Number=SeqID_1747
gccaacttcgcacctcactggtggggctgatgatcatatagaagtgaaagacgcgccagagggttaacactctgctcgcagttgaaatatttatatcaaacttgcttttattaaatattttgaggcgtttggctcttctttccgctgcgaattctccctgttgttcctttttttctggcttcatttcctctcccctgttttctcccctctccttttctcgtgttggtttcttctatctttctattgtatgtattcctctctcttcttattgtctctccacttcatatatcttgagcgtcttctttctcgtctttctctttttcctttcctctcatttactcctcgtcattattctgtctttacctcctccttgtcatctcccccgcacgtttggggcggtataaaccttccctttctctttctcgcgtctgcaggtgcagcggggtgggcgttttattatttttttctgtgggggactattttttttattgtcgctctattttatttttggggaaaaaattatatattactcacttccccac

SEQ ID NO: 11527 - DNA, 336 bp, Glycine max
  misc_feature (89)..(89): n is a, c, g, or t
  misc_feature (216)..(216): n is a, c, g, or t
  misc_feature (305)..(305): n is a, c, g, or t
  Coding DNA Sequence Number=SeqID_1748
ggacaactattttcttcaaccatagctctaaaaaatttggctgaaaacaaaatccgtcataattagctctgcttggaaaatttcttganagtgtcccacttttccataaagtctttaatagtgtcattaacagttctgttggtttcaataacatttctcaattcttcaatgttgaacttcttcatatcatcctccaatttaatgttattttgtaanaaggtaagtttgctgagtaagatgatattttgttcttcgacttccttggatttgaattgtaatttagctctgagttctcttttatcaanaagctttaatctcagatcttcaactttaaca

SEQ ID NO: 11528 - DNA, 505 bp, Glycine max
  Coding DNA Sequence Number=SeqID_1749
aatcaaaccacccaaattcttctcagatctgtacttgtacttgtacttcttctaaaacccagaaagaaaattaaagcaatggctccaaaagcagcagagaagaagccagtagaggagaaagctccggcggagaagaagccgaaggccgggaagaagctgcccaaggaagcaggtgcaggcgttgacatgaagaagaagaagaaatcgaagaagagcgtggagacgtataagatttacatcttcaaggttctgaagcaggttcatccagatgtcggaatctctagtaaagccatggggatcatgaacagtttcatcaatgacatcttcgagaagctcgcccaggaatcgtcaaagcttgcaaggtacaacaagaagccaacaatcacctcgagggagattcagactgctgttaggctcgttcttccaggagagctcgccaaacacgccgtctccgaaggcaccaaggccgtcactaaattcaccagctcttgaacatccaatctaa

SEQ ID NO: 11529 - DNA, 501 bp, Glycine max
  Coding DNA Sequence Number=SeqID_1750
ccacccttaatacctagaacaagagaagaaaaattgtaaactcgaccattatgatgttaactctttactggaggtagtatgtatctagatgcaatcgatatatttagagaaggattttttaattggttagcgaactatgtatttggagtggacagaggtgtcagttattgtaaactgtaattgtatggattattctgttttgatgtataaaaatattgttatgtatttgtaagcgctgtactgtgcctttcaggttgtttatatctgacatgaacatcatctccagcaatgtagtgcttgctgtttatcaacaaaagaaattgtaaactactagtagttatcctatgtaattttaaaaacaaacgaaatggataacattttaagatttatatatataatgtataattatcatacaaagttcatcttttttcaagtatcctcaccatcattcgaattttcatctttactacatacgtgcatattgctacataatgtttccag

SEQ ID NO: 11530 - DNA, 335 bp, Glycine max
  Coding DNA Sequence Number=SeqID_1751
tcccctgcggcagaggaagcaacaaccgtaagaggattataccgcaacatgcccgagtggatctgccgagaggaacctacagtcctcaactcgcccatccaggacactacctcttggagtctgttgatggagccatctttccgatgccacccagccgccggcccgggaggtacacgacggcaacgccaataatgtgaagctctctgtcggcggggctgaagtctgcggtcggactctccatctgctctatgataagcagttaatccacttagttatttcaaatgaaagttatgtaacgtttaagatgaaaccacatcttgacaatctgcgaaata

SEQ ID NO: 11531 - DNA, 425 bp, Glycine max
  Coding DNA Sequence Number=SeqID_1752
taggttctagatcgccagcggccccctttattttcattttgtattcgtttttgtctttcattacaaatatgtttttgtctttatccgttattaaattctgcttgtatcatgtgacatttacattaatttattgattttagatattaaatctagaaacttgtgataagatatttcttatttttactttcaacttatattcctcttactgaaattgcaatatatatactgtcttacttctccttaagcaataactcctcgtgtcgaaattgtatatccaaagtttatgtttaaagtaaactacttcccttgagtcttcaattagaactacatcatccaaaaactatgaaattatggattatttatatcttcttggtaagcgagtccaagattagattcaacaaagacttgatggtgatgcattccta

SEQ ID NO: 11532 - DNA, 321 bp, Glycine max
  Coding DNA Sequence Number=SeqID_1753
ggcggtaacaccttccagatctaccccatcatgcatagcatatccaatgcccttgttgcttactaccagaagtacgtatacgagcagtccaagaaggagatcaaggacatccttgtcaagtactaccgcacccttctcgtatccgatcctagtcgctgcaagcccaagaagttcggcggtcgcggtgctcgcgccaggttccagaagtactaccgttgatttccactctttattcatgttattcttcatgacttcgaaaggtactgtcttcctgtattatttgttccgcgctgagtggaggtcaatcggatcttgcataca

SEQ ID NO: 11533 - DNA, 535 bp, Glycine max
  misc_feature (79)..(79): n is a, c, g, or t
  misc_feature (357)..(357): n is a, c, g, or t
  misc_feature (417)..(417): n is a, c, g, or t
  misc_feature (447)..(447): n is a, c, g, or t
  misc_feature (492)..(492): n is a, c, g, or t
  misc_feature (501)..(501): n is a, c, g, or t
  misc_feature (509)..(510): n is a, c, g, or t
  Coding DNA Sequence Number=SeqID_1754
attcgaggttcgtgaggatctgtatatatgctcggtgtgtggtatatgacattattaataggatatttataagatatgntgagtagtattgaatgtctaatatttatgtatgagagcttcgtgggtgcgagacgatagacagacaatttgtcaatcatgcgtatgtatagataacctcaacacgatacgatacacgtacatcaaatacagagtatataaagagagactccgtacggaggtgagcaggcactgcaatctcatcatctgcatattaaaacttatggtctgcagcgatgagtgcgcctatacgtattaataggagtatacacacaaatataactcccacctcgcgcgatnatcgtatttataatcatacaacacacacacacgacaataacctacatctcataaactaanacaggcacacaaagaaaagtgaaagtacancatcatagaaaagtgggatagtaaatctcatcttatatccacacnataatatcnccatcttnntctcccatcttcttatctaattttt

SEQ ID NO: 11534 - DNA, 307 bp, Glycine max
  misc_feature (37)..(37): n is a, c, g, or t
  misc_feature (61)..(61): n is a, c, g, or t
  Coding DNA Sequence Number=SeqID_1755
cgcgcgagaggacccgcagggacaggaccgacagggncacccacgccgacaccgacggcgncgccgccggagcaggcaccgcgggttttttgtgcgcctacgagctctccaaaaacccctgggggggggtgggcatagtcgagcagtccgtcagccccggcggcggagcctggctcggcggggagctcgtgggtgcgatggtagtgcgtaagaccgcacagggcgggggagacgagcttggtcgtgagtatgaggaacaagacaagtacgtggggatcgagcacgctgcatggttgacgggcaggca

SEQ ID NO: 11535 - DNA, 530 bp, Glycine max
  Coding DNA Sequence Number=SeqID_1756
tatctaccgctattacatataccccctayattagatatgtatttttctgcacagagcatttcctttgattttaaaattcactgaggcacatacggactaaatttttccaagtaaaaacagagaagggccaccacaaatatcaattgacctgggcaagtgctcacagaccaccgttggagccagcgtcactcggcgagcctggcgacccgtgaacttggagctgtttgtcggccatcataaccttgcgagaggaagaatcaatcacaccagatccagtcccttgcaagccgaagacgaggacgacgtggcaaccagggggaacatgtggcgtcaatcaaggtgaagaaagaaacatcaccagttcagttagcatgagccgtaagcgtagagcactcatcttggcttgcatgtagccgtatgtaaactcatagagtcggaacacacggattgatgcttagggccagcatcaccttggttgcttcatactcaattattctcttactgagaaattcagcgacaaccagccaaag

SEQ ID NO: 11536 - DNA, 450 bp, Glycine max
  misc_feature (251)..(251): n is a, c, g, or t
  misc_feature (259)..(259): n is a, c, g, or t
  misc_feature (276)..(277): n is a, c, g, or t
  misc_feature (293)..(293): n is a, c, g, or t
  Coding DNA Sequence Number=SeqID_1757
ggttatcttctgtcataatcagagagcagttgctatagccaataatcctgttcttcatgctcggaccaagcacatggacattgacatcttctttgttagagaaaaagtcttgtccaagcagctggttgttcatcatattctggctcttgatcagtgggcagatgctctcaccaagcccctctctccaaccagatttttattttaaggaccaaactcaatgtgcttgagactccttcacagtctcatccacncttgaagngggggtattagagtatnntgtacaaagagttgcnagtgttcaactacactttctcaatccaagccagttagttagaagttagttaggagttagttttctgttatgagtgttagtaagttagttggtgaattagttggtcataactaatcactcagatctataaacagaggctaatactcatttttcacttc

SEQ ID NO: 11537 - DNA, 490 bp, Glycine max
  misc_feature (26)..(26): n is a, c, g, or t
  misc_feature (34)..(34): n is a, c, g, or t
  misc_feature (46)..(46): n is a, c, g, or t
  misc_feature (58)..(59): n is a, c, g, or t
  misc_feature (68)..(68): n is a, c, g, or t
  misc_feature (127)..(127): n is a, c, g, or t
  misc_feature (156)..(156): n is a, c, g, or t
  misc_feature (168)..(168): n is a, c, g, or t
  misc_feature (187)..(187): n is a, c, g, or t
  misc_feature (209)..(209): n is a, c, g, or t
  misc_feature (211)..(211): n is a, c, g, or t
  misc_feature (229)..(229): n is a, c, g, or t
  misc_feature (245)..(245): n is a, c, g, or t
  misc_feature (252)..(252): n is a, c, g, or t
  misc_feature (260)..(260): n is a, c, g, or t
  misc_feature (268)..(268): n is a, c, g, or t
  misc_feature (271)..(271): n is a, c, g, or t
  misc_feature (275)..(275): n is a, c, g, or t
  misc_feature (303)..(303): n is a, c, g, or t
  misc_feature (306)..(306): n is a, c, g, or t
  misc_feature (316)..(316): n is a, c, g, or t
  misc_feature (320)..(320): n is a, c, g, or t
  misc_feature (330)..(330): n is a, c, g, or t
  misc_feature (362)..(362): n is a, c, g, or t
  misc_feature (368)..(368): n is a, c, g, or t
  misc_feature (384)..(384): n is a, c, g, or t
  misc_feature (386)..(387): n is a, c, g, or t
  misc_feature (417)..(417): n is a, c, g, or t
  misc_feature (423)..(423): n is a, c, g, or t
  misc_feature (425)..(425): n is a, c, g, or t
  misc_feature (431)..(431): n is a, c, g, or t
  misc_feature (440)..(441): n is a, c, g, or t
  misc_feature (465)..(465): n is a, c, g, or t
  Coding DNA Sequence Number=SeqID_1758
gatcatcgccatctgctcacagcganacatcaancatatagcctgntccatgcactannagtctgacntgtgataaatcaaggcgggactagagatcaccagtctcgtagtggatcgcttactgtantactggctatacatcgtacgtgacacggntcgacgactacnactctgagaacgagctaanctacgataagtatagatctgancntgggaactcgactcatgnattgatcaaatcgacnctactgncgactganagtaagancgngacngatactatatatactgatcattgactcnatnaatatgatcnatantttacgactncaactagtagtctaccacacatcaacaatcantaaagnactaaagagtgacacnanncataataatcgacacgcggatgctagacancagacntnacccgncgctgtgcnntctcagtctgtcgactggtgcgcnacgttgctacgatgacactcaagca

SEQ ID NO: 11538 - DNA, 445 bp, Glycine max
  misc_feature (401)..(401): n is a, c, g, or t
  Coding DNA Sequence Number=SeqID_1759
ctgttatcgcgttcctgatggcaatggtgagatccttaagtacagcgactatgtacaggttggcgaggaaatgggtgtgaagatgtattctgacatggtcactcttcaaactatggaccgcttattctatggtgtgcagaggcaaggtcggatctccttctacctcacccaaatgggggaagaagcagttaacattgcatctgctgctgcacttgctcctgatgatataatattgcctcagtaccgggagcctggagttctattgtggcgtggttttacactgcaacaatttgttcatcaatgctttggaaacacacatgatttggaaaagcaggcagatccaatacattatgggtctaccacacattacttccagtgcatccccatgcacacacttcctnagctgtggactgctattccttaaatggtgggaaaggctgtcagc

SEQ ID NO: 11539 - DNA, 492 bp, Glycine max
  misc_feature (379)..(379): n is a, c, g, or t
  misc_feature (460)..(460): n is a, c, g, or t
  Coding DNA Sequence Number=SeqID_1760
cataacaaccaacaatttctcggcccccgggggacccgctagggcaagggggaaaaaggcccacaaaaaaccacctcgtgtttctcatccgggcttcataaactgggccctcagaaagaacacaaattccaacctcccccggggagatctcgcctgaccacccgccctggaataaaaaaaaacaaattttcccccccaaccaaaaaaaaaattttttgtttaaaaaaaggggggggagaacttttcctggcctttccaccagaagtgggggaatggggcggggacctttctcccggggaaaacataggaaaaaaatctgggtgggtggccttatttgcttcgccaacccggtctctgtccgagctgggccattatcccntggaatcgcgatgaaacactgcgagggtgacgctggccttgggcctccaaaacctgattcaaaattttagcctttgagggnccccaaatcttttgaattttcgaactgtttgg

SEQ ID NO: 11540 - DNA, 415 bp, Glycine max
  Coding DNA Sequence Number=SeqID_1761
gatttcgatatcaggatttgccagaacctctggtcatggctttctctttagtaccgagctgtttccatggctatctcaccagctcctcgttctcctccaccactcattttctcccgacttctctctcttgcggcggcgtctctgtttctcccgtttcgaagctaagaacatgtgccaaattcgataagtttcagggtgattctcctcttgaacagaccacatcagcttctgcttcgcaggaagtagtaccgttagaagctgaagacccaccagaagaagaagaagacgatagctgcttgcctaatgatttggtgggagctgttaggcaatcaggtgaagcaagtgcttcgtttgtgaactcgggaggaacaagagctatcgtggagctcttgattcctcagctgcagttcttaga

SEQ ID NO: 11541 - DNA, 393 bp, Glycine max
  Coding DNA Sequence Number=SeqID_1762
ttagaacttatgtccaaggtggtgctcattgtcttgtggggtaactgaaaacacttttgaattttaaaattgagggtggtaaacatcttatggggtggatacactttgccaagtccaaagtttaatccagaaaattaagctagtttctgctatgtgaatggagctattaatgctcaccacatttaatacttgtctaagagtcttgaagttgtacacttggttaagccttctgtatctgtagttttagtgtgtccctgagtagtaatattttactgtttgttgcattttcaatgttctatttattgagcttagtcatattgctttttatatgtttttatttatttattcatcgtttagtcgttttcttctatttccactttttcagtgtcccga

SEQ ID NO: 11542 - DNA, 335 bp, Glycine max
  Coding DNA Sequence Number=SeqID_1763
tgaacaacggaagcacttgaaaattcaaattgtcataacttttcacatggatgtccaattcggggaaataatatatcgagacgctcgaaattgaacaatgggatttctcgataaattcgaacggtcatagcttttcacacgaatgttccgattcggggacattatatatcaagacgctcgaaactgatcaacggatgctctcgagaaattcgaatggtcataacttttcacatggatctccgattcaggcgcatgatatatcgagacgctcgtaattgaacagcggaagacctcgaaaattgaaatggtcatgactttgcacttggatgtccgat

SEQ ID NO: 11543 - DNA, 261 bp, Glycine max
  misc_feature (107)..(113): n is a, c, g, or t
  Coding DNA Sequence Number=SeqID_1764
gggcaatacgttttcagataagaggaatccgatccaggataggcaataatgaatgtttgctttgctgtgttgatttcgttttccatcttgtggagactcttgttcgnnnnnnnaacaagtatgcatatgttcaggtacaattctttgtccatgtcattaattagtcttctatatgatactaattgcatcttctattatgacaggttattgtggatttacaattttacatttagtttaattgctggtgcttccttaggaaat

SEQ ID NO: 11544 - DNA, 468 bp, Glycine max
  misc_feature (184)..(184): n is a, c, g, or t
  misc_feature (216)..(216): n is a, c, g, or t
  misc_feature (265)..(265): n is a, c, g, or t
  misc_feature (373)..(373): n is a, c, g, or t
  misc_feature (378)..(378): n is a, c, g, or t
  Coding DNA Sequence Number=SeqID_1765
aggagactacaacttacaccgcactaacagtatacaatgaccgcttgcgtctggcgtcgtcagcgccgctgtagcgtcgcgtttatacgcacacttaccaatcgtttgagcgattgttgatgcgttgtggtgtgagtatcttcagcctatcacattttctctcgatgaccgcatacgcaacagntctcgcacggtcatgtctagctttggtcgctngggagatatagatagcaaactacttgtccctcgcacatattgctgtcgntcttactcatttagatgtgacatagcctgacgctgtaagattacagctgccacattaagttcatcgagaggtgagctagcgcatagatgaaaaacttatgtagcttgnagtancgggctccgtcgacacgccacacgcgtgtcagaggtggaggaaacaaagattgtagccgacgtctgtctgcttcgctgctgtagacacgt

SEQ ID NO: 11545 - DNA, 574 bp, Glycine max
  misc_feature (40)..(40): n is a, c, g, or t
  misc_feature (189)..(189): n is a, c, g, or t
  misc_feature (208)..(208): n is a, c, g, or t
  misc_feature (514)..(514): n is a, c, g, or t
  Coding DNA Sequence Number=SeqID_1766
cacccacaacactctaacaatatattaattgtcgcctccncacatataactagcgccacctctcacaaatatactaactcatactctggctctcgtcttatctccgttgctggactactaatatattcactatacacgcccatctccacgagctgttgatactatacgcgcaccacgtacacataccanacatctaactactactctntaccaccctaacctatcacacacacgcctctatcccacacctcaaattctcacgataatcaaaactccgcgacagtattatccgtctcgctcgcctctttaaaagataacatgaaatataatatctccttctcatgcttaccctcattatatatataaaacaatataaactttctattctcacatcacactctctgtcccacatcgactgtcacgacaccacgcacaacacacacacataaatcatacacacatataatatcacctcacatctccatcttatttcattctgtctacttctaacccncagcttcattgcgcatacttactctgatctccctcttttcataccactcatcctctctag

SEQ ID NO: 11546 - DNA, 253 bp, Glycine max
  Coding DNA Sequence Number=SeqID_1767
gttcagctagcaaaaataccatgaagtacaggggttgcaacttgtggagggggagcaaaacccaagctcctgaaagatttgggagttcacatagttatagacgatcatagcgacgatgtaaaaactggcctaagggaagagttacccaaatgtattgacgttatctatgactcagttggcggcgacacgatcaactcgtgcttgagtgcggagcatgaccatgaacgacatatgggtattaacatgatggcta

SEQ ID NO: 11547 - DNA, 210 bp, Glycine max
  Coding DNA Sequence Number=SeqID_1768
gagtttcgggaaaggtttcatgccgttcatcctcatcgtggacccgccggtccccatgttgcattctttgatatcaacatggaagggttgcatggcatccaaggaccagtatatgtgggaggtgggtgtgtcttcagcacacaggcattctatggatatgatgcccctacatcgaagaaagcaccaagaaggtcatgtagctgttggcct

SEQ ID NO: 11548 - DNA, 580 bp, Glycine max
  misc_feature (81)..(81): n is a, c, g, or t
  misc_feature (113)..(113): n is a, c, g, or t
  misc_feature (399)..(399): n is a, c, g, or t
  misc_feature (404)..(404): n is a, c, g, or t
  misc_feature (408)..(409): n is a, c, g, or t
  Coding DNA Sequence Number=SeqID_1769
ggaatatgccgctgtctatatatatcaacccctcgaacacatgaaggataggcgcgcgggggtggagagactactgcttcnccgccgctgatgtattatattcttggcgctcncgcgcacccccgcgggtggccgcgcggttatttcataactacacaagcgtagttaaaaacatagagtattactagtatagtgtatccattttaccactccatatctcaccatatattctccgcacatattactatcacgcgccctatattcatctattctaccatgccccacttattatatctgttcatccgcaatctctcttctctcgcaagatatatattagggaatattacatactatgttttactgcgcttgtattatacacctctttatataacgaattancacantttnngcgagggctcgtagcgcacgccgcccgtggcgtggggaggggtagagagagggagggtgggtggggcgggggcggaggtagtatacagttggcgacgagggagtaccgtgagcgtggggcggcggcgtggtcttcgcgcgggtgcgataacacacgcggttgtagtctcac

SEQ ID NO: 11549 - DNA, 585 bp, Glycine max
  Coding DNA Sequence Number=SeqID_1770
gttctatccggtgatttattctgtggacgctagacttcctagtgtgtccattgatgatgctcgtctttgcaaaccgggaacacttgatcctaccaaagtaaagggaaaaatactagtctgccttcgaggtaataaattaactccagccagtgagggtgaacagggtaaactcgctggctctgcggcagttgtagtgcaatatgatgaccagaatgatactttacttttggccgagaatcatatattacccgctgcaagtataagtggaacgggaagtcatcatattaaaaacggatcatgcaactctggccttagcaaggagattgtagcttacttgattgctggagaaacatatataggagtgaatccacgtccgagtatgagaggattctcatctagtggttccagttccattcaacccttggtactgacggcggacatgactgctcttgggtgatcttagtgctgcgtttacacaacgagctggtgccgtgctatcatccattggataccaccgatctctcttgatgtgtcagcggggacttctatgttgagacctcatgtcgatggcgttgagtgtctctc

SEQ ID NO: 11550 - DNA, 581 bp, Glycine max
  misc_feature (250)..(250): n is a, c, g, or t
  misc_feature (311)..(311): n is a, c, g, or t
  misc_feature (484)..(484): n is a, c, g, or t
  misc_feature (494)..(494): n is a, c, g, or t
  misc_feature (500)..(500): n is a, c, g, or t
  Coding DNA Sequence Number=SeqID_1771
taatcatacgtcacgtcttgctctctcactcccttctattttaacattgcgatagagcgcgggtgaatagacgagagtcacgatcatatgaatagatcggtgcattgaggatgtgatatacgctctcatatctgtcctggtcgatgtcgcgtcatttgtcttgttctcatatgtttgtcatttctgcttctcgtgcccttatataattagtatatctataacaaacacactactaatcgctgctccgcgnttggccgcagagcgaagaatacgcagcggcgctctctcacttgatctacgtggagcatcancgtggcttcggtctctggtcggacaatgtgtcaaatagtatgagtatcacgacgagcacagacatacgataagatctatccggtctctggttgtatatatgtatgtacagtccctagcgtgccgagtcgtgatcacgagtgtcgtgtcgacgtcgtatatacaaagcgtcatncaccaccgcntcgcgncgtaaaatgagcgaatctaccaccttagtacggtggcctcttgctgcctcgtgtctgtacttaacagctctggcaatcgaa

SEQ ID NO: 11551 - DNA, 460 bp, Glycine max
  misc_feature (133)..(134): n is a, c, g, or t
  misc_feature (295)..(295): n is a, c, g, or t
  Coding DNA Sequence Number=SeqID_1772
gatattgtagtcacactccaagcttcctattaagtatataagacacgaaaattaacgatagagatgaagagagcgcgccctcctgatgtgtgggaatgatagtgttgatgtagtgtggcattaaattaggtgnnatgatgtcttattgctagattgagaaggagaagagattaagacgcgcggtgagtatcatacatctccgacggcagagatatcagagctgttcctacacggcgaatattaatgagatctataaagacacaacacaactcatccacataccaccatcaacgcnccacgcggcagatagagagcagtatgcacccatatctacatatatgtattatggtggttggagagaggctaggccacaccacatgcggcgaaagggcgaaggagacgatcccaacacatcgtaagagtatcaccctcgctctacgtgtcgtcagaatccgggcgg

SEQ ID NO: 11552 - DNA, 89 bp, Glycine max
  Coding DNA Sequence Number=SeqID_1773
gaagtgggttgctacatgttcagcatatgaatgctcttaggccttcacagtctgctaactgcgtgaggaatggagaccgatcttctatg

SEQ ID NO: 11553 - DNA, 427 bp, Glycine max
  Coding DNA Sequence Number=SeqID_1774
acttgcgaatcacttgcaccaccaaacaagctttcttaccgagagttgttgtgtttgtgcacacatagcatacttcagctagaatccatggcgaaatgctggctgctgctccagttcttggcgttcctcttgccggcggcgagtgctacgtcgtgccacaccgacgacctccgtgcgctgcagggcttcgccgggaacctcagtggtgggggcgtgctcctacgtgctgtctggtccggtgcctcgtgctgcggctgggaaggtgtgagctgcgacggcacaagtggacgcgtcacggcgcttcggctccccgggcacggccttgtggggcccatccctggagcatccttggcgggcctcgcgcagctggaggagctcaaccttgccaacaacaaactggtcggcacatcccatcatggattggcga

SEQ ID NO: 11554 - DNA, 567 bp, Glycine max
  misc_feature (40)..(40): n is a, c, g, or t
  misc_feature (522)..(523): n is a, c, g, or t
  Coding DNA Sequence Number=SeqID_1775
tacacggctgtactcacgtagggcaggactacggataatntatcattacttacaactagactcatgactatccaaaagtcactcacaccaaccctcttctagacacacctagtccactcctatgtacataggctacacacacacttatgtgtaggcgcttaggaaggatctacagtagtctatgtacacgttgcgtagacagcttccacgacttctcgttgagtatctaccttccgtgttcagtacatgagggttttgatgctatggtggatggtataagtaatcatccgcaaattcggatggaatgcgtagatttacacgtctgcgcttcgctgctgacacacgagtagtggtgtatacgaaaatatttccatcaatcgacatagttgattgacagatgtcggtgctggggtacataagacaagagagacgtggtgaggtgagacgctgttagttcgcataacatcgtgtctgacccttcggaggcggcggggcggcttcgttctatctccatatttcgannccaatttctctattatggtgaggaggaccatgaaacacactaca

SEQ ID NO: 11555 - DNA, 353 bp, Glycine max
  misc_feature (49)..(49): n is a, c, g, or t
  misc_feature (67)..(67): n is a, c, g, or t
  misc_feature (73)..(73): n is a, c, g, or t
  misc_feature (85)..(85): n is a, c, g, or t
  misc_feature (97)..(97): n is a, c, g, or t
  misc_feature (115)..(115): n is a, c, g, or t
  misc_feature (192)..(192): n is a, c, g, or t
  misc_feature (216)..(216): n is a, c, g, or t
  Coding DNA Sequence Number=SeqID_1776
gagtctcctgatcgtcgcgtctatgtcgatccgtttgcttcagtatcgnttcatctcttcgtgtgtntcgatntcgattcatctnctcgcaggcgtnacaacatgcattgatacnacgccattagagatcaatcattcgaattttttttctcatctcctatgttctattttctgatctgaaggccagttgcnccgtggaggtgcgactgctcaagnctagcctcctccctcctcatggatcgaaccttccttatgcttcactccaagccttttgttcaaggaagctttaatgtgtttggctggagacttctcaggaaaggccatcggaagagtactgttcaaggtgtggaagt

SEQ ID NO: 11556 - DNA, 467 bp, Glycine max
  misc_feature (140)..(140): n is a, c, g, or t
  misc_feature (403)..(403): n is a, c, g, or t
  misc_feature (406)..(406): n is a, c, g, or t
  misc_feature (410)..(410): n is a, c, g, or t
  Coding DNA Sequence Number=SeqID_1777
acctccatctaatcactaatcgctatctacgcactcccatgcagtgattataaattaaaattatccctttctgttttttgtttatgtggtcctatccttccttccttttactacacttcagactaattcttggtgtgttntgtgccgcgcgatctataggcatgtatggagacacacataaactattgttctttcttatgtagactgaagtaacatcagactagatgttggggattataaagtaactattatcctactactcgagctcgctgcaggtgttgtggtcttggtcggcgtgtgaggtccctctagcagataaataagtcagaatatatttctctaatttgtgtgacgcccgggccctctgcacacaaaacaattattatactttcattagttaatnagntatntgggggacgaactatcatcacaatagtattaggaaccccagacaaggcgtttgtgtt

SEQ ID NO: 11557 - DNA, 243 bp, Glycine max
  Coding DNA Sequence Number=SeqID_1778
ttaccgaatgggtttgaatacaaaggaaatgttgacttttctgtgcacacacacttgggcgggcttaaacccatatccaattgttttgggaaaacctgaactccatttccaaaagaggggcccgaggcaccccgggaacaacctctggcagagccatggttgaattttccaccccctcttttaagggcctccaaaaaaaaaaggtggaaatctttttttttgtcccaccatgcgtcctttttt

SEQ ID NO: 11558 - DNA, 555 bp, Glycine max
  misc_feature (188)..(188): n is a, c, g, or t
  misc_feature (213)..(213): n is a, c, g, or t
  misc_feature (425)..(425): n is a, c, g, or t
  Coding DNA Sequence Number=SeqID_1779
aaactagcgcgtgggagagccgcacaccataaccgccgagcccaggactaataatcgcggaattcattagacgagagtagagaatataaacaggataaatcgatataggctggtaggcgatgaggtattagataaaaagaagacataataataataatataattcagttgcatcagtatgtgttattntctctttctcccaatagaaactaangaggagagataggttggcgatagtactagtagtgagcggcgcagagacgaggcggggtttgcacgaagggtaggagagtgcgagggtgagggcagtcgtcggggcgtgcacccacagaggcgacctggctgagagttatgttaggtcggagtgtgcgcgctgagctgcgatatactagctgtacaataatttatcattaaatgaacaattgntttgttattatatttcgaaggggtacaagcggaaacaacacagagactccgctggcacgccccccctcgcgagccgccgctagttaatacgcctcccctcgcccgcagcggtcgcgggagactagcaatt

SEQ ID NO: 11559 - DNA, 578 bp, Glycine max
  Coding DNA Sequence Number=SeqID_1780
tcgtccaaccttattgctctttttaagtgccgaaaaatcagtgtgaggatctttacgcgtcttgctacttatccacgtcgggtctcgccatcgcggatcttcacatactgttttttacatcacataaattcacaattcgacagccacgcgcgcggttggtttattttactatagcgtaggcgagcgcgcgtatggccgcttcgtatttgcgatcgcttatgttgtggagatgtagtgggtgtgatctattgtggcggagtattcggtgtgaggtgggggctgcatgacagacgaagaaaatataatcgagagctctcatacatgcgtattgtgcgcaggtctataaagcgggatggtggtgtgaagagcagaaggtttctcttggtacacgtgtggtttatgtttgaacgttagatgaataaagagagaccgtgctccttggtgttataaaaatataacccctctctcggtgccgagacgatatccgatcgacctaacctcttctttcgtatatcagtaggcgatgtagccctctctgcgtgcgtgattattatcctgccttgttgtgatgagagtgt

SEQ ID NO: 11560 - DNA, 403 bp, Glycine max
  Coding DNA Sequence Number=SeqID_1781
ttccttggtggtggcacatgtggctggatgagtgggtggatctcggcgacctcgctgctcaaaattgtcgtagccggaggccctggatgctggggctgcttaggcattgagggaggtcacggaggaacaaatttcagcaagactgccaggctaaactatctgtatgtacacagtagagaggtcgttgatatgcttacatcctcttctgctattaagttgcaaaagcaagcacgaagggccacttcgagtcgcttggtgacataatgattttaggagcataaccggcaagcctaccttcagttttagctcgtggtttggaattcctgggaaggtcaatttgttaaggaactctgttggacacatattctccattgtgttgtaatttgttgttgccttgcataca

SEQ ID NO: 11561 - DNA, 288 bp, Glycine max
  Coding DNA Sequence Number=SeqID_1782
gcgacaaaaccatcgtccgtcagtacggcggcgccgccatgaggtccccggagctccaggactccgtgatcgacgacattgtcctcctctcctgcgacgagctccgccccgacctggtccacggcgacgaccccaagatcaactcttggctcggccgcctaaacatccccgccggatttccgcgacgtactccgcgtcaccgacgccggaaccatggagaacgcctccctggtgctcccgcggaaaaataacaaaaccctagtttctctaataaaaagggccgatgcc

SEQ ID NO: 11562 - DNA, 366 bp, Glycine max
  Coding DNA Sequence Number=SeqID_1783
agacagcaaccatgttttctggaatgttcatggagaagccagacaaagccgtggctttgaagcagctacggacccatgttgctctgttcggcggctgggttgtggttgtccgtgctgttccgtacatcctctcgtatttctccgattccaaggatgagctcaagctcgacttctaagtctcgattttcagtgttgaagaggtgatatttagatgcactgtgaagcaatgcaagacattgtttttggcgtatttgcaattttctttggacttgaaataaccatgatgtgagacataaaagttattatagtgatgtacttttgctattcgtttgttactttggtttctcatctctcgtatcctttctt

SEQ ID NO: 11563 - DNA, 526 bp, Glycine max
  misc_feature (50)..(51): n is a, c, g, or t
  misc_feature (53)..(53): n is a, c, g, or t
  misc_feature (84)..(84): n is a, c, g, or t
  misc_feature (99)..(99): n is a, c, g, or t
  misc_feature (150)..(150): n is a, c, g, or t
  misc_feature (152)..(152): n is a, c, g, or t
  misc_feature (194)..(194): n is a, c, g, or t
  misc_feature (198)..(199): n is a, c, g, or t
  misc_feature (206)..(206): n is a, c, g, or t
  misc_feature (217)..(217): n is a, c, g, or t
  misc_feature (219)..(219): n is a, c, g, or t
  misc_feature (221)..(221): n is a, c, g, or t
  misc_feature (267)..(267): n is a, c, g, or t
  misc_feature (338)..(338): n is a, c, g, or t
  misc_feature (340)..(340): n is a, c, g, or t
  misc_feature (342)..(342): n is a, c, g, or t
  misc_feature (350)..(350): n is a, c, g, or t
  misc_feature (383)..(383): n is a, c, g, or t
  misc_feature (422)..(422): n is a, c, g, or t
  misc_feature (455)..(455): n is a, c, g, or t
  misc_feature (484)..(484): n is a, c, g, or t
  misc_feature (492)..(492): n is a, c, g, or t
  Coding DNA Sequence Number=SeqID_1784
agatagacctcggatctgcgacgacggacagcagcacgaaccgacgcgcnnancccatcacgcagacgtacgcgctgctatctnggccgtatagtgttntattttagcattttacatcctatgacatatgtagtactgcgtaacactatnanatatatacacagtcacctgtaccacatactataagcataganatannatatacngagaaaaagtngncnagatacgcgtgatggagtggttagttgtcgttgggtcgagtgtacnctcttgggccgcctcgctcgcatatctgcgatgagcgacacgcgacagtctagtacatgagcggacatatnantntagatagnagagcacacatagtatcagcgagggcatcatcntgtctccactgactatacagctctccgtgggttgggtantcctcctagcgttagtgtttggccatagttaantccctggcgcatcctctcactcacgccgntgcgcacnatatagttcatactaccaccctactttatgatga

SEQ ID NO: 11564 - DNA, 558 bp, Glycine max
  misc_feature (56)..(56): n is a, c, g, or t
  misc_feature (198)..(198): n is a, c, g, or t
  misc_feature (264)..(264): n is a, c, g, or t
  misc_feature (374)..(374): n is a, c, g, or t
  misc_feature (379)..(379): n is a, c, g, or t
  misc_feature (507)..(507): n is a, c, g, or t
  misc_feature (522)..(522): n is a, c, g, or t
  Coding DNA Sequence Number=SeqID_1785
actttccgtctctcattacatcaatgtcatgactatatccgctgtcttaggatttncgtctgcatattctctctgcgcgatcatatattcatatctctcttatgcggccgctacatacgtcacatccctgtacgccggacgcgcgcagctgcgtgtgtgtactcgtatactatgacgcagcagtacgttgtgtggcgncggtatgcgtcgtactcaatgcaacaagtaccgcgactgagttattatcagcatggtgtctcgaancgcacaataccgcgtccggtgtgcgtgcagcaatatagcggcggtcgtcggacgtagtcgcgtactgtcctatgttatgactgttaattgtctgagctatcgacctccgntgtcngccggcattattcttgagtggtcgcacgcgctgacgaggctatcttgcgtccgtagtgctccgcgctcttaatgtatgctgatcatcgagtactgtatgcacatgtattgaatgttcgcgttatgaantggatcgtttcttanactaatctagcagtatctctgctgtatcacgtcggc

SEQ ID NO: 11565 - DNA, 480 bp, Glycine max
  Coding DNA Sequence Number=SeqID_1786
ttcttccttcgccttagcatatcttctgagcatatcttcccttctttgtcttagattttcgttccctcacggtatcgaggggcttggggttttgtgtttagagatttcttgactgatatgatccaacaagaagtgttctctagcctctttctttagaaggaacctggggtcaaactgtcttttgttcctctctttgtaacttgcaaaacaaaaccattaatgtcatgtcattgaaattaaagtccgagaacaattccagttgatcttctttcactcatttctcgggggcctagcagggtttttctttgggaaaactgtctttaaacccttggccttctcttgacttgttttcctcggtaactggctattattacaaagtcaagagatttgtctccttcttcctcggtagcaaaactggaccatgaccttttccgctggtagcatcatgtcttttcaagagattttcctgttctttctggg

SEQ ID NO: 11566 - DNA, 559 bp, Glycine max
  misc_feature (75)..(75): n is a, c, g, or t
  misc_feature (111)..(111): n is a, c, g, or t
  misc_feature (277)..(277): n is a, c, g, or t
  misc_feature (321)..(321): n is a, c, g, or t
  misc_feature (460)..(460): n is a, c, g, or t
  Coding DNA Sequence Number=SeqID_1787
ggtagcacagtacatcgcattactcagttaagttatcactctgaggacgttagacgcgatgactgatcattcacngtgtattctactatctcgtgtcagcttacggtagcnagtctgcacacagcctactgtaacgacagatccgtctaacaagtgatgtgctaaccatcgatgactgtgatgtatcatagcgtgattcagtatatagtcagtgacgtatcagagacgtcgtagctaggtgcgcgcggcagagatctagacatgttatactatcgtnatcacattaagagcgaactagacataccataccgactgagtcancgtcgtagacactcgccgactctcatatgcgacatgtcatctcctgtcgatagtgatcatacttatgttgtccttagctctcagctcgacgtagaagcagagtgtgtagctgatagaaatgacgatcttagattatagngtgtatcgcactcgcgactaatgaggatgatgtcgatgtgtcgcatgagatcgaatgtgttctagagccatgacgatatcactgagaccgttaccctgc

SEQ ID NO: 11567 - DNA, 410 bp, Glycine max
  Coding DNA Sequence Number=SeqID_1788
gatagtaggatacaagttcgcttttgatcactgtcctcaaaaagagagaaaaaggaccagctgaaatggggcgttgggtgagacctgaggtgtaccctcttctcggagcaatgggatttgtaacatctatggttgtgtttcaactcacaaggaatgcattattaaaccctgattgcaggataagtaaagagaacagaaaaatgggaattctggaaaatgaagatgaaggagaaaaatatgcacaacacagtcttcgcaagcatttgaggacccgtccacctcaagttacgccttctctcaaccgtttcttctctgaagaggacaactaaactatttcaccttatcataaaagttacttatatactagttattatacaaattaaatctagtttgggattgcttaatgtgta

SEQ ID NO: 11568 - DNA, 233 bp, Glycine max
  Coding DNA Sequence Number=SeqID_1789
gatttttaatttcaacttctgcccattccaaggaattggacaaaagatgattacagaataaaaccagcccgtaaaacaaaggttgagcgaggcctacagaattcaaataccaaatggggatgcccggaggtcgtctccacttgccatctttggaaatggcttgcgctggctttccagcgggagcgatgcgtgaactgtttattcgtcgaaggtggtgcgctttccgccagcac

SEQ ID NO: 11569 - DNA, 581 bp, Glycine max
  misc_feature (71)..(71): n is a, c, g, or t
  misc_feature (83)..(83): n is a, c, g, or t
  misc_feature (149)..(149): n is a, c, g, or t
  misc_feature (242)..(242): n is a, c, g, or t
  misc_feature (378)..(378): n is a, c, g, or t
  misc_feature (427)..(427): n is a, c, g, or t
  misc_feature (431)..(431): n is a, c, g, or t
  misc_feature (451)..(451): n is a, c, g, or t
  misc_feature (462)..(462): n is a, c, g, or t
  misc_feature (476)..(476): n is a, c, g, or t
  misc_feature (479)..(479): n is a, c, g, or t
  misc_feature (487)..(487): n is a, c, g, or t
  misc_feature (501)..(501): n is a, c, g, or t
  misc_feature (536)..(536): n is a, c, g, or t
  misc_feature (541)..(541): n is a, c, g, or t
  Coding DNA Sequence Number=SeqID_1790
aggtgtgactgtgcctcgtcctcgatacactatgtgttgatgatatatacatatatagatacatgagtganatagcatcacancgcgtacacgacttcaacaccatacacacgaactcaactcgaccgacactgacagcatcacactanagtgtgtagctacaggatagtgaatgcgaccccgcacacatatgcgtaatacgctagcagtatgacatacagcatgtacagagatatgagacntctactgcgacatcgatcactatactagactataatcgctatactcgtctcgtgacgagaccataccatcgacgtcacacacagcgacgtcgcgagactacgtccgtgcgctgcgtctcgtactcgaaatgtactnactatctcagtgtgtgcatggtgcactgcgtatagatatcagagtgtcngtcngagtacgactagattccgantacgagcacgncgatgaatagtacnganacatcgtnacacacgctgaatnacacctatagcgtcagtatatcatcagatacgttnagganggtcgttcaacacatgactacagtgcgtcgacagctacga

SEQ ID NO: 11570 - DNA, 550 bp, Glycine max
  misc_feature (81)..(81): n is a, c, g, or t
  misc_feature (126)..(126): n is a, c, g, or t
  misc_feature (129)..(129): n is a, c, g, or t
  misc_feature (142)..(142): n is a, c, g, or t
  misc_feature (159)..(159): n is a, c, g, or t
  misc_feature (226)..(226): n is a, c, g, or t
  misc_feature (244)..(244): n is a, c, g, or t
  misc_feature (288)..(288): n is a, c, g, or t
  Coding DNA Sequence Number=SeqID_1791
aatagtcaatacttcgactctctcacctaccctctccacatacactcaccatccattcctcactacctgcctaacaaccgnacaatctctttatcttccttctctttcaatttcttgtctcttctngtngttgtcggttatnaatcataccacctactnttctcatcactatatctctatccctactatctcaaaagtattcttattatatatccacatatgtacnctaactctctatgtatancgtcctctactctaaagagcacatctgctacatctctacacccncactctccactctctctatcacactcatcgctactcattaacacaacctctcatcacctctactcttgctatccatctctcttatatcatctcctcactctgcactctgtcacttagtactctctcatctctcactcttatctctttcttcattattactacttctacatttatactatatctctcttctctttgtctatcatcatatttcatacatcgtcgtgattagacctaacttatacacaacccactctcatgtcat

SEQ ID NO: 11571 - DNA, 581 bp, Glycine max
  misc_feature (38)..(38): n is a, c, g, or t
  misc_feature (111)..(111): n is a, c, g, or t
  misc_feature (152)..(152): n is a, c, g, or t
  misc_feature (226)..(226): n is a, c, g, or t
  misc_feature (447)..(447): n is a, c, g, or t
  misc_feature (489)..(489): n is a, c, g, or t
  Coding DNA Sequence Number=SeqID_1792
gcgatgtatgcactacacacactcacttcatagttagngatctcgaagtcatctcattcacacctctcattatcctctcatgcaatatgatcatacacctgcgagcagccncatagatagtctcacttgtgatcagtgacgctgcacagtancaccgctctatgccacgtcacatcaccgccgcacatgcctcagcaccatttgagttaactcactcgtgtcaccntccctctgtagcgcacaatcgtatactgtgtacgcaaccctgtgagattcatacacgaataatcaaaatatacaacagcgcataacgtcctatacgcatatatagtatattatgatatcacactcacactctataccgcactcgctactgagatatacgctatctataatatacacactcttattcccctcgctacggggacatcatagtgcacatagtcncgtctctacgtcgtcaagatgagactacgactgacacacccnctcggtatattcgtgtatatatgagacgagggtctcgcgctctaatcaatcgtactatcatatatcatacagacatacatcgctcgtacagc

SEQ ID NO: 11572 - DNA, 531 bp, Glycine max
  misc_feature (418)..(418): n is a, c, g, or t
  misc_feature (502)..(502): n is a, c, g, or t
  Coding DNA Sequence Number=SeqID_1793
taacctcctgacaaactcctattattaaatattagctattcattattatcagatacgagatgtgcgcgcgctatttagatacatcattccctccttgttgtacatttctgtctcatgtcgtttatgctacctccactcgtgggatactttattctcttcctctctcttttgaccatctcacccactccatcatcactttaacaatgaagcgcacatcccacatggcaccagcccacacatctctctacgcctcctctctcagataactcaacattctgtctcacacgccacgtgcgctagactcctcatgttcgaaagacacaataaatgctgtgtatatcctttatcacgcgcatgtatgacctgtccacttacctacaatctcacctatcgccagccctcagatactcatatcctncatacaacctacgccatatggcgtcgactcaacgtacgctacgccgccctatcgtgtcaatctgtgtagtatctctcgctgcangtttaacaaacattactcagctcaccttc

SEQ ID NO: 11573 - DNA, 435 bp, Glycine max
  Coding DNA Sequence Number=SeqID_1794
gggaccccggaatcttggccgcgctgttctatggcggccggggatgggaaaaaccccggggggtaagactcggggaaaacacttggagaaaatccccccttttccccatttgggggaaaaagaaaaaaggaaccaaacatttccacccccttttttccaagcagacgacccccgaagggggcacacgaaacaataaaagagcgcccccgccacccggatattgtccctctttctcccacaagacgttattcctcacaccccctttaaaagtggtcataagagggacaacccgtgcgcaaacacgattataaatacttcttggaacaacaacattccgggtgtagaatagatttttttcccgaaaaccaacctcctattcttttcttagcacaaataatgagccacaatactgcgggagtcactcctcctcttgta

SEQ ID NO: 11574 - DNA, 536 bp, Glycine max
  misc_feature (269)..(273): n is a, c, g, or t
  Coding DNA Sequence Number=SeqID_1795
atgtggagctttctcgtcgaattcctgagagtcttccttctccaaatgctatttgcttcacatccatgatcaatgcatatgcccgaaatggagcggggaaagaaggaattgcagtgcttcaagctatgattgagaggggactaaagcctgatgatgttaccttattatgtgcactaaatggttgtaaccacacaggattagttgaggaaggaagattagtctttgaatcgatgaaatctcttcatggggtcgatccagatcaccgccannnnncatgcatggtggatctcttttgccgtgcaggacttctacatgaagctgaagagttgctgctacaggcaccgggaaaaggagactgttttatgtggagctctttgctgagaagttgcagggtccacaagaatgaagaggttggaacaagagcagcacaagtgttagttgagctagatccagatgaccctgcagacacgatagagcaaaagttacaaattgaaaggaggcttggtagtgtgaaaacacgcaaggaccgtccgagc

SEQ ID NO: 11575 - DNA, 452 bp, Glycine max
  Coding DNA Sequence Number=SeqID_1796
aacatctttcatttaataggagacttataattaacattaagttttaattaaaggtaatttaagaattttttaattagaattaacgcaatttaatgaaattaattaattttttaatgttatgaaaaaaaaatttcttatttttatttacttataattgagactaaaggagtgacattttgtgtattatgggcccactattttgtttttcctttaaccattaccttctttcttttagcctctcttgtactcttttccttcctcctgttcctagaaagctgttttagttattagttaaaacttattgaaaatcttaaaatttgttagttttacttcttatttaataatttttttttgtcactaatgtgttaaaaaaaaaagtgttggcttgggaaaattgtattcattttggaaaaatgtctaatattaatggagcttgcagttaaggacgctat

SEQ ID NO: 11576 - DNA, 367 bp, Glycine max
  Coding DNA Sequence Number=SeqID_1797
accaaaagcccatcattgaagaaggtgtcaagactttgttgaacaaagacaacacgttgaaccccacactttcatgaaagaagttgatgtcgttgaaaccagacctgtcgaacaaactatcgaagttatggaacccagaaaggtcctcaaggaagttcaatacactgaagctgtccccgtcatgaagaccattgaaactatcgaaccccaagtcatcaagaaggaaatcgaagttatggaacccaagctcgtcaccaagactattcaagtcgtcgaaaacgttcctgtcaagaaggaagtcgaagtcattgaatctgtccccatcatgaaggaagttgaaactttcgaacctcaaactttcaccaag

SEQ ID NO: 11577 - DNA, 579 bp, Glycine max
  Coding DNA Sequence Number=SeqID_1798
tacgtggaccgctgcagtacgatacgtcgcagctccgccgcgaggtcgtgtcgcgcgagtcgcgacgggcgcgagaatgatacgagcgtgtttgtcggttgctaccacgttcacaagctaatggccgacattagtaaattaatatccacgcacataggatacgagtgccaatatattacgccctgccgcagacatccgcgtgtgatcgtaaggtcggtcagctcacgcttcacccggcagcgcctcattgctctaggcattccaccttctcggagcgcaaaccggttataagtcgtgaacgtaatgtcgtgcgagttaggcatgcgaagagtgcgaactcagacgggagtcgacgcgcatgtgggtcgtttgttatagtcttagagaatccattcatattagatatatctgcacgacatgtattaaatacaggagatagaaccttagtccaagtctccagtatccgcatagcacacataacatttcacctcacccatagaagacccaagcagattctctgtccttggtgtgttgaaattccactaagcgtcgtcacagattccagtgacgctccgagtc

SEQ ID NO: 11578 - DNA, 552 bp, Glycine max
  misc_feature (42)..(42): n is a, c, g, or t
  misc_feature (77)..(77): n is a, c, g, or t
  misc_feature (202)..(202): n is a, c, g, or t
  misc_feature (216)..(216): n is a, c, g, or t
  misc_feature (368)..(368): n is a, c, g, or t
  misc_feature (406)..(406): n is a, c, g, or t
  misc_feature (412)..(412): n is a, c, g, or t
  misc_feature (452)..(452): n is a, c, g, or t
  misc_feature (516)..(516): n is a, c, g, or t
  Coding DNA Sequence Number=SeqID_1799
gacgagcgtgtcatctagttgccatcctccactgttcttaanttgtcgagtctctctactcacgtccaccaccgtcnactatatctttcctcgacgactatctccatacagcacgacaaacgtattgattatcgatactagatgaccacaccacgtgaccgatgtaattagtaatctgcgcaacacactcatatcacgttcngcgccttcgagagnacgcgcggtgtctgtcgtaatgactgccgtatatgctgctgctatttatctctctatgacgcatgcgtgtacgtcgcgatctcctctgttatggcgttgcgtctgcgatatcgtcgtatcttcttagagttatcagactatggtctgtttangtctcaccacaccgatgcgcatgcaccgagtatgctcnctctcntctactgccgctgtgccacctacatctgtcctccgcagcncaccgcactctagctactcacgacatatatattaagcgtccaactagacatagttcagcctganacgactgcattgatgtcacagcacgtgcacgtacat

SEQ ID NO: 11579 - DNA, 282 bp, Glycine max
  Coding DNA Sequence Number=SeqID_1800
cggggggataaaacatggcctcattgggagggttacaaaatctaagcggcatcaattctcttatcaaaaaacagggcccaaaagtcaatgcgaagctctagcctgaacccgccaccctatccactgaatggtctggagcctatgatgagccaccacacacttgagtttaattgggggaaacaactacagaacatatgtggaaaacctgaaaaaacaaattgatggcacagaccttgatgggaaatcactctaagagattatagccacatcatatactaaggg

SEQ ID NO: 11580 - DNA, 536 bp, Glycine max
  misc_feature (81)..(81): n is a, c, g, or t
  misc_feature (122)..(122): n is a, c, g, or t
  misc_feature (366)..(366): n is a, c, g, or t
  misc_feature (369)..(369): n is a, c, g, or t
  misc_feature (379)..(379): n is a, c, g, or t
  misc_feature (403)..(403): n is a, c, g, or t
  misc_feature (409)..(409): n is a, c, g, or t
  misc_feature (420)..(420): n is a, c, g, or t
  misc_feature (501)..(501): n is a, c, g, or t
  Coding DNA Sequence Number=SeqID_1801
tcgaccgaggcgtgtcgttcgccgcgacgcgcgggtgcgcgcccgcatcgcactctataatgccgacgcatacgacagagnagcagagacggggacaaccacacgcctgatgtgacgtgagngtagtcggcgccggcatgcgcacgccgctctgtcgccgtacacgagcctcgcagatacagcacgcgaccccaccgcagacagacccagccgcacgaccgacacacgcgcgcaggcgacggcaactcgtctcacacacgcgcgcgccagcagcagctgatcgagagacgaggatgcgtgtgcgcgcacacaacgcaggcggcggacggcggagaagtgtagatcacgaaataatgacaacaacgnggngaacatgatngaacacacagcacgtcgagacagnacacgnacatacgcagngacgtaggagacctggacacacagcagcgagacgtagagactcggcgcgctgcgagcagaggacgctcgacggagagagangcaacgagatagagtcgcagcgagacacggctgta

SEQ ID NO: 11581 - DNA, 544 bp, Glycine max
  misc_feature (218)..(218): n is a, c, g, or t
  misc_feature (470)..(470): n is a, c, g, or t
  misc_feature (504)..(504): n is a, c, g, or t
  misc_feature (507)..(507): n is a, c, g, or t
  misc_feature (515)..(515): n is a, c, g, or t
  Coding DNA Sequence Number=SeqID_1802
aaagtatatgccaaactcattttatattctcttccaccttactccatcctcgatcatgtgaaaaaagtttattttaccaaaaatgtggttatggttctgactgaaaccagtttatgattggcgtatatgcaaaatttgaatggtctaataatgccgattaaatttccgagctaattcctgagattgtgttgttatgcattgttgcagatgaaggtganaaagcagaagaggcataggaagattttgacgttttacactgcttgcttcggttttcggaagcctttcaaggttctatgtgatggcacattcgtgcatcaccttcttgtgaatcgaataacccctgctgacacggccattggcaatgttctcagtgctacggtcaagctctacacaacaagatgtgttctagctgagttgaatcgactcggtagctcgtattctgaggctctggacttctggagggcagtctncataaaagctgtattagtttggcacagatggtgnagncattgaanagaatgttaaggagcttgccagcatggct

SEQ ID NO: 11582 - DNA, 432 bp, Glycine max
  Coding DNA Sequence Number=SeqID_1803
gacatatctgtaacgctgcttcttctgtgaggcatcaatggagacaaaagctttgtccttcgctctgtctctcaatgacctcaccaacaaccgcttctcttccaatacgccacatgctgccgccaaagtttccgtctttaccgtcagatgctctgcttcgggcagtggagagaggccttggacgacttcagacgctagacttgtgcttcaagatggttcaatctggagagcaaggtcgtttggtgcttcagggacccaagttggcgaggtcgttctcaatacatcattgactgggtatcaacaaagtctggctgatcctggttatgctgggcactttgggctcatgacatacccacatattgggaacactggcgtcaatgttgatgatgacgaatcaagacgctgcttccttgccgggcatgcagttacaaa

SEQ ID NO: 11583 - DNA, 555 bp, Glycine max
  misc_feature (122)..(122): n is a, c, g, or t
  misc_feature (469)..(469): n is a, c, g, or t
  Coding DNA Sequence Number=SeqID_1804
tgttgtttctgtctagctgcgtcacgcacccacccacacatcagctgtaattagtatatatacctcaacctagacgagctatcgcgtctctccgccgcgcctgcttcctcctctcacgtccntatctctcttacttctccctctcctcctctatctcttatgctgtgtctcaatccgctcagcgcgacgtagtggcgctatggtcatactcactacgagctagccattgttactctctgcactctacaatcactcgacgcgtagaatcacagcgcggcgacactatctctgctcatggacacactatgcgtgtgacgtcagacggctgacggcaggcggcgagtcgtgtgtgaatgtggcggagtcatctcactcgtccgtcgagacagcacactgcgctcatgactgcatgcacacgtctcatgtctcactcatctcgttcatgcgtctcatctcacatacacatcancctgtgactctctctgcgactcactaccgtcgccctactcacgtcatcaccacacactatcttgtcgagatccaccatcagacgaa

SEQ ID NO: 11584 - DNA, 555 bp, Glycine max
  misc_feature (99)..(99): n is a, c, g, or t
  misc_feature (105)..(105): n is a, c, g, or t
  misc_feature (283)..(283): n is a, c, g, or t
  misc_feature (501)..(501): n is a, c, g, or t
  Coding DNA Sequence Number=SeqID_1805
gagacagcgacgtgcgcgaccacagtccgagcgccagaatttatagatatatcgtagagcggcgacagcggaagttaagcatttttttatctaaacgcncgaganatataagcacgcgagatcactcgcgcgctcatcgacgccatcatcgcgtacacagtatattgcggcccgcaaccatgcaagatataataagcgtacgtgcgtcgttcagtacgcaggggcacttagtccgcgatgcgtaagcatatacaccgccgattaacacgcgagccgcaccggnagtgagtaattggaacaggcgcatatggacgcgttcagacgcagtttgatacgttacgacaaagagacatatatcaaccgccacgcagcacgtcgatacggcagccggcacggtaaaatgaagaaataccccagacagagctgcgcgcgcggcgggacgttggcctacctcgatatgttatcccgctaatctccactaatatatagattgcctattantagccgtggtgagacagtgaaagagggtagatgcgtcgacgataatcaccggac

SEQ ID NO: 11585 - DNA, 422 bp, Glycine max
  misc_feature (135)..(135): n is a, c, g, or t
  misc_feature (152)..(152): n is a, c, g, or t
  Coding DNA Sequence Number=SeqID_1806
gtttatatatgtccattaattgctcatactatatactagtaatatctgatttttttccactcaagtagtattagattcctttccccttgcttgaaatttcatttattatatagttctctttaacttctaatagcnatagcacaaataatgcnaagccatttattactccctccatttcttaataattgtcgtgcaaaaattaaaagtaaaagcgatttcatctattatatagttctctttaccttttttttacttaaaggttttttttaagttaaaattaaaaataagagtttataaaaatataatttttttaacataaattaaaagaaccttttaagaaaaaagttgtttggtaaaaaaatttaaaaactttaacctgcttgtttaaaaatagttatcttgtccgataaacaattattagt

SEQ ID NO: 11586 - DNA, 525 bp, Glycine max
  misc_feature (305)..(305): n is a, c, g, or t
  misc_feature (334)..(334): n is a, c, g, or t
  misc_feature (382)..(382): n is a, c, g, or t
  Coding DNA Sequence Number=SeqID_1807
tagccagacacagccagaacacattaagaccgttcaagtagatatacaacgatcagagcagaactacaaaacgaagaaggtagagagaaaagaggtaaggagagtcaggatggcgcgaaaatagacactacatgaatcacaacacgagagacagagacagattactcactcattagagacacacactctaacgtgcaagtctctccatgcattcgtttcgactgcttatcgttcttctctcccacctctatacttaagtacacgagttacagaagaaaacgcacgcgtgggcgtctttgcatatnagagcgctcatatgtacgcggcgggacgncgccacctcgccaacgagagacccaacatccaatcaacaccgatactnaacaaaccatagggaatttatttgttgatatgcatgtacattacactctatcacctctactacacacaaaacacacacactatcataggaccgatataggatacgatatgaacatcacacggcctaagcgcaacacgaggacg

SEQ ID NO: 11587 - DNA, 456 bp, Glycine max
  misc_feature (81)..(85): n is a, c, g, or t
  misc_feature (247)..(269): n is a, c, g, or t
  misc_feature (348)..(352): n is a, c, g, or t
  misc_feature (408)..(412): n is a, c, g, or t
  Coding DNA Sequence Number=SeqID_1808
tgacttaatcttttgctctgttggcgattaattagggaatgctgatactaacactaacagcctgggtgccacaatttcatnnnnnaagatgcacatctgacccttctggccagcaagtgcgtcttaccccaacgactactcagattgccatcttaattttagggctgagttggatggccgtaggcacaggtggaatcaaaccatgctctattacatttgccattgaccaatttgacacaacttcttnnnnnnnnnnnnnnnnnnnnnnnaacttctttagctggtactacactgcacaaacgttggtccaattgaccagtttgactataatagtttacatccaaaacnnnnnctgggtattggggtttggcacactaggtttgctcatggtatgtgcagttatcttannnnncgcaggaacaagagtttatgcctacgttccacagagtgaagcat

SEQ ID NO: 11588 - DNA, 541 bp, Glycine max
  Coding DNA Sequence Number=SeqID_1809
tgtggcgccactgcaaacattcaagcagatcacgccgcttcttgtgccccccaccagggaggaggagagcaaaagcggactatgacttggacacagggaactgcaccccctttgtatctcccctcagaaggtgccccgaaaatgcacccttttgggcccccaaagtgttttgaataaaccggtctcgtggttgtttcaaggggttgggcaatgggcccagtttctcccctggttaaagaaaaattcggcttggccccccacaggggttacccggatatctttccctggcagggcacaccttttgatttggattggaacacctctccgaagtggcccttataccctgggcgatggcccactttttgaacaggggcaggggcaaacattgtgtcggaaaataaatcctccccgcctttcccaggtgtgagaggcccaaaaaattccccacggggctctgttttttgtgtttaaaacccttctcttgacggcggcgcgcgcccctctcccaggggtgttttctttcggcggcatctggacgatc

SEQ ID NO: 11589 - DNA, 589 bp, Glycine max
  misc_feature (76)..(76): n is a, c, g, or t
  misc_feature (79)..(79): n is a, c, g, or t
  misc_feature (83)..(83): n is a, c, g, or t
  misc_feature (86)..(86): n is a, c, g, or t
  misc_feature (98)..(98): n is a, c, g, or t
  misc_feature (129)..(130): n is a, c, g, or t
  misc_feature (143)..(143): n is a, c, g, or t
  misc_feature (161)..(162): n is a, c, g, or t
  misc_feature (180)..(180): n is a, c, g, or t
  misc_feature (183)..(183): n is a, c, g, or t
  misc_feature (195)..(195): n is a, c, g, or t
  misc_feature (203)..(203): n is a, c, g, or t
  misc_feature (211)..(211): n is a, c, g, or t
  misc_feature (240)..(240): n is a, c, g, or t
  misc_feature (262)..(262): n is a, c, g, or t
  misc_feature (265)..(265): n is a, c, g, or t
  misc_feature (279)..(279): n is a, c, g, or t
  misc_feature (305)..(305): n is a, c, g, or t
  misc_feature (316)..(316): n is a, c, g, or t
  misc_feature (319)..(319): n is a, c, g, or t
  misc_feature (326)..(326): n is a, c, g, or t
  misc_feature (340)..(340): n is a, c, g, or t
  misc_feature (348)..(349): n is a, c, g, or t
  misc_feature (356)..(356): n is a, c, g, or t
  misc_feature (358)..(358): n is a, c, g, or t
  misc_feature (362)..(362): n is a, c, g, or t
  misc_feature (399)..(399): n is a, c, g, or t
  misc_feature (406)..(406): n is a, c, g, or t
  misc_feature (415)..(415): n is a, c, g, or t
  misc_feature (434)..(434): n is a, c, g, or t
  misc_feature (437)..(437): n is a, c, g, or t
  misc_feature (449)..(451): n is a, c, g, or t
  misc_feature (455)..(455): n is a, c, g, or t
  misc_feature (457)..(458): n is a, c, g, or t
  misc_feature (463)..(463): n is a, c, g, or t
  misc_feature (486)..(486): n is a, c, g, or t
  misc_feature (507)..(507): n is a, c, g, or t
  misc_feature (521)..(522): n is a, c, g, or t
  misc_feature (533)..(533): n is a, c, g, or t
  misc_feature (561)..(561): n is a, c, g, or t
  Coding DNA Sequence Number=SeqID_1810
cggcgtcgcgctaatgcgagacgatctggtacatgcgatcacgtgactggtcgacagtcagaattcagcatctgcngcntagnatnagtgtctcatgnacgaccgcatgctcctcgtcgcatatgcttnnatattcgagatanagctgcgcgcagcgcganngagcactcgagtcagcanagnagtcactgtgcnactgacgntagtgatnattgaacgttggactgtcacgacgcgacnattacgtcaatgtgcagcgagncgnctagtctacgctgnagtgacgtcgacgtgccacgacgctngaggttatcgnacnccgtgtnaccactcgtccgcnatccgcgnncgcacantncatnacactcaacgacgtgcgacatcttcaatacgacgcancatagtncatgatcanccctgcgtccacgagatcncgntcgctacgacgnnncatnanntgtgntgctaattggtcgacagtgcagncacacgttcgacgtcgcgacntcgtactcaccacnntacttcattanctcatacgcagctctactaccgactggnactagtcatatgatactgctggggaccc

SEQ ID NO: 11590 - DNA, 473 bp, Glycine max
  misc_feature (50)..(50): n is a, c, g, or t
  misc_feature (130)..(130): n is a, c, g, or t
  misc_feature (160)..(160): n is a, c, g, or t
  misc_feature (210)..(210): n is a, c, g, or t
  misc_feature (278)..(278): n is a, c, g, or t
  misc_feature (355)..(355): n is a, c, g, or t
  misc_feature (372)..(372): n is a, c, g, or t
  Coding DNA Sequence Number=SeqID_1811
gattacacctcgatacacgctctatacgcttgtcctacctcgccgacacnctgacgcactgcatgatgttctgtctcgttactacactaggggtatctaatcaatggagagattatatctcgtctctccnctcctttactaggttcactgatgtccgtancattacatgactacggtcgcggtgcgtcgctcgtacgcgagcgacatcgnatatatcagatgctcaagacgccgtcttataatactcacttactacgcacactcacctgctataatanctacctcgttcatccgcatgccatctcagactctgcgacacacgtttctctagactcatctgcatcgtgcgtgaggnctgacgtatttgtcgtntatgcgtccggcttgacttcgagtattattcttacgataccagatggaatagtaatggtagttttaaggccgagtggtaggtactcgctagtaatgactca

SEQ ID NO: 11591 - DNA, 457 bp, Glycine max
  Coding DNA Sequence Number=SeqID_1812
gatgctaattctcaggttatcagatggttctgggaaattcttgaagatatggatagcactcaaagagctaatctcttacaattcgtcacaggaacttcaaaggtgccattggaaggtttctcagttttgagaggtatttcaggacctcagaaattccaaatccataaagctggtaatcctgaagctcttcctactggtcatacatgcttcaatcaattggatctacctgagtatagatcaaaggagcaattgattgaaaaattgatcattgctattactgaaggtaaagaaggcttcggctttgcataaaggtcatattctggtcgagaataattcaaattgctttttatacagtactaattatccaaagagttttctttttataactgtgttccatttcgtttgataaatattataataataactttattaattacagtatatgtgctcaataccc

SEQ ID NO: 11592 - DNA, 501 bp, Glycine max
  misc_feature (26)..(26): n is a, c, g, or t
  misc_feature (45)..(45): n is a, c, g, or t
  misc_feature (85)..(85): n is a, c, g, or t
  misc_feature (94)..(94): n is a, c, g, or t
  misc_feature (96)..(96): n is a, c, g, or t
  misc_feature (102)..(102): n is a, c, g, or t
  misc_feature (104)..(104): n is a, c, g, or t
  misc_feature (180)..(180): n is a, c, g, or t
  misc_feature (189)..(189): n is a, c, g, or t
  misc_feature (214)..(214): n is a, c, g, or t
  misc_feature (216)..(216): n is a, c, g, or t
  misc_feature (339)..(339): n is a, c, g, or t
  misc_feature (356)..(356): n is a, c, g, or t
  misc_feature (410)..(410): n is a, c, g, or t
  Coding DNA Sequence Number=SeqID_1813
tatactgtatagcttcctgacctaantctctatcttctcacattntatatcgtacgtggtagtgtgatgtctggagtctcacttncgttgtggngngttttntntctctctccacaacacttagtattcatcatatctcgctactaagtctctcttgtatttcattatatacattatgtnttgagcagngtgtgtgctcaccaccactcttatntntactcccctgcgctgcagtggggtgtgtgcctcgtgcttcctggcgggaatataagtagaggagcacagcactgcacgcccagagcaggatactgaatgtttgctacttcctgtgtgtatggnggatgtgcatattctantaggtatgtactcagcaacgcgatgtgagattatgatataataagtaaatgaantttatttagtactagtatctatatacaataaccaagactacaagagatatagaatataaaatctccaagactataatactctcacataaga

SEQ ID NO: 11593 - DNA, 206 bp, Glycine max
  Coding DNA Sequence Number=SeqID_1814
aagagaggagtgaaccagcatcagcggaattacacaaaacacagattccgtgaggcccggtgacccatactgtcccctagggcagtgtcttcctccccgcgcggaggcggcgggcccgctgggcggggaggtgaaatccggccaacgggatcgcagacctatgggatatccctgctttgcgcggctcggcgaagaggtgcggcggc

SEQ ID NO: 11594 - DNA, 580 bp, Glycine max
  misc_feature (297)..(297): n is a, c, g, or t
  Coding DNA Sequence Number=SeqID_1815
aggacgcatgtcaggcaaagcaaatctagagccccatgtatgacggcatagggtaagtcacccttgattgatggctcagatctcaaggatggccccgacctatatgtattccgcaaccagaagtacgtggccattgaattgtggcaggtgaaatctggttctttgtttgacaatgtcttatttatagatcatcctgaatattgcaaacacctgggtcaagaaccatggggcaagcacgaggacgttgagaaggcatcatttgaagaggctgagaagaagagggaagaggaggactcntaggatgacccagttggctgtgatgctgatgaggaagaggacgatcatgatgaagctggcaatatctccgatgctgaatcagagacgcaacctgggggaggccccaaggaagagggtgtacatgatgaactctaggaagtttgcgagacggataaagattgagcggaagttattttcccgatagttatatttcagtcgtagctagatagtcttccctagataagcagctcgtggaagactgatagtaaaatctggagcctttgctttgatcccatttgtctat

SEQ ID NO: 11595 - DNA, 178 bp, Glycine max
  Coding DNA Sequence Number=SeqID_1816
gactcgtgggcttgtttccggttcttgatgaaccacagtctttgctcatatgtctctgagctaatccgcctatcagctacagctagttggctgacggtttacaatggtacttacaaataacctaacaattaaggaccacctggaggatttgaaatcaaaaccaaaggcgaacaatatc

SEQ ID NO: 11596 - DNA, 290 bp, Glycine max
  Coding DNA Sequence Number=SeqID_1817
ttgctgcctgcaggtgaccaaatgtataaatattgacctttgtctaagggtagtggttaaacacatgccaccatgagctgtgaataggtgctgaatctgctgatgatgtgccgagagtggcactcttcgtttgcactgccttaaggctgattaaaacagaatcgggtcttcctgaggatttcatagactccattactgcaaggtgtgatcgctatttcaaagaggcagatctggaggttgtggcattggttgatcgggactcctaattcacatgagcttgggttgaggaa

SEQ ID NO: 11597 - DNA, 516 bp, Glycine max
  misc_feature (373)..(373): n is a, c, g, or t
  Coding DNA Sequence Number=SeqID_1818
gggcgcctgatacagtgccaaaaataatgggggagttgtctcaacccccacaatgggtggagaatgtgttataaaaaggaaacgcgggggggaggaagggagggtttatatgagcgttttggtggtgtaaaaaagcgtggggcgcggcccgaacaaagagggcgaaaaaaaaacaaaccaagacagcccggtccctaggggtgggaaataagacgtggtcgaaaagggcgtagagatttttttccccccgcggatttgatacccaatgggggtcccgtcttgggttaagcccaaacccataagcccaggttgccagctaagttagttgtgcacctcagtccggttcatggcctccggggacgtgtttggcggncctgcagcatcggatcaagtcgccgtggtacccacggccggcaagcagccccaccggccgcagggcccgtaaccgccgcccccgcggcccgggtaccctccgccgcggccccccgcggtggagttccagctttgagaagaaga

SEQ ID NO: 11598 - DNA, 481 bp, Glycine max
  Coding DNA Sequence Number=SeqID_1819
ggcgcgcccgtatctttaagtagtttatcacagcatagccggccgtttgtgtcggcgacgtgcgcgggataaagctgtgcccccgccccgccgctccgcccccttatatatactctctgctatgtatgttatgtcgataaagcggcgtgcgcgacagaaaacataattagttctcgcgaatatatgatacgttcacacacgtatgtagatgtgtggttatacaatgatagcgataataaagacgtaggttggtgtgtgcggcgcttgcctctcgcgccgctatctacacccgaacgttatattatatataaaaccgtgcgggtgacgcaccataagttcatgtgtgcgaacgaattgtgccgcacagtcgagctgatatgtatgtgtcgcgtgcgaaaaaatatataattatcaactctgtttatcgataccaaaattataacagtgtgcgcgcgcatggacgcgcggaacgatatactta

SEQ ID NO: 11599 - DNA, 542 bp, Glycine max
  Coding DNA Sequence Number=SeqID_1820
acatgagcattccagatgattacctgttagtcccgctaaagtttgtaatggtacatattggtaaagagcgtaaggaagcatgggccagttggtttaaagcttatatacatgaggtctcttacagtgggatacctgatcccgaaaggaagatctgttatggactcagtgaatccttaatatacacttagtaactatctctgcctccctgcaatttatgcatcacaaataggtgactttggagaggtttgcagcctgttccaattagtggagcatccgtatcatgaactccctggaatggaaagatatgctggcttgcccccagattgggcatatcgcccaggggtatgcaagtctttatgttattccttacgcttcccgttaggtgtaaaggcgtcctataatttaaccctataaaatagcgcttaacttatagcggataaaatagtagcgcgtttctaagatattcttttcccgtaggtttacgataaccggccccgagtattattgtcacacgagcaatgcggtcgtcttggtctcagaaa

SEQ ID NO: 11600 - DNA, 581 bp, Glycine max
  misc_feature (428)..(428): n is a, c, g, or t
  Coding DNA Sequence Number=SeqID_1821
gagctacgaattcttaatgagggtcggagacggggacgagtataaactataaacgagaattaattggtggtgtttatttggattagaactcattcgctagttgggcatgaatgactaagcaaccatcatcctcgctcgccgcgtagacattatatacttagcgctatatctgtggcgggaggacgatcgacggtgggtctatagtatgagttcaagtgtatatagagaggaacagcggtggtgggaggagagaacagcgtcgtgaggtactcgtaacaggtacgtatgatgcagtaataacgaaagtgggcaaagacgagaggtggagacgcggagacagccacataggttaacacgactgatgtacgcagcacggaacagaaagagtgatggtatatatatcaacacattcatacgcaactaatcanaagtagggtggattagtgtagttgagaagtacgtgcatgtcagggtggtgcgttgggtgttggtatatataggcgacgagatgttctatcgcagaggttgttgggggttctggttcattaagttgtccgcctttcttcgtctagagtctattt

SEQ ID NO: 11601 - DNA, 543 bp, Glycine max
  misc_feature (220)..(220): n is a, c, g, or t
  misc_feature (263)..(263): n is a, c, g, or t
  misc_feature (280)..(280): n is a, c, g, or t
  misc_feature (433)..(433): n is a, c, g, or t
  Coding DNA Sequence Number=SeqID_1822
tgcacatactctcgcgacaacacaaacataaatatcagaacaatacaaatagaaatgtaagagagactaacatcataatatagtcatataacgataaattattttatctagattatagagatagagatggtgtaagatatgacagtgtacagatatgtatgatagtatgaagttgtatatcattctcgcggtgagtagcgtgcgagggcgtcacgcggtntgaggcgttacatgcgtgaaggacgagatcatactgtatgtantcgtggctcggagccgngattgtaacgcagtgactgcatgtacggctagtcgatagttatgttcagatcatgagaactagagtgagaacaggataatgatcagagtcgataatgatgcgattctaagagagtaattacatatgtaggaaatagcgcgccccgcacgacgngactttcgcctcgccatcacgttcatgcgcgcgtaccccaccattgtcatgcttataagaccgtagctcactcctactcactcgcttatacgcaccctccatgaagtctg

SEQ ID NO: 11602 - DNA, 491 bp, Glycine max
  Coding DNA Sequence Number=SeqID_1823
gggaattctgctcgagcttcctgcttcttctgtatatctctctacgcctctccgcgtgtcgcttcaacgggatccgtcagattttccgtcagccttctagggctttctcgaccgctctgaactaccaccttgacacaccggacaacaaccctaaacttccatgggaattcaccgaggccaatcaagcaaaggttaaggagattttgtctcactatccatccaactataagcaatctgctacaattcctcttttagatcttacccagcagcagcataaagattaactacctattgctacaataaatacaatagctaagattatagaaattcctcccatacaaatatataagattgccacattttactccatattcaatcaacctgaagttgggaaataccatgtgtggggtgatagaacaacacctgatatgataaggaattcaccaaaaatggagagaacctgattgaagcacgtggaaataaatcacaat

SEQ ID NO: 11603 - DNA, 322 bp, Glycine max
  misc_feature (30)..(30): n is a, c, g, or t
  Coding DNA Sequence Number=SeqID_1824
gtgtactttcgcaaaaggtttattgtgggncttggccccgtcgacaaccgagcccccagatcccggcaaccccaaccccacactcaccaccatctccatactttcctatattagatcttcttggcgccaggagcgttgagatgtgaggccatcatcgccactcgcgacagatggtaacagtgatctgtgtggttaacacattatttaagagccttatttagcagagatgtgatctaatctctcttcatcaaatgtagtctgctgtatatagaatcgctttgttcctctctgtccatcttcggaattggtctccatattaaca

SEQ ID NO: 11604 - DNA, 550 bp, Glycine max
  misc_feature (105)..(105): n is a, c, g, or t
  misc_feature (113)..(113): n is a, c, g, or t
  misc_feature (189)..(189): n is a, c, g, or t
  misc_feature (228)..(228): n is a, c, g, or t
  misc_feature (240)..(240): n is a, c, g, or t
  misc_feature (253)..(253): n is a, c, g, or t
  misc_feature (276)..(276): n is a, c, g, or t
  misc_feature (294)..(294): n is a, c, g, or t
  misc_feature (342)..(342): n is a, c, g, or t
  misc_feature (344)..(344): n is a, c, g, or t
  misc_feature (349)..(349): n is a, c, g, or t
  misc_feature (376)..(376): n is a, c, g, or t
  misc_feature (392)..(392): n is a, c, g, or t
  misc_feature (399)..(399): n is a, c, g, or t
  misc_feature (401)..(402): n is a, c, g, or t
  misc_feature (460)..(460): n is a, c, g, or t
  misc_feature (494)..(494): n is a, c, g, or t
  misc_feature (525)..(525): n is a, c, g, or t
  Coding DNA Sequence Number=SeqID_1825
ccgaccgcacatcatcatatagacacatgtactcgacgactatatacacgagcaactcatatctatgagagttatatgatgtgttagacatcattctcttcgtcnacacacanaaacacgatgagtatatccgaacatatgtacatagtctagacatatatcactcatgtgtgtgctgtaaggcaactnagatagatagtacacacatcttaactattcaacacaaancgtacgcgcgtntataagtagatangaatagacgcaagtgctaatatntatacacatgcaatatanatcgcgacccagcatgcacacagcgatataaatatgggaagtgctgtnantatantactatgcagacgcgtcgcgctataantcgcagacgatggaantgcatgntnngtcgatgtacgactcaagggaacatagtctgatagacgaacaaacatacacgcaacanagaggacactcggatagtgagatatcagcacatncaccatgcagtaaagactacatagcgtaacncacagtgcggtaacaacatatatca

SEQ ID NO: 11605 - DNA, 371 bp, Glycine max
  Coding DNA Sequence Number=SeqID_1826
tttatctaatactcttttgacctacttacattctgagatcaacttcacatcgtcaatgccatagcagaaacatggggagcctctaaccactacttatatctcgttaccttcacttcttatatatgagcactattcccacaatatcatattgtcaaccaatcaacaaacacgtgggggaagaaaatatcaggctgaagccaacttttgcatgtgcctagccaattcttggtgctacacatacctaactcaaaattgagtccatacagttattgagaatggtttcagattagatgcaccacgggatggtacattggtgattaacaagggtcgatttctagtccgcttgggaattactcttttgtgcttataaa

SEQ ID NO: 11606 - DNA, 544 bp, Glycine max
  misc_feature (32)..(32): n is a, c, g, or t
  misc_feature (37)..(37): n is a, c, g, or t
  misc_feature (312)..(312): n is a, c, g, or t
  Coding DNA Sequence Number=SeqID_1827
agtgcggaggctatcgaacgacgtcgctaagnacctnctcgtccagccatggcaatagacagtcacgcgcgggcgtcgcagtagccagatgtgtatgagacggcgatcagagaaggaagtgtatgttgttgcctagagagagaggagcgcgcaagcacgtacgagtgatatagatctcgacgtgagagatcactgatggtagagtatggttgtgatgagagtagatgtaagtataggtaggtagacgacgatcacgaggtgtggctagacgtagcgcggctgccccagctgattcctcactctccacgctcnaacaacgtatctataaatacacgtagcgacacgcgcagactcacgtctctacttatatagtattatcttcatttatgtagttcgatagagaggaatctggctctctatctagttgtagtcactatcaggataatgataagagaaggaagatgagaggaggacgcagcatgcgctaatcgcacgcgtatccatactcagagagagtagcgcggctccctttcgaacatagata

SEQ ID NO: 11607 - DNA, 422 bp, Glycine max
  Coding DNA Sequence Number=SeqID_1828
tatgcactctcattcatcttccttcatcatccccttcatcatcttcttcttctttttcttctctcaatccaccatgttcaactaccttctctccctctaacgatgggcctctcagatccgttgatttgaatagttgcaaaggaaatgattacgaccatgcagattcattaccgttggtttgattctgaggctaaaatacggttgttatctaactgtatatccagtccctattgcaactgataagccgctttcaaggtgttatcagcttgctgaccctggggactttggtctgagtgaatagataagttggtcgcaagtttgcaagatgccatattatatacagagactttataggctatgcaatgcatccttttcacctgatggacctgcgtctgaagaggccatcgagaaagttcgtgaga

SEQ ID NO: 11608 - DNA, 360 bp, Glycine max
  Coding DNA Sequence Number=SeqID_1829
cagtttcaccacctactgtacctaaactgaaccagattgaggatctcaatgcagattttaaccaggggggtttggaagattctcaatatgtcatggtagaggcagttagagaacctgaaaatgttgaaatcagacatcatgatcagaagaagtgtccatataacaaattctgggaagcattattgaaaataaacgatccagagagtcctatctcatcaattgattccatcacaaacaggattgatccaatattggatgatgtagatgttggagaatgtgagattctatggcaggatctggttctcgatgaaagaatgtggatatgttcatatggagaggtctaccatgcgtactggaatg

SEQ ID NO: 11609 - DNA, 573 bp, Glycine max
  misc_feature (84)..(84): n is a, c, g, or t
  misc_feature (147)..(147): n is a, c, g, or t
  misc_feature (168)..(168): n is a, c, g, or t
  misc_feature (313)..(313): n is a, c, g, or t
  misc_feature (395)..(395): n is a, c, g, or t
  misc_feature (399)..(399): n is a, c, g, or t
  misc_feature (526)..(526): n is a, c, g, or t
  Coding DNA Sequence Number=SeqID_1830
atgtgtcgacgtatacgtgacccgtctcaccagtaagcgtcctcttcgctcagtctctacacccatcgtgaagcgctccgtctncctgggcaccatccagtgtgtgatcggagctatgcatacgctgtaatttacacatatcatcgnttgatatctcccacatccaanccgaccgtcattctgtattatattgatcgttgcgcgacagagataagtatgtgtacgacacgacgtcgcaccaggtactcgaacgaccgcgcaactcgacctcacattctaccgacagtgtcacatgactctctaccatatcttnaaatcgaccctgagacatatctacgaacacatgaagtcgtagaggaatcacttattatacgtagagaggatggtcacttgtntatnacttatgagcgtgtcgatcgtactgcatggaatcgacgcgagtgagagacttatacacactcgcgtctctacggacacattataatcacgactacagcgacgcgatcagcgcatattgcgctacatncgcgcgtctctacacgtagactgactctgactacaggtgatcctcca

SEQ ID NO: 11610 - DNA, 599 bp, Glycine max
  misc_feature (93)..(93): n is a, c, g, or t
  misc_feature (95)..(96): n is a, c, g, or t
  misc_feature (99)..(103): n is a, c, g, or t
  misc_feature (105)..(107): n is a, c, g, or t
  misc_feature (109)..(112): n is a, c, g, or t
  misc_feature (153)..(153): n is a, c, g, or t
  Coding DNA Sequence Number=SeqID_1831
agattctcgactatgctgtcttgcggtctgcggcacgcgagacgcgggcggtggtgagttcctcgcccttgcatgagagggactctctccccntnnttnnnnntnnntnnnngtgggattcactctagatgtatttttttttataatatgcantcgctgcccagacaactggcggccactcgagcgttgataattatcctgtggtaatcgtccgcggcaggaatacacatctatagtctcttaatagtagacggctctgcccaccccgctgggagtggaattcttcccaagccttttctgatgctcattcttaaagtggacggtgacttaatatggcggcggctttggcgagaaatcatcctggaggcacatcagacttgtcatcacactcggtgcgcacaaattgtgtttatgcccgcattccacaaattctgcccgtgagcacactattcctgaactccgggatagactcaaataactacgttacaagctccttggattgttggtcctcacatcaggaatgtgagcgcacattcgtcagcatcttacattgtgcgtgtattgtcggctgtcaacgcgggcagcgagtgtatctctac

SEQ ID NO: 11611 - DNA, 356 bp, Glycine max
  misc_feature (72)..(72): n is a, c, g, or t
  misc_feature (111)..(111): n is a, c, g, or t
  misc_feature (268)..(268): n is a, c, g, or t
  misc_feature (313)..(313): n is a, c, g, or t
  Coding DNA Sequence Number=SeqID_1832
gggacaactgtcgagatcatatacattcttctatctgatcatactgttctcacgccgctgttaagaactggntccattaataggcagtctccattctgcgaactctaatanttcatccctctgtttctcgtgtgatatggcactgaactgagggatgatgggcggattggcatgtattagtagtgggggccccgtatcgaagctaggcttccaatataaagtctctgaagcgccagacatctcaaactccagatatctctgctacagnttctcctgctcttgaagaggagagaaaaggagataagagagtaanagactctgatactgattctcctccttctaacccttatggatgg

SEQ ID NO: 11612 - DNA, 504 bp, Glycine max
  misc_feature (26)..(26): n is a, c, g, or t
  misc_feature (70)..(70): n is a, c, g, or t
  misc_feature (131)..(131): n is a, c, g, or t
  misc_feature (203)..(203): n is a, c, g, or t
  misc_feature (271)..(271): n is a, c, g, or t
  misc_feature (294)..(294): n is a, c, g, or t
  misc_feature (298)..(298): n is a, c, g, or t
  misc_feature (300)..(300): n is a, c, g, or t
  misc_feature (370)..(370): n is a, c, g, or t
  misc_feature (372)..(372): n is a, c, g, or t
  misc_feature (437)..(437): n is a, c, g, or t
  Coding DNA Sequence Number=SeqID_1833
gatgctcatgactaccgcatgactanaatgccaagaggctacggaggtgagagaaaagagtagagagaanaggtcacagcatagtacttatagattaccaccaatcacacgcagatacacagcacgacgcncagcccgccggagcagatcagcagcgcgaatggcgcgaccccgccgccgctcggtagtgtgagtaggcggtncagccgctcgcgccacgcgcgggcagggacggcgcccacgagggctcgccggcgcagcgctacgccancatcccggcctaacccgtgcccncccncnaaatccaggtggtcggtgtgtggtctctcgtggtatataatatgtatagagatgttagtgtttctcgtgntnagatgtgctccgtcacacttggctctccctcagctctgtcccaggtcgcgcgtgtttgtattaanccaccataggcggaatgagtaggcggtggtgcccgagctcgcgctctggaatataggctttttctta

SEQ ID NO: 11613 - DNA, 449 bp, Glycine max
  Coding DNA Sequence Number=SeqID_1834
gaatactgatcaagcaggcccctagtctccataatatgcttcaattattaccttttggattccaaatcatgtaccacagattttcaaaatgtgggtgcattcaaagtccaaaggtttcctgcttttgaatcatccaattgtctacacgaaattcatttacagtagtagttcttgttttcttgtttactgtcattttctcatgttaatattcattgtggtttcccagccctgcatttcagaggtttgcagtgaggacatcaaaaagaattgaagatatttctaacaaagctgttcagaagaggcaggagctagctgagcagatcaaggacatctcgaaaaatatggaggttgtatgctgacaaaattaatatttaaatcaatattgacaatgtgattatcatcttttaacttttcctttttcttttgctgcttccagtcattcaagaaca

SEQ ID NO: 11614 - DNA, 477 bp, Glycine max
  Coding DNA Sequence Number=SeqID_1835
aaagctcctcagaacctatatggcaaggacctcatttttccaagcattggagctaatagagacgctcaaacaagcgcacctctcttctttccaaatgcaagcttctttaaaaagagtgatactaaaaagacactggactgtctcaaactgccaatgaataatctcagagaagacttttcagtgtcgtcttcaagcagatgcgactttgctaaccatcccaaggtcaaggaaaataactgtaaggagagattcaagaaaagcgaatgcatactggcccctccacaaaagagaaagcgctgtcagattcttaacgaattttcccaagaggactatttgagcccaaagcaccctcgagtcaaagctttacaaggaaatttgctcgatctcgcacgaaccgactctgaatccaggaaatcatcaaaatttgaggagtggcaaacacctcaaaagaagttccatgtcttttgggatcatcat

SEQ ID NO: 11615 - DNA, 512 bp, Glycine max
  Coding DNA Sequence Number=SeqID_1836
tcaaactgagtgtgttgttcgtcggtaccgtgtatagatgcctgatatgtgttactttgcacgatgaccatatggaactaccgaggcagctgcatgacgatgactcagtgagttgcactgcgaccgacccatgccttaactacaagccggtgatcggaatcctgacccaccccggcgacggtgcctctggccggctcaacaacgccatccgggtttgttacatcgccgactcctacgttaaattcatggagtccggtggtgctagagttattcgacgtatctacaatgagacacctgagaacctgaacaagaagctcgattgggtcaatggagtgctcttcactgctgggaaggctgatttaggaccatattgggatactctaggaaacttctgcaagatagctctagataaaagctatgctggagaacatctatcgggaatcgactatctctgatgaggagacctcatcatcaggatcgtgagatagcaagactgaatccttgatccattt

SEQ ID NO: 11616 - DNA, 565 bp, Glycine max
  misc_feature (423)..(423): n is a, c, g, or t
  Coding DNA Sequence Number=SeqID_1837
acctgctcactccacaaggaagaatatttgcgaaagcgacacacacctcggagcacgcgcccccgtgaatgtgatagcaaattactatatctccgacttctgtgacatatctcatcccaaacaattctcttctgcgcttggccgcactcgcccccctcactttcgtatcttcacaacgacacgcacacacagaccttccctaccgtgcaaaccgcgcgaccccgaaccacgacaccacctctgcggcgtattacagatgagagatgagacatctcatacatacactaggcggtgtgggtggtggcttctcggcacattcccttggttctactttcgcgctcaattagaaaaacataatcataccatatagtcatccggcacatctacctgcgcacactcccccctccagcgccaccactcaanaacatttcgtcctctcccctgattggcaaaatcaggctcgaactcgtgcgagaggacgcgtctactgctaactcaacaccacagcctgtggcgcgcggcgggcgggtcgttgctcacacagctgtggtgtatcacggcccgc

SEQ ID NO: 11617 - DNA, 412 bp, Glycine max
  Coding DNA Sequence Number=SeqID_1838
aaattgacccaaacacatcattagggtataaactactcacgcaaagtcttttcacttcaaccttctttgttgaatttgcgagcagaggaaggaaggaatctgcagagagaatgttgttcttctcgtacttcaaggatttggtgggacaagaagtgacggttgagctgaagaacgatttagcaatcagagggacacttcactcggttgatcagtacctcaacatcaagctcgagaacactcgtgttgttgatcaggacaagtaccctcacatgttgtcggtgagaaactgtttcatcagaggatcagtggtgaggtacgtgcagttgcctcctgatggagtcgatgttgatttacttcacgatgctgctagaagagaggccagaggtggatgattccgccacaaccgttttat

SEQ ID NO: 11618 - DNA, 555 bp, Glycine max
  misc_feature (84)..(84): n is a, c, g, or t
  misc_feature (203)..(203): n is a, c, g, or t
  Coding DNA Sequence Number=SeqID_1839
gcactatataccaactcgacacaatattagtaatgtgacccgcgagtgcactcccaccgaagcctatcaccagccacgcgtggngttgatcatataaagggagaagggggcgtgagactagaaataacatcacaccacagatatcggaatgtgcgtgtgtggtagcgatacatataaactgtatgatctgtatgatgcgtagntcaggtgtcttgttatcaggtcaccctccacgttcatgactaaatcttcgggacgacgtgtgcgtggggagatatacacacaaactcatcatctggtaatataaataagaatgaaagcaccatcactactagacatatccattagtaggaggaacacaatccactacccccacgcccttatctatgtgtagatacgctagcgatgtgagacgccgctctcacattgagaaggaatggtactcctaacaccatctcctagactctcgatgttccagatcaataaaaactaaccaccacacctgtagcagagcagagagagactgtctctctacaagctcgcacctggtgagat

SEQ ID NO: 11619 - DNA, 534 bp, Glycine max
  misc_feature (118)..(118): n is a, c, g, or t
  misc_feature (236)..(236): n is a, c, g, or t
  misc_feature (238)..(238): n is a, c, g, or t
  misc_feature (242)..(242): n is a, c, g, or t
  misc_feature (249)..(249): n is a, c, g, or t
  misc_feature (262)..(262): n is a, c, g, or t
  misc_feature (266)..(266): n is a, c, g, or t
  misc_feature (286)..(286): n is a, c, g, or t
  misc_feature (311)..(311): n is a, c, g, or t
  misc_feature (331)..(332): n is a, c, g, or t
  misc_feature (340)..(340): n is a, c, g, or t
  misc_feature (345)..(345): n is a, c, g, or t
  misc_feature (360)..(360): n is a, c, g, or t
  misc_feature (382)..(382): n is a, c, g, or t
  misc_feature (408)..(408): n is a, c, g, or t
  misc_feature (490)..(491): n is a, c, g, or t
  misc_feature (505)..(505): n is a, c, g, or t
  Coding DNA Sequence Number=SeqID_1840
gtcacggacggactgatctcgagacgtaagtgcgatacgcgagtcagctgatacgctgcatgtcgtcgtactcgtgtcgagcgtgactttcatctgttcgtgtatgtcgaccacggtnaccccgacgacgattacatcgagcgtgcactgcgtatatcgagcgccgatactgataatatgcgtatgtctgatgctcgtgtgacgacactagctaagcacctgacttatcgtacatncnacgnactacgnctgttaactacantcgncgagtagtatgagtcgtcancgcgcgatgtatctgctgctcgcgntcgacgaactgacacgcgtnncgcgcgtnatctncgatatgattctgtncgttcgctcagacgactcgctntcggcgcgatagacgtccgcgcgggnacgaccacgcgtctgcgtgcgacgcatgcgtcgcctgcgcactcgacgtctcgtcgtcagtatcatcacggcgtctcgcatnnttctcgcgaagtgntgtcgtctgtatggacgtctctctgtcga

SEQ ID NO: 11620 - DNA, 598 bp, Glycine max
  misc_feature (38)..(38): n is a, c, g, or t
  misc_feature (129)..(129): n is a, c, g, or t
  misc_feature (248)..(248): n is a, c, g, or t
  Coding DNA Sequence Number=SeqID_1841
ccttaggcggtgtttatgatgatgttccggcggggcancatggggaggaggcaactaataccaaccacgagtgaggagaaggatcgtaaaaccatctgaggcatggatgaaccccatcacgttggtagncggggcgtcatcacaagagcagcagcatcatgttcgtcatatgtaaaccgatgagtcatgagcactgcgtcagacacctatgtgatcatcgtagaggcaaagattgatgatgtgagctntcagatgcagtagcagcacgcagagcagtaatgaatcctgatgtcatcagcgtgtcttcgcaacgagaataatcgtccagcactgcagcagtgcaagacgatgatgaggagattatcgaggatgatgttgacgcaaagaacgttgagtaggtgatgacccaaccgggagtagctagtacaaagactgtgaaagcacttaagaatgctgatggagatattgtcgctgccatcatggaacttcccacctaaatataaatcgtttcaactttaaatgaggtgcctctcaaaaatgaggaggaagaatgtttttcatcattcctccgaagaagttttcagcagtgtatcagcat

SEQ ID NO: 11621 - DNA, 282 bp, Glycine max
  misc_feature (152)..(152): n is a, c, g, or t
  Coding DNA Sequence Number=SeqID_1842
gatggtgttatatgcttcttgccgtggtattgcttctaaaatctctcactaaatcagccagctcttctgcttgtccttattttgtttaatattccttgattgttatgatgagttgagaaggccgacacttgacggatgcagctatggcgtgntggaggtggagctcgtcttgcctgacagccccttcgcatcccccaccaagaggagcctcatgcgctgatgctgtcaccgctgcaagcgctcggaaatgccagcagcaacaagcccctcgcctgttgtttt

SEQ ID NO: 11622 - DNA, 487 bp, Glycine max
  misc_feature (69)..(70): n is a, c, g, or t
  misc_feature (96)..(96): n is a, c, g, or t
  misc_feature (131)..(131): n is a, c, g, or t
  misc_feature (136)..(139): n is a, c, g, or t
  misc_feature (150)..(150): n is a, c, g, or t
  misc_feature (188)..(190): n is a, c, g, or t
  misc_feature (192)..(192): n is a, c, g, or t
  misc_feature (200)..(201): n is a, c, g, or t
  misc_feature (264)..(264): n is a, c, g, or t
  misc_feature (266)..(266): n is a, c, g, or t
  misc_feature (278)..(278): n is a, c, g, or t
  misc_feature (342)..(342): n is a, c, g, or t
  misc_feature (344)..(344): n is a, c, g, or t
  misc_feature (346)..(347): n is a, c, g, or t
  misc_feature (370)..(370): n is a, c, g, or t
  misc_feature (407)..(407): n is a, c, g, or t
  misc_feature (409)..(409): n is a, c, g, or t
  misc_feature (456)..(456): n is a, c, g, or t
  Coding DNA Sequence Number=SeqID_1843
tatatgcgtgtggttcacgcgcgtaggatgacgtgtcacatatacctgcacaatcacgagcggtgtctnngctgctctgcctcacacgcgatcgancacgcaaaactaacacaacacactacaaccaacanctcannnnggaggcactcngtgccgttccccgtccgcttccacctaactattccgcnnncnttttctcnncgagcctccatcgagccctccctcacctcctactcacgttattctcacattatttcctacagntncgtcgttctcgntgagagagctgagtaacgcatgcattcgtgcactccgcgaaggatggctgctgtccgctcttgngngnntctttcgcgctgttctcatgtanatgtctctaggatcttatatacaacgcacgtctcagntnataccaactatccatactcttcgctatgcgtccgatggtggtggtgnggtggagagactgatcgctgagtgacactag

SEQ ID NO: 11623 - DNA, 580 bp, Glycine max
  misc_feature (181)..(181): n is a, c, g, or t
  misc_feature (223)..(223): n is a, c, g, or t
  misc_feature (255)..(255): n is a, c, g, or t
  misc_feature (260)..(260): n is a, c, g, or t
  misc_feature (293)..(293): n is a, c, g, or t
  misc_feature (371)..(371): n is a, c, g, or t
  misc_feature (421)..(421): n is a, c, g, or t
  misc_feature (437)..(437): n is a, c, g, or t
  misc_feature (501)..(501): n is a, c, g, or t
  Coding DNA Sequence Number=SeqID_1844
ggtatacttgcgtttgatcacctcgctgccctcttgctgcgccgctgtgacacgagtaccgacggctgtaggcctcgactgacacgagctacgcctagctgcgcgccgacgtccaaacaagatagatctgtcccgcgcgccgatccgcgactgtaccgtcttaacccacggtcgccccccntagcgtcacgcaagatcggatatgtgcgagcatcgagtctcngccactgatcactctctccgacttctatgcgncgtantatgacgcttacagccatatctctctcgtctcnactctcgtctctctatatgctatattcccgctccacactctctcgttgactatcgcatagcgcttatcactctcaccncacacgtatgcgagtgaccgccgcatacacgttaccgtcacgcctgtacnagactcgactcccgcnctacaccgctatagtgatatatgtatcagctcaacaacctcgatgatctctcatgtgatcacgntagccaccacacactatacttaacagcgcgtgcggatcggtcgacccggcgactgtagcgccagcaatgactacttcac

SEQ ID NO: 11624 - DNA, 566 bp, Glycine max
  misc_feature (369)..(369): n is a, c, g, or t
  Coding DNA Sequence Number=SeqID_1845
atcacacagtattagcgtcctcgagagctattatgtatctctagagcgcgtgcagcgttacgctgatcattgtctatactgattataatccttcctcctgccgtctcgatgatactctacctaggcaggggcgtcggtactctctgttatatacgcacctgcgacgtctgctcgcctatctcatctctaccttcggcgcctccagaaatgacatcctacgtaccacgcgcactgcatgtagacctaattctatctgtctctgattgtatcatactcaacgaacacgtctcttgcatttcttatctttctcttactcgactctcactcttgctctatcaattcttatcttcctcacctacactacactgnatatgtccgcctcgctcatgataattctcccacacgataacaatgtctatgacccgctgctactgagctgcacgcgcatcgacacgctcacgactgctgctgtcagtcgcatatctcaccgctacgtacaacaattattatggacaacatagacttattgctcggcatcaacgtcatatattactcactccgtcctt

SEQ ID NO: 11625 - DNA, 494 bp, Glycine max
  misc_feature (173)..(173): n is a, c, g, or t
  misc_feature (196)..(196): n is a, c, g, or t
  misc_feature (231)..(231): n is a, c, g, or t
  misc_feature (238)..(238): n is a, c, g, or t
  misc_feature (329)..(329): n is a, c, g, or t
  misc_feature (336)..(336): n is a, c, g, or t
  misc_feature (360)..(360): n is a, c, g, or t
  Coding DNA Sequence Number=SeqID_1846
agtatagacacgacacatgccctacacatatacaaactgtgataaatgagatagacatacgaatctctacatcacacttcattcctctatgatccaatgtcggcgctgtacgtgatatgtctgcgtagcgctctgtatgtgtgaactatcatgtcacgcacacgatacacaangataacagacgatgctgatatcntcatgcattatacgtacgtgagctcccgcgagcgncgccggntagatataacgcatgatcacagcgcatcatacatcaatataatgcacgattctacatctcacagtgacacacatgtgtcgataaatgagcngaagacntgggagagaatcgagatagtatgngtgaaaaacggacgtacacgaatagtagcatgtacagcacgatgagcgcacgagcatagcgtgagaaaaagatatcacacaacacacatctcacacgaccaagtttcttatattatacatgactgcaccgccga

SEQ ID NO: 11626 - DNA, 254 bp, Glycine max
  Coding DNA Sequence Number=SeqID_1847
aaagcagtaacgtacaacgccgtctctcgttcacatagtcgctcaccatcagactgtaatacattgttagctattaaagcccatggatatctcacagatgggtcctggagatgatttattcacagtacctctcaagcttgtagttgaatgtgccgcctatattcatgctcttgttgcatattttgatgtatcgttcacaaagtgttataaattgatggccttctctataggatcaagattatgagttatgcatt

SEQ ID NO: 11627 - DNA, 505 bp, Glycine max
  misc_feature (241)..(241): n is a, c, g, or t
  misc_feature (270)..(270): n is a, c, g, or t
  misc_feature (277)..(277): n is a, c, g, or t
  misc_feature (282)..(282): n is a, c, g, or t
  misc_feature (293)..(295): n is a, c, g, or t
  misc_feature (313)..(313): n is a, c, g, or t
  misc_feature (347)..(347): n is a, c, g, or t
  misc_feature (409)..(409): n is a, c, g, or t
  misc_feature (438)..(438): n is a, c, g, or t
  misc_feature (472)..(472): n is a, c, g, or t
  misc_feature (474)..(474): n is a, c, g, or t
  Coding DNA Sequence Number=SeqID_1848
gtcatatcgcacgtatataagcagtagatgctgttatagctagtatatcgaccgccaataaaattatcattatacgagataatagcaagaagagtataattttattactacaagtagtggagaggcagtgtagtgtgagagacttgccacagccacgctgctagcacagattatgaacagcaagataacgctcctatctagacagactaatcgcgactgtagtcaacacacacactacgcngcgcttattttccgctgacgacggtgtgngatattntatgntcgtgtggggnnngcgagtgtagttttattnattgtgttacttttgagaagagagagtagtaggnagaatagaggacacgcacacaatcaacacatagatctctctcttacaatcgaatacacaaanccctgccacggtcgtctctctttcatctntttatcattaagagaagagagagacccaggatcntntaatattatccacactaatcaaattgcgtgc

SEQ ID NO: 11628 - DNA, 468 bp, Glycine max
  misc_feature (33)..(33): n is a, c, g, or t
  misc_feature (86)..(86): n is a, c, g, or t
  misc_feature (90)..(90): n is a, c, g, or t
  misc_feature (92)..(92): n is a, c, g, or t
  misc_feature (167)..(167): n is a, c, g, or t
  misc_feature (177)..(177): n is a, c, g, or t
  misc_feature (188)..(188): n is a, c, g, or t
  misc_feature (219)..(219): n is a, c, g, or t
  misc_feature (257)..(257): n is a, c, g, or t
  misc_feature (319)..(319): n is a, c, g, or t
  misc_feature (345)..(345): n is a, c, g, or t
  misc_feature (350)..(350): n is a, c, g, or t
  misc_feature (421)..(421): n is a, c, g, or t
  misc_feature (433)..(434): n is a, c, g, or t
  misc_feature (439)..(441): n is a, c, g, or t
  Coding DNA Sequence Number=SeqID_1849
caagtggagcgagaagcgccgtaccgtagttgnagaatctgatgtcataaggtgttaaagggagcagcattataggagagtgtgcncgtnangatgttatacgctcgtagtgctctgctgtgacatatttctatctgctggaggagtcgggatagtgtaggatgagnatactccgtntacgcgccagngttgaggccacatatgtgttgttgttttctnttgttgatttgatatgacagcgatggtggtgtggtggngtgtttggtatatgatagggataggggggtcgtcctctcgaatgtgtcgttgccacacccanactcccacacccacacctcacacgtngatcnttctcgttgtgtgggtggagagggggagcgccttatcgattatgctatgaactctcggatgggtgtgggtnaacttccacccnntggtnnntttttcggtgtcttttcgtcttggtag

SEQ ID NO: 11629 - DNA, 421 bp, Glycine max
  Coding DNA Sequence Number=SeqID_1850
atcgtcctcgtcaccgacagatagagagctccgccgctgccggccgggatccggggccggcgttgctgcccgtgctcaccagcaccgcccctagagacgtgctgctggacgtgccgaagccccctgctggtctccctccaggttcgtcctcgaccaccgcggctggacgcgcggctgacccgccgcagatccccgtggccggagacgccgcggaggcctgccgctggatgcgtcgccgaggccttctgctgtacgcatgacttatttgtccctggtcgacaccactgggcctgaccaagtcgctctacctaggattgcagctagcagtttccaagtctgcacgcaagctgtttgtggtaatgtctcttcatccgtgataatttttttcaactcgattttgcaccatagcatagtcagcggc

SEQ ID NO: 11630 - DNA, 492 bp, Glycine max
  Coding DNA Sequence Number=SeqID_1851
aatgcattccatcgatggaccttgttgcagcagtcttttaattagtcgacttctgactgcctccccttcatctattcagcagtgtcggtcgccacaaaagactggtcatcagtccctcgacgtgtcatgcgtggaggtggatcatcctcatcagcatctgtggcaaagaaataatcttgtagtcatccaactatgcttcattaattgctgaatgatcatcatccagatgcagctgcatcataatatccgtgtggacgtcttgcattataagtttgaagaagccaactaagttgaagatggagaattagaatcatcatggaggatgtaataacagcatcagtcagtagtatcttcttttgctcccacctggggcggtaagtttgctcaacacagccaatatgagcatcagaatattcctggcttgtataatgaggagatgatgagcttcttcttctatgataatgttctgttaacatctaatcacctttctga

SEQ ID NO: 11631 - DNA, 375 bp, Glycine max
  Coding DNA Sequence Number=SeqID_1852
tagtttttcccctgcgccgcttgtgtcgatttggacgaagaacaaatccacggccgacgcggtcaccgtcaccctcatcgctgtcgcaaccagacgccttctcgatgtccaggaccacaccaagagaagcaccgcgacgcccgcaccctcctggcgcaaggagcctcctaggattgccgccatccctcgcgaacgactccgtgttcgtcaacgccggccgccactgcttccttcgatctgcaccgctccgacctccttcggcttccccgagccctccacgagcaccgccacttcgagaccgctgccgatgtccgtgtgttcgactacatcgacgatgacccttccttcttgtcagagcaaccagacgatggagcc

SEQ ID NO: 11632 - DNA, 503 bp, Glycine max
  Coding DNA Sequence Number=SeqID_1853
agagcgatggcaaggaactccgagaggaggagggtgaaatggtcactatgatgttggctcgactcactcagaccacgccggccggccggccggagccatccgcggcggtggttctgattgagccgtgccaatatcttagtgctctttcatgcatgcatgtgcccgttccttgtgcgccgccgtgcctagctagctcctccgccatggcgccagccggccagtacaccgtcctaacctgcgctacaggtttgccttgtgtgcatgcgagctatgtgttcatcctctggacgtgcaagctaggctggtgatttgccgccgatagagaggtcactccactgatctacatgcagggttaactcccaagaagggttggagtaaggcacagagaaatgtacaaaacttcmccgcttyttcatgcaccgccccagacaagttcagtttgaacatgcatgtagtgtgtgtgacatgcttgcacgtytacgtgctccaatgttttgtataca

SEQ ID NO: 11633 - DNA, 565 bp, Glycine max
  Coding DNA Sequence Number=SeqID_1854
ctgacccaatcctacctgatggtagtcaaatggagaacgaaatgccatgtgtaacagcacaggctctgattgatttcctaaacaaggaagaagtgaaaagagcattgcatgctagtagcggaataacctggttgaactgtaactcaaagattcatgacaaatattagaaagataatgcagagtctttggaagattacaaatacttgaagaataatggactcaggatattcctatggacaggtgataccgattttgcagttccttacgttcacactatacaaaccatgcttcaagttgatagtgacattgtagaagggtggagaacttggagtctgaatgacgagatcaaaggatataccttcagaactgcaaagatgacttttgccagtataaatggcactggccatatgactcctgtttggagaaaggaagaaacctacagcctcgtttcaaagtttatgaagaatgagttgatctaagctattatgtgttctgttatatatactctttaattcgtagatacttgttttgtttccattattactgatatgcacaagtctcttat

SEQ ID NO: 11634 - DNA, 597 bp, Glycine max
  misc_feature (295)..(295): n is a, c, g, or t
  misc_feature (351)..(351): n is a, c, g, or t
  misc_feature (392)..(392): n is a, c, g, or t
  misc_feature (396)..(396): n is a, c, g, or t
  misc_feature (408)..(408): n is a, c, g, or t
  Coding DNA Sequence Number=SeqID_1855
gttatctaccatcacgtggcgcagtcgttataccacagcgtgcacactcacttgctcattatagatctgtgctgagtactctacatatatacaactaacactcgacctatcggtcgtcacgctgtctctatgcggcagcgcagtcgaattatttgtattgccctcctattatctagactcataatctatgagctacatataatatgtccgatcgttagagtgcgtccacatacatgcacgacgagtatttatcgtggatacgtaggcacttggactggtatactcataacgctcnactcacatataagcctttgcttgtgctcacacgcactgatctgtgatctcacctanaatcgtatctcaacgccatttcgtagcgtatatgcgcggtngcgngcattcttgtgngtggggagaagatgatataagactctagacactcgcgatgctctcatgtgcgctctcctatacgctctcacttatgttgacttctgacgaatatctgttctatacacattcattactcgaagtacgcgactgctcaggcacacagagagcgtcagatgagatattatcgctacttggaacgcatctgtg

SEQ ID NO: 11635 - DNA, 554 bp, Glycine max
  Coding DNA Sequence Number=SeqID_1856
ggtggtcttgctggtagtacttcaactctctttgtctatcccctcgatatggcaagaacaagattgggagttgatattggtaagaatcccagtgaaagacaattcagaggcgtctttgactgtatcagcaagattcatagaaccgatggctttaagggcttatataaaggacttggtatgtccttgtttggtattttcatgtaccgcggcctttacttcggtacctatgacagtggaaagggtcacgtaatcaaccccgagacctcaactttcttgcagaagttcttgtttgcacaagcctgtgtgatcttctctgaaagtatctcttaccccactgacaccatcaagagaaagctgatgttacaagctgccagtaaagaagttttatataccggagctattgattgcatcaagaaggtaatgaagaatgacggtattaaaggatttttcagaggaaacttgagcaatgtcttcagaagtgtaggaagctcattgtgtcttgtattatacgatgagatgaaacgccacagcgataaatacgctgcttcacatta

SEQ ID NO: 11636 - DNA, 189 bp, Glycine max
  misc_feature (41)..(41): n is a, c, g, or t
  misc_feature (156)..(156): n is a, c, g, or t
  Coding DNA Sequence Number=SeqID_1857
taatatctttataaatttcaccaagaagtattctgcatcanaattccttctaatctctaaataaaatataatttgaatctttgagtgtcccaaccctttgtcaattccataacgagaaaggcacttcctgtagcatcgttattgtaacacgtcaanactctcttggatctcatattttgaagtgtaaag

SEQ ID NO: 11637 - DNA, 498 bp, Glycine max
  Coding DNA Sequence Number=SeqID_1858
cttctgtcaggcacaaagagtggatttctttcaaagagctaagccacataaggaccatcccacaatcctcagaatgcagaaacttgcaaaagagttaggtgtagtcataccagttagcttctttgaggaggcaaacaatgcacattataattcaatagccataattgattctgatggaactgatcttgggatttatagaaagtcccatattccagatggaccaggttacgaggaaaagttctattttaatccaggtgacactggatttaggtttttcagactaatttgcaaaaagtgagttgtattttgctggatcagtgttttcctgagcagccgagcaatggtgcttcaggtgctgagttctatttatctaccgctattggtctgaactcatgatgaagcttgactctctgacattggaacgagtatgcaggactgctggggcatttggcacacttgggctacataggatagaaagaattattgactgacatggaa

SEQ ID NO: 11638 - DNA, 401 bp, Glycine max
  misc_feature (250)..(250): n is a, c, g, or t
  misc_feature (332)..(332): n is a, c, g, or t
  Coding DNA Sequence Number=SeqID_1859
agtcttgatttgtcttgattccccaactgattagcattcttctgagctttcttcaatatcttccaactcttccggctcacatcggtctcgctgatcttgatacttgaccactggcccaacgctgaacatctgaccactggctcatccctgaactgaccgctggcccatcccttgaatatttgaccactggcccatccctgaaccgctgaactgatctgaatgagcctttgtgagccttccaagtcttcanagctaatcttctttcaattaactgtgtcttgagtcttgagaataagtcttgagagataaaataagtcttcaatgtctcctancacgttcattgatgtaattgattacttgtaggtgattcatgtaaatcttgataggattcttgagtcttg

SEQ ID NO: 11639 - DNA, 482 bp, Glycine max
  misc_feature (239)..(239): n is a, c, g, or t
  misc_feature (262)..(262): n is a, c, g, or t
  misc_feature (364)..(364): n is a, c, g, or t
  Coding DNA Sequence Number=SeqID_1860
gggctagatcatacattcgggatgaggtgtgaacaaagaaggcggtgtgaggaaatagaatcgcgggtgcgcgaggtaataaaaatacgagaggtgtgggatacaactaatacaatctctcatataacacaacatagtctgttattcctgttctagtgtgttgcgagatacacagaactcacaatataataaggtgcttgtgatttgttagtgtgatatagtcttctaacaaagcaatnggtgcgtgggcgggagaaagcanaacaagcgatcgggcgtggaggaggatagaatatagatatgaggaagggaggtgtggaatatataggtggtacctacctccgtgtgttcgacgaactatcantcgcactcgccaacatggtcgcgcgtgtgactaacatataatatcgtgcgacggtcgcgacgagcatcacaacacatctgagtactgcgagcgacgcgacttgtgtatgtatctgaga

SEQ ID NO: 11640 - DNA, 459 bp, Glycine max
  misc_feature (60)..(61): n is a, c, g, or t
  misc_feature (85)..(86): n is a, c, g, or t
  misc_feature (150)..(151): n is a, c, g, or t
  Coding DNA Sequence Number=SeqID_1861
tcatctcctatatccatacggctatagattggcgtttcttatgggactcgagtttggagnngttcaaccttgtcggagttgtganngcggcttttaagcttccagatggaatcctatatgtctcttatccccataagaattctcataacnncggatttatatatgcgcgcatggttgtcaaacaattttaatgctggcttggaaaccgtgcgcggttggaccataccggtttataccgttgacaagccgccacatcatgctttaacatatatttctggaacatccatgtcatgccctcacgtgagtggcttatccgcgattctcataggcgcgcaccctcagtggagccctgccgccattaggtctgccctcatgacaacagcatacacaagttacaaaaatggtgaaacgattcaagatgtttcaacaggacaacctgcgacaccgtttgattacgga

SEQ ID NO: 11641 - DNA, 321 bp, Glycine max
  misc_feature (124)..(124): n is a, c, g, or t
  Coding DNA Sequence Number=SeqID_1862
tgtgaaaactgcagattctttgaactgctgaatcataacattcctcataacatattacacactatcacacaattaacccaacaccactacagtaaatacatataacatagattcaataaattantaccaaccaaagatctagattctatccaaactataatcaaacatataaactaatatatcaccttccacttacatcacctgcctaaatcaaacatctgatagatccctaatctcattcataactacatgacaatcatcaacaattctgctctaaacctatataaattaccactacacctactatactacgtgactcag

SEQ ID NO: 11642 - DNA, 508 bp, Glycine max
  Coding DNA Sequence Number=SeqID_1863
gggacgcaaagagtatcctcaattttttgcagctcttatttgaaatcagcaacatggttgttgataaagatgatggaaagaagaagagcaaaaagtcaaagaaaagcaaacaccagaaacttgtcaaatcctctgctaattctgtagatcatacctcaaatcatagtcaaaaaagctctgaagccgactggaaacaaaaatacaacagtgtacttggaatcaacgccgaatttagcaatagctctgccactggagaatctgtctacgaccctaatcaagaagaagagggttctgaagaacaacatggagctgaagcaatccacagaaatgctcctggaagtgacctcaaaagacatccaaacaaatcttcagatgagcatcaaattgctggaagcagaggagactctcaaagcgctagtcgaatgtctgaagccaacaaaagtggtgcaaagcaaaaatacgatgaatatagtagtcatcaaagaagctctggccaaaaacatcaatc

SEQ ID NO: 11643 - DNA, 401 bp, Glycine max
  Coding DNA Sequence Number=SeqID_1864
ttctctcatctctggaaatcatggccaactttattgtgaccagcgaaatggaataccgtgttgtaagattcaacgtagctgctggtactttgagcaaccttgtcgtaaggatggtcgactgcgaacgcacaataagtcgttggctcaatgggaacgaagtcataacatactatcaccgtcatgatactccccgccatccccttggaccttacgagcaaatcaatcatacgacggaaggatggcgtgtagacacgcaagaggagcttcgtcaacgtattgctaccgatcttttcaatgattacgatcagggttggaactacaattgggaaccccttgctgcattcttgtctgcacatgtacatggcgcaggtggtggaggagcaaatttcaacctcgaagtt

SEQ ID NO: 11644 - DNA, 582 bp, Glycine max
  misc_feature (26)..(26): n is a, c, g, or t
  misc_feature (34)..(35): n is a, c, g, or t
  misc_feature (37)..(37): n is a, c, g, or t
  misc_feature (107)..(107): n is a, c, g, or t
  misc_feature (127)..(128): n is a, c, g, or t
  misc_feature (134)..(134): n is a, c, g, or t
  misc_feature (162)..(162): n is a, c, g, or t
  misc_feature (166)..(166): n is a, c, g, or t
  misc_feature (169)..(169): n is a, c, g, or t
  misc_feature (184)..(184): n is a, c, g, or t
  misc_feature (240)..(240): n is a, c, g, or t
  misc_feature (259)..(259): n is a, c, g, or t
  misc_feature (262)..(262): n is a, c, g, or t
  misc_feature (292)..(292): n is a, c, g, or t
  misc_feature (306)..(306): n is a, c, g, or t
  misc_feature (362)..(362): n is a, c, g, or t
  misc_feature (380)..(380): n is a, c, g, or t
  misc_feature (387)..(387): n is a, c, g, or t
  misc_feature (399)..(399): n is a, c, g, or t
  misc_feature (431)..(431): n is a, c, g, or t
  misc_feature (449)..(450): n is a, c, g, or t
  misc_feature (486)..(486): n is a, c, g, or t
  misc_feature (541)..(541): n is a, c, g, or t
  Coding DNA Sequence Number=SeqID_1865
tactgacgtcgtatcgtatcgtgtgnatcgctgnnantaactctgatagttttatatcacaagtgagtaatggacgactatcaacgtagtacgaaggagcacggatntttagcgcgtcaggagagcnncgtacncacggctagagagcgtggatactctatncgantcnacgagatcagatgtntacaccagcgcgacgtcatcgtcacgatcataagagagccatgtagtagagatctngactgcgcagcagcagcancantaccactgcgagtatgatgtagtgtcatcntggctaggcgacantccccgtatcatactatgtggatctgacgtacggcccgctcaactgtagggaatangttccagcgctcgtatgntcgcccnggatgagtacgnctagcagtattacgtatgtacatttcctaganttcgactagcgtgatcannactacgaccagcagactttgagacgtaatttgatgntgtccggagcgtcccatggcgacctctcccgttctggtgataatacgatttgtantataatggccaccactctgcatgtatgctgagtacatctgc

SEQ ID NO: 11645 - DNA, 387 bp, Glycine max
  Coding DNA Sequence Number=SeqID_1866
tatgccggcccgtgagaaggttctccgctcccattatagttatcggaaccgttcttaactgacggtggttacaaaccgaggaggcacatctgttcatctcctagatctggattggttcctgttgcggtggaccacgacgtgaaccctggctcgtcgactcaacggcaggccctcttctcttgaggacggtgcagaggctagctagaggtcgcaagtcagttcatcggggctagggttttgctccagcggttgtgagggttacggcgacaacgggtcctgctgaaggatggcggtttcttcagtactctagcccaatgaagctcggatctgctcttgacatgctgattttctagatgtgcgttgaatctagaccatgcgtgacgacga

SEQ ID NO: 11646 - DNA, 307 bp, Glycine max
  misc_feature (32)..(32): n is a, c, g, or t
  misc_feature (36)..(36): n is a, c, g, or t
  misc_feature (38)..(38): n is a, c, g, or t
  misc_feature (40)..(40): n is a, c, g, or t
  misc_feature (75)..(75): n is a, c, g, or t
  misc_feature (77)..(77): n is a, c, g, or t
  misc_feature (80)..(81): n is a, c, g, or t
  misc_feature (100)..(100): n is a, c, g, or t
  misc_feature (128)..(128): n is a, c, g, or t
  misc_feature (135)..(135): n is a, c, g, or t
  misc_feature (163)..(163): n is a, c, g, or t
  misc_feature (190)..(190): n is a, c, g, or t
  misc_feature (192)..(192): n is a, c, g, or t
  misc_feature (223)..(223): n is a, c, g, or t
  misc_feature (258)..(258): n is a, c, g, or t
  misc_feature (272)..(273): n is a, c, g, or t
  misc_feature (276)..(276): n is a, c, g, or t
  misc_feature (278)..(278): n is a, c, g, or t
  Coding DNA Sequence Number=SeqID_1867
tctacgctacgttaagtcatcacgcataatgntgtncnancatcacagatgcacgcgagagtgcagcacatatancnagnntgctacatgatactatgcntacgaaactagatcccgctgctcgatgncactgcntgtacgatctcatgcatgacaaacgacnagactcctcgtctatcgagattcgctncnacgcagagtgagttacgtcggtgacgtgtanctgctccgaccgatactcgtgtataccgtagcagnaataccagagaganntancnatcgacgtactcagcgctcatactcatgt

SEQ ID NO: 11647 - DNA, 547 bp, Glycine max
  Coding DNA Sequence Number=SeqID_1868
gacttaagcacaaccgattacttgaacttcctatgtgcttctggttataaccctgctttactcaagttttttggcgatttgaaattccctttcacttgtcccaagtcttacagaattgaagatttcaactatccttcaattacggtgcatcatcctgggtcaaagactattaacgttactcgtacagtaacaaatgttgggcctccaagcacgtatgttgtgaatactcactggccaaaggggattaaggttcttgtgcaaccaagttcgttgacttttaagaaaactggagaaaaaaagaaatttcaggttattcttcagccaattggtgtgcctagtcacaacattcctttatttggaaatttgtcttggacagatggcaagcacagagtaactagtcctatcgtagtgctggacacttagaaattaccctcagcactgtcatgttgccattgtcattttagtttgtttgtcttttgttgttttttaggctgtaatataagcgtgttttctgctcattttgcattgatgtactttgtcacataaa

SEQ ID NO: 11648 - DNA, 575 bp, Glycine max
  Coding DNA Sequence Number=SeqID_1869
aacgatgctttgtgaagacctggttaatacatcctgttggattgtttgcagggatccttcttatgttgagccttgtataggagtatgtgttttgggtttgtttttatagattacaaagcatatatgttgggtcctctacaacatcttttttatgacaaaaaaaaaaaaaaaaaaaaaaaaaccaaaaaaaaaaaaaaaaaaaaaaaaaaaaaaaaaaaaaaaaaaaaaaaaaaaaaaaaaaaaaaaaaaaacaaaaaaaaaaaaaaaaaaaaaaaaaaaaaaaaaaaaaacaaaccaaaaacaaaaaagggccccccccccccaaaaaccccccccccccaaaaaaaaaatccccccccaccccccagagccccccactattctctaaaaggggcaaataaaaaactgccaaaaaaccggaaaaaaaaatctcacttgcgaaaaggttataggccccaaatcacccaacaaaaacagccccgcaaaaaaaataaaaaaacccgccgcgccccatagggagccactccacaaataaattcggcccggcctccctgccgcctcttccaaagagagaa

SEQ ID NO: 11649 - DNA, 521 bp, Glycine max
  Coding DNA Sequence Number=SeqID_1870
aagcccaacaatctgatccttttgcggaaatccctgagagaccatttgaagtggattttgagcagatctgggaatatgaattcgaagaacttcaagagcttgttcatcaatatgaaaaatactcctcttctatccgaaataaatacaacgatatggtaggagagttcagaatgacaaaagaaaagctcatgcttgtcgaagaagaaagaaaacgtttattaatcgaaaatgagcaatataagactcaaaatgaaaatctcaaaacatatatcaaccaaaccacctctcaaactcaaaacactcaagaatctcccaaatcaaagtcagatagtcctaaacccaaacaacaaaacctccaaaaaatcccttctaataatgactttgatcaaattgctgatgatgaattagtttcttctttaaaatcaagagtcgccaaactccttgatgaattaaccagcgccgaagaacctatctgcgttaacgtcattggtctgatggctaatttccaacaaagcaaccaa

SEQ ID NO: 11650 - DNA, 509 bp, Glycine max
  Coding DNA Sequence Number=SeqID_1871
ccaccactcgtcaacttcaatgaagagccaactccaaaccctaaccgccgtatgtcgtaccagatccgccgtatcgcaagtccgagacaaagcgaactcctccactttctaggcggagataagaagattctgaaccggagagaagctagcctcgagaaccgccatcccaagaaacaagaacctccgacaccatacccttcctatcaaccggagacgagctaccagccccaatgactgacgatgtgatttccgacggctcctcgtcgtcctcaaacaaggagcacacgccgtactttcgaagagccaccagagcgacagagctctctaaggggtcgacgcgccaagaccctcccgattcgccgtggagaagagagaagaaccacaaagagcaccagatctggatgtattccgtctagttgagcagtatccgagagggggaggacgcctcgagcatcagcggagccgccgtacgtcgatttgcctccaccctactgtgaagcgggcgatat

SEQ ID NO: 11651 - DNA, 530 bp, Glycine max
  misc_feature (43)..(43): n is a, c, g, or t
  misc_feature (150)..(150): n is a, c, g, or t
  misc_feature (195)..(195): n is a, c, g, or t
  misc_feature (205)..(205): n is a, c, g, or t
  misc_feature (461)..(461): n is a, c, g, or t
  Coding DNA Sequence Number=SeqID_1872
gagtgcaccctcacggtcggtatatcctcagcggtgatgatgncgtgatattcgtccccctcccactctcagggagtatcaatatgtgatggaagcgcgcgagcacagccccaccacgtcgcattacacctctatagcgtatagcgagcncaccactttgcacgaacgaccgcagaacgaaagtagagatcgtancaacaacganagcgtaaatagatatagagacacacgctccctgcgactctctataatgcatcatacacataaagaagccttgtattcactctattccttctctatcgtactcgcgcgcgccccaccgtgtgtacgagagatataaacagcccccatctcacgatgatgcggctgtgtgagtattcattcacacgcgcgctagaccacatgcatacatcatattacaccgagacgggggacatctccgcataccgccatctccaccncatatttcacaccatacagggcatgtactgactgcctctccttatcgcacaccatcactcaattataat

SEQ ID NO: 11652 - DNA, 493 bp, Glycine max
  Coding DNA Sequence Number=SeqID_1873
gagcctcgattaccaccttaattatattcatgaccgataccctgttaggctgcaccaaaatttgctctatcggtaacaattttcacacacttatggcgaacccagagagcattaaagtgtataacctgctgggaaagccgtaatgaggtgtaactaatctcacatcaaatatgacgattgccgcaaacatgaacagggttaaacacccggggaaaccctattggagcgcagctaccctcacattaatttggccttacggcccaactgaccaggctttccagtcggataaaacctccaggggcccactttgtctttattaacatctgcaaacccggccacgaggaagaggcgtgcctttgcatattctgtgcccccaagaggaggagttttcattttattcaccatctaagacacggtttaaacaccctgaattgtccccttataacccagttttggacccgtgggtataatctggccaggcaatgctgagccc

SEQ ID NO: 11653 - DNA, 559 bp, Glycine max
  misc_feature (189)..(189): n is a, c, g, or t
  misc_feature (194)..(194): n is a, c, g, or t
  misc_feature (287)..(287): n is a, c, g, or t
  misc_feature (297)..(297): n is a, c, g, or t
  misc_feature (308)..(308): n is a, c, g, or t
  misc_feature (317)..(317): n is a, c, g, or t
  misc_feature (319)..(319): n is a, c, g, or t
  misc_feature (343)..(343): n is a, c, g, or t
  misc_feature (359)..(359): n is a, c, g, or t
  misc_feature (392)..(392): n is a, c, g, or t
  misc_feature (438)..(438): n is a, c, g, or t
  misc_feature (451)..(451): n is a, c, g, or t
  misc_feature (475)..(475): n is a, c, g, or t
  misc_feature (489)..(489): n is a, c, g, or t
  Coding DNA Sequence Number=SeqID_1874
tcacattcgtactcgcagcacaatatctgcacatatcttccctacgctctactgtcatcctctgataccgcacgaacgcgtcgactacatctcgacagacgccgtcatacacacacgacatgtatctagcgtttcacatcctactctacacacgcacaacgagattctacactgctcatcacaagaccncggcnggtacgtgaacaatactgtagccatcttatgagctctgctctgaaagtatcgagatggacagcactctcttctgtatctctccatacagtgcngtagcgtctnactgtacttanatgagaaancnactaaatataggtgaaacagtganctgaatagatgatatnatcatttgtatacgacatacgatcacgacacantccgcactcgctcacacatagtgctactgcgtagtctagcaagatncgaaaccatcccnacgtagcagactatgtagtctcantcgcatcaacggtnatcggttctgatttcattgacagctcggcgaagaggtctttatcgcgcgattacatcctctatcttaaca

SEQ ID NO: 11654 - DNA, 319 bp, Glycine max
  misc_feature (46)..(46): n is a, c, g, or t
  Coding DNA Sequence Number=SeqID_1875
catgtatcgtggcacttagtcgttgttagtgcgggtggatgctggnccctcgtttggtagacaaatttggtaccccgtcattccttcattgagttccacgtggttcccgcaatgcgactgctatttggtggcgttttttcaaaaacccgtgatgtcatatcgccatggcgccgccataaccgctttttaacaacactgattacctttgaatttacttttctgcttctttaaataaaatatagtaatactttaaaagattaataattgagcacaaagcataatgcaaaaactaaataaaccaacctgcttgaatacattg

SEQ ID NO: 11655 - DNA, 592 bp, Glycine max
  misc_feature (38)..(38): n is a, c, g, or t
  misc_feature (97)..(97): n is a, c, g, or t
  misc_feature (105)..(105): n is a, c, g, or t
  misc_feature (110)..(110): n is a, c, g, or t
  misc_feature (144)..(144): n is a, c, g, or t
  misc_feature (146)..(146): n is a, c, g, or t
  misc_feature (262)..(262): n is a, c, g, or t
  misc_feature (296)..(296): n is a, c, g, or t
  misc_feature (367)..(367): n is a, c, g, or t
  misc_feature (416)..(416): n is a, c, g, or t
  misc_feature (440)..(440): n is a, c, g, or t
  misc_feature (524)..(524): n is a, c, g, or t
  misc_feature (526)..(526): n is a, c, g, or t
  Coding DNA Sequence Number=SeqID_1876
gcgacagcactgtgcgcatgtgtgtgatcatgtcggtngtgacaggtcaccgacgatgcgcggcgatggacgagtggatgcgacccgtggtaggagntagattanatggngcggcacgcatctgagcgggcgtgcacgttattngngacactcacatgattcgcgacatgctctctcctacacctagtgtagcacatgacactgccgctatccacaggctcttatccgccgtgcatcgctgacgcggacacgccgcacgcgngcacgcggactgccgctgctctgcacccatatantcagtacgccatagtcatatatgccacactacgcacactcacgtgtccgcgctcgcacgacactctcctcnctcatgctcccacttgtactatatctattgagagtgacatgctataccncgatgtactcactcacacatcgancatctacatacgtagatcatcacctaactactacacatcacgtgatcgccagtacgtgactcatctctctacctctctcgtgcntnatcacatagggactctacgctactagtagccagtcctcgccatgcgcgtgctatagctcactcgca

SEQ ID NO: 11656 - DNA, 333 bp, Glycine max
  Coding DNA Sequence Number=SeqID_1877
gatcatttgcgaaaagaaccgtatggagatctgcgaatacctatgccaatagggagtttgctttgcgaagaaggactttaatctggctaagcacccagagattgatgtgccgaatctgcaggcgataaatctgatgcagagcttataattcagagagtctgtgagggagacatttgcgtggatgctctattgctggttgctcagcgacgatggagtcgtgtttctcatgacatacctcaaccttacttccgaaattgtccttgctactctcaagatgcaggccatgccctggggaataccattcggtggtctacccggtgatcgcaccacggg

SEQ ID NO: 11657 - DNA, 474 bp, Glycine max
  Coding DNA Sequence Number=SeqID_1878
atataaatcccattcctgaagcaagagctgacttaaatcaagcttcttgtactaatgagatcaatcttcccattgagttgattaaaaatgaaactgtgagttcagatgtagaacatataccttttaatgcttatattttgttgagagttccttctattacaacctcaaattcattggaaagtctctatatacttactagcactggactgaaagaatggctaaaccctacctattttgattttttcgatccttgcaatcaacaatttttaagaatgacagttgccggaggaacatattcagtgactttacctccaaatcagcaactcatttatcctaataccttttgtgtagcaataagtgatgacagaaaaattccctatgatttagttctttatgaattaagtgcttctacatctaaaacctggatagcttcatctcgcttctcaggagtattgagtcctaactttgtagcaa

SEQ ID NO: 11658 - DNA, 180 bp, Glycine max
  Coding DNA Sequence Number=SeqID_1879
taattttcccctgtgcttttcgaattctcttgttaccatgtatgcaaagagaggcaatatagatagtgcacatgaagttttcaagaggtagaaggagagggacttggtttcttggacctcaatgatcactgaatatgcacaacatggccgggccaagaaagcattagtggtattcgaggg

SEQ ID NO: 11659 - DNA, 517 bp, Glycine max
  misc_feature (172)..(172): n is a, c, g, or t
  misc_feature (186)..(186): n is a, c, g, or t
  misc_feature (384)..(384): n is a, c, g, or t
  misc_feature (415)..(416): n is a, c, g, or t
  misc_feature (486)..(486): n is a, c, g, or t
  misc_feature (488)..(489): n is a, c, g, or t
  misc_feature (492)..(492): n is a, c, g, or t
  Coding DNA Sequence Number=SeqID_1880
tgccccgtccgtgtaagacggtgtaggaaaagataatctatataagtagatgatgatggcagacaatatatgaagaataaaaacacacaacaaccataacagcgacgcgtccatcagtcgcggcaccgactacatacgcatcaaggtccatcaccacgcacgacaccaatcnacccccagcatctntcctcggccacaccccacgccacgagctcaacaaactccatcaactccttttatttgaatccacactgtgtcaatttctcgtctgtctttcatcattgtgtgacgatccactcctccctcgtctgtttcttctcaccatacaccacgcaccgatccccgcagtagaaactcatacgacgcccgtgctcgtatgtgggngcgcaccgcgcctcacacctcacacaggtcnnctcgctcaccctaccgcaattactatagaagaagccggccgggtgacgcgagcacaccgcccgaacccananntcntattgtttagcctcatacgatgtaa

SEQ ID NO: 11660 - DNA, 214 bp, Glycine max
  Coding DNA Sequence Number=SeqID_1881
aaagaaacttagacgcgccaaagagcaggcaactggcctggaagagagcggcaaagaacacaacacactgaaccggaagcaaaagggggcactggcgaaacagcgggggctccgagcgagacaaggggaggtgtgggcgcagaacagaagggcaaggacgaagctggaagcaaaggagggcgactgcgagctattgaaaaggagatgcgagaac

SEQ ID NO: 11661 - DNA, 576 bp, Glycine max
  misc_feature (90)..(90): n is a, c, g, or t
  misc_feature (116)..(116): n is a, c, g, or t
  misc_feature (133)..(133): n is a, c, g, or t
  misc_feature (149)..(149): n is a, c, g, or t
  misc_feature (181)..(181): n is a, c, g, or t
  misc_feature (275)..(275): n is a, c, g, or t
  misc_feature (382)..(382): n is a, c, g, or t
  misc_feature (466)..(466): n is a, c, g, or t
  misc_feature (544)..(545): n is a, c, g, or t
  Coding DNA Sequence Number=SeqID_1882
ctcgtcaggcgagctgtatggtgctgtgctcttcgtctctagcacgctgtacgccgtgtatttgatcgttgtatactagcgcatcagagnagagtgagtcagcctctattatacanatatagcacgatgagtntataattatacgacgngctcgtgacgtacagcggtaactcatggcggnagcgaccgccgcggaacggtcgctctcgtgatcgtcgtagagttctcgtggtatagtgtctcatatctcgtacagatctgtgtacatttcttcnacattgaataagagacccgtgctgtatatgactagtagacgactaaatagagcatgcatatatatagccgagacaagcgatcatagttgcggatgccgcgaggtggnaggctgctgcgttgaggatgctgttgtatgacagacgacataaggagaagcactctatagacaccgtactaatcatacagatgncgtggcgtgtccacggcgcacctatcgcgcactacactctcatcgttgtgctctcctctctctctctctctcttcttnnacgagattaaggagagccacccatgacacac

SEQ ID NO: 11662 - DNA, 459 bp, Glycine max
  Coding DNA Sequence Number=SeqID_1883
aaaagtttctactgactgctctctcgtttctataaaccctttgcgatcgacgaagcaagatcaaagaagaagatgttcaggaatcagtacgacacagatgtgacgacatggagcccaacaggtcgtctcttccaagtagaatacgccatggaagcagtgaagcaaggctccgccgcaattggactgagatctagctcccatgtcgtcctcgcatgcgtcaacaaagcccaatctgagctctcttctcaccagaagaagatcttcaaagtggatgaccacataggcgtcgcaatcgctggactcacagccgatggacgtgttctctcccgttatatgagatcggaatcaatcaatcactccttcacctatgagtctccacttcccgttggtcgtctcgtcgttcatctcgctgataaggcccaggtctgtacccaacgatcatggaaacggccctatggc

SEQ ID NO: 11663 - DNA, 515 bp, Glycine max
  misc_feature (57)..(57): n is a, c, g, or t
  misc_feature (218)..(218): n is a, c, g, or t
  misc_feature (469)..(469): n is a, c, g, or t
  Coding DNA Sequence Number=SeqID_1884
gcgcgccgccgatgtgataatcacgtcgcggcgcgactagtgataacacgcagatancatcatcaaccgcgccggaaattatatacaatataataatatggcggcgttgataggccgaatatattatatagagaatgtataggcggatgtgtgaggacgcgcgcacgcgcgagtcttctcgtcgattatcagatctatcacgagcaggggcgatatanaatattggtgcgacgtatgacttcgatggcgtgcgaatcggtgcgtggtggtgtgtaagtagaaggttatgtgatcgtgtggatgtagccagctcgctcgcatacacacatgtatattattcacacactaatcactttgctgcgctcttcaccagcatacaatatataatcatcgttctgcgtatcatacgacagccaccgacacgctgtctcgcaccaacgcacagcgacaagagagagcgaacataggnaaaaacgcggcgcggacacaaattcgacgcggtcgctatatactgt

SEQ ID NO: 11664 - DNA, 238 bp, Glycine max
  Coding DNA Sequence Number=SeqID_1885
ttcctcccttggatctaccaaaggcggaaggggcgagcccaaagcctccatatccgtttcaagatcgcagaaagctggtctccaattccccgttggaagaatcgctcgattccttaaggctgggaaataccctgtacgtgttggtgctggtgctcctgtgtacctctctgcagtgctcgactatttttctgctcacgttttgtacttcgctcggaatgctcctatggatatcaaaagg

SEQ ID NO: 11665 - DNA, 261 bp, Glycine max
  misc_feature (120)..(120): n is a, c, g, or t
  misc_feature (165)..(165): n is a, c, g, or t
  Coding DNA Sequence Number=SeqID_1886
gggcggacaaacagtccaaattatgcaacatatttgtttttccaaggccaactcaaatcctgaccagaaaactgcccaatgagagaaaaaaaatgaaaatggccacttgacctttgtccnaatctctcaaagactgttcttgctatatttgtgtgtgtgattttncctgtttcttcttgtgagatctctcttggttctattttcttctaaaataacatagaaaacctcgtcgctgggtttatgggttattgttttgtgtgt

SEQ ID NO: 11666 - DNA, 368 bp, Glycine max
  Coding DNA Sequence Number=SeqID_1887
attgaaactgctttcggtggccggtgagcaattggccaccggtcgccacccccttcttttgtttttttgttatcttgtattatattataactacttttctcgatctatagatcgatagtatcatcgcaaggagattttccttttccgttagcggattatcttattcgcgttggcgatttttgttgtgtagatcttcatccccgtccccgtgcaagctttaatctctaaatcccggaacttctatttgatcttttgtagctaccgagtgctagatttcctccaagcagagagtaattatttcttcctttagttatagagtaggaagtttctctgacttggttgagaatcgaagatgttggatgtttcca

SEQ ID NO: 11667 - DNA, 164 bp, Glycine max
  Coding DNA Sequence Number=SeqID_1888
aaatctcaagaagcatcataaatggcaacaaacttttgcagatactacttatcttttcctcagtcccctgttacacagggatatgattcaattccagctggcatccctgatccattagccaagaagcctgttgaatgggatgatagagatggtgcactaaggaa

SEQ ID NO: 11668 - DNA, 556 bp, Glycine max
  misc_feature (39)..(39): n is a, c, g, or t
  misc_feature (91)..(91): n is a, c, g, or t
  misc_feature (176)..(176): n is a, c, g, or t
  misc_feature (187)..(187): n is a, c, g, or t
  misc_feature (213)..(213): n is a, c, g, or t
  misc_feature (412)..(412): n is a, c, g, or t
  misc_feature (470)..(470): n is a, c, g, or t
  misc_feature (515)..(515): n is a, c, g, or t
  Coding DNA Sequence Number=SeqID_1889
tcatacgacctgtccgatgcctggagcttgctctccttntcaactactactatgatttctgcatcttgtgatatcagctgaatctcgaccnacgtcagcaatataccatactctactctcaatcacacagctcactcatcctcaataacctcctctctatagacatggctaccagnacactaccacnccaccacccgcactaccaccaatccncgatctctaccatgactcatactctctgctgattactcttctctatatctctcctctatatatctgccatctctcgcatctactctagatactaagcatcgttcgtgactagtgaccacgagctgctacagctgtgcacatcctaccgttcatcgtatatgcgcagcgtgtcctccactcgcactcatcgcttatactntctctacttctcgctgtcaccttttgtacgtccctgatgctctatgtaagtcatctanctcgctccgtaggtgaaagtagacctatctgttcccgccgtccantctctctctcgtatatatgtcatcatactgctatctctacc

SEQ ID NO: 11669 - DNA, 488 bp, Glycine max
  misc_feature (119)..(119): n is a, c, g, or t
  misc_feature (123)..(123): n is a, c, g, or t
  Coding DNA Sequence Number=SeqID_1890
agcacgagcggcatcgcgcacgagcaacggtcacgcagccgacgagaccgcgacacgcagagcgcatgaagctcggccggaagacggcgcgcggggcaggaccccgcgccacatagcanagancgccggcgcacgcaagggagagcacaagtgcggacagggtagcggcgcgcgaccaaagaagacccacagcacagccacgcggcgccaggaccacgcaaacagaggcgcgaagcgcgcccgccaggcgcgcatacgctcggccgaccacacagcccagtcaagcacgacacaccaccgagacgcacgcgaccgagcgcgacccgccggacgacacacactcggacctacccgactccggaccgataggcagaagggcgcgcgcccacgacgcgcgagcacggaatgacaagagagcgccggagcacacacgcccgacgcgcgctagcacgcgaagggcagaaagatcatcagacgagcggcgctca

SEQ ID NO: 11670 - DNA, 442 bp, Glycine max
  Coding DNA Sequence Number=SeqID_1891
ctctcggcgattctattcggtgatgatggcgttggctggaatcacgacttcgaatccaacgtttcttcagctcagggtctctaacacaagcttacgtcatgtggctccacgtaactcgatttcatttcctcgttcgtcatacgtgaatctcaatcggagaaaccgtctctgtgttcgatcctcctcctcctccgctccagtggcatctgcagtggagggattgaagccggcgatatccttgacggagagtgcgcttaagcatctgaataagatgagatcagagcgtggggaagatttgtgtttgagaattggtgtgaagcagggaggatgctcggggatgtcttacacgatggactttgagaacagagctaacgcaaggcctgatgattccaccattgaatatgaaggcttcgctatagtttgtgatccgaagagcatgctc

SEQ ID NO: 11671 - DNA, 540 bp, Glycine max
  misc_feature (97)..(97): n is a, c, g, or t
  misc_feature (101)..(101): n is a, c, g, or t
  misc_feature (162)..(162): n is a, c, g, or t
  misc_feature (175)..(175): n is a, c, g, or t
  misc_feature (279)..(279): n is a, c, g, or t
  misc_feature (301)..(301): n is a, c, g, or t
  misc_feature (460)..(460): n is a, c, g, or t
  misc_feature (476)..(476): n is a, c, g, or t
  misc_feature (480)..(480): n is a, c, g, or t
  misc_feature (486)..(486): n is a, c, g, or t
  Coding DNA Sequence Number=SeqID_1892
gaatatatctgtcgtctgtcacctacacaaagacagcgattcgacgccacgtcgtctcatgcctgtagatcattggtggctcacggatacgcgactntgtnacgtcgagtcagtgacaatagttcactgtggttagacgaggacggacgaatgagagtgttnactcgcgataagnccacaaggaccacactaacagagatgtatgatgtctcctggactttctcgcgccctatgtcccactcctactggagactatgtctacaaccagcggaggcactngcacccgatctagactaactgnactgcatgaacatgggtaagagtacgaaataacgtctgctcgtgtgcaccagaccagacgtggtagatgatatgagacattgccataatatcagcattagctggcgacattgctactacaacgcctacttacagagtctcgtcatgtgtaccagttcgnccgtgacttgtattgncacnctatcntgcagcgactcatgatcactctactcgtcgtgtgtctctcggatggcgatcatc

SEQ ID NO: 11672 - DNA, 520 bp, Glycine max
  misc_feature (66)..(66): n is a, c, g, or t
  Coding DNA Sequence Number=SeqID_1893
tgattgtgccgccagatctgagccagctcactgttcacgttaggtacacgtgtaaagcgatggctnctggggcagagtcttccatcgagcgcgagagagagagacgctgtttgtacaggagtcgtgacgtttgtgcgctatagagccgaacggtaatatcgagagcgtgatcgactgactcgggaggaatgatcaagctactgatcagctgagctgtccgtctcatcgtgacgctttatcggcgtttcagttccctgcgcgagcccctgtccgaaggtccgcgacacgacgctgcttgaagacgggacccgctcagaagcggcgggcctggagcaggaacggagggcggcggcctgggtgtcgggttccgcatgggcgggaagcgcgacaggcacagccccttggtgctggggttgtggaggtcgagggcctcccgatagcttagagaacgctaggcctgttaggtttctttctttcgctttcgataggattttagttaagttctcgtgcgaatcctcag

SEQ ID NO: 11673 - DNA, 504 bp, Glycine max
  misc_feature (30)..(30): n is a, c, g, or t
  misc_feature (45)..(46): n is a, c, g, or t
  misc_feature (52)..(52): n is a, c, g, or t
  misc_feature (55)..(55): n is a, c, g, or t
  misc_feature (68)..(68): n is a, c, g, or t
  misc_feature (73)..(73): n is a, c, g, or t
  misc_feature (122)..(122): n is a, c, g, or t
  misc_feature (143)..(143): n is a, c, g, or t
  misc_feature (148)..(148): n is a, c, g, or t
  misc_feature (151)..(151): n is a, c, g, or t
  misc_feature (154)..(154): n is a, c, g, or t
  misc_feature (156)..(156): n is a, c, g, or t
  misc_feature (166)..(166): n is a, c, g, or t
  misc_feature (177)..(177): n is a, c, g, or t
  misc_feature (185)..(185): n is a, c, g, or t
  misc_feature (201)..(201): n is a, c, g, or t
  misc_feature (242)..(242): n is a, c, g, or t
  misc_feature (252)..(252): n is a, c, g, or t
  misc_feature (256)..(257): n is a, c, g, or t
  misc_feature (259)..(259): n is a, c, g, or t
  misc_feature (266)..(266): n is a, c, g, or t
  misc_feature (295)..(295): n is a, c, g, or t
  misc_feature (298)..(298): n is a, c, g, or t
  misc_feature (305)..(305): n is a, c, g, or t
  misc_feature (322)..(323): n is a, c, g, or t
  misc_feature (329)..(329): n is a, c, g, or t
  misc_feature (333)..(334): n is a, c, g, or t
  misc_feature (344)..(344): n is a, c, g, or t
  misc_feature (362)..(362): n is a, c, g, or t
  misc_feature (392)..(392): n is a, c, g, or t
  misc_feature (403)..(403): n is a, c, g, or t
  misc_feature (418)..(418): n is a, c, g, or t
  misc_feature (420)..(420): n is a, c, g, or t
  misc_feature (426)..(426): n is a, c, g, or t
  misc_feature (435)..(435): n is a, c, g, or t
  misc_feature (437)..(437): n is a, c, g, or t
  misc_feature (447)..(447): n is a, c, g, or t
  misc_feature (470)..(470): n is a, c, g, or t
  Coding DNA Sequence Number=SeqID_1894
tatgtgaacgctaagtgatctcgacgcgcngccgacacagcatgnntgcacnaantgtcgacgcgtantacantgtcgacgccagcatctacgttctacttgcacagtgtacgcatgctgtngtcgagatgatgtgatatatngcacncgnatngncatcggcagnatgcactactncatgatgnaagtagtgcgtagcgncatcagtccatcgtatatgacgatgagacacgttactgcgnctgcgtgccncacnncnaccaacncgacgaacgtatgtgacgttgcatgctcncgntagcccncagacgcccacggtctnncacacncacnngcgacagganagttaagatctggcagtncagtgtagtgcgtgtgtggtgagtgtgtgntcgtgtgcaangcgtgcgactgtgtngncaaagntgataagtngncgtgcactantacactagagtgatctgatgatnatctctgatgagtattaagtagtgttcttcacga

SEQ ID NO: 11674 - DNA, 99 bp, Glycine max
  Coding DNA Sequence Number=SeqID_1895
actatccaaatgtacgcgggccgaatgtatacgcgctcaaattggttacatctggtactaactagagcttggatgcgtgataatgagcaggttgtgttt

SEQ ID NO: 11675 - DNA, 561 bp, Glycine max
  misc_feature (64)..(64): n is a, c, g, or t
  Coding DNA Sequence Number=SeqID_1896
tgcgatagcacagaagcccacacggagcgaattatatctagtgtggcgcgggcggctgctcacncaggaggcggttagcacatactcgctcggctcgcgcgcggccactgaccggactcgtcggcttaatacacaagatacacgaggggcgcacgaggtattcttcgtccgcatctctaacgacttgcgcgtgctaggaacacgtcctccactcaataatgagctaggcgccgctggcgagtcgtggactaggaaacacagcgaagaattattaggccatgcagcgaaagaactatatgattgtaggctgcgggctgggtgatcgtctaaagaggaggaagggcgacagttggatgagtacaggatagatgatagttgtgaggcaggcagttggccgagactatgtatatatctctatatggtggagtcgggcggcctctagtattgtgaagatgaataatatattgaacgcctcatcctgcgcggtttggggggggggcggtattatgcctgttttcgtacgtgggggcgcgccctcgtcccctttgttagagaatgctg

SEQ ID NO: 11676 - DNA, 236 bp, Glycine max
  Coding DNA Sequence Number=SeqID_1897
ttcggcaccagcttaagcttgctactgagtttccacactgcataccttaggtcttccgaattcgaagttaatttgcaagatggctaaggaaaaggctcagatcaacattctcgtgccgaattcggcaccagatcgagaggacgatcaggatgcctggtgtttcttccatgcttcttttgtttctatttgtaatattaatatctcaagtcagtgccttaagcgtatcctgtgattac

SEQ ID NO: 11677 - DNA, 599 bp, Glycine max
  Coding DNA Sequence Number=SeqID_1898
ttgttgaaagtgagccccttctatccagaggccttcagaaccataaaattgctttctataaaatatttgtgcaaccatatcttaaaaagctcgcacctgaagaaacccaaaatcttggttccgaagccagacctgaacagttagatctacagcctactgataaattacaaatagatttttctacaaactacggtgaggtggaaaaagactacaataaatatttatcatacaatatcttccatttcccaattggtgaagctggatatagatcattattagaagtacaaagagttcaatataagagaagacatttcaagaagatcattgctcacatcgcaagattcgactcagatatatccgttaaaaatttggaactcatagctactatctgtcacgaacaaaagatcgctttgagtcttatcgaaatcgctgaattattcatgaagaatggagttattaatagacttgagcaattcactgctgttattgaaaagctcagattctttagagatctcgctgatagtagtgaatatcttgctagatcattcgccagatataccaaggttccattcacaattgctctattgaaccctcacttg

SEQ ID NO: 11678 - DNA, 345 bp, Glycine max
  misc_feature (152)..(153): n is a, c, g, or t
  misc_feature (190)..(191): n is a, c, g, or t
  misc_feature (305)..(306): n is a, c, g, or t
  Coding DNA Sequence Number=SeqID_1899
agcgcagagagctctacaactgtaaaagcaccgaccttcttaaacgggagaaaaaagacacgaaaccaatcctatcatagagaatactaacttaacattttttttatgagagacaaaacgcggaaactatggttccattacttatcttgcgnncatcgcgaagcgctctcggacactgctgctcaggctnnctagacgggaggcaatatttaaaggaggatactttactttagttatttactttatttcatggcttaagtatgtacttccggatttgctataaactattaaatataattgaagcnncatttataaaaggaggagccttcgtctcattacttggtt

SEQ ID NO: 11679 - DNA, 497 bp, Glycine max
  misc_feature (86)..(86): n is a, c, g, or t
  misc_feature (362)..(362): n is a, c, g, or t
  Coding DNA Sequence Number=SeqID_1900
aagaggcgcgtatactctgcgaataattgtatatgcgtgatatcgtaaataagcgatccgagctcgacgcgagttcggtgtaggtncgcctgtcgtctcaagatgcggtacctcctaccgtcagcgacccggcaccacaaaaagaatgtccggctgcggcgcgaaaataacaagacgggagcgcaaaaaaggaggaggcaaaagtgtacaagggagaaacgagtaatcacggcgatagggcccacaaaaattttctcctaatgtattagctctcactctctagcttgcgagccactgtagatgtcggtcgtgctatgtgtcactgcgtttttcaggcatagtggataagagtgaagagacgnggaggttgatcgccctgtgtattgttcgggttggttgctcataagatagaagatgagaagtttactctgcgcaattcaccgtgtcaggactcgcggcgcatattcacaacttaggttgtcaagagcctggctccc

SEQ ID NO: 11680 - DNA, 448 bp, Glycine max
  misc_feature (51)..(51): n is a, c, g, or t
  misc_feature (66)..(66): n is a, c, g, or t
  misc_feature (84)..(84): n is a, c, g, or t
  misc_feature (91)..(91): n is a, c, g, or t
  misc_feature (128)..(128): n is a, c, g, or t
  misc_feature (133)..(134): n is a, c, g, or t
  misc_feature (138)..(139): n is a, c, g, or t
  misc_feature (141)..(141): n is a, c, g, or t
  misc_feature (148)..(148): n is a, c, g, or t
  misc_feature (163)..(164): n is a, c, g, or t
  misc_feature (171)..(171): n is a, c, g, or t
  misc_feature (178)..(178): n is a, c, g, or t
  misc_feature (187)..(187): n is a, c, g, or t
  misc_feature (204)..(204): n is a, c, g, or t
  misc_feature (206)..(206): n is a, c, g, or t
  misc_feature (211)..(211): n is a, c, g, or t
  misc_feature (213)..(213): n is a, c, g, or t
  misc_feature (227)..(227): n is a, c, g, or t
  misc_feature (236)..(237): n is a, c, g, or t
  misc_feature (239)..(239): n is a, c, g, or t
  misc_feature (252)..(252): n is a, c, g, or t
  misc_feature (279)..(280): n is a, c, g, or t
  misc_feature (294)..(295): n is a, c, g, or t
  misc_feature (315)..(317): n is a, c, g, or t
  misc_feature (323)..(323): n is a, c, g, or t
  misc_feature (330)..(330): n is a, c, g, or t
  misc_feature (337)..(337): n is a, c, g, or t
  misc_feature (351)..(351): n is a, c, g, or t
  misc_feature (353)..(353): n is a, c, g, or t
  misc_feature (355)..(356): n is a, c, g, or t
  misc_feature (362)..(363): n is a, c, g, or t
  misc_feature (365)..(365): n is a, c, g, or t
  misc_feature (401)..(401): n is a, c, g, or t
  misc_feature (417)..(417): n is a, c, g, or t
  Coding DNA Sequence Number=SeqID_1901
gagcatcctagccatttgggccacacaagttatcgttaatgggtgccgttnaaggattccgtattnttggtggccccctcggtnaggtcangtgacccaatatacccaggtggcagcttcgacccatngggcnntgannangacccanaggctttttctgagnntaaggtnaaggatngtcaatgancgagccgacctggccangngcatnangtctggcttcttgncccaggccnntntcgttggaaaggntccattggagatacctcaccgatcacnnggttgacccttgtnnacaggatagcctgggcctannncaccangtttgtnccagganagtgagggtcaaanancnnaaaganntngagagtttttatatttgtggctggtgaacctacttnagataatgaaataatnttgagtatcggaatccaagcaaatgtcagat

SEQ ID NO: 11681 - DNA, 534 bp, Glycine max
  misc_feature (259)..(259): n is a, c, g, or t
  misc_feature (441)..(441): n is a, c, g, or t
  Coding DNA Sequence Number=SeqID_1902
ttagtttgctgatgcccgtatttcagggtggtgcttcttaatttattatagagaagttgttcttctcactacccaaacacttatatccacataataaaacaggcgtgtgtgaatgtgtgttggcgacaagagatagccgagtgcaaaaaccacaaagatctattaatgagcgccattttggtaggattgcacatatagtgcggaaaagatgacagtggaaaaggaaacaatattgtattacgatattaagaaattgganttcatttcgacaatgcttatcaaaatagcggccggactctgcaaatacctaaaataagaaagagatgactggccgggattgtgcggaagatttttattttatcaacaattataatgtggtaatatccccgccagattaaaacaacagagatagatatattgagattccacagccacgccccngggggtggtcccgattttgtattcttagaggctggttaggtactttttatcgaaggattaatcattttttttctccagctttttataattggg

SEQ ID NO: 11682 - DNA, 69 bp, Glycine max
  Coding DNA Sequence Number=SeqID_1903
tttctctttcttgcattcgtttgtgattcaattcacctcagatagcacgttcacgcctcaggagaaaaa

SEQ ID NO: 11683 - DNA, 521 bp, Glycine max
  Coding DNA Sequence Number=SeqID_1904
aggcttcgtcttttgtcttgcaacaggcttataaggaatggcaaagagcacattcaaggaagagcatgacctagagaaaagaagtgcagaggctgctcggattagagagaaatatccagataggattccggtgattgttgagaagggggagaagagtgatataccaaccatcgacaagaaaaaatacctagtcccagctgatctgacagtggggcaattcgtgtatgtcattcgcaaaagaatcaaactgagtgctgaaaaggctatctttatctttgtggacaatgttcttcctccaactggtgcactaatgtctgctgtgtacgaagagaaaaaggatgacgatggctttctctatgtcacttacagcggagagaacacatttggatctccatagagatctcttgctggatatttcgtttctattttacctatttcgcctgagtatttcatatcttattattagttatctatgtactactttctctaagaactttaagatggccgttaatgtgtacaga

SEQ ID NO: 11684 - DNA, 530 bp, Glycine max
  Coding DNA Sequence Number=SeqID_1905
aacctgaagagccagttccgcagtccctatatacaattccggagacaggaagatcagggtcatcaaaaaatgcaaaaggttcaagcaatgcaagaccaagtacctcaataggaaggactacagctcaaaagaaaccaggatttaatgtatccaagagtattgtagagcagaaatttggaaggaaaaatattgtaaagactgtaagtgagaataagattaaaggtgcgactcgagttcagataggtacaccagagaagaagaaccgaaataccgcaaccaaggatggtaatgcgatgtttaagaatcctaaaaaggttgaagaggctttacagaaggcaagagaaattgcagacttgtattaggtcataagagcgtgcaaacaagttgttagggtttgttagcagtaagcattttttatatagaaatttttatgtatttttattatatttctcgatttttacctatggagcttataagctattattaaagcaaataactcattattttggctttgcatactgacaatatca

SEQ ID NO: 11685 - DNA, 514 bp, Glycine max
  misc_feature (461)..(461): n is a, c, g, or t
  Coding DNA Sequence Number=SeqID_1906
ataactcgcgacacaggcgcgggaggctgggcagacggtgagaacacacaccgggcaaagaaaatgaaaaagccgcccgagattgcgtctcttccaactacaaacataagggcgaagataacaccacacagtgcacaccgcgctcacgcgccacccaggcacgcagcatatcgggcgactacacgcgacatacgtatgggcgcgtcgctcgtaatataatcggcatgtgtggaaaagggtcagtattacgccccgagctcataccgcggcgccgcgatttcgcgctcacgggcgtaggcagagggcgtgcggtgattgagttagcacggtgaataatgctgcaaaaattatagggatagagacgccggagaggcgcttcggccacccgttatataacaaccactccccgcgccgcgtgtgtgggcggcatgtagggaccggccatgtggaacacgattcgncgggagatattcctctattataccctccgccggtgcatactcgtgcacgcagg

SEQ ID NO: 11686 - DNA, 533 bp, Glycine max
  misc_feature (33)..(33): n is a, c, g, or t
  misc_feature (78)..(78): n is a, c, g, or t
  misc_feature (117)..(117): n is a, c, g, or t
  misc_feature (123)..(123): n is a, c, g, or t
  misc_feature (187)..(187): n is a, c, g, or t
  misc_feature (227)..(227): n is a, c, g, or t
  misc_feature (349)..(349): n is a, c, g, or t
  misc_feature (394)..(394): n is a, c, g, or t
  misc_feature (490)..(490): n is a, c, g, or t
  Coding DNA Sequence Number=SeqID_1907
gtgatgtgatgctcggcaacactgtctgcttgncgctgattgtttctgactgattgtgtttgagtcactatgcaaacncacccacactatatggctgacacccatacaagttagaantatgtngtattgatatgtttgatgaatgtgagacgcgcacacgatgtcaacacactagtcgctctcatantcatctattagaatccatatataaacgcatgtcttgcacnacgcttgaggcgtctagctgagattgttgatattacactacatatgagagtgtatagaagactaagattgtaacgacgcgatactccctctcttctgcgttgttgagtttctgccgtcgctncctcgttcgtgtgtcgaatgactgcagcctacgtggcacgcgtcntgatgtcaaggtaatcgcacgcgtgcggtactgttgtatggtgtatttgtctgcccgtggtcttgtgggactagatcgtgcatctctgtcgcggtntcggtggaacgtggtgctgtccgcatggcaagtctctattatc

SEQ ID NO: 11687 - DNA, 493 bp, Glycine max
  misc_feature (74)..(74): n is a, c, g, or t
  misc_feature (79)..(79): n is a, c, g, or t
  misc_feature (133)..(133): n is a, c, g, or t
  misc_feature (142)..(142): n is a, c, g, or t
  misc_feature (154)..(154): n is a, c, g, or t
  misc_feature (156)..(156): n is a, c, g, or t
  misc_feature (254)..(254): n is a, c, g, or t
  misc_feature (317)..(317): n is a, c, g, or t
  misc_feature (322)..(322): n is a, c, g, or t
  misc_feature (343)..(343): n is a, c, g, or t
  misc_feature (427)..(427): n is a, c, g, or t
  misc_feature (449)..(449): n is a, c, g, or t
  Coding DNA Sequence Number=SeqID_1908
cgatggcgtcgactgtatattcgtatcgcgcaatgtcgttgtctgcgtgctgactctcgtcatgtgtgagcctntgagngcggcggagtggagtgagagggtgtggctgtgtgatgagcgctgcgccgtcgcncgcctcccncttgtggtcgantntctctctactactcgatcacacacgtcatctcacacgtgtgtaaggcaacagatctattctggcgagactgagactatgtaccttgtatcgagggagntgtgtctcccataattatgtgagtgttaatagcggtgtagcgagtgtgttgtgatgagttgtncaatnttcatacatattacataactnttatctctatacgtacatatagcgagagtagcgtgctgagcgctatgactcttagtagcacatagatatatgctgtagtagtgnggtggtgtgattacggggggtncgcgtccctccacaacgacagacatatcgagagctgcccactaa

SEQ ID NO: 11688 - DNA, 502 bp, Glycine max
  misc_feature (126)..(126): n is a, c, g, or t
  misc_feature (128)..(128): n is a, c, g, or t
  misc_feature (130)..(130): n is a, c, g, or t
  misc_feature (134)..(134): n is a, c, g, or t
  misc_feature (160)..(160): n is a, c, g, or t
  misc_feature (162)..(162): n is a, c, g, or t
  misc_feature (178)..(178): n is a, c, g, or t
  misc_feature (180)..(180): n is a, c, g, or t
  misc_feature (207)..(207): n is a, c, g, or t
  misc_feature (280)..(280): n is a, c, g, or t
  misc_feature (314)..(314): n is a, c, g, or t
  misc_feature (342)..(342): n is a, c, g, or t
  misc_feature (383)..(383): n is a, c, g, or t
  misc_feature (409)..(409): n is a, c, g, or t
  misc_feature (436)..(436): n is a, c, g, or t
  misc_feature (463)..(463): n is a, c, g, or t
  Coding DNA Sequence Number=SeqID_1909
caggaacaacgcgacggaacactttacatcgaccagacagactaatcagataacagaggagcacacgtacctgacgtggacgagactctttctgctcgctctagcatactttatgagtgagagttntntngatngtgagactatactactgattctgctngnataccgactcttactncnagagagagtctccgatcgatggcgctngctcgctcttgccactctcgcgcttgcagctctctcgaagacagagagatctctctcatggtatctcgcgtgngcgaggatctcgcgtgggcagtataacactgcanacagtatagagcacatcgtacacgtctngtgcgtgcgtgccgcgctgttgtgtctagaatatactgtgnggagaggatagctatctccacagcgngtgagcatggcttcagacgcgcgtctnctgctgctctgccctcgcgacgccgcnctaggcgtgcatcgtcttctatgtctgctgaggacggcg

SEQ ID NO: 11689 - DNA, 509 bp, Glycine max
  misc_feature (27)..(27): n is a, c, g, or t
  misc_feature (29)..(29): n is a, c, g, or t
  misc_feature (40)..(40): n is a, c, g, or t
  misc_feature (47)..(47): n is a, c, g, or t
  misc_feature (65)..(65): n is a, c, g, or t
  misc_feature (68)..(68): n is a, c, g, or t
  misc_feature (78)..(78): n is a, c, g, or t
  misc_feature (84)..(84): n is a, c, g, or t
  misc_feature (87)..(87): n is a, c, g, or t
  misc_feature (104)..(104): n is a, c, g, or t
  misc_feature (114)..(114): n is a, c, g, or t
  misc_feature (134)..(134): n is a, c, g, or t
  misc_feature (142)..(142): n is a, c, g, or t
  misc_feature (144)..(144): n is a, c, g, or t
  misc_feature (163)..(163): n is a, c, g, or t
  misc_feature (167)..(167): n is a, c, g, or t
  misc_feature (173)..(173): n is a, c, g, or t
  misc_feature (176)..(176): n is a, c, g, or t
  misc_feature (183)..(183): n is a, c, g, or t
  misc_feature (197)..(198): n is a, c, g, or t
  misc_feature (204)..(204): n is a, c, g, or t
  misc_feature (208)..(208): n is a, c, g, or t
  misc_feature (212)..(213): n is a, c, g, or t
  misc_feature (215)..(215): n is a, c, g, or t
  misc_feature (219)..(220): n is a, c, g, or t
  misc_feature (243)..(243): n is a, c, g, or t
  misc_feature (245)..(245): n is a, c, g, or t
  misc_feature (269)..(269): n is a, c, g, or t
  misc_feature (272)..(272): n is a, c, g, or t
  misc_feature (279)..(279): n is a, c, g, or t
  misc_feature (302)..(302): n is a, c, g, or t
  misc_feature (307)..(307): n is a, c, g, or t
  misc_feature (336)..(336): n is a, c, g, or t
  misc_feature (355)..(356): n is a, c, g, or t
  misc_feature (405)..(405): n is a, c, g, or t
  misc_feature (408)..(408): n is a, c, g, or t
  misc_feature (411)..(411): n is a, c, g, or t
  misc_feature (447)..(447): n is a, c, g, or t
  misc_feature (464)..(464): n is a, c, g, or t
  misc_feature (469)..(469): n is a, c, g, or t
  Coding DNA Sequence Number=SeqID_1910
atcagcacactatgcaatcgactgccngnctgtagatgcnccgagtngccctgcccgatgcgtcngantactgactangcatcntcnaggtacgatcgtctacntgtactgatnactgtcatcagtcgctactngcatcgtncnatgttcatgtcgccgagtnacgncctacntangtaccantatcacctgtcttnngttgantgcngagnnantagnnatgtgatgatgactgatatccgnangcaatagtactacatctggccatncgntcgagtntgactactgactacttgcgactnccctngcgatcgtcatgctcatgtactccaatantacgtagtcgacgtaaggnnacgcatgatagtacaggacaaaccactgctgacgatcagacgatacgcngcnagnagttactgcgatcgatactctcacttaccagacgancccggatccgtagttantccantcagggcgatctcgaatgctttacccgtcacctgactcga

SEQ ID NO: 11690 - DNA, 595 bp, Glycine max
  misc_feature (195)..(195): n is a, c, g, or t
  misc_feature (503)..(503): n is a, c, g, or t
  misc_feature (563)..(563): n is a, c, g, or t
  Coding DNA Sequence Number=SeqID_1911
atctttagtttcagtcgtaccaccgtactgactatggtactctgcgacaagtgaatacttggggatatatatctgatctacagtagtgcgctgatgatcttccgagccgtgatctatcctgtgcgggcctctgagttatgtgtataggagagaaagttattctcgctctcgattatcatagctgcgcgattggtngtgtatatgtatgtgatcacgacatggatgatatgcacagtacgagcatacagatatgtggagtatgcatgactggtctgccagagtatgcgcgagactagtcgcagctcgctatgtatgcagtaggatgtatacgtggggctcgatcgaccaccgagagtggggatcatggatgtctcgctcgtaattgtgttatatccccactatgctccgttttttatatgtcggcgagctagagatgtcaactgctcgagaacgaccgtgcgctgtattatattcgacccgggagttagacgacattgctgtgngttaattatagccggcattaacttgcacgcgctggtctctgtatattaagagctcgctgntatatgcggacgcgactatagccgacgagtga

SEQ ID NO: 11691 - DNA, 350 bp, Glycine max
  Coding DNA Sequence Number=SeqID_1912
agccagccacattcagttcagttgctgagtaaaaagcttattcgcacgcatcttccttctcttatccgcttgagaaagggttttcttaagaaaagctacaactgtacgctaccaatctttgcaaggtggataatcatgtcctggaggaacacacactatgggtgcacttatcctacggtatgtgaactcactctcacgacggatatatacagcactgttgcttacgttatactgtgtattgctcattaacagtagtatgtgatccgatttgttgtcatatgccaaattgccattaaaacaccactccgaggaatgcacgttcgtggccagcgctttgttttaggtagcca

SEQ ID NO: 11692 - DNA, 310 bp, Glycine max
  misc_feature (47)..(47): n is a, c, g, or t
  Coding DNA Sequence Number=SeqID_1913
ttgacttcacaatcggatgtttcggttcttcactttccagcggctcnggcactcgaatttccttaattggatggtaaaatctaaaagatgtataggggtggaaagatttgcttgattgtgtactttaagcttttttgggccaaaaattgccccagatttggtattgcacatgcactttgtttaggttttgcacggtggcttgcagcagaggttcccatccttgttgattgtggtatgatcaagcacaaagatgacaccgcaaccacatcaactgaattttagttagcatgtcttgctaaaactgtagaag

SEQ ID NO: 11693 - DNA, 373 bp, Glycine max
  Coding DNA Sequence Number=SeqID_1914
atggaaaatctttctcctctacgagacgacgatgaggaaaacgaagtagacgaagccaaaatgctcctcatcggtgagaacggaaccaacggtgatagcttctctcctcggtccgacggtgcaccggagctccagcattacactatccgctccatcaagtcaacggtcgtgattcgtcaactgacgtcacagggtctctccttccagctctggccagccgcttctactttcgtcgcgcttctcgataactaccgcctcgaccctgccaacagccccctcgccgcaacactctcctcgctgaaacccgccggctctactactacaccgatgaacattctcgagctcggatccggaaccggcgtcgtcggaatcg

SEQ ID NO: 11694 - DNA, 409 bp, Glycine max
  Coding DNA Sequence Number=SeqID_1915
gatcaagacttgaagggcagctacgatccagctgagaaatagctgctaaagagcctgattcgacaattaagggagatgctagctgttgaataaaataattaatgttatttcatttcactcactaaaagacaaatttagtcaagtagaaaaaaagcaatatattcttgatgtttcaaagaagtgattttttaaaaaaataatttttctcactcgtgaaatgtgagatgtgcgtaagaaagagacggaaacaaagagagagaaaaaaacaaataagataggaagaaaaagaagaataaaagatgtgactggagacataaaaagaaaaggtgagtataatgaagaaaaaaaagaacaagacaagaagtaaaagaaaaagaaaaataaaagacgtggcaggagatataaaaag

SEQ ID NO: 11695 - DNA, 186 bp, Glycine max
  misc_feature (160)..(161): n is a, c, g, or t
  Coding DNA Sequence Number=SeqID_1916
agctggcgttctgagaaccaaggacaaccctgtccgagatatcaagcccaggaataggagtatcatgggtgctggaggccctgatgatgaggacaacaacaggtggccccgtggctgaagcctctgctacaagaaagtatctttggtcatgcaagcttcnngctgatccgacaagaagcgagtgca

SEQ ID NO: 11696 - DNA, 409 bp, Glycine max
  misc_feature (98)..(98): n is a, c, g, or t
  misc_feature (207)..(208): n is a, c, g, or t
  misc_feature (265)..(265): n is a, c, g, or t
  misc_feature (373)..(373): n is a, c, g, or t
  Coding DNA Sequence Number=SeqID_1917
atatagctgctaaacttgcggataaaattttgggtgaagtccctactagcacccctgctaaaccattggtcgatgagtcaagaccaatgaaggctctngctggatgggaaagaaacatgttgaaattatttctgctcctagaccaatgatcactgatccaagagacattgtgttaaagattacagcgactactatatgtggatctgnncttgcatcttttcacaggtgctatgttagacatgcataaaggagatgtattgggacnacgaatttatgggaattgtagaagaagttggttctgaggtaaaaaatattcaacaaggacaacgagtcgtagtggctttcgatattgcttgtggtgaatgcgattatngtaaaagacaagaatatactgcttgcgacacaacca

SEQ ID NO: 11697 - DNA, 508 bp, Glycine max
  misc_feature (121)..(121): n is a, c, g, or t
  Coding DNA Sequence Number=SeqID_1918
gcgccgggtggatcgtcttcgacaatataatatttttatatggatcagggatggcccgggttggctgggcgatgataagtttaaatgacaagagcatgtggaatataaatgtttttgtggntgggtgggggggagaggggggaacacggcacacgcggttctcaaaaaggcggggagatatcataacgggtgggtgtgaaggggggcggaatataagaaataaggggagggatggaggaatttatactgctcgaggggatgatagttgcgggtggtgggtgctgtattataattttacattgggagtaaaaagtggtcggggtgattttggtggtgagcatgggggggtggaaagagcatatcttgtggatagggggggagggaaacgaagaccccacatggcaggggcccgcgcggggacaaaacataatatcggtaatccggagcgaggaggggagtaaataagcaggacagggggcgggagggctccggcgcgtagatagccaag

SEQ ID NO: 11698 - DNA, 230 bp, Glycine max
  Coding DNA Sequence Number=SeqID_1919
agtgaaaaaccttggaatctcctgcaacccccagctacaggaaagacggtgaagacacaggcgatcgactcctcatgggaaaacgatcgcttcgatcactaggccttggttattgaatgtgtacctatttcatctttggcatacactttcattttggacataattgagtttgcaggtggttttattcctactcttgtgtacaccagtcagaagatggaactatcccctat

SEQ ID NO: 11699 - DNA, 494 bp, Glycine max
  misc_feature (117)..(117): n is a, c, g, or t
  misc_feature (129)..(129): n is a, c, g, or t
  misc_feature (140)..(140): n is a, c, g, or t
  misc_feature (174)..(175): n is a, c, g, or t
  misc_feature (183)..(183): n is a, c, g, or t
  misc_feature (262)..(262): n is a, c, g, or t
  misc_feature (342)..(342): n is a, c, g, or t
  misc_feature (460)..(460): n is a, c, g, or t
  Coding DNA Sequence Number=SeqID_1920
ttagttatgcgcgtgctcgatatcctgcgacccacgtgactgagcggactcataagacatgacatgttggtgcgctgtcccgtatatacgtataatcatgcgtttacgcgcccccangcgttcgtcagngcgcttcgttnagatagagcgatatatcgctgatcgagctcgganngttacggncgctgtccgcatacgcgccaacgaagcgacatacggtcgcatccatctttcatatatatatctatctacggacgcgcancgacgacgagccgagaaccgaagacagacagtgtaagtcctggtagagctaggctcgccactatcatgtcagtcgctgcncgttgcgatgcaaatcgctaggaaacatatataaatatatgtattacgtatatgcacatacgtcgatgctgcgccgcacgatagcgcactatttatcgccctctcactatctattacntgtgatatatatcatcatacattgcgcgtcgttg

SEQ ID NO: 11700 - DNA, 456 bp, Glycine max
  Coding DNA Sequence Number=SeqID_1921
tgcagcccggttctaaagcgtcccggcaacgccactctccccgcaagcttaccggcggtccctacctcctggggggggcccccccccaccttaattaatccccgcctagcgacttccgggaaattcaatcctttatctgccttcccgggaacatccactaatcaccccccgggaaatctgcggatccgaatcaaattccccccaaaaaataaaaacccaaaagtgtaaaaggcaaaaaccctgggggtccccatgggatgggagcaacctccacttactttggctctcggcctaccgcccccatttaggctccactatttatcatagggaaaacacccgatagtcgcccaacatgcaaataataagaataccacaaatactcacccgcgaaaaagcccccatcttcgccgaccacgaaccccacccccatttgatctcattaaatcacaccaccca

SEQ ID NO: 11701 - DNA, 229 bp, Glycine max
  Coding DNA Sequence Number=SeqID_1922
gggttagtatcgtgctatagcttattataggaccactgcgttggcgaatgcaccgtcaactgctgtgcatgccacgacttctgaagcccaagaactacgtctcatggaggactcgacgcagagtgtgtataataagaggctggatagcccctccactgatgaggctggttctctcacgccggctgctgtagctaccacacacgtttgatctcacagagactcatatgcc

SEQ ID NO: 11702 - DNA, 542 bp, Glycine max
  misc_feature (83)..(83): n is a, c, g, or t
  misc_feature (382)..(382): n is a, c, g, or t
  misc_feature (459)..(459): n is a, c, g, or t
  Coding DNA Sequence Number=SeqID_1923
agaggtctagtcagatttgtcgggtgggactgtactgtcggtgacttcatgcgtgacgacaagtgtggatatgctctgtgtgnccggggggtcgcgtgttgccagcacatgtacgctgagacaaaactcgatagatagggtattacgatcagtcgtacgactatgcaacctggcattaatagtaaggagcgccgggtcggccgtcgcggtgatatagtaatatctggtccaatctgtttatgcattattgacctcgtaactgtagtttgatatgaagatgattaggcatagtcatactgccggaccggccagagagattgtatcgtatgacgattacggtgtaagacatagccgtagcgggatgactgtgtgatattatagntgacgagagaagaatagatcgtctgaggtcactatacatcgatatatctgcgtcgctgtacaccaacaacaagaganaagaaagaagaaggccttcaatacgtatcagcgcgtgcgcaccctgcgtaggggggggtgacgcagtctacctatcacttaag

SEQ ID NO: 11703 - DNA, 174 bp, Glycine max
  Coding DNA Sequence Number=SeqID_1924
gggcggcgcaccttttctttgagacttgctgggtcaagggaacaccttggttcccactggaacccagaagattaacaaatcccgcccgttaattggcccaagggaccacctgaaatctcttcaaaatttccaattaaggaattaattttgggcctggcatttttttggcgcgtt

SEQ ID NO: 11704 - DNA, 554 bp, Glycine max
  misc_feature (28)..(28): n is a, c, g, or t
  misc_feature (66)..(66): n is a, c, g, or t
  misc_feature (68)..(68): n is a, c, g, or t
  misc_feature (79)..(79): n is a, c, g, or t
  misc_feature (133)..(133): n is a, c, g, or t
  misc_feature (238)..(238): n is a, c, g, or t
  misc_feature (253)..(253): n is a, c, g, or t
  misc_feature (302)..(302): n is a, c, g, or t
  misc_feature (358)..(358): n is a, c, g, or t
  misc_feature (421)..(421): n is a, c, g, or t
  misc_feature (425)..(425): n is a, c, g, or t
  misc_feature (477)..(477): n is a, c, g, or t
  misc_feature (516)..(516): n is a, c, g, or t
  misc_feature (528)..(528): n is a, c, g, or t
  Coding DNA Sequence Number=SeqID_1925
gtgtgggatggctaacgcatgaattagnaggatatttgtcgtctcactctcacgtcctggcacgcnanctagcgcaccnacgaatatagtatagtctgtgatatgtgacgtgtgtgcgttgcgctgatatggngcatatcagcattcatcagtgactcatgttcgaagcgtagtgcgtctcgcctctcctcgatcgctctgcacgatatcactcatactgtttattagcgtgtctccntccacttacccatcnattcatacttcagtacacaatcgatgctgcgatctagttgaatctgaanactcagtcatcagacagcgtcactgacatacatgatatgcgcgatgccgcatcgcncacacgaatgatagtagtttagttaaataactataaagtgaacgagcaatggactgaatctcntaantcatatatctagcacaccgagcattagtagacacgacgcaataagcttgtcngctgcagtatatatgtatatatgagctctcaacgtagantcacctatctcntacatcatgacagctaatatctacta

SEQ ID NO: 11705 - DNA, 454 bp, Glycine max
  Coding DNA Sequence Number=SeqID_1926
gctactgcgaaagcttcgaacttgagaatgggggagcagtttgaagaaatgcctttgaatctttgtgtcctgcccccccatcgaattgtttgggattcggaagtgaaggaaatccttttattttttaatagcggccaaattggagtttttccaaatcttgcgcctattgccccaccggtaaatttaggtattttgagaatccgtttttttaaagcccaatggttaccgatggttttgatgggcggttttgttaaaataaccaataatgggatccctgttttagtaaatgatccggaaaagggtagtgccattgatccccaagaagccccgcaaattttttaaatagcagaagttatttttaataagggggaaggaaagacccccctcctccccccaatttagtttttagaggagttaggccccgagtagaggctttcaatgtgttttcttacca

SEQ ID NO: 11706 - DNA, 508 bp, Glycine max
  Coding DNA Sequence Number=SeqID_1927
gtattactcaatgtacaggcatgtggatagactagcggaagaaataaagaaaggagttgattctgtagaaggtgttgaggccaaactatggcaggtaccagagacattgccagaagaggtgcttggcaaaatgagagcaccacccaagagtgatgtgccaattattacccccaatgaactctctgaggctgatggctttgtctttggcttccccacaagatttggaatgatggcagcgcagttcaaagcatttctggatgcaactggaggcttatggaaaacacaacagcttgcaggcaagcctgctggaatcttctacagcactagttcccaaggtggtggacaagaaacaacagcgcttactgctataactcagctggttcatcatggaatgcattttgttcctttttgctactaatatggtgctggatgcttcgattttgaggagctcctaggtggaaggtatcatggttcaggaatagatgcaggttacatgtcaagaccacca

SEQ ID NO: 11707 - DNA, 575 bp, Glycine max
  misc_feature (143)..(143): n is a, c, g, or t
  misc_feature (296)..(296): n is a, c, g, or t
  Coding DNA Sequence Number=SeqID_1928
ataattgtatcacgcgatgcatcgcactttatccacaacgcgatcataagaaaatgagacacagtgtgagaacaccgtcttatgatcctgtcgtcccataaaaggccggtatcttacactcatagataacatgacttgcgacngagtgtgccacacacatatcaaataagcctcaatatgtgtcgatctcacatgctatacgaatatctaacgagccgcacaccgttctacatcccgcagtagcatgttgatacgaaccgatacatcgactgctggcggtaaaacattcgtcaccnactataataatgttaccgcatactcactcccatgaacgccgcggccgtctgtacgaatacgcggcctaataacattccttcgattcaatatgatgatagattcgcgccgcccggcgagtagtcgaaaaagataacgagatcgtagatatccgttacaatattaaaaacaacggatcatcggtattgctccgggtacgcacccacttctaaatatatgtagagcactaatgtactgggatagaatatcgcgaaccgcgctcgtcacctgtgtgagtatag

SEQ ID NO: 11708 - DNA, 394 bp, Glycine max
  misc_feature (271)..(271): n is a, c, g, or t
  misc_feature (285)..(285): n is a, c, g, or t
  misc_feature (332)..(332): n is a, c, g, or t
  Coding DNA Sequence Number=SeqID_1929
aagacggatggaggccactctcaatccgtgcgatggactctgtcaatgagcatgtcagcgatacgatgtcgacgacatacttgatcgcgtgtcacggtaacgttgaaggagccttcagcgcgtatatgcgcgttatatagggtagcatgatgaagcgcaatcggcgactctggctaacgctgatatgagcgagcggaagactactgcgctaggtatatgtggtgcgtctagtgagtctgatatgctcactacgacagttgtggtgcgtctntatcgcgagagtcncgtacagcatcaccacgctcatacgacgtgatgagcgtgtatattgncacgtagtgacgtgctgctgagatgtgcgcgcgatagcatagtgcgagagcagtcacggccg

SEQ ID NO: 11709 - DNA, 574 bp, Glycine max
  Coding DNA Sequence Number=SeqID_1930
gagtcgatagaggtactctaccagtaaaggatgctaaacttaaatgaatccaatagttggatgaaatattgcctcttgattgtctgaggtttcgaaaaaggttgacgaagaaaataaagtatggtgtaataatatgatttaaaacaatgtcgacaaagtcactatgagtgcatctacttgaatttgttagtagagaaagccttcactatgaatgaatagtttttgcactggttatgtcaagatagaaatgactgccaacaccggcttcttaacagttgatgaatgtgctgctagtcctgtgagtctagcactgcttcccattggtagtccatcaggcttcttcttttacaggagtgatgtggcttccttttgattagtaatgcaatgttatgcttttgtttgtcaatttactcaattctaaattacacacaaatgtttattgaggctactttaagcacattatatcatgttgtttacttctatttaatttttctcattaggaagtaggcacagaaggttgtggagctccccatttttggatttgaaattgattgcttgatttgagttcgaagtt

SEQ ID NO: 11710 - DNA, 209 bp, Glycine max
  Coding DNA Sequence Number=SeqID_1931
catccacaaggcacacattctgtgtatcagatataacatgcgcactcgtacctcgctaatattccatactacaaaaaacatggatatggggtggagaaatctaactcgaccttgtatgatgaatgggttaacaaggccaatgcaccagcactgcccgagactcttaagaattacaacacgctggagtcttttggcttcaacattatatt

SEQ ID NO: 11711 - DNA, 569 bp, Glycine max
  misc_feature (120)..(120): n is a, c, g, or t
  misc_feature (356)..(356): n is a, c, g, or t
  misc_feature (420)..(420): n is a, c, g, or t
  misc_feature (521)..(521): n is a, c, g, or t
  Coding DNA Sequence Number=SeqID_1932
ggctctcctctttagcttttatttcatataacatttgagctatatgtggtgaggagctcgtttgttaatgttatgtattgtaggtgttttcttcttagtgacaaaataatcacctccgcncacgacgagttataggattgggtgttggagactgtttttattatttagtacatgtgagaagtactgctgtaatatcagttaactagtatcaagatcaggattgatgtagtgtattatgttaattgtttatatggagttaagaacatctaataaatgttatgctaatctagtgtatatatattttattgtgtggagtgacgagagccataggtattgaagggtggtatagatataangatgtgtttatttattatttgtatatgcatatcttataaatttgtggggggggggagggataanagttatgttagaagttaataaaggagggaagaccgacatatcctcatctattgtattgtagtatgcgggagaagggtggggggggggaccacacagtctanctatttacacaaatgaagaaatataggatatgcgggacttacagttgg

SEQ ID NO: 11712 - DNA, 544 bp, Glycine max
  misc_feature (36)..(36): n is a, c, g, or t
  misc_feature (92)..(92): n is a, c, g, or t
  misc_feature (247)..(247): n is a, c, g, or t
  misc_feature (359)..(359): n is a, c, g, or t
  misc_feature (458)..(458): n is a, c, g, or t
  misc_feature (516)..(516): n is a, c, g, or t
  Coding DNA Sequence Number=SeqID_1933
atctctcacatacttgttacccatagtatacggcgnacacagcggtgcctaccgatcgcctctacacacatctcacatatttataagacgancggaacaaaacaaattggaactaacttactgagaactcacgatgtcatagatacgcatcatatgagcgatagtggcatcttaactactatcgcgtattctcatatagactgctcattttgtctagtagcgcttatcgagtatcatagatattgcntatctctatcaagatgatggaatgattgcagacatgatatatgtaatagaggcgatgacactctcctccctcgagtcttgggttagtactcaatttacacggtcgctctttncttctatgcatatcaattgaccacatattctgttactattccttgctgctctagactcactcacacagatcgtacacgtggacgctcgctaaccggtangtaccagcgcgcatatgatcggatccttctattttcgagggacagagagcatcgtggntacggccagaattatgtaccgcgtgttt

SEQ ID NO: 11713 - DNA, 573 bp, Glycine max
  misc_feature (361)..(362): n is a, c, g, or t
  misc_feature (416)..(416): n is a, c, g, or t
  misc_feature (425)..(425): n is a, c, g, or t
  misc_feature (434)..(434): n is a, c, g, or t
  misc_feature (503)..(503): n is a, c, g, or t
  misc_feature (526)..(526): n is a, c, g, or t
  misc_feature (546)..(547): n is a, c, g, or t
  Coding DNA Sequence Number=SeqID_1934
tcagcccgggatcccaaggtagcgcgcgaactcaagtaatggttccaattccctcgccccttcctccccggggatccctcgcaacggaaagttggttttcccccccccaaaggggggggggcgggttcgaaaaaacaaaaaaaatttatttgggggccccccaaccccgttttggaaataaggcccgtcccccctaaaattttgggaagaacccccccggtaattcagtgcgtttttgaacccaaaaataaaaaggaccctgaatggggaaagaaatagagggagagggggtggaaagtacacaaacccgccctgggggagcgcctctaattgggcgagaagcgcaggccaagtaggggcnncccgggtaaaaacgagtgggagaagaagaacaattccgtgacgacgggagggcnccgcccgcngaggagagngagcaacacaaaaccactttcaggagcgcagaccgtggccaggtcgtgaggtagacgagggtcgcgtgncaaaaggacggaagaaacggganactgggcgggagggatgganncaacccacccgacacattatgagaga

SEQ ID NO: 11714 - DNA, 568 bp, Glycine max
  misc_feature (93)..(93): n is a, c, g, or t
  misc_feature (198)..(198): n is a, c, g, or t
  misc_feature (245)..(245): n is a, c, g, or t
  misc_feature (278)..(278): n is a, c, g, or t
  misc_feature (325)..(325): n is a, c, g, or t
  misc_feature (391)..(391): n is a, c, g, or t
  misc_feature (431)..(431): n is a, c, g, or t
  misc_feature (433)..(433): n is a, c, g, or t
  misc_feature (476)..(476): n is a, c, g, or t
  misc_feature (495)..(495): n is a, c, g, or t
  Coding DNA Sequence Number=SeqID_1935
gaaacgagccttgctcgctttattaccttctatttcttttatgcattgctccttacaagtatacatatttgtgatgtctctgacatttggatntcgttagtgtttataacaagttgaggagagaggtagatatgaggtgagctgtatcctggtcgcgattctcaccgacttgtactagttttgccgtccgttctattntgtatacaccacttcgtatacccctgaaacaacttcaacgacacaangcgacaacggaataaagtataccccgcgcgtcncggacgcgccgcccacaccactagccacgatgcatacagtctctcgnacgcgacaatcacctccaagatgatctccgtgtctgatagcatgcgtagagacactcagagctttngaatgacattgtgaacctaccgcatattcctatgcttctngnacgatgagtccccctcccgatcaccacgtgtatccgagcgtcngctgtccgagcggcaaagngacatacaccactcttacactatcgcataatgtatatctgaatcgaaaatactcactcctaaacatcatctaa

SEQ ID NO: 11715 - DNA, 156 bp, Glycine max
  Coding DNA Sequence Number=SeqID_1936
ttagtaggtgtttcgttgttgttgctgttggtgtgttaatcttagtgggttcagagagctgggattggtgttaatagggggacacagtaaacacatcttttttcaccgtcgaaggtggtgaagatgcttaacgacagtggcattcataacgtgacg

SEQ ID NO: 11716 - DNA, 499 bp, Glycine max
  misc_feature (101)..(101): n is a, c, g, or t
  misc_feature (114)..(114): n is a, c, g, or t
  misc_feature (420)..(420): n is a, c, g, or t
  Coding DNA Sequence Number=SeqID_1937
gtgtcgtgagcttgcatcagacgtccgccatgagatattgcgtatgcagagtactgtaatagtatataatgaagttgacggtcgtactatcctagacgganttctacatgattnattctgtatcgatattatatatcagatgacggtgtatatagtatagcatattcttgcgttaagtatatctagcgagctatagatattatgtagtactgtctgtatagcggacatgtgtcttgtagagggagtacccgtgccagatatcttgattcggtgtgcgatgagtgtgtcggtctgcgacaatagagtacatatcactacactcgatcggactactgactatctatctcttagcacatactacttcgactcaacgtcacgtcctgtactccgatccgtgcagagcagctgtctacttgtgantagtcatcatgaactactactacgtcatgcttctcctcagtcaagacgacactgtgcatgctgcacgacgcacgggtac

SEQ ID NO: 11717 - DNA, 205 bp, Glycine max
  Coding DNA Sequence Number=SeqID_1938
ggtaccacaacactcgggggtatgtgcaacatcacaatgtcacaacttcgaatatgtgtgaatcaagaccgatgattcacccatgatcggcactcttgcaggggcaaactcattgttgaacgcattaccagatgaagtgattcatcacactttcaacctaaaaagcctgccggctaggcaaataaagaacagacaccctttcaag

SEQ ID NO: 11718 - DNA, 175 bp, Glycine max
  Coding DNA Sequence Number=SeqID_1939
gggaagttcatctcatattctgacctccggggcatacttgaatctaaagggtggcccgattggtcagccccagttttgtccctttaaggaggtaaatgcgcgttggagcaaactgtctccgggggaaattcccccccatcccaataaaacgggaaggtatgggattaattttgat

SEQ ID NO: 11719 - DNA, 290 bp, Glycine max
  Coding DNA Sequence Number=SeqID_1940
gacggtaacccttgggatgatgacccccccgtggaaaaagctgggagaggctggttcgcagtggttaggatgccctggtctattgtggggagacatcccaacgggcgccctgttggttatgggatcaaaaagtttcagatcattttaactattgtcgatgcccttgtatttgtggacccccttgttgaggagactttcccagttttgccccccaaagagtatgtccaaaactgtgacattgttgccttcaacaaaatttgggggttcatgttgaattcccgcccttttta

SEQ ID NO: 11720 - DNA, 581 bp, Glycine max
  misc_feature (187)..(187): n is a, c, g, or t
  misc_feature (289)..(289): n is a, c, g, or t
  misc_feature (472)..(472): n is a, c, g, or t
  Coding DNA Sequence Number=SeqID_1941
atagcaccaggctgtgtgatgtgaaagcaatcgactagatagacagggtcatgttatcgctgcacacccctcgcccacgccagcgcgttattagaggaagtataatagcccgacggcgcacgaagaaggattaagtaacagaactcagaacaggatcaccttaagagatatcaagcgacatcatgtntatgtcaatgctagccatgaagacggcgggcattgttgacgcccccggccacgcctcacccactgcgcaatagcgtgcttggacatttacatcgcgctgctntcagtcggcggtacaaaccacgcgcagcagccacgcctcggtcatactctatactgcacactatatcgtgcctccgtccgccggcatcgcgccacggcgcgcactacgacgcagcgcgacgtaggctctcatgtccacgcaatgacgctcaacatattctcgcgcaccatcccgctgagtgcntcctatcaccactcatcatacaccattcctcatatctcgtgtgcactcgatccgtatgtactatgtgcgtacgacctcgctcgtgaagcgatgactcgtggaacacata

SEQ ID NO: 11721 - DNA, 507 bp, Glycine max
  misc_feature (78)..(78): n is a, c, g, or t
  misc_feature (174)..(174): n is a, c, g, or t
  Coding DNA Sequence Number=SeqID_1942
agagatctatctatccgatccactcaatactccaacctccctgcgtgctccagaacggcggcgtgacacgatatggancgctgctcaagactcaatgcatgttcatctcgcgcctgagcgcgtacattactggggcacgtacgttcaggatagctacactcctgacgacgagtngtggtgtagcaccctcgatacgacccctcttgtatactcatagcatcgcacgaaggatgaacgatcgtctaaggtatctagccgctgacgaaaggcttagacctatgaagcaggcgagtgttggggcgtatcgattcatagttggtcgaattaagcttcatataccccacggaggtgtgtcgcctacgcagatgaaatacctggacggctcttctgcagatatgagtgcatgtgtactcagagatgagagtgggtcctgcgtgggggagagttacgctgacaagtccctcgggcgcgatcatcgtctattgataaaagaacacggccgcgccc

SEQ ID NO: 11722 - DNA, 598 bp, Glycine max
  Coding DNA Sequence Number=SeqID_1943
ctagtccccttttgagtaatggagaagcagttgttaattcaaacacagcaaagagctttaatactgagtatgtgcctgcaagacaactccaaaagcctgaattatcaacaagacaaggtataactttagaaaataaaaaggctatgaactccaacgaaacatatcagaaaaatgtcaagaatttctttggagtagccggagaagatagtatttgctttaagtcaaagacagccactgaaaaattcgatagatttattaagtaaacataaaggaggttttctctaatgagtataaatggagatcagagcaaccataatatactcaataaaggtgttctttagtaacctcagcctgtatataaagcagttggagtgaatagaagaactagccacttataacaattttttaaatactacagtttatatccaagaacgtttgcaaacataattatataatgcaacaataaaaataaatatggcaggtaaatagtagaagcttcctcatgtatagcgacatatataggtgtgtttttttttgctataaggagtgttatataatttttctttgtaactttttttgtaaggctatccaacgatta

SEQ ID NO: 11723 - DNA, 560 bp, Glycine max
  misc_feature (80)..(80): n is a, c, g, or t
  misc_feature (166)..(166): n is a, c, g, or t
  misc_feature (238)..(238): n is a, c, g, or t
  misc_feature (278)..(278): n is a, c, g, or t
  misc_feature (397)..(397): n is a, c, g, or t
  misc_feature (495)..(495): n is a, c, g, or t
  Coding DNA Sequence Number=SeqID_1944
tgatgacacatcacggctacgcaacattatgaccgcacacaactgccatgacacgagacggcacacacactcgcaccccncgatcagagtattctgttatatatcttcctaatcctcttcacccaccagcaacactctctctcgcgttcctcgaacacaacacaangagcaacacatgtctatctccttcactttctctctactcatcatctctactatatcgtcataagtttatctntcatacttaatcctagcgctcctctcttatccactgctcnccctcacgctgctagcagcgcgccgacctcatgatctattacattagctcttctctcttctctctccctctctcctccaactcctccagcgcgctgtcactgctcgctccctcctctcntcccctgctacgcctgacctgcttcgcgcgctctcgcctacgcagcgcggcggtagagattcgtgtggatagattgtggtgatatgtctgcttgaggnagtgtattacgaatccacgtgtgcgtgctgtccacgcctacccacacaccactgcatattgatag

SEQ ID NO: 11724 - DNA, 408 bp, Glycine max
  Coding DNA Sequence Number=SeqID_1945
caaggtgcttggcttaaggactcaacacagctctctgcaggcttcaaatgcaagttccttcatgatggacaagagtataccctgctgctaactgaagcctttcccgaagatgaggccctatacacctgtgaagcacgcaatgactctggaatggcttctacatcagcttcacttacagttgaagccgttgaaaaagtacttcaatataaagagatggagactgaagccaaagcttctgtactgagaacgaagattgagtctttggaggcagctgttggccattctgcagtgttcacttgtgaaacagaacctgcgccaaacttgagttttcaatggttcaagtctggtcgagaaatttatgaaagtgacaagtactctgtaaagactttcacctatgtgtctacactt

SEQ ID NO: 11725 - DNA, 543 bp, Glycine max
  misc_feature (251)..(251): n is a, c, g, or t
  misc_feature (377)..(377): n is a, c, g, or t
  Coding DNA Sequence Number=SeqID_1946
agtatacaccttactacccatcgtatacttcgtattacgttgcgactcgcagacataccaccgctcacaacaccaccttcctatctcacacccgccccgcggcacgaggcctgcgcacgcacgaccgcgcgacaacgagacaggccgctccaccctcctacacttatactcaattactcgatgtcacaatctccgccacgcgcgcgccgctctacgtcatcaccctctagacagagatgtggtccgcagtngcgttcgtgtctgcgtggctgggggtcgactatatctatatcagtcctatgtcatagagagtgacatcaatcgcgtcgggcgcgcagtgggcgtggagctcataaatagtaagcgtgtaagcgaanatgcaagcgaggcgcgcgcatcgcagtcacgtgtccgatacattaatatatatcatataactagacacagcttcgccgttactgcgcgtgattgctctcgcgcgcgctacttctcatctaccttcctcgacgcttctccctacgtcgcagtgctcacgtcctctaa

SEQ ID NO: 11726 - DNA, 432 bp, Glycine max
  Coding DNA Sequence Number=SeqID_1947
gcaccttagcccacgcatttggtgtctctagtatcccaggatttggtcccagtctcaccttgccacaagcactttcccacactagacctgatgggctaggcgcactccacagagaaggccacgcctcctttcttacctccttggtgcaccacaggttcccttaccaccccccgcaagtcagagacagatttatcgcctctctcgcctcaaataacgccgcagaagcgcaaccacccctcctcaagatgcccaatgaggggcgaatgaccccttgacgcatgatatagttaatttggtttgtgtctcagtttacctagttaagaatattatgcccaagccttattttaagagtgtgttatttaggtttttctcttgtgtaatatggatctcgtttcacttcacaagctcatgttcccctttatggtctcttat

SEQ ID NO: 11727 - DNA, 483 bp, Glycine max
  Coding DNA Sequence Number=SeqID_1948
aaacggcgcccggtgcatggataaggccctctcggaggccttcctgtgcgccgcgaagatcgcggcctcgtcgatgagcaaggccgttactttcttcagaagcgaagctgagcggaaagggaaagatgccgccgtggcgaagaagagagcgcgggaggctctcgaggacgtgctcaagctcgacgagaaggctaagttggccgtttcgaagccctccgagaatagagatcagaaaccgaaacagagtcctgcttcgaatggtggtttgaaacagattgagagctctgcggccaccgcccaagtcaagaaacagagttcgtctgtagtgcaagttaagcaagagaagtgattgcttttgaatggttatcagtgaataacttgatgtatcttttgtcttgtttgtgaaaaaaaaggttcaagcttggcatattatgtttcgggttttagtgtagatttgtgtaagtggtctccttgttttttcag

SEQ ID NO: 11728 - DNA, 488 bp, Glycine max
  Coding DNA Sequence Number=SeqID_1949
gtttttgggcgcaggcaagggtagggttccccctgctggtgggttccacctcggttgaaaagcatgatttggggggccttttgttttgtaacccatttggaaaaaagcgtttttggttttgggcaattgtgggggcggccccccttttttttcctcttccgaatgggaaaagctgggcaaggcgaattttttttgaggccccaaaatttaaattttcccggggtttttcaatttagaggcggtggtttttttttagggggggccgcccatttattttttttttttttatgttttttttttttttttttttttttttttttttttttttttttttttttttttttttttttttttttttttttttttttttttttttttttaatataaaattcaattgaagattcatgcaaaataaaaaccacttcaaaatctggcattgattttacatggaaatttcccccaaattgaagggttaactatcgtgaata

SEQ ID NO: 11729 - DNA, 504 bp, Glycine max
  misc_feature (111)..(111): n is a, c, g, or t
  misc_feature (223)..(223): n is a, c, g, or t
  misc_feature (365)..(365): n is a, c, g, or t
  misc_feature (419)..(419): n is a, c, g, or t
  misc_feature (430)..(430): n is a, c, g, or t
  misc_feature (471)..(471): n is a, c, g, or t
  misc_feature (478)..(478): n is a, c, g, or t
  Coding DNA Sequence Number=SeqID_1950
ggacccgtactcacactcctttagactccgttgagggatgttgtatatgtaaataggtctcttggtggacgcgttctgcattttgttattgttgtttggttttcatttgtngtgtgtgtgtgtcgaattagctgacagaacccccatgagacgccgacaattggcggagggacgagcgcagcgcgggtgggagggaagcaggacgagggtacaaccatccagnatatcacccctacctaccccccacaatagacccacccaccactctcctacaaatacacgctactccacaccgacccacaacgcatactaactcgcttctctatctaacgttgtaattgtgttggtatgggtgcttgtccgtncgccgcattacggtgtcagaagacatagagatagcgggccaacccactgggctnccgccgtgtgntgcctatataaaaaagataggaaaacaagccactaaacttntaaagancaaactctaatggtcggacatacggg

SEQ ID NO: 11730 - DNA, 507 bp, Glycine max
  Coding DNA Sequence Number=SeqID_1951
gaaccgggggcaaaagcgcacagcggggggaaaagggggccccgtgggaaggccccggggggcttaaggggggagctaaaagggggaaattggggggggccaaagggggggggtaaaaccggaaaacggggggggccacccggcgggattaagaggggaaaaaccgggggggggggggggtttattgagtggccaaggggggggggaggggggcttgggaatcggggcccaggggggggttttttttcaccaggggatgggggaagaggggaatgggcttcaacctggggggctggaggaggggaaaaggggggtacaaggggggttggccccggaggcaaaaaaacctgtttgggggagtgtagggggggaataaaaagagatctggcttagaggtgcgcgctggcccccgccggggaatcgcccggcaagccgcagcccggggatgggaagagggccctattggcccgggagcaatgtgttgttgggaacccagcatgggatggg

SEQ ID NO: 11731 - DNA, 494 bp, Glycine max
  misc_feature (48)..(48): n is a, c, g, or t
  misc_feature (140)..(140): n is a, c, g, or t
  misc_feature (310)..(310): n is a, c, g, or t
  misc_feature (330)..(330): n is a, c, g, or t
  misc_feature (334)..(334): n is a, c, g, or t
  misc_feature (345)..(345): n is a, c, g, or t
  misc_feature (361)..(361): n is a, c, g, or t
  misc_feature (440)..(440): n is a, c, g, or t
  Coding DNA Sequence Number=SeqID_1952
gcgccagcgatgtgttcgtatcatgattcgttttcgcatatgctatantgttctcaatgatcattcatctcgcgacatatgtcgcggtagctgagatggctcagtggcttggatcgcatgaggtagtcgcgataataagncagcgggtatgcacagctactgacgagcacgaattacttatgtatatgttcggctgcagatgtcacagtgcgtggtcacaatctgtaggaccgcagcggtgttgagtttagacgtgatcttaggtactcggtcgatagcaagtcgattgtctcagtctcacaggcacaanattgtatgatgcgtcggctntcantgcgtccgcanacaccactcgctcggnaggtggaggcgaggtgggggggagcgcgagagctagcaaacgggacgcgaagatgggaaagcgagagagtataccgcgnggaggcggagcgagtggctagtcatggagaaattagcactgacggaacaaccca

SEQ ID NO: 11732 - DNA, 426 bp, Glycine max
  Coding DNA Sequence Number=SeqID_1953
tcttcattttgagaggcagtgccgtggttttcttcaccagctctactatttcagttacaccttcatctccaaaacgctcatcagattcctctaagatctgtgtaatgaaagtgaacaaactgatttcagtttcgcgagggtagtagctattgaaatagacaaaatcttttgaagcatattagtagcctcctagatcaaagtctgactaaaatgggagaaatacataacaagactctttgcagaaattttttatcaaacaaaacacagcacactgattccttgcgtcaatagttacgcattgctattttttaatgaacattcaaacttatgatgtttcccgactggataggcgttccctctgtacgttctgatcaatgaccggcacaaacaccttaaggagtgacactccgtaaagcgaaggttgtt

SEQ ID NO: 11733 - DNA, 330 bp, Glycine max
  Coding DNA Sequence Number=SeqID_1954
ctgatttcggaaacccaaccataattggtggattgagatactgaatataaccaacgatgccatggaagacttatggactatgcctttgatgtcataatccactatggcggcattaaatctgatgaagattacccataccgggatgtcgatggtatatgcaacgcatatatgaaaaatgccctactccattctatcgatgactaccacaatgtgcctgccaataatgaaatgtccttgaaaaacgccggtgcaaatcagaccgcgaacgatgctattcaacgagggggcatgaaactccaattatacgcatctggcgtattcactgtgaga

SEQ ID NO: 11734 - DNA, 309 bp, Glycine max
  misc_feature (105)..(105): n is a, c, g, or t
  misc_feature (153)..(153): n is a, c, g, or t
  misc_feature (232)..(232): n is a, c, g, or t
  misc_feature (241)..(241): n is a, c, g, or t
  misc_feature (247)..(248): n is a, c, g, or t
  misc_feature (251)..(251): n is a, c, g, or t
  misc_feature (265)..(265): n is a, c, g, or t
  Coding DNA Sequence Number=SeqID_1955
ttttttgccgccgactagtacccagaggcaccagcaaaaggggaggctgcaccggcccccttcaccccaccagaacttgacccaaacaccccttccccgatcttngggggcagaacaagagggctcctgcgcaaggcacaggtggaggagttntatgtcattacgtgggacttacccaaagaacagatctttgaaatgcccactgggcggcgccgtttcatgagggagggtnctaaccttntaaagnnggncaggaaggagcagngcttgggtcttgggactaggctcagggccaagtaccagaaccag

SEQ ID NO: 11735 - DNA, 138 bp, Glycine max
  Coding DNA Sequence Number=SeqID_1956
atcagcataaaaacgcaaaccctagtttttattttttctctctctagattaaacgagagagagagatacttttatctctttctcgctccttcgctgctgttgtttcgtccaagttgcactgcttgacctcaaaccctt

SEQ ID NO: 11736 - DNA, 570 bp, Glycine max
  Coding DNA Sequence Number=SeqID_1957
actacttgtgtcgttggctaattcaaatgtctctctaccaaattgttggggaagaagaaaagcaccaacaccactatcgccgcaacggtatgattggtttgtaagtgtgtgtgtatgcatggcagcatgtcgcggtggtttttttcttctattttttgttttgatttcaatattttttagtcactagatccaaataattctattgatgcatttggtacgtttaaaagagatttacaaacttgatttttttagatgagaacacattggatacatgacatcacattacaaatcctctctttgttttttttattcgttatttaactcatttttgcaaacaatttgtttcgtcgcgcttacttttttgtttttattgttgttgttgttgttgttgctgttttgtgctaacattctcatataaactacatcagtataagatatatacttgtttgtttgtttttttttcattatttatttatttttattattattattactttcttgttgtttgtgtgtatgtgtgtgtgtgtttgtttgtttcattgaatttttgcgcaaagagtttcatttttc

SEQ ID NO: 11737 - DNA, 407 bp, Glycine max
  misc_feature (80)..(80): n is a, c, g, or t
  misc_feature (89)..(89): n is a, c, g, or t
  misc_feature (148)..(148): n is a, c, g, or t
  misc_feature (150)..(150): n is a, c, g, or t
  misc_feature (176)..(176): n is a, c, g, or t
  misc_feature (207)..(207): n is a, c, g, or t
  misc_feature (215)..(215): n is a, c, g, or t
  misc_feature (280)..(280): n is a, c, g, or t
  misc_feature (282)..(282): n is a, c, g, or t
  misc_feature (324)..(324): n is a, c, g, or t
  misc_feature (330)..(330): n is a, c, g, or t
  misc_feature (337)..(337): n is a, c, g, or t
  Coding DNA Sequence Number=SeqID_1958
caagtaacaacacaatcggaacaattatcaacaatattccaccgcatggtgagcgttcgtactcacactcagtaatagantatatttanttagttatcaccaactatctaaaatagtcaattcgcgaggatgtaggtgatgaaagtantngaagagagaatgtctctactctccanacgcatcgcactacagcctagctcacatttnatgcaatncgcgcacgcgcgtgagcgaggcgacctatcgtctctcgtacctcagttctgtgtttcggtctcgngntgtcgccgctcaccactacatattgtgtgtaatatgacagtnattcgnttgtgtncataccacacatcacacatcgcatcagcaagacgtgctcgccgcttagatgtgcgtgtgcatgtgtaagt

SEQ ID NO: 11738 - DNA, 544 bp, Glycine max
  misc_feature (80)..(80): n is a, c, g, or t
  misc_feature (131)..(131): n is a, c, g, or t
  misc_feature (185)..(185): n is a, c, g, or t
  misc_feature (252)..(252): n is a, c, g, or t
  misc_feature (280)..(280): n is a, c, g, or t
  misc_feature (287)..(287): n is a, c, g, or t
  misc_feature (330)..(330): n is a, c, g, or t
  misc_feature (341)..(341): n is a, c, g, or t
  misc_feature (369)..(369): n is a, c, g, or t
  misc_feature (387)..(387): n is a, c, g, or t
  misc_feature (389)..(389): n is a, c, g, or t
  misc_feature (429)..(429): n is a, c, g, or t
  misc_feature (442)..(442): n is a, c, g, or t
  misc_feature (450)..(450): n is a, c, g, or t
  misc_feature (478)..(478): n is a, c, g, or t
  misc_feature (489)..(489): n is a, c, g, or t
  misc_feature (504)..(504): n is a, c, g, or t
  Coding DNA Sequence Number=SeqID_1959
ggtcgtccacgaccatgcatatcgtgctgcgtggcgcggagcctcactactgtgcagtgcgtgctgatgttgaacactcngctcacgtcggagtcagcgacacgcataataatgtgaaaaattacgatacnatgtataacagcgtacgcgcgatcgtatcacatatgatcgatgatcatggcttncatcattatcgttcgtcttatccgtcgatcctatgtaactatcatactacatacattatcgtgaccncacattcacatcaacgaccactgcatgntggttcnctgtgcgatcatcatgtgcgtgtcgatcgcgatcgcccgagtncggctacgaanagcatatgaactacgtcaacgacgcagngctatctactgcgacgantnctgtcgagtgacacgaggagtcatgaacgatggacgcttncgacagaagtganatattagnatgtgattgatatcacttactctaaacngtctgtgtgtnagcatcgttaccacntttcgtcgcgacgtcgccacgtactcaacgtcgatcatat

SEQ ID NO: 11739 - DNA, 585 bp, Glycine max
  misc_feature (42)..(42): n is a, c, g, or t
  misc_feature (49)..(49): n is a, c, g, or t
  misc_feature (65)..(65): n is a, c, g, or t
  misc_feature (134)..(134): n is a, c, g, or t
  misc_feature (167)..(167): n is a, c, g, or t
  misc_feature (185)..(185): n is a, c, g, or t
  misc_feature (234)..(234): n is a, c, g, or t
  misc_feature (264)..(264): n is a, c, g, or t
  misc_feature (491)..(491): n is a, c, g, or t
  misc_feature (493)..(493): n is a, c, g, or t
  misc_feature (524)..(524): n is a, c, g, or t
  Coding DNA Sequence Number=SeqID_1960
catgcgcagcgtgagcgtgaactgtgtagacggacgcgaccnagctgtncgcagatacgctcggntgctatgtacactactgtgtgccgcgtatctagcgcacgtgacctatgctccatcgtcatgattcatcngctatacgcactgagtctatgagtggcactgtnctgcttactatctatgcngtattgcacttatctcactcgtcttatctgttgcgctctccctctgtcncgactaacgcatcgtgcggtgagcatgtcncttggtatatacatagcgactagctgcgatgtattcgtattgattactgatatgtactctgctcgtctagcgacatcatgatgtatcatcactcgtactctgtgagtccagatgtatagcgtcaatagtgtctcgcgtagcaggactattcacgtatgtgatctcacgtgtacactcgctctcgactattatgcgtcggatgatctctactctatctccggcgtctncnatccattcactctctaggttagttcatttantgtcagacttagcatcacttctctcgtagcgaccgcacagctctgcgtgactgtatgtgtc

SEQ ID NO: 11740 - DNA, 171 bp, Glycine max
  Coding DNA Sequence Number=SeqID_1961
ttctatcatactgcaaaggaaggccatgtccctgtggctttcagatactctataggcccttgaactttaactgatgacgcgactatgactacttcttatacatgaagagtctcgctgcatcgttggtggactgatatctccttggtaccctattatgatgtcaggtgtcca

SEQ ID NO: 11741 - DNA, 326 bp, Glycine max
  misc_feature (81)..(81): n is a, c, g, or t
  misc_feature (83)..(83): n is a, c, g, or t
  misc_feature (197)..(197): n is a, c, g, or t
  misc_feature (287)..(287): n is a, c, g, or t
  Coding DNA Sequence Number=SeqID_1962
ttctttcaacttctctgagctgtctttcaagttgatcaacatttttttgtaactcatctctctccatctccaaatcttctngngctctttctgcattatcgacatcctccttcaactcatcaataacagatctgagttcttgaatctccttttgattcaactccaaatcctctccaaacttcactctttcttcttgngactttaagctcaaatcctcatatgcctttcttgctttttccaatgcctttgacttgccatccaattcgctcttcaattctccaagttgnccttccaattccttaatctcctgctcgtgttcttcgttt

SEQ ID NO: 11742 - DNA, 564 bp, Glycine max
  misc_feature (429)..(429): n is a, c, g, or t
  Coding DNA Sequence Number=SeqID_1963
gatgcgcactgagatgatgcaccgaggtggtagcgagtgtacaatatgttgtcaaagacactctctcgttacgcgacgccactggtatatattgatcgcgacgggcggagcggtatgaggagcgtgcatcacgccacacgctccgctgtgctgatgtgtattgtgtgcgcgctgaggaggctacgcagcacggtgtgttgcgacggcagcacacgcgcgcgctgcgttttccgcgtgtggcgcgcggattacgcggagtgatgtgtcgcgcagctctgagtacacgagctctttaactcacctacaacacgatcatcgagataagacgcgacgtgatgaatacgagcacactgcgtagctaatatgagaggccggttgcgataggcgacgatgtgcatatagctaatcgctgcacaatcagtcatcctntcacacacgacatactagatattaaaataggtatataggagatacacacattgtatgaacgaccgacacagaataatatggatgacgtgctgcacaccgtaagtacgcttgatccgtcggagtggacatacctgt

SEQ ID NO: 11743 - DNA, 437 bp, Glycine max
  Coding DNA Sequence Number=SeqID_1964
gtcttctaaatagcccatttgccaatatccattgtatacaagatttttgagagtgccacgagcactaggagctaaagtagttagcaaaccagacactccagcaactactcctgcaggtgtactagttacaaataccaacccaagtacagttgcacttgttcctagtgcatcttttagcttactgtaatcttttttattaaagcccttatcataaatattacgctgagcagatgtcatttttctaacctggcttaaattgagagtaacccttgcagcatattctgaagaattaatattacctaaagcatgaacttgtccaacctgattagcagtcttaaatgattgaatttgtgctgataaatcagtttttgcttcgactacttgtttctttggtactttttgttcagctgctgatgcaacttcactaaacccagaaa

SEQ ID NO: 11744 - DNA, 556 bp, Glycine max
  misc_feature (52)..(52): n is a, c, g, or t
  misc_feature (247)..(247): n is a, c, g, or t
  misc_feature (331)..(331): n is a, c, g, or t
  Coding DNA Sequence Number=SeqID_1965
gtagactatggactgcaaccatggagttaaatttccagacaactagcacgcnatcttactcgcagcatggcaagtatatgaagagcagaaccgcccatatcagacacgcatagagcacgcacacgataacacatacgcgaacacgacactgtattcgcgatcacccactatacaatcgagagtagataaggagacaagaaagtaactgtggtcagatggtgactgagtaagcaaatcagggcgagcnaaaaaactgaaatcactatacgccgtacatcacacctccatattgaggatgggtgtgttgtcggctgtccgccacagccgcgcncactcaacagcggctatctctatcgcgagatccttcatctctcacgtcggcaccggcgcgttactcctacacctcgtcttcacctccgccaccacgacgcaagcaccgacgcacacaccacatccgcctcgcccgaacacacaacaataaaaatactacactatagttctcctatcggtgtatcgatacgagagagaagtgaacatcacacgaagacagccgaag

SEQ ID NO: 11745 - DNA, 480 bp, Glycine max
  misc_feature (26)..(26): n is a, c, g, or t
  misc_feature (42)..(42): n is a, c, g, or t
  misc_feature (67)..(67): n is a, c, g, or t
  misc_feature (94)..(94): n is a, c, g, or t
  misc_feature (345)..(345): n is a, c, g, or t
  misc_feature (347)..(347): n is a, c, g, or t
  misc_feature (358)..(358): n is a, c, g, or t
  misc_feature (409)..(409): n is a, c, g, or t
  misc_feature (450)..(450): n is a, c, g, or t
  misc_feature (454)..(454): n is a, c, g, or t
  Coding DNA Sequence Number=SeqID_1966
gtccatctcttcttacgtgtagtgtnatattgtcaatctatnatacttgggtgtctgtatcatcatntctctctctcttacttgtctgtcactncttgtactacatcttagtcgagcgctgtatttgtctctattatatcttgtttcgcctatcattctcttcgtggtatgttgatgtgcgtgtgtgtttttactatatgtgcgcgtatagttactactcctacttactccccacctctcctgcgtgtgtgtatatcgcttacgctgtgctagtgtcggggcgtggcttcgtatcgagacgcggtagcgagatgcagcgttacgtgcgtagggagggaggcgggngngatcttcatgnttcatatatatatataatatatgagagactgttatgaccttgctgcttatnatatctcggcgcctactcgtgtccgttgagggctggagtanatantgatagtctattgttgtcgagagagg

SEQ ID NO: 11746 - DNA, 599 bp, Glycine max
  Coding DNA Sequence Number=SeqID_1967
ctcatctttcttactctatctattctatcgtcctcttctattccgccactctcctctaatcccttctccacctgtatcttcattctccatgtccactctgcgtctctgcctctctattacatcttctgccactcctgttcgccacttttatttgacttcacaacctcttccttccctcctactctcctccctcctctcttaccctcttctcctctctacgtggtgtgtaatacttatacattatattttctattcaatgggatttattactcactcgctcatggctcatcatctctcttcaactcgggcgttaatttggcggggcacacataaagacaaataaaaacaaaacacatgtggcgaaacggtgtgaataacaagtgtgaaccacatgtgtggggtgggtggggggtataacatatcggtgttgtcaagacaccctccacactctgccctcagtccttcataatctttgcttgaattattaacactcatatgttccttctattctgttctcataactgtcaacaactactccacatctcgcaccgtgcacttgttttcatctgcgccaacactcgtgtcccacatgggtggtt

SEQ ID NO: 11747 - DNA, 540 bp, Glycine max
  Coding DNA Sequence Number=SeqID_1968
gtgtctgaattctcaacgggtcggctttttgagggctttcaggaagggccggtcaccttctctcccacctacaagtaccagccaaactctgatcagtactactggtgctttgaagcagcgcgaggggagaagaagcgtgctcccgcatggtgtgatcgcattctttggcgcggcaagggcctgaaacaaatccaatatgggacctgcgactacaagttgtcagaccaccggccggtgagagcgggtttcattgccgagtgcaggatcaggggagatgcggaggactctattggtggcttcatgcgctgaactctgcagccgatggtcgagatggaagttatgcaccatccaaccagaggctctgccgtccgatctaaaatatggaacaatcacggacatagcgaaaccatgatgaattttgacgagatyttgagtgttcgttgacgaccagtgcgcaattgggaagtagactagtctgatgttcttatcagtgacgctgtataaattttttgttctcatcctcatctctaaaacgtctta

SEQ ID NO: 11748 - DNA, 594 bp, Glycine max
  Coding DNA Sequence Number=SeqID_1969
aactgaggccagaaatagagagatcagctgcagcaaaatgatgtttagggtggaagaaggtctatcacattggaacatatggtgttagaagtggtattgagttttctatagttggatgatatacacaacaatgtacaagcactagagactctagttcagaatacacaaactaaaatttaatcacatgtaatgtatttggaaaaattatagttgggctgtgtttggacatgattttggatttcaagttagtttagagaaagtggaaaaaattaaccattgaatcagtaaactgtaatctgcacatattaatatattattagtatgattcttgaagctaaaaaaaaaaaaaaaaaaaaaaaaaaaaaaaaaaaaaaaaaaaaaaaaaaaaaaaaaaaaaaaaaaaaaaaaaaaaaaaaaaaaaaaaaaaaaaaaaaaaaaaaaaaaaaaaaaaagggggggcccgccctcttgggggtcttttttccccggggatttaatttccggaccgggcccctggaggggcacaccctcttccctttttgggggtcgtttttaagagctgggcggaaatctgggcccaaaggttttgccttg

SEQ ID NO: 11749 - DNA, 243 bp, Glycine max
  Coding DNA Sequence Number=SeqID_1970
tcctctctggttcgaattcgagcctgcgagctcgcgcgatcatcgttgccccgccctcgttgacgcgtccaccggcctcctcggcgtgcgggggcacgtcctggaggttcgtcgtgttcgtccatgtccgttcagagcatcggagcaaggccggaagctgcgtggacggcgtcgtcgacctcttcttcctccgcccgtcgtccaccttgtcgtcgccgaccaagcacgcgagctgggacggcc

SEQ ID NO: 11750 - DNA, 263 bp, Glycine max
  Coding DNA Sequence Number=SeqID_1971
gaaccggatcgggtccaagctccgagaactggggtgcaacgagcacggaatacatccgacggggaagtacgtctgaaactcacatctgcaactcaagggcgtgaacgtctactacaatgaagcctcgtgcgggcccttcgtgacactcgcggggctgatggacctgaaacccgaaacattttttcccctacccaccgggggggaggggcagaccttccgcaccgacaacgtctaattgggacagtaaggagccgaccccaact

SEQ ID NO: 11751 - DNA, 556 bp, Glycine max
  Coding DNA Sequence Number=SeqID_1972
ttatcactaaagctcaatacaatgcaagacagaccaatcaaagcagctcataactatcgcaatgaagaagaagataactacgatgattatgatagagaagtagaagaagaaaaaggagatgatgaagaaaaaggtccatcattaaatttccaagaagatgaaggtgttgttggtggtcaagaaccagaattagaaaaggaagttgagaattatatgcatagaggagaatatcaagatgcttataactctttaaaaagattggagaaattagataatacgagaccagaaacttattcaaatatggcaaagtgtcaaacagaattaaagttgtttattcaagctataaagagtcttcagtgtgcagtcgatttagatcctaaatattctagctcaaactcctccaaaaaacattataaagacaataaagttatcttgcaaaattcgaatgacatctagataaatgactgtcgaattcggttttatttatttcacacaaaaaattttttttaaatgatcagatgattattatttcagtgatgtatttttttcgtaccct

SEQ ID NO: 11752 - DNA, 440 bp, Glycine max
  misc_feature (29)..(29): n is a, c, g, or t
  misc_feature (40)..(40): n is a, c, g, or t
  misc_feature (178)..(178): n is a, c, g, or t
  misc_feature (182)..(182): n is a, c, g, or t
  misc_feature (265)..(265): n is a, c, g, or t
  misc_feature (376)..(376): n is a, c, g, or t
  misc_feature (397)..(397): n is a, c, g, or t
  misc_feature (415)..(415): n is a, c, g, or t
  Coding DNA Sequence Number=SeqID_1973
tcaacatgaccagcagcgactcttactgnctcctactccnatcatgcgttgcgtgtatgcgtcgtccttcaacaatatacatgctaatcactccgtctgtcatattatacatcaccgcacgcaccgatctgacgcctacgcgctggcagtatcatgtgcgtagtgcttcctcgcgagnacanacagcgtatacgctcgcgtaggcgtacgatcagttatggaacacactactcgctcgctacgtcgacggcggctaactatctcncgtccatcgtcgctgtcatactttgtcatgttttcatctggcgcgcgtgatgacgcgatgacggcatacggcgtgcgctgcagctctactacagcattcagttcgtatacngtcgagctgacggccgactgntgtgagtatatctatagntgacgactcgtgtctgtgctgcgtc

SEQ ID NO: 11753 - DNA, 451 bp, Glycine max
  misc_feature (43)..(43): n is a, c, g, or t
  misc_feature (79)..(79): n is a, c, g, or t
  misc_feature (103)..(103): n is a, c, g, or t
  misc_feature (118)..(118): n is a, c, g, or t
  misc_feature (145)..(145): n is a, c, g, or t
  misc_feature (153)..(153): n is a, c, g, or t
  misc_feature (195)..(195): n is a, c, g, or t
  misc_feature (216)..(216): n is a, c, g, or t
  misc_feature (220)..(220): n is a, c, g, or t
  misc_feature (252)..(253): n is a, c, g, or t
  misc_feature (277)..(277): n is a, c, g, or t
  misc_feature (282)..(282): n is a, c, g, or t
  misc_feature (290)..(290): n is a, c, g, or t
  misc_feature (316)..(316): n is a, c, g, or t
  misc_feature (319)..(319): n is a, c, g, or t
  misc_feature (324)..(324): n is a, c, g, or t
  misc_feature (332)..(332): n is a, c, g, or t
  misc_feature (380)..(380): n is a, c, g, or t
  misc_feature (409)..(409): n is a, c, g, or t
  Coding DNA Sequence Number=SeqID_1974
tgacgctacacactacttcggagatcacgtgacgtcttgcgancgatgcgcgtcgagagtagatgttacgtcgacgtcngtgagacgactcatcgatcgtctnatgctagatatgctngtcgtctgtgtacaccgcgtatccatnaatcacancgacactggcgacacgcgtatgtcaacggcagatgtgtgaantgtcgctacggtccgatgtangcgngcatcactatgagcgctactgcgtctagcagnntcgtcgcgcgtcgtgacgacgtcngacgngctgtcgntgcagacgatctgcttgtgctcatgnagntgtantagtgtangtcgtgagcatgagtagcatgatatatgccatcgtggacgcagacgcnggatggctgatggtgctcacgcatgcccngcatgtgacgactgtagtacgcactgagtacgatcgcgcagc

SEQ ID NO: 11754 - DNA, 302 bp, Glycine max
  Coding DNA Sequence Number=SeqID_1975
tggtgcagcaccagccgacgcagtacccgacgtcggaggagctgagcatcggccagatcaagttcaagaccgtcgacctcggcggtcacgagatcgctcgacgggtctggccggactactaggcaagggtggatgctgtactatacttggtagagtgctatgacaaggagcggtttactgaatcaaaaaaggagcttgatggtctcctttctgatgagtccttgggcaatgccccatttctcatacttggcaataagagtgggcttccatatggcctatctgacgaagagctgcggcatcgc

SEQ ID NO: 11755 - DNA, 531 bp, Glycine max
  misc_feature (445)..(445): n is a, c, g, or t
  Coding DNA Sequence Number=SeqID_1976
ctctatttcaatattcgggcgccaatatatagaccgccgcggtaaagagagagaagcgcagcgttacgtggacaactcgatattcctacagaattctattattctttattctcggtcgccccgtatgcttggcgacgaggtgatatatagcaccgtagttgatacaccaccactatctctcgtgatgtggccgcgggcgcgcgcgccgcccgcgggggtcgcgttcaaccgagcggatctaccaccacggcgcgaataacgcgtcggcaacaataagtaacatccgcgcctgcatgtcggtatctattactacagtaggcgattgttgtagcggagagagcggtgtcaacgtattatattttcagtgcgcaagtatacatatccgtacggctagttccggtgtagagtgctggtggcgctgcgacgcctcagctgaggcgtgatntgcgcccgctgctacacctatcttctaccaccctaatggtgatctcaacctaatacactagaatcaggcgttatcgatgcgccgat

SEQ ID NO: 11756 - DNA, 552 bp, Glycine max
  misc_feature (443)..(444): n is a, c, g, or t
  Coding DNA Sequence Number=SeqID_1977
gtaagaggaccgagagatagcatattggtcgacacattatatttgggatcaatcttataagtgttggttacactcgcgcccgcgccgcacacggaaagaaggaagggtgtgttttttttttttttttttgtttaaaaacaaaaaaaacaaccaccccgctcgtggggggggggtggggagaaagaaaaggtttgggtgtgtgggggggggggggggggtccgtcctctctttcctatttggttcaccaacgcgcccggggtttttttttttttttttttccgccgcgcgcgcttttctttttttataaaaaaaaaaaaaaaaaagacaagtggggggggggttatttttttttttttttgggggggggggttcttctctcccggaaggggggtgggggttccccccccccccggggggggcgctgtgttaaaaaacaaacacnnacggcaaaaggaactccgaaaggactctctctctctctctgtgttgagaaaacgaaaagggtaacggagatcaaagaagagaagagagggatccaaaaggcttttgct

SEQ ID NO: 11757 - DNA, 378 bp, Glycine max
  Coding DNA Sequence Number=SeqID_1978
aaactccaatcattctgcgactcttcaaaccaactctttgtgactcacattcatccaactctctctagctatgtcaacatccgagaacaaagtggagatagtcgacagaggccacaaggaggaggaagaaaaagaagaaggcaaaggaggcttcctcgacaaggtcaaagacttcatccacgacatcggcgaaaagatcgaaggaaccatcggcttcggcaaaccaaccgccgacgtctccgccatccacatccccaagatcaacctcgagagagccgacatcgtggtcgacgtcctcgtcaagaaccccaaccctgtccccatccctctcatcgacatcgactacctcgtcgagagcgacgggcgaaagctcgtctc

SEQ ID NO: 11758 - DNA, 420 bp, Glycine max
  Coding DNA Sequence Number=SeqID_1979
ggaaccgcgcgtacggcacgtacctctacgccgacgacgacggcgcgcgcgtcatcctgaagccgcagcgcggctccctgcaaacggcgtggcaggtgcaccgggtatggcgccacgaccgcatctacatcctcctccacagcgccgcctacggccggtacctcgccgtctcgcgtgtcacgattgagggtcgacacccgtcaccatgcgaacctcacgggtccagggcgtcctacgacaccccgaaagcaggacggacatacctcctggggcgggcttggcctatggtgagacaaacgcaccaccgcccgtcaaggcttccaaaagccttctcccacggtctttcacccgccgcccagccaaccccaaaaaaaaccacaccatttcctattagaaagaacgagcattctcgagccggaa

SEQ ID NO: 11759 - DNA, 327 bp, Glycine max
  Coding DNA Sequence Number=SeqID_1980
agaaggtctccgtgggaacagcccgaggccaagaaggaggacctcgccgatctccattaacacgccctcacctcccactcccccataccttccgtcacacaccctctcccctccgctctcgccgtggatgaccccatctttggaacctacccgcccacttaattaaggacccggtgggcccccaaaccgtaaaaggagagaataaaaccgatcctatccagggccgatgtcctatataacttgtacccatacacccctaatcaacgtttttttttagcgtccgtggtgctctttacaacactttaaactctgtaatccctaaaggtg

SEQ ID NO: 11760 - DNA, 581 bp, Glycine max
  misc_feature (150)..(150): n is a, c, g, or t
  misc_feature (369)..(369): n is a, c, g, or t
  misc_feature (413)..(413): n is a, c, g, or t
  misc_feature (490)..(490): n is a, c, g, or t
  misc_feature (523)..(523): n is a, c, g, or t
  Coding DNA Sequence Number=SeqID_1981
atatataacgtcagggacaccccaccacccttcttatgtttgatcttaacagtcaatgctaagttactagctgtgtatcgtattgttcttgtgaggtgctcgataatgcgcgcgccgcacgccagccgacgccgagccaagccccagccnaatactaaacagatctcgtgcagtgcactctcacttgaccgagtatgatatctgaatgtgaagccgccactgaccctatgagtcgagcttcgtctttgtagctgtgttggtcttatctctaatctcatttcgcccacactacatgttctactgtcatcgcctgtggcgtttattgtggatctcatacttgtaaaggagatggtgtgatgatgctagtgnacagtgtatagtatcatgtgtgccgttgcgcgcggcactggcgngactgcctagcgcgcccgtgcacgactccttgtgattctgtctctatctgctctttcccactgtccacgatgcgagngtggcgcatgtcgcggagcactttgctctgtgnactcgtgtcatgtcatctctctgctctagtctattctgcatatgatcgcatgcgtcgt

SEQ ID NO: 11761 - DNA, 567 bp, Glycine max
  misc_feature (160)..(160): n is a, c, g, or t
  misc_feature (268)..(268): n is a, c, g, or t
  misc_feature (349)..(349): n is a, c, g, or t
  misc_feature (371)..(371): n is a, c, g, or t
  misc_feature (516)..(516): n is a, c, g, or t
  Coding DNA Sequence Number=SeqID_1982
tcatggtgttcgtcgctatgtgatctatgtgcatccccgacgatcattacgtgcgtgcgccgtcctagacgccacctaatcttgtgtccagatgtgtgtgtgcggtgcacatgttgcatcttccgcttctactctattatcatttcacatcacatttacnctgccgctgctgtccgccctcttctatgtgctcatgccgcctcgtgatgcaccgagcagtacatagttagatttctgatagcactgcgtccctgctgactactgccgncttactgacatgcctcgacgttgattcaccttattactatcggcacttgctgtccgctcgtcttcgcatgacgcgagatgnatgatctgtgtctgcgctctcncgtcgatttgcctattcatcgcacgacctatcagcttaagataggttaggtgtaggcacgaagacgtctcacacacgctcatgtgcacatcacgactaacgctctcaccatccgtcgttcatcctgcctgcttctatctatcggntaggttgatcactatatcctattcgcacttcgcatgtgtgactccgttaca

SEQ ID NO: 11762 - DNA, 581 bp, Glycine max
  misc_feature (128)..(128): n is a, c, g, or t
  misc_feature (350)..(350): n is a, c, g, or t
  misc_feature (418)..(418): n is a, c, g, or t
  Coding DNA Sequence Number=SeqID_1983
cagcactactccgtagagccaagaacgtagccaccgtcacttctggatgtgaatagtatgcgcgcgtgggcgcgcgaggagagtatgaagtgcgactatacacactgagtcgagaactacttacacgntcatgcgcgctcgccagcgtgtgcgcgcagctctatgccacgtacgacgctcgacaaagtcagcgcgtgtagtctggtggaggagagacgtgcgcagagtgggcgggcgcatgccgctacaacacctcctctcgtacaagactcactcacactagagtctatgagtacatagtgagaatatgtgctcgacgtcctttacagcgtgatgcccgctaataccanaaacatcgcagcaccaagttaaatcattaacgcggctggtggtcgtgaacacagcactgacaaaccgngatagacgcggtagctgcgtcagaagcgaagtagcaagaagaacgaagaacgaagtgaacccgaagaggatggtaggatgtcggatgacagtacaagacgtcacgatcggtccgtggagcgattgcaagctgctgcgagattgtttcgttcagcttcgagtga

SEQ ID NO: 11763 - DNA, 546 bp, Glycine max
  misc_feature (178)..(178): n is a, c, g, or t
  misc_feature (211)..(211): n is a, c, g, or t
  misc_feature (245)..(245): n is a, c, g, or t
  misc_feature (269)..(269): n is a, c, g, or t
  misc_feature (295)..(295): n is a, c, g, or t
  misc_feature (332)..(332): n is a, c, g, or t
  misc_feature (344)..(344): n is a, c, g, or t
  misc_feature (393)..(393): n is a, c, g, or t
  misc_feature (395)..(395): n is a, c, g, or t
  misc_feature (505)..(505): n is a, c, g, or t
  Coding DNA Sequence Number=SeqID_1984
gacaacgtagctagatagcgcgtctagaatacagtagtgagcatgatgcagatgagcgtgagtcgtcgtgctagtgtcgacagtagttgcgcggttcgcgtcgctcttgtcctcatctcactactgctcccatacgagctgactatgacgtcgacgccgggatgggtgcgagcacagncacgaagaagatagtataaacatatatatagtnaccacgtgcgcgcgaccctgtcgagcgcatcacncaagggtgacgcgaagctcactantagacagaagcacgagaagacacacngtgatctagatataagatggagtcgtcgtacaatcancagctagagagngcatgcatgagtagcgccgagagacagcatcacttgagtagcgcgcgcnanatgagtgacacttactacactcatatacatcaatacatatgacggcgagacagagattacatatacactaatatatatagtactctatgcctgcgagcgctcacctacgnctcttcatctcgtgcaaacatcagagtacttcaggcgacta

SEQ ID NO: 11764 - DNA, 515 bp, Glycine max
  misc_feature (377)..(377): n is a, c, g, or t
  misc_feature (487)..(487): n is a, c, g, or t
  Coding DNA Sequence Number=SeqID_1985
ttctgcacgaaattgcaccccatattgcgcctctgcgaataatcataaggcccctcccttggtccccgacaccacggtgagcaaccacccccatctctaagttggacagcacaatcataccgaacattgtgcacccacaacctcactcacgaattccacctcatctcctcgcctgcgaaggccacaatgccacctatctaatcgcaacggacctctctggcgcactacaaacttcttctcgcaacacactcggccaacggactcactcatctgggccaaactactccccatatcactctaatatacgagcagacacagtacataatataacaacaggcgaatatcaaatttcgccctcacaacaacccgggcactanacggctcctccaacaataaagactcttccttcataaacatacactctctccccattcgcgaccacactccctctctccacactaccaacgcgtcccacatctgcgatcanacagacgccatgcgaaacaatactctac

SEQ ID NO: 11765 - DNA, 599 bp, Glycine max
  misc_feature (55)..(55): n is a, c, g, or t
  misc_feature (100)..(100): n is a, c, g, or t
  misc_feature (220)..(220): n is a, c, g, or t
  misc_feature (466)..(466): n is a, c, g, or t
  Coding DNA Sequence Number=SeqID_1986
gagctatgtgtactgcttactcattgctggtctgatattgatttctcactctggngtgggcgtgcgtgtcgcacccgtcgtcgtggtattaccacctcgncgccgtgataggaaacgtcacaaagcaatcactctaggatatttattgtgactaccctgcctgtccttcacacgtcgccgctcgtgtgtcggtgtgcgtagtgtggcgagctcgcggganaccacactcttcccgtacgaccccgcgagagaccgctcgcgctctactcctcgcacactcacatatagcgcgcctaacacagctcaagctgagctcgagtgtcggcccactcattatctctcacactcgtatccacgtcccaaccgcctctacgtacacacacaactcgcgcgtcgcagatgatctatatctatcgcgcgtcgccgcgcgttctcctctcttctaattcgcgcgcggctcctgggngcgttgcgcgtcgcgcgcgcgcgcgcggtgtccgttatagatagacatatccactcagactgtcgactgacgcctactaagttgacgctctacatagtgctgttccgagtctatatatactgctgtgtgtcta

SEQ ID NO: 11766 - DNA, 465 bp, Glycine max
  Coding DNA Sequence Number=SeqID_1987
ataaaggttctgaggcagcaacaaaaaaaaagctctttaatatagaaatatttatattattacaatatcaactgctaaactatgcctttttacttcttcttcttacccttcttctttttcttctttccttgttgaatccttgggaatggcactctcaattcattatcagctggattactaggcgcaattattgtgcggacaaacttcacatcaggataagtctgacgaagctcaactaggtaaggatctgatatcttatccgtaaagtttatcaagcagatcttaagcttagataatgatttgcagatcatatttattccagtctctcctacaggcacaaaaccattcatgtccaagatctccaagtttggacaagcattgcagaattttatcacagcgccttcagaattgatcttggttgaactcattctaaactcaactaagtgcttgaacccttcatctttc

SEQ ID NO: 11767 - DNA, 192 bp, Glycine max
  misc_feature (72)..(73): n is a, c, g, or t
  misc_feature (101)..(101): n is a, c, g, or t
  misc_feature (144)..(144): n is a, c, g, or t
  misc_feature (157)..(157): n is a, c, g, or t
  misc_feature (164)..(164): n is a, c, g, or t
  Coding DNA Sequence Number=SeqID_1988
gattgagtcttttacgtttgattggctaaacatatcatgaaacaaacaagcacccagtagaaatggttttcnnccagtgaaagactggaaagtccattttnaggcacatggaatcccaaaacatggatagagtaaatatccccngggccagctccgnaaataanatcttattctggaatactctggggggcc

SEQ ID NO: 11768 - DNA, 500 bp, Glycine max
  misc_feature (338)..(338): n is a, c, g, or t
  Coding DNA Sequence Number=SeqID_1989
cgcggcgggcatagagacagtatatagacagatgaagcgacgtgctgcgccagcacgatgcgcaccgacgcctttgccgggagagcggctctagagcagagcactcgcggatgttctctgcggagatggtgtgctacggtactccgacattggccgccatgcgagggcaagagtatggggtgggttctataaagaggaagggtaccccgcgctgctcgttgcgggtctagacaacaacacaaaagcactaaaatgtcagacacagagggatagagagcggtcgcctcactgatcacagagtgcttctgtgacatcctctcctcgctctagtttggtancacgtctatcgacagaggttgctgagcccgaggcgtcgcgcagcaggggcgcgcacgaaggagaagagagatagaagaggagccgaggaagtaatcacaaggcggggtgtggcgagaacgcagaataagacggcggggagttgcctccctgggcgcgtattt

SEQ ID NO: 11769 - DNA, 209 bp, Glycine max
  Coding DNA Sequence Number=SeqID_1990
gaatgttgaattctgatccgttgaaggtgtgcataataaatgtgaaaatgccaaagtctaacacggattggaatttagcacaaggtagtcctgagtctaaatgacagtgctgctagacttcggtgtacttaacaagaataacttcaggacttaccatagtttccctgatgaggattactgaatcatggcacccgtctgttaaccttagg

SEQ ID NO: 11770 - DNA, 375 bp, Glycine max
  Coding DNA Sequence Number=SeqID_1991
gagatcgactacgaggtggacccgaggaggcccgtgagggggagcgacacgttctacaggtacacgggctccttcaccacgccgccgtgcaccgagggcatcgcctgggcggtggccaccaaggtgcggcatgtgtcgcgtcaccaggtggagctgctcaaagacgccgtccacgaccatgccaggaggaacgctcggccgctccaggaggccaacggcaggggcatcgccctgtacgacagctggcctcgttccggccccgggaattaagacggccggaagcactgaatctgttgcgttaacctctgttgcactgaacgttgtaaccgtagttgatcttggatgcactgaatctgcgttcatgctgtggctgaa

SEQ ID NO: 11771 - DNA, 171 bp, Glycine max
  misc_feature (34)..(34): n is a, c, g, or t
  misc_feature (103)..(103): n is a, c, g, or t
  Coding DNA Sequence Number=SeqID_1992
ggaacaaccccataagtggagtgttccccattgnttttccacagtttggcctggtccaattcgcagcacgggttttgcacgaaaatgaattggactggtgtcnattctgaaaacccgaaggaaatcctggtggaactttggagctgaaggatgtccctaatagcgggaagg

SEQ ID NO: 11772 - DNA, 479 bp, Glycine max
  misc_feature (106)..(106): n is a, c, g, or t
  misc_feature (110)..(110): n is a, c, g, or t
  misc_feature (163)..(163): n is a, c, g, or t
  misc_feature (252)..(252): n is a, c, g, or t
  misc_feature (349)..(349): n is a, c, g, or t
  misc_feature (351)..(351): n is a, c, g, or t
  misc_feature (362)..(362): n is a, c, g, or t
  misc_feature (371)..(372): n is a, c, g, or t
  misc_feature (382)..(382): n is a, c, g, or t
  misc_feature (402)..(403): n is a, c, g, or t
  misc_feature (414)..(414): n is a, c, g, or t
  misc_feature (416)..(416): n is a, c, g, or t
  misc_feature (423)..(423): n is a, c, g, or t
  misc_feature (429)..(429): n is a, c, g, or t
  Coding DNA Sequence Number=SeqID_1993
cacagagcgcgcaggcgagagcgacggagtggggagagtggcggcagacagccgagagagcgagagaagaggaggcgagagagaggaggagggaggaggcgggcgngagnaaggaggaggtgcagtgagatgagatagaggtgagaatggagagagagtcatnagagtgtgacagcgaggtatggagagtaggcggcagtacgcacagtgcagagagagatcgcacgacaggtccagcagagcagggcgacngcgcgcaggcgaggacatgtgatgcacacgcgcacgagacggagagacaagcgagagagttgtagttggtaagatgcatacgccctccgtcataccnantgcctcccgcngtcccggcnnctccgctctntcatcacgcgctacagtttnncgcgtgctctntntgtcgcngtcctntcgcaacatactaaacatactcacccaccatcaacgactatacaacacac

SEQ ID NO: 11773 - DNA, 511 bp, Glycine max
  misc_feature (29)..(29): n is a, c, g, or t
  misc_feature (68)..(68): n is a, c, g, or t
  misc_feature (212)..(212): n is a, c, g, or t
  misc_feature (251)..(251): n is a, c, g, or t
  misc_feature (253)..(253): n is a, c, g, or t
  misc_feature (255)..(255): n is a, c, g, or t
  misc_feature (432)..(432): n is a, c, g, or t
  Coding DNA Sequence Number=SeqID_1994
cccagagccacgctgcgaatatatactcnagtcacgcttcgatactgtgctggcgcgccgtagagtgntagtaatgctcacgatactatatattataatcgtcgccgcgctatccaccaccgctcatctccacactcttacaacgtaattagtggtacgtcacactaacaaactgcacaccttatcgatatatcgccactcacccaacatantctctaatgtacactcacaccgctcaagcacgcataggnanantatatgtgtgctccacaacaattacactggccacgagcctaccaccgtaacagcacttaagtattgagtaatctattctgatatgatacggctccgctcgtgcactcgcgcacacagcatcttctctctcaacacatatactctgagttacatctgtccgtatatcgacaactcatntatcatatcacagatcgcaacgatactctcgaacactctgcacatagatatatctctatatcgagacatcacctctcca

SEQ ID NO: 11774 - DNA, 566 bp, Glycine max
  misc_feature (136)..(136): n is a, c, g, or t
  misc_feature (223)..(223): n is a, c, g, or t
  misc_feature (426)..(426): n is a, c, g, or t
  misc_feature (513)..(513): n is a, c, g, or t
  Coding DNA Sequence Number=SeqID_1995
ttacagatctactacgcagctggatgcggactctcgacagatcaacaactaaacacaagatcacatcagcgctaaggtaataatatcaaagctcgcagtcacgcgcgtccgagagagtccagtctaccgtccgaangtgtttgtaagtggtggtgtgtatatgtatgttgctgtatagatgtattatgtacgagttccttgtgcagctccgctcacacgtatnagcagaccatcgattgagcgaaataacatagagtataacgcttcttcgcagtatcatactacagcatctattgtcctctcactgctcctccgtgtcacctcaaatcaatctgccactgcgtgctgcagtgagccaatatcctgtaatatggcgcaccgaccacgacacagacgcgcgtgtgtagtatacggcagaacacacgngaacactcgaggtgtgcgcggaagttgagagagggtgtgatcagcattattatctatacgatatgatctgtcgacagagaagagtangtgcgcgcagcgtctctcaagtctcatatatcgatggtcgtttgtgtgctcta

SEQ ID NO: 11775 - DNA, 586 bp, Glycine max
  Coding DNA Sequence Number=SeqID_1996
tacaaccgcggtcggctaacgagctgcgggtaccccgcctcctgggctcccgtccgagacccgccgtgcacgcatgcatgcggagccgatgattccggcaagaatccaaggacccacgcatcggaggcccatagaacactccgggcccccaaacggcacggacgacgcaaccacgatgggatatgagggggcgggacgaaaaaatagatgcggacttttccgacgcccacatcataataagcgaggagcagcgacacttcctcgatggaacgggatcgaataagacgggtctcacagacctagacgcgacacaggtggggcctacgacattggagaaaataacatggcgagaacagaaggacatagcaccgaaaggaggaccttataccagtaaagcacttcgaaacggggcgagccgcgacccgatacccaccagaaaggagggacccacagcaaaagaatgggcggcagggcacgatcacgcggcagcgatagaaggtagaagcccaaccgcgccagagaggacacgacagaagccggtgcgccaggagagggagccagaagaggacccgatcatacccaggaa

SEQ ID NO: 11776 - DNA, 476 bp, Glycine max
  Coding DNA Sequence Number=SeqID_1997
aacagggtctaatggtccgcggtatcatgcgcgcgcactccgacttctatacggtgattgccactcccatcgacaactccgacatgatcgtgacggagtggtgcgacaaatccatcattctgtggcacctcaacaaggaggacaagaactacggtgtccaccgccgtcgcctcaccggacattctcactttgtccatgacgtcgtcctctcattctacggacatgtcgtcctatcctgcttctgggacggcgagctgcgcctctgggacctcatggctggcacctctgtgcgccgcttcgttggccacaccatggacgtgatctgcgtggggtgctgcattgacaaccgtatgatcgtgtaggcatatagtgaacgctctatctatgtgcggaacactctgtgtgattgcaagtgcacgattcaagatggtgatgccgattcagattggtgtagttgagtgcgaatgagccctagc

SEQ ID NO: 11777 - DNA, 405 bp, Glycine max
  Coding DNA Sequence Number=SeqID_1998
ttccacccctctgatctgagaaaaggagaagaaggggttggatgagcaagaagcagaaggactagaagaagaagaagaagaagggaagggaggtggggccatatgcatgtccatggaggtactcctctttggcgtaatgggccaccagacaagccagttctytggaatgcatgtggttcgagatggaggataaagggtacattggtgaattacacaccggcgcatcgtcgggaagatactgacgttggcgaagctggacctgacaagctgaagctcaatggacattattgttgctgattactggtgatatgctcaactaagtgtagatcagtcttttacgttagatgcgtttgcatggaccagttgacatgttttctgtttgcaagttcttgcacaattagaaac

SEQ ID NO: 11778 - DNA, 501 bp, Glycine max
  Coding DNA Sequence Number=SeqID_1999
gatgaatcatggtcctgttgcagcatatgattcttatgttctggctgcccattgtgcccttgcctgtgagcttcagttgttccctttgattatcacgggggaatacttatttaccttacaataatgagcacagatatatgcctatcctgttagactatatggatcctctcattacttgctgactggcttacattcaccattacgtgatactcacacatttttaccaatcctagaggctctatcatcattgaagccatcttctgttgtaacccattgtagtgacagctcatatgagatatttgtaactgctatcgttgctgtccatgtttctgatctatttagaatgtgataagcttacatacatgctctgtctgttctgatttcttgtatattggacaatgaaattctctccactgcatcatcatcgtataatctgctcgctattcacagtatacctgttgcctctatatggttcaatgcacagcccttagaagcaacctt

SEQ ID NO: 11779 - DNA, 585 bp, Glycine max
  Coding DNA Sequence Number=SeqID_2000
agaggcccttcagcagtgagagtgaactttacagtcagctacagatcttcaaaccataactttattgtcacttcctacaactatagaacctactctaatggttatgaaactgagcaagatgaagctgaagaagaatacgaatcagatttgggcagtgttttgaactatactgtatctgacttgagaactttgaacaatggtaccagtgaattcactcctcttttaaacaatgctactgattatattatcgctgaagctatcaaagaaggtgatcttcctgattccgaatacaatatcacctatgtttatggagctgaatcttcagaagacgcaatgtataatgatcctgaaatccaccctaatatgaagttccttgtgaagtttgtcaacagtgaaggaaactatttcttgatcgaaatcagagcaaactatagcactgatgaagaaggcaatcatcaagttaccagaaatcctgagtatcaagtcctaatcaacagaattgtgacacctggcgcattgtaaagtgcaatataataatgcmcaatacatattgagaaattgtgagactcgtatctttatgatgaa

SEQ ID NO: 11780 - DNA, 450 bp, Glycine max
  misc_feature (211)..(211): n is a, c, g, or t
  misc_feature (218)..(218): n is a, c, g, or t
  misc_feature (262)..(262): n is a, c, g, or t
  misc_feature (300)..(300): n is a, c, g, or t
  misc_feature (302)..(302): n is a, c, g, or t
  misc_feature (425)..(425): n is a, c, g, or t
  Coding DNA Sequence Number=SeqID_2001
acgagtagacggcagtataatataatgtagagaaatatggtataagaacgtgataagctatggtgatatgcatagatatacgatagatggcgcgagatggagggatagtgtagtaaagacataccgatcattattagtagtgctgtgcttgtgacatgtatgttgcatatattgattaatatgtgatataatatatgtatgatgtattatntattgangagagatgcagattatgtagcgtgtatataacagtagtgtgaangtgtcgtgtataatataagtatcatgtagtattgttgntntggctggctgtacgtctgtagattgtccttatatgtatgatatagcggtgtaagtttataagacgaggtgcgaggtagtgtggatctgataataacgccgcattgtaaattagtgtatgtgtntgtagcctgttggttgtgtaataga

SEQ ID NO: 11781 - DNA, 533 bp, Glycine max
  misc_feature (110)..(110): n is a, c, g, or t
  misc_feature (243)..(243): n is a, c, g, or t
  misc_feature (312)..(312): n is a, c, g, or t
  Coding DNA Sequence Number=SeqID_2002
gggctgttgagctttctgtatgtgatcgtctttctgtccccacacctcacactacgctagtgtcctcccttctgatggagcgcggggtgatggattggccgctgacgagnccgcgcacgcccaggcaccacacctcgcccccactcccaccttcacacagcaccgcatcgctccgcacgaggtacccgctacacttggcctcatcatcccacgtacatcccaacttaaacttgattaggctgngagtatgtgcgtgtgcatcatttgtatgacaggtaagtaacatatattcctcggcgggcacagacacgncaccgcgccgcggatacctacgaatcatctaaccccacacacctacaccactctctcttcttctaccgaatggaaggctatcgttaggtgagagtgacatccctgcctgcgctaacctaatcctaccatgacagcgcggcggagtagactccctagcctacctagtaagcatgcctcctccccctccgcgcggtgtgtgcactccccaccacatgagggtt

SEQ ID NO: 11782 - DNA, 592 bp, Glycine max
  misc_feature (444)..(444): n is a, c, g, or t
  misc_feature (516)..(516): n is a, c, g, or t
  Coding DNA Sequence Number=SeqID_2003
tcagctgcctatccgatggcaagatcgattccgacgccgccgtgctcctccactccctcacctacctccctcgcgccagcccagaggccggattcggactctacaacctaatcctgtgcctgggttccgctgaccgagccgtctagctacgcctagtcgccgacctcagtctccgcctcgtccacgttgacacctcgcgcgccgaggagatcgcagactctgtcatggcgctcttcctctgactcctccaccgcacgcaccttctctcccggcacccgctctcctgctgcggctggctctgctccgtccagccgatctgcctgggcatgcgccgctgtcgcagactcgttctcggcatcgacagaatctccgcttcgctacgtgtatgccacttcgatctaggtctccaaatgagcgtgctctatgtcgatgctcgctcggganaatgcaaagataagttccctactgcagcgacaataatggatactcttaatgatgataagctggcagcgcacnatatcactggactgtacttataacgagcatctatacgcactatcaatcttgatgtgcctgactgtgaagccggagc

SEQ ID NO: 11783 - DNA, 469 bp, Glycine max
  Coding DNA Sequence Number=SeqID_2004
gcaagtcgccgttggaggcaatttttcggcaacaacgtttcatttattttttctttctttctcttcatcctctcccttcctcccttgatctattcctcatttgttgtgatctcctccttcctctccagcggkgccacaccaggtctgcaccaaatccatccgtcatcaacttcaccgaagccgcaccagattcacgacaatagatctgcaccaacttcatgacttccacgatttgaataaccgttacgagagattcatgtctaacactttggaacccatgttctgcttgcaccagatccacgatgtcgtcgagtttgtcggagcccaaattcatggcaccgcatctcgatttgagcaaccactgtgagggattagcatctgacacatcgaaatccatggttcatggtgcacacccaccagatctatgatgttgtcaagttcgttggagagcaaatccacgataccaaat

SEQ ID NO: 11784 - DNA, 553 bp, Glycine max
  misc_feature (38)..(38): n is a, c, g, or t
  misc_feature (167)..(167): n is a, c, g, or t
  misc_feature (257)..(257): n is a, c, g, or t
  misc_feature (395)..(395): n is a, c, g, or t
  Coding DNA Sequence Number=SeqID_2005
gtgtattacactgtttcggctctatccgggtgcaaagncactgcttcgtcgttgtctacttgttcattatatatcatcgcggactaccgactaagacgatctagaggcgtgtgcgtgtgccttgtctcctcaactcgtcccgtgagatctgacttcctccacactcngctgccagagcgcaatgtcacagagatcctcctctcgtgttgtgtttgcccccacccctaccacccttcaccgtctctgatgaattgatnctgctcgcatataccgcgcacatatacagtctaactgaatagcgacaactcatcccactaccgtgtgggcagtccgcctacatgtatcacgactacaaacgccactgatcatgccgctgacgagtacatgtcgcgcgnctctggcgacacagcgcgcctactactcttatctctcttacactatccaacgacccacctcttataagagataagtatatctcggcctcgcatggtctcatgtgagtatgtcctctagtattacatatattctctactcctctcactatctatgtgta

SEQ ID NO: 11785 - DNA, 454 bp, Glycine max
  Coding DNA Sequence Number=SeqID_2006
aacaaacccaagaatctcctgtccggacctcctcgaatctgaggtagccatgtcttgcacttccaacgtcttgctatccccaaacggctgcgttttggcatctcctaagcctcttggcagattcctcagcgccaggtcggtaggacggaagcttttcgtatcagtcgttagagcttcttccgacgatcctgattgtaatgccgaggaatgtgctcccgacaaagaggttgggacagtgagtatggaatggttggctggagagaagaccaaagtggtgggaacgtttccacctcggaagcgtggttggactggctatgtgagaaagatactgctggtcagactaatgtttactctattgagcctgcagtatatgttgcagagagtaccataagctcaggcactgcagggtcatcttctgatggagctgagaacacagcagcaatcgtaggaggcc

SEQ ID NO: 11786 - DNA, 557 bp, Glycine max
  misc_feature (241)..(241): n is a, c, g, or t
  misc_feature (269)..(269): n is a, c, g, or t
  misc_feature (302)..(302): n is a, c, g, or t
  misc_feature (398)..(398): n is a, c, g, or t
  misc_feature (515)..(515): n is a, c, g, or t
  Coding DNA Sequence Number=SeqID_2007
tcccctccgtctactagatgaggttgacatgatacaataatcaagcaggaagcgacgctcatgcgaagaaccgcatgcagtaatgtaatgagacacaatcaatgacaccacacgcgagacgcgaatgacgtgtggcgtgcgtagtcactctcctggtcgcctgattgcgaacgcacccacacacgagttagagtgagtcggtgcgcacgcaccaacccacgctcagccaccgtcgcgtatntatgcgttctcgtatgcgacggccacgncacgatatctagactaatgcactcgagggagcnacagataagaagtaccgctgtggagagcggcggagcgccactgctatcgatggacacagagtggcgagccacagcgtgcggttcgctgtaacaccntccactcaacaacactaggatagaacgaaggcatgtagacgtacgtgaacacttctagcgtctccgcgcgcgctacgcccacgcccgaccgcacgcatatatgtcgtcgttctagtntctgagcgtgcgtgcatatagcgaccgcgagtgtatagtgtt

SEQ ID NO: 11787 - DNA, 431 bp, Glycine max
  Coding DNA Sequence Number=SeqID_2008
gacataggttctggaccttaatccatctaatctacaagatatcaattgtgctctatgactttgaattcagggtcattactatccaccttgcacttaacctgcattaactttaggcacgttcaagcacacctctagatcctatcttacaatactactactgggcagactgtgtggccttcaaaggactcatgaaatactatagtataatgatccacctgtgcatcgagctctcgatgagaactgttgatatcttctacagcttatatcgaatgacaatcttgtctatattcatcatagagttctatctactcattgatgtccaatactatcaataacatgcatctttgctaatgcacatgatccagcactaagtgcatcaatggtttatagtccaattaacgagttattatcagaagactacccagcaatat

SEQ ID NO: 11788 - DNA, 544 bp, Glycine max
  Coding DNA Sequence Number=SeqID_2009
ctctctctgtgttttattcatgtattctgtttggctctttgtgtagctttaagcctgctactgtgcttgtcacttctgaacttcctctgggttcaggattgggttcgtcggcgtcgttttgcgtggcgctggcggcagccttgttggcttatactgactctgtctctttccatgtcaaccatcaaggatggctctcatttggggagaaagatcttgagttggtaaatcaatgggcttttgaaggagagaagatcattcatggaaagccctttggtatctacaacacatctagcgcatttggtaacattatcagcttaaataccggtgactatattcatatgaacttatatgggccgctttatatgctcatttctatcactaactttgggatgaacaccacagcattggtggcttgtgtaggataaaggtaacttttgcctccagatattattggtttagtttctagtgctgttgtatctgattacgaataattgactttcattaccgaggtacatacctgcagatagcatttagttactgatat

SEQ ID NO: 11789 - DNA, 289 bp, Glycine max
  Coding DNA Sequence Number=SeqID_2010
attcgtggcatcaggctccctattaagcactccgaaaaggtggtgcggcaacgcaatcaaaaaggttgcacctgacccggatgccctcccccgggcggtcgtgagccgggctgagaagcccttcaagataatctcacaggtttcctccaagagaaacagtgttcttcttgagcatgctattgccaaggaaacctctggggactacaagaagttccttctccccctgttgggaaaagaagactaaaaacttttcttcgagggcggttgtgattatcaccccaggccagtt

SEQ ID NO: 11790 - DNA, 552 bp, Glycine max
  misc_feature (29)..(29): n is a, c, g, or t
  Coding DNA Sequence Number=SeqID_2011
attatctgagttccgctagcaggcagcantgcctagaagatgcgttatgcctaagcgtatcgcacgcagcgcttccaccacactcgatacctactatctaatctatgtgtgtattcgatcgatctctgatatgcacgacgctcgctgtatcttacagatctcctgtgcgatagtcgcctggcgcatcgtagcgctgttgaccccgttcttgtcgatgcgctatgatgtctcatcatatagtactacgctatatgcgatcatagataattacacacgacagtcagatcctgatgcgctatgatgatacacgtatactcagttgatactactgtaactgtatccgcagtgcgatcgcttgtcatgtcctttgcgttggtctattagtctgcggtgcgtctctacgtgatatggcttatgacgtaccattcactatcactactcatatgtgatagtggtgtatctcaccggtgcatctgtatacgatttatatcactactattcaaatgcgtatctatgtatacatgagcagacgagtcatgatacggctgccgc

SEQ ID NO: 11791 - DNA, 547 bp, Glycine max
  misc_feature (59)..(59): n is a, c, g, or t
  misc_feature (65)..(65): n is a, c, g, or t
  misc_feature (310)..(310): n is a, c, g, or t
  misc_feature (343)..(343): n is a, c, g, or t
  misc_feature (350)..(350): n is a, c, g, or t
  misc_feature (522)..(522): n is a, c, g, or t
  Coding DNA Sequence Number=SeqID_2012
tcatctcagtgtcatttcctctcattatgtgtattatctatcttatctactatcactanagcacncatcctgacacatgagacaccagtgtttacggcggatgatgcataggttgtgatgtatgtgtcgcgtcgtgatatcactctgatcagcatcggatacactccgctcctgtgcataatctgtgtgtgccctctctagcgcacctcactgtgcttctactctactattcgtccacgtcaatcattactcatatatatcgaaatctcaccacttgctctatactctctgtctctcatgttaatcgttnttatacatcctcaatattatcatctcacctcgncgtgtanagccactcgtcactattatatgtcacactatctcgacgaaacacacctcgccacctcacagcacacactagctctactgctaatatcgccgcactccgactctactaactctccgacactgtcaagatatgtgtcacacttgtataatatagaatatataaaactatcagtntgtatctatactgcgactatcgaag

SEQ ID NO: 11792 - DNA, 530 bp, Glycine max
  Coding DNA Sequence Number=SeqID_2013
ggatccccgctgtctaatgtggtgggagtctcatatacccaaaatggcttgatggctcgctaccagaggactatggttttgacccactttgactaggaaaggacccggtattcctgaaaaggtatagacaatctgaactcattcatgggaggcgggcaatggctgcattagtaggcatcttcattgggcaagcatggagtggagtaccatggcttgacgctggagcatatcctaatgcaattgctcctatctcattaggctctctcttatgtactcatctgctcctaatgtggtgggttgagagcaagacatgggtggacttcttcaacccagattctcagtcagtggattgtgccactccatggtcaagaactgctcatatctttggcaacactactgtcgaacaaggattccctggcagaaaattctccgaccctttgagatttgctggagctatcatcgatggcgttatcatgttgcatgctcactagctatacagactgacatcgtctgacagcatccatctaaga

SEQ ID NO: 11793 - DNA, 561 bp, Glycine max
  misc_feature (32)..(32): n is a, c, g, or t
  misc_feature (56)..(56): n is a, c, g, or t
  misc_feature (58)..(59): n is a, c, g, or t
  misc_feature (63)..(63): n is a, c, g, or t
  misc_feature (150)..(150): n is a, c, g, or t
  misc_feature (349)..(350): n is a, c, g, or t
  misc_feature (364)..(364): n is a, c, g, or t
  misc_feature (375)..(375): n is a, c, g, or t
  misc_feature (377)..(377): n is a, c, g, or t
  misc_feature (386)..(386): n is a, c, g, or t
  misc_feature (388)..(388): n is a, c, g, or t
  misc_feature (536)..(536): n is a, c, g, or t
  Coding DNA Sequence Number=SeqID_2014
tcaactcatgatctcttattagcgagagatcnttcatccgtacacgcccacgctcncnngtgnggactacgcacacagcgctgaaggtgccacaatgtgcgtctcgtggggactcactggaggccgtgcgactccaaccgtccattaatncgaacgtcgcccgccacccactcctcacgccgaaggacctaccgtcagagaagagtagggagaaggacaagtgtcacgtccttctagacgccgaggaagacccttgttagtgctttgcggctccgcacctcgcttctcttccgcgtgatctgtctagcctcactggtcaggttacacaccatagcgcgacgggcagagnnacaccatccagagnggaggtgcgtnanacatttgcncncgcgagacagatgcccatgcgtcctggtgaagagaggcccccttcacactcactactacgaagtgcagcgcgccatggtgtgcgaatgccgagccatcacaacatacgttagagccacccgacaatgtgacgagcacaacacctagantacagcgcgacgacgatgcgatata

SEQ ID NO: 11794 - DNA, 563 bp, Glycine max
  misc_feature (49)..(49): n is a, c, g, or t
  misc_feature (52)..(52): n is a, c, g, or t
  misc_feature (55)..(55): n is a, c, g, or t
  misc_feature (89)..(89): n is a, c, g, or t
  misc_feature (119)..(119): n is a, c, g, or t
  misc_feature (190)..(190): n is a, c, g, or t
  misc_feature (206)..(206): n is a, c, g, or t
  misc_feature (214)..(214): n is a, c, g, or t
  misc_feature (235)..(235): n is a, c, g, or t
  misc_feature (327)..(327): n is a, c, g, or t
  misc_feature (347)..(347): n is a, c, g, or t
  misc_feature (357)..(357): n is a, c, g, or t
  misc_feature (376)..(376): n is a, c, g, or t
  misc_feature (398)..(398): n is a, c, g, or t
  misc_feature (418)..(418): n is a, c, g, or t
  misc_feature (429)..(429): n is a, c, g, or t
  misc_feature (445)..(445): n is a, c, g, or t
  misc_feature (454)..(454): n is a, c, g, or t
  misc_feature (462)..(463): n is a, c, g, or t
  misc_feature (467)..(467): n is a, c, g, or t
  misc_feature (489)..(489): n is a, c, g, or t
  misc_feature (517)..(517): n is a, c, g, or t
  misc_feature (528)..(528): n is a, c, g, or t
  Coding DNA Sequence Number=SeqID_2015
atgtaggtagagtagtatacggaacggggtgtgacggagaaagaatganggnctnatcagtgtacacaagcactcgcgaagtcgattcnagccagattcggagcgttctactagagtgncatgctgaggatgggtgagaggtagggagtacgtgagggttgtcgtctgtcgtcttacccggagtggtccncaagtatatactatanttcgcagngaacacgcgagctaacgcgcngtcagcaagtagagagagagacgatcataatgtactaatacatcattgtacatatactacaacacacccatgatatatgtgtagagaagggnggcacgctgtgtgccatcantcagtgagtngagtatagatgatttcgtngtctatattcgtatctatcgcngcgagccacacatctatatntgcacatggancggtagaggtaggtgnggaggaganatgtgggnngcgncccctcctcctacatttaatangtgataagtgtacatattttatatactntcttatgttanatatagttatagtatcgttctagtggtgcgaggca

SEQ ID NO: 11795 - DNA, 524 bp, Glycine max
  misc_feature (39)..(39): n is a, c, g, or t
  misc_feature (144)..(144): n is a, c, g, or t
  misc_feature (158)..(158): n is a, c, g, or t
  misc_feature (386)..(386): n is a, c, g, or t
  misc_feature (388)..(388): n is a, c, g, or t
  misc_feature (436)..(436): n is a, c, g, or t
  misc_feature (479)..(479): n is a, c, g, or t
  Coding DNA Sequence Number=SeqID_2016
tgatacaacagagcgaccacagcatgagtagaggtgtgngagaagagacagagatgcagaggtgccagtatagcgagatgtattcacgagagacagtaggtggatcgacgactgttgcagtatgcgatgagatgatgcagatgnaatcagacgaaccntctagagtaattacgtctcgacacaatgcaggaagagagtgagtaggcgagtggtgtgagagtgcatgaatagagtcgtgtaagttatagcgttgtatatattaatgttcatactttgtattagtattatctacttaataatgtttgtttataggtgttagatggtgagagtgtgtgaaatagagtgtatgatggtagtattcgctgctatatggtgtgtcagcacgngngtttcacattcgtcgtactatctctatcatcagtcaagtcgtctaccncgagatagattactctgtgtgatagtgcgttgtgtggtgtggnttgcagtatacagatgcagtgtgtacgtgatggtgtatgcatatc

SEQ ID NO: 11796 - DNA, 593 bp, Glycine max
  misc_feature (52)..(52): n is a, c, g, or t
  misc_feature (86)..(86): n is a, c, g, or t
  misc_feature (104)..(104): n is a, c, g, or t
  misc_feature (192)..(192): n is a, c, g, or t
  misc_feature (257)..(257): n is a, c, g, or t
  misc_feature (408)..(408): n is a, c, g, or t
  misc_feature (525)..(525): n is a, c, g, or t
  misc_feature (531)..(531): n is a, c, g, or t
  Coding DNA Sequence Number=SeqID_2017
atctatatcaatcgcgttcacacgcgtgtgttctcatctcttgctctctgantgaatacacgctgccgggtgtagcatacggagtngttataagcttgagccancactactcccttcatgtgcttggtgtactcaaatcagtcgcacaccacattattctacctccacagcagaccacctaccaggcagatntacacctcagacgcacaggactcatactcgctctctgactacacgcactctcgagccgcggcttncgagctatctatactcgtctcgtgtgtagtctagtgagggacagagagaaagggtgatttataactttgatcgtaaagcaacacccgagtggtgggagactacactataagagacgtgggcgccctactccctacactggagaatacgtancagcgccgccgctgaagaagaatgaaaataaaaaaaaacgactctctctcttatagccattccccgtcctacgtttaggacgaacccttgcccgcgacactcaatattgatacaaanaaatanaagggggcgcccaaccaccaaaatatcatgacctcttctcgtgagtgcatgtggtgccttta

SEQ ID NO: 11797 - DNA, 540 bp, Glycine max
  Coding DNA Sequence Number=SeqID_2018
ttgtgcaatgtcctgaaaccgtcgctcgcggcgtgacggccgaatggcaaagcgtcgcggacaagggatgctcaatgttcgagtacagtgcctgtgttctcgctaagagagaggagctggatttcgaagagtggccgatcgtcgtctcgaactgatcacgagtatattgcaggtcggccaaaatcgaggtgtgaagttgcgtagacgccttcactgaggcaacttgtttccgtcagctattgttgaaccaaatcttgaagtgctcaaacggacatttcagtcgacgaatagtctggtcgtcttgggtatcaacaacagagtctagggctgcaaaaaagtgactggttgacacaagctgaatcccctcgtgagcgagtcgcgatgacctaggaggtggaggacccaaacggccacgggggagagaatcgctgcggagcctggcgcggagtcccgagccatcggtcttcttttcgatcccatcggtcaagccggcttctttggtagtctgcagcatggacattccgattctccaagtgtaat

SEQ ID NO: 11798 - DNA, 457 bp, Glycine max
  Coding DNA Sequence Number=SeqID_2019
agccaaagcttatttctctcagtaaaatcaaacttatattgagaacattcatagtcctcattgtattgcgaactatgatgatccctttcatctgctttccttcctttactttcaaaatcgtcttgaaggatcttctcccagaaaacctccatgctccttatatcaaaaggctgatatgtgctctccaacagtttgttggttttttctttgcttgtgctgctataatctctagggttggcgttatttgaagccacagacactggtctctcagcactcttgaagaacatcatgttgggcaacacagggacactcccactttgattctgaccatttccaaaccctcttttttgtaagtcaggactttggtatctatgcgaagaagcttgagaagttgagctcacctgtttcttgctttgttcgagattgagttctgaattgacaacctttttctcattat

SEQ ID NO: 11799 - DNA, 316 bp, Glycine max
  misc_feature (155)..(155): n is a, c, g, or t
  misc_feature (274)..(289): n is a, c, g, or t
  Coding DNA Sequence Number=SeqID_2020
ttaccaaaattattaaacgctcacaattttccctttgcccatccaggtttggcaactttttgggaaggggcattcggttcgggacttttttcgtttattccgccagctgcggaaaggggggatttgtttccaggcgattttaatttggttaacgnccagggtttttcccagtccccgaccttgtaaaaccggcggccacgtggattgttattcggcttccctattagggcgaaatgggttacgggcccccccttcgaagtccagttacgttggnnnnnnnnnnnnnnnntaaagacgccgatgaatggcttatttt

SEQ ID NO: 11800 - DNA, 379 bp, Glycine max
  Coding DNA Sequence Number=SeqID_2021
tatactcagcacaaagaaacttcccttcaaaaaaaaaagttaccctctctctctctctctctctcacacatttattaacctcaacgttcccaaattttgaaacaaaccagctcgcaacaatgtcccatctaaacggcgcctactacggccccgccgttcccccgccgaaatcctaccaccgtccctcccacggcggcggcggcggccgcgacggctgctgctgcggctgcctgagctgcttctgtggctgcatcttcgactgcatcctcggcctaatctgcaagatcctgaccacaatcatcataatcctggcagttctcgcttttctgttctggtttatcgtgcgccccaacgtgatcaaattccacgtcacagacgc

SEQ ID NO: 11801 - DNA, 589 bp, Glycine max
  misc_feature (60)..(60): n is a, c, g, or t
  misc_feature (94)..(94): n is a, c, g, or t
  misc_feature (138)..(138): n is a, c, g, or t
  misc_feature (202)..(202): n is a, c, g, or t
  misc_feature (217)..(217): n is a, c, g, or t
  misc_feature (258)..(258): n is a, c, g, or t
  misc_feature (264)..(264): n is a, c, g, or t
  misc_feature (431)..(431): n is a, c, g, or t
  misc_feature (496)..(496): n is a, c, g, or t
  misc_feature (522)..(522): n is a, c, g, or t
  misc_feature (549)..(549): n is a, c, g, or t
  Coding DNA Sequence Number=SeqID_2022
gagacacacgactactcagcagtgacagagctgatatctagctacgaatagcacgatgcncgtagcacgcacgacacctactaatagatgaccncagctcatcagagcgctcatgtcacccgcatgcatgatactgangagcaatgtagcgcatcgtcgtcgacgatgactcacacactgcctcaagcactgatatgccgantagagacatgacgantttaacatactactgaactactacgcgtagcagtcacgagncgctcngtgtagcgaatgatgttccgtcgactactctgcgtcacctactctcatctcgcatcactctcgttcgactctatgctgtcactcaatcatttgcagtgatcacgtacctgcctgctcgactacgcggtgtgcctactatcgagctaatcactatgactcatgcgttnctatcacagtctcatcaaactatactcgtgactgtatctcatgtgatgagcgtagtgctacgttncgagtactaccacagtgacgtagtantgctactactgctgcatatgtcgtatnttgctgccgtctctcttgatatcttcactctgcgcactgt

SEQ ID NO: 11802 - DNA, 320 bp, Glycine max
  misc_feature (31)..(32): n is a, c, g, or t
  misc_feature (224)..(224): n is a, c, g, or t
  Coding DNA Sequence Number=SeqID_2023
gagccagatggcgtcgacgacgttccggcgnngcggcgtggcggcggcggccgccgcgttcatcgcgctcgcggccttcggatccgcctcggcgtccaagacggccttcgtgaagtccaccgtcaaggcccacgacgtcgtcatcttctccaagtcctactgcccgtactgtaaaagggcaaaggctgtgtttaaggaacttgaactgaagaaggacccatatntcgtcgagcttgatcagcgagaggatggtggggatatccaggacgccttatccgacatggttggcaggcgtactgttcctcaggtttttatccgag

SEQ ID NO: 11803 - DNA, 426 bp, Glycine max
  Coding DNA Sequence Number=SeqID_2024
acctggctctctcattatcttgcttttccttctcttttaaatcttgagcactcttctcttcatgatgctgatgaactctatgatgaacacccctagattcagcctgggattaggtgaaacaagatttgactgctttgatgcacttctagtaccttgactcaaataatgatccaaatccttcattctttcattaatggcattaatagtgcctccaactttacttgaactggtatcagaatgctttctggaatgaagttgatgttcttttccgtaaatatggatgggatctttgaaagaactgctatcctcaatcaaatttctttggattttgacagtgctaggggactttatgctttctgttctgctattatttctattgtgagtactttttggttgttccataacaatgtcaaatttctcacttcc

SEQ ID NO: 11804 - DNA, 386 bp, Glycine max
  Coding DNA Sequence Number=SeqID_2025
ctcttcagctcatagcattttatgtgaaggcgtgtgattggttttcagaaccaatatcaggagcagtattatggaatccaacagagaagaggccgtcaaggctagggaaattgctttaaaaaagttagaaagcaaagactttgttggtgctaaaaggattgcactgaaagcacaaaggatttttccagaacttgaaaacttatctcagctgttgactgtctgcgaagtgcattgtgcagcagaagcaaagatcaatgagttgttggacttctacgggattctccaagtggatgtaacggctgatgaggcaaccataaagaagcagtaccggaagcttgccttttcacttcaccctgataaaaatagttaccctggtgcagaagctg

SEQ ID NO: 11805 - DNA, 433 bp, Glycine max
  misc_feature (152)..(152): n is a, c, g, or t
  misc_feature (213)..(213): n is a, c, g, or t
  misc_feature (311)..(311): n is a, c, g, or t
  Coding DNA Sequence Number=SeqID_2026
gtattcctcgccttcaacatcgtgtcgtctccgccgccctcgcgtcgtcacgcctatcactcttcttccgtgctccattaagtcgttctcgttgcgtgtacctatcagcctttgctttgtttgcgtctctcggttctgttctatcgtcttgngacgctcagtcgtactggcgcgcattttctctccttctctgggcgggcctgagaaaacgcntcgtttcgcgccgatgccctcgcggctcgcgttccgctcctcgactctctcctcctgctcgttatcttatctgcgtccgtctgtgctctgcggggtgncataaatccgttcgccggctgcgtcactttgcgtctagtctggctctgttgtgttatacatcgctatctctagcaggactctggactattcgtgaccttctgttccctattatcgctacggc

SEQ ID NO: 11806 - DNA, 525 bp, Glycine max
  misc_feature (80)..(80): n is a, c, g, or t
  misc_feature (102)..(102): n is a, c, g, or t
  misc_feature (109)..(109): n is a, c, g, or t
  misc_feature (225)..(225): n is a, c, g, or t
  misc_feature (231)..(231): n is a, c, g, or t
  misc_feature (279)..(279): n is a, c, g, or t
  misc_feature (286)..(286): n is a, c, g, or t
  misc_feature (359)..(359): n is a, c, g, or t
  misc_feature (361)..(361): n is a, c, g, or t
  misc_feature (399)..(399): n is a, c, g, or t
  misc_feature (432)..(433): n is a, c, g, or t
  misc_feature (495)..(495): n is a, c, g, or t
  Coding DNA Sequence Number=SeqID_2027
acatgcggatgtgagctgagtctacgtctcacatacaagaggaggtagtacactctctactcacactgctcacctcgcgnagccctcgacacgtatcagtanacgaatngcgcgatgagtgatagcgtgtgagagtagtgagtgtaccgcagtgtgacacgtatcagtatctatatatatctgctctcatacagtgtatgtcaaaaatatatcatatgctagctnctacancatgtgcgatagtctctacgacgacgtatagagtgacgtgctacgcancaggtgnacaatgtagacgacgactacgtgtcgatctcagacgagctgcgtcgttgtatatcactcttcagtctgtgttngnagcgtccgtcgctgctatcctgatactatatatactanagtatagtaacagaccgcgatcggacgtcacannacatatacaccagctcgcccttggcgcgacagagaagaggatctactccgtcacgtaatccngtactacaatatgcatacggcgctgcttat

SEQ ID NO: 11807 - DNA, 219 bp, Glycine max
  Coding DNA Sequence Number=SeqID_2028
agagaacaagatacacacgcaagtgacgcttgcgagcacgagatacgggcttcgcaagaaagcctatgagctatctgttctctgtgttgctgaggttgccctcatcatcttctccaagcgtggcaagcttgatgaagcgtgtaacagcctgagcaagcacgagacacttgaatgggaccagaaaagtagatatggcgccgtggaacttaccaaaccctg

SEQ ID NO: 11808 - DNA, 598 bp, Glycine max
  misc_feature (100)..(100): n is a, c, g, or t
  misc_feature (243)..(243): n is a, c, g, or t
  misc_feature (250)..(250): n is a, c, g, or t
  misc_feature (294)..(294): n is a, c, g, or t
  misc_feature (309)..(309): n is a, c, g, or t
  misc_feature (317)..(317): n is a, c, g, or t
  misc_feature (339)..(339): n is a, c, g, or t
  misc_feature (417)..(417): n is a, c, g, or t
  misc_feature (500)..(500): n is a, c, g, or t
  misc_feature (519)..(519): n is a, c, g, or t
  misc_feature (547)..(547): n is a, c, g, or t
  Coding DNA Sequence Number=SeqID_2029
gtctaattactcgaacgccgctgttagtaagtgtcattctctgaccgaccatagtcataatgcgaccacacatatgcgcgggcagatcatggtgatctgnatgatattatctagtacatcacagtgtatacagatcacgtatacgtgcgcggagtcacgtgcgatgcgcacacgatggagtcggcacgactgcatgactgtagtatagaatggaatatatatcagactctgatactggacggncgtgtantgagtcgcgctatatagacggaaatgcacgacgtgctgacgagnacgacgatatagaanacaacganactactataactatctgcgacngagagctgcgcaccacgccacgcgtgacgcacactatgcagctgagtgacgactgcgtatatcgtttacaccgacttnctcgtcctactcacaacacccacgcccctctcgactcctatcataccaaattaacgtatctactcacggcactcatatatgantactgctagctaaactggntaagctctcggcgagtgacactacgacntatatactattaacataaaatgagatatacctacgctacatctatactaca

SEQ ID NO: 11809 - DNA, 364 bp, Glycine max
  Coding DNA Sequence Number=SeqID_2030
cgtcgtcgtctccggcgagtagccacccgcctggcccgtttgctctagggttggagtcctcggcgaacaagattggcatcggcgtcgtctccatctccgggcaaatcctctccaacccgcgccatacgtacatcaccccgccaggccacggtttcctgccccgggagaccgcgcagcaccacctcgtccacctactccctctactccgcgcagcactcgccgaggccgatgcctctcctgccgacctcgcctgcatttgctacaccatgggccccggcatgggcgggcctctccaggtcgccgccgcatcggcccgggctctgtcgctcctatgggggaaaccgcttgtcgccgtcaatcactg

SEQ ID NO: 11810 - DNA, 297 bp, Glycine max
  misc_feature (49)..(49): n is a, c, g, or t
  misc_feature (57)..(57): n is a, c, g, or t
  misc_feature (60)..(60): n is a, c, g, or t
  Coding DNA Sequence Number=SeqID_2031
cacatgtgatcaaatccgtcttctctttctctccagtttcgcggaagcngatttttnganggtattcaagaaaacatggaatccagcagtaaccatggagggatcaagctactgctagctgctgaacacgaagctcagcaaatcgtcaatgccgctaggactgcaaaaatggcaaggctgaagcaagccaaggaagaggctgagacagaggttgctgagcacaaagccagcactgagcatggtttccagaggaaactcgaagagaccagtggagattcaggtgcaaacgtgacgagg

SEQ ID NO: 11811 - DNA, 546 bp, Glycine max
  misc_feature (268)..(268): n is a, c, g, or t
  Coding DNA Sequence Number=SeqID_2032
gtctaaacggccgtgcaacaaggcgccgccgagcgcgtgtgacaaacacaatcatcaaactatgtaatacacgcgcgcggacaacgcgcgtggcgtcaatagcgtgggcgttctcataatcataggtttatactgtcatattctcacgtcatatcgctatcgcgtccatcgtggtccatccatagtctacataactacttccattcatctcactcgctacctccctactcacttcatccaccatctcacactacgcctagtccgtgcntcctctggtctatattacggaactttcacttttcacctctttgtgctgctcttccttcgcactcctgtgtgataatgtggcttgtcgagtggcgcgtgcaaaatatctatctaagagttaataaacgtcgccatcccgcgtcactcataggggcgtaaaaacggacgcaaaaatggctatcatgtgcacatagggcacataggcgtataatatgtgtcccccgcgcgtttataaagttggtaaaaacgctgataataggcgtcacatcttattctctc

SEQ ID NO: 11812 - DNA, 436 bp, Glycine max
  Coding DNA Sequence Number=SeqID_2033
agcgagcctgctgaacatcagtcaagtgagtcctctagcatgggtatgatccagaagggtgaggggcaagaatggggctttcttgccccccattcatgggattccatgaattttaccctactatgtatatggggaactccgttagttgcatctaaccatacaactagagaagtattccggtaatcatatggaccctcgtattttaggtaaattgaacttccgtttgtaagatgtgcagtagaggttcacttatcctcttacaaagatcattatggtggtatttttaatataaatgtattttgcatagtaggagaatagtttgcggaaaaatgtgtgcatgtcgacagcgtaacctgttagtagctagtaataatataatttgcatatatggtcatttagcaatgtactaatttgaacttgtcgaattttttggtag

SEQ ID NO: 11813 - DNA, 363 bp, Glycine max
  misc_feature (144)..(145): n is a, c, g, or t
  misc_feature (151)..(152): n is a, c, g, or t
  Coding DNA Sequence Number=SeqID_2034
aaatgagcagcgagacgagcaagcgagatcatgcacgggagctcctcgccgccgacaggaagctgatgaccgtggcccgttcggcgcgacggcgccggctggagctccggcggctgggacgtacggcgtccgcggccgcggagnncgaggnngcgaagcgggtgcggccggcgccggacagctcctcggactcgtctgactccgcgaaggtggtgccggtggcgtctaggtgttcggcgtgcgtgtcgcacggggcggtgtccgtgatcgggcgccggcgggagatggaggacgcggtggccgtcgccgcgccgttcctggccgagacggcgggggtggagggcagcggcgacgtggagtacg

SEQ ID NO: 11814 - DNA, 252 bp, Glycine max
  Coding DNA Sequence Number=SeqID_2035
tgaccgcgacgcaaaggctactgaccgcgcggtggagccctgactaagtcacactctcttggcacgcaaatactggagaatgcggatgaacgcatggtcctggataacgagccactctatgaaatctgaggccgtacactcaccctcacaagtccacgttcgtggaatctgaacactagatctcaacaacaatggagcgggcaatcgtgctgcaccggttcccgtgcagatgaactactaccatccgccact

SEQ ID NO: 11815 - DNA, 567 bp, Glycine max
  Coding DNA Sequence Number=SeqID_2036
tatggctcgtatatcacctaacctcactccaaaagacaacttaagtaggctattggaaaggccatcaccttcacctattactgcacgttcatcaagagcaaacatcttaacagaacacaatggaccaatttttgaggcatcaaagattccaagaggttcaagatctccaaattttggaaaaaatataaaggatgcagatagatcgacggatgatagcggtgaaaataatggtaaaaagttgttggaagcacagcatgacaggaagtatttggaggagcaatataaattaatggagaatagagttaaacatttgatggatgagaacgaaaagataaagggcaaaattaagcagacgcgagtacaaacagaaaatatagtaaagactaaggagaaattagcagagagggaagaaaakattagattgcagcaggaaargcgtgagagagaagcaatasagaagaagaatcaaatagcaaaaatgaagcaagagcacgaagaaaaacgtaaagaaaagcaagaaaatgtcataaacagcaagcttagacttgtttcagaggtcagacaaca

SEQ ID NO: 11816 - DNA, 578 bp, Glycine max
  misc_feature (213)..(213): n is a, c, g, or t
  misc_feature (274)..(274): n is a, c, g, or t
  misc_feature (477)..(477): n is a, c, g, or t
  misc_feature (489)..(489): n is a, c, g, or t
  misc_feature (501)..(501): n is a, c, g, or t
  misc_feature (552)..(552): n is a, c, g, or t
  Coding DNA Sequence Number=SeqID_2037
atgatactatacacgagcactactcacatcgttgctgagcgtcgaacatgagtcttacatacatgatgacatctcatcgacaccgctggcaccttgctagccatgagcttcgaccgctctcagttgtctatactattctcgtggtgaggctacgatagagtagctagagacgagatagtgttggagagtaaatcagtcacaagaaggaacagntatcaccactcatgacacactgaatacgaccattactacatatatcatataaatatagtancatatagatgtatttgggttctgctattacgaatgccatctagccatgcgcgggcagcagacgagtgcgagacggcaggtcttcgtctccagcagagcgtgctggcgctcgaacgaccagaacgacgacaatacaccgggacagagtggaagtgcatgggggttgcgggatgggctgtatcacagataacgtacatctgacgnggggagagggangtgtattgtgtntgacttatcttgatctctggcgtgtgggtgtgtagttggcgcgacaccacncagaaacacatctcagatccttcgct

SEQ ID NO: 11817 - DNA, 548 bp, Glycine max
  misc_feature (37)..(37): n is a, c, g, or t
  misc_feature (75)..(75): n is a, c, g, or t
  misc_feature (91)..(91): n is a, c, g, or t
  misc_feature (111)..(111): n is a, c, g, or t
  misc_feature (152)..(152): n is a, c, g, or t
  misc_feature (161)..(161): n is a, c, g, or t
  misc_feature (237)..(237): n is a, c, g, or t
  misc_feature (305)..(305): n is a, c, g, or t
  misc_feature (327)..(328): n is a, c, g, or t
  misc_feature (388)..(389): n is a, c, g, or t
  misc_feature (441)..(441): n is a, c, g, or t
  Coding DNA Sequence Number=SeqID_2038
gaacgcgcgacagcacacaaagcgaccacgccgcccncgcgcgccgtcccacacgagacaagagcaaaggcggcnacactgagacgcaggnacacagaggcacggcagcgncagacacacgcacgcgccatgtaactgcgcccaccacaacncgtaatgtnagacacggacgcaattgtgcaccgccggccgagacactcgttatacactacacgccggacgcccacgtatcacgcntcacgaatcatacctcggcgctcaggcatatagtgccaggacgtagagatagtgtcgaaccgcgccanttcaagaccacgtgtgtcagcnnttctactcgcgctccccatgattatgatgatagacgactacgcgatcgcgaatacattannataagcctcagacactatatagcatcgcgtgtgcagacatatgaatgtctanacacaggactagacggatacacattgttgtgcgcatcgcggcacagtaatacacgtccatccgccgcgcgcgtcgaggatgaggtcgtaactatcacagtgcgtctt

SEQ ID NO: 11818 - DNA, 305 bp, Glycine max
  misc_feature (181)..(181): n is a, c, g, or t
  misc_feature (200)..(200): n is a, c, g, or t
  misc_feature (212)..(212): n is a, c, g, or t
  misc_feature (248)..(248): n is a, c, g, or t
  misc_feature (263)..(263): n is a, c, g, or t
  Coding DNA Sequence Number=SeqID_2039
tacctcgacgcacacagctatgcaccgacggcgtacgcgcagctcgtgcatcatcatgccgaatcagcacaagtactcagatcggcgcggcgcgacgtcttgcagcgacaactctcgagttctacctatcgagatgtgctgccttctcttccgctacaactctttatgctcactctctttnttcatggcgtaaaaatcgngttctcttccgnttccgcgacaaatctacacactccctaaccccctancgcgcgagccaacanctctctcctaagctatcgcaaaagaactcaccggcggcgcgc

SEQ ID NO: 11819 - DNA, 255 bp, Glycine max
  Coding DNA Sequence Number=SeqID_2040
ttgggagagggcttgttaacgcttaatccatgtcattctgatcgcttcttactgtcgcccgcagcgcttgctggattagttaccgtgttccgcgcgtgcctagacgtgagagctcttgtgttgggaaaatgtctctatgttctctacttgctcgttttggcgctgcgcgcaaggatgttgttgtctgtggatgagggctagacgcctgtatcaatgcctgtgcgtgggggacgcgccgtgagtgttgtggaccaa

SEQ ID NO: 11820 - DNA, 391 bp, Glycine max
  misc_feature (117)..(117): n is a, c, g, or t
  misc_feature (140)..(140): n is a, c, g, or t
  misc_feature (212)..(212): n is a, c, g, or t
  misc_feature (217)..(217): n is a, c, g, or t
  misc_feature (219)..(219): n is a, c, g, or t
  misc_feature (237)..(237): n is a, c, g, or t
  misc_feature (240)..(240): n is a, c, g, or t
  misc_feature (286)..(286): n is a, c, g, or t
  misc_feature (288)..(288): n is a, c, g, or t
  misc_feature (297)..(297): n is a, c, g, or t
  Coding DNA Sequence Number=SeqID_2041
atatacgctgcgcatcatactcactaaccatacaacctcactcgatctatcgcacaatctactcatatcacacaactcctatatattattacacgtctcccccaaccctcttgcctntctatgacacggctctgtcgtcnttcactctcagccacatgagaagaagatcggaagacacacagagtgagagagggtccgcggagggcggcggnggcanancgtgtgtcgcgcgggagngcngaactggcggagtgtagagcggcgatcggcgacacccacagacacncnctccttatntcttatgcgtcgactccgcgcgccactctcacactactgttgtaccatctttcttgatatactctatgcatatgctctatatacacctcacctc

SEQ ID NO: 11821 - DNA, 438 bp, Glycine max
  Coding DNA Sequence Number=SeqID_2042
tgctctgcccctgcctagtccggtaccccgtcttcattgcatggtggtgcttccttgcgtcgtggcgctcctagtgttgctgagcgctctggggccctggctccccgcttcccctgggaccttgacactgaatgggttgcgcgggacgagcccgcgctttacatcaccatcagagctctcccaggtggcaaaaaggagctcagacgagtcatgttcagtcgagaaaagtttggtgagatgcatgctagactgtggtgggaagagagccgtgccagaatgcatgaacaatgcttgtgagaattctcagaaggggtggctgcagatggttcgcaaaatgtggaggtggtgtttcttattaatttgcttagtttatatttttgctatataaagtctcttccatagaggatcagatgttagagctaggtgctacttgcacct

SEQ ID NO: 11822 - DNA, 525 bp, Glycine max
  Coding DNA Sequence Number=SeqID_2043
gactagttatgtcaatctttcaaaaattactctgagaaggttggtgcatccaatgattcattaaatactgatagcatcttggaaatggtaaattttttaagaaagttttgtcagtgtcggcactctgttattaggcagaggagttgtgaaccaatagagaacaaagtaatgtacaagagaattaagtacatgtttggattacagtttgtaaactgaatttgcaaaagtatctctcgaactgaatttgaaggttaagggggtgtttggtttggttattttctgtttttattttcactggaaatagaaaatggtgatgaaaatatgtttggttggatttttatattttcattttaagtgaaaatattttctcaaacaaatcaaaaactgaaagaataaaatctcgttttcaatattttcaattaaaatcaagaacctcattttggataaaatgaaaacgcgatcgcaaaaaatgtaattttaaataaatttaaaaatacatttccttttgaaaacgcattttcagta

SEQ ID NO: 11823 - DNA, 566 bp, Glycine max
  Coding DNA Sequence Number=SeqID_2044
gatcggctccagacggatggcataagacgacaaaaggactcgcaaaacagtgataggaaacagactatctgatgagcactgagagcttaggaacttcatcgctaatcttgatactacaatataccgaagagctgggcatatttatcagaatctggagccgcgtgtggtgaagacattgcttcattctttgctgaaccctacaaaagcggtgcctaaacactatggggcaattaaagggatagaaacgcttggatcaagactgatcatcttgcttatacttgcaaatctcgagccatattagccacttcttgagccagatatgcagcctgataagcaagaaaactaacagaataggcatgaagctagacgagtttatgggactcagatgggtgcagcaagacaatacgtgcatgataaggtcaaaaagtttgacaatttggtctctgctagacactcatgtatattcaatgcgcagtggaaagattgtgattgatatgcgctgctaaccaaaagccatcacacgttagtctgtagcataaagaagagctacctctaatgaacaaact

SEQ ID NO: 11824 - DNA, 376 bp, Glycine max
  Coding DNA Sequence Number=SeqID_2045
tgattcacattccagcattcttgggtcgccaaacagatcttctagttgcagcagccccatctgggaaaattattaacattaagaccggacagttatgctctccttatctgacgacaaattattatcaatacttatggatgactgggaactcttatgtgatgggctgtcatagaggaacaccctaccaatactgagaggagattggcttaccacgtgagacagactgctaaaaacattccaacaggtccactttccctaaggtagcttagtcactacaacaatctcattgataggccttagcctttgtctgtgtttgttgacacctatttcgctaactagaaccatgatttggagagactccacattgtgcaggaaa

SEQ ID NO: 11825 - DNA, 435 bp, Glycine max
  misc_feature (112)..(112): n is a, c, g, or t
  misc_feature (176)..(176): n is a, c, g, or t
  misc_feature (178)..(178): n is a, c, g, or t
  misc_feature (263)..(263): n is a, c, g, or t
  misc_feature (271)..(271): n is a, c, g, or t
  Coding DNA Sequence Number=SeqID_2046
agggcgtggcgagcgcatatacatcccacatagcacaccacaacaccattagagagagaatgaagtcgctgattttcgggtacatacacacgtgtgcgattggcgtccagcncctcgagcgtgcacagtcatgatacgaagaagaccgacagacagacagacatgcggcgcgaagnangacacacagcgagagagacagactggcaagacagtcaccttcgatcgcgcgagatctcagtgagatagatgtactctagatgatngaaaagtngtacctcgcgtgtgtgtggtagatatacaactaaaccaagacacaccggaggaaggactcacacacacaatatttaataaagggagagccgtaacccggactctacttgctatgaaacagatccctcatcacctatcatatcacaacaactcacgctcacaaat

SEQ ID NO: 11826 - DNA, 575 bp, Glycine max
  misc_feature (487)..(487): n is a, c, g, or t
  misc_feature (514)..(514): n is a, c, g, or t
  Coding DNA Sequence Number=SeqID_2047
aatatcatcaattcgcactcgtgtcggggcgagtgttattcgttataggacacgctatgtcacgtacagatgtatattagtagattatgagagacagcaaaccagtgccactagcaagtctcggactgatagggcggacgacgtttcaacgaccacgactgatcgttatcatagaaattgcatcatcgatcacactattcacaactcagagacaagatgggctctcgatagctaaacactataaataatacgagcgatacatacagagagaagagaagaaccacgatgtatatacatgaatatatggacaagacgctacatacagatagtgacagataacgatagaagactatcgatcgcacagcatgtatatatgacgactatacacactccatacgcagatttgtatctactacatcgatgtgcactcgtgttggtgcgacacgacatagaatgtctgatgacgtacatcaagcgtcaaagtggngcgatgaataagtgtgatatgcgccanacacatcgttagacacctcgtgatgtgacatgtaatgtgatactgacatgcctctatacga

SEQ ID NO: 11827 - DNA, 567 bp, Glycine max
  Coding DNA Sequence Number=SeqID_2048
gagtgaacaaattccgcggcatacaatccagccgcaagggcatctgggtattgcaggaagtgaattgcccttctgtattgatagaagcagggttcatgtccaacccatctgatatgtccaatctgaagagcactgcttaccagcagaaaatggccggcgctatattgaccggtatccagcaatatttatcggctcatgaaaatcaaaccaccttcattccggtagatactaccatagaagtgaaagtaaaagatacggctgctcatcctttgtttgtagttgacggagaaaaaatgggtcggaagggtttgaaagaattaaaactggatccaaatgatattgacaatattagtgttttaaaagatgaggccgcctttaaaaagtatggcgaggaaggcaaaaacggagttgtagagatcaccactaaaaagcaagtagctgactctacaacgacaaagcagcatagtaaagctgatctgatgatgaaaaaattgaatgagctgaaaaaagataatgagaaatcttatttcgagattgatggtaaatccgtcatcactaccaaaagcg

SEQ ID NO: 11828 - DNA, 421 bp, Glycine max
  Coding DNA Sequence Number=SeqID_2049
gtctcccttgcctatttccaagaatctttcattccaatatgataatcctcgcctactgtatgagctgcatctattggctctcacctagtctgactaattgatgtaacctgaaacagatgacgccattgcgcctgacaacatactctcactggcatctaaagacaaccttaacatatgcattggccatcccagatttgacctaattccccatgatgtcacagaccccttgttgattgacggtgacctcatctatcatcttgcctgccctgcttctccaatcttctacaaatacaaccctgtccacacaatacatacagatgtgattgcaacactgcacatgcttgcgcttgctaatcctgcgtgagcaatgatctttcttacatctacttcacaaccatatggtgaccctcatgtgcatcca

SEQ ID NO: 11829 - DNA, 448 bp, Glycine max
  misc_feature (44)..(44): n is a, c, g, or t
  misc_feature (157)..(157): n is a, c, g, or t
  misc_feature (167)..(167): n is a, c, g, or t
  misc_feature (193)..(193): n is a, c, g, or t
  misc_feature (275)..(275): n is a, c, g, or t
  misc_feature (307)..(307): n is a, c, g, or t
  misc_feature (309)..(309): n is a, c, g, or t
  misc_feature (332)..(332): n is a, c, g, or t
  misc_feature (345)..(345): n is a, c, g, or t
  misc_feature (347)..(347): n is a, c, g, or t
  misc_feature (359)..(359): n is a, c, g, or t
  Coding DNA Sequence Number=SeqID_2050
aaatgtaagccacgctcgtactgcagggcagtacgctgactacncatccacactatctgtctactactctacgatgatactgatttgctacacaactacatccgaattatatgtagagatcgttcgtactccacgacgtagctgcgcatctgattanctacgacgangcatatatgatcgtactcgagcgatngtacgcgcctgagctgatatagactgcacgcgtctcttatcgacatgcgcgtgcgcgacatcgcttatgtagaattacaganactctcctctatagctgactacagctaggcancntcgcgtcgatatgagagatgacntacagtcgactantnactagccgagtnatagcgcatgacagtactcatgataatagtgactataccgacccacgcatcatggatgcgcattgatagtcagtctacgctgaccctga

SEQ ID NO: 11830 - DNA, 166 bp, Glycine max
  Coding DNA Sequence Number=SeqID_2051
gaagccatatgattcaactctagcgtcactttcaatcacttgcagcaaagcactacaactagatttagctgaggcttttctgaatcaaatttctgaatgtctatatccaaatccttataatgctttgctagcatcatgcgatcaactggaagggtcagagaaaacc

SEQ ID NO: 11831 - DNA, 556 bp, Glycine max
  Coding DNA Sequence Number=SeqID_2052
gcttcattgcaacaaactggtttccaacaaagtggcctccaaastggattgcaacaaccaatcttgcaacaaaacatgccattacaaactggattgcaacaaactagcttgcaacaaggtatgccattacaacaaactggtctccaacaaggtgctccattgcaacaaacgttacaccaaaaaggtgctcaattaaagcaaaacttacaacaaggtttacaaggtggtattcaacaaggaaacttccaacaaggttacttccaaaaagaatcattgaagcaaaccggtattcaaggtgctccattacaaactggtttccaacaaggtgctccattgcaacaaggtatgccattacaacaaactggtttccaacaaggtggtctccaacaaactcttcaaaatggattacaacaaattggtcttcaacaaggtgctccattgcaacaaactggtttccaatcaggattacaacaaggtgccccattgcaaggtggtattcaacaaaacttgcaaagaggattgcaatcaggtgtcattccacctccaacacaaagtg

SEQ ID NO: 11832 - DNA, 448 bp, Glycine max
  misc_feature (43)..(43): n is a, c, g, or t
  misc_feature (73)..(73): n is a, c, g, or t
  misc_feature (76)..(76): n is a, c, g, or t
  misc_feature (80)..(80): n is a, c, g, or t
  misc_feature (98)..(98): n is a, c, g, or t
  misc_feature (101)..(101): n is a, c, g, or t
  misc_feature (103)..(103): n is a, c, g, or t
  misc_feature (117)..(117): n is a, c, g, or t
  misc_feature (180)..(180): n is a, c, g, or t
  misc_feature (193)..(193): n is a, c, g, or t
  misc_feature (196)..(196): n is a, c, g, or t
  misc_feature (200)..(200): n is a, c, g, or t
  misc_feature (205)..(205): n is a, c, g, or t
  misc_feature (207)..(207): n is a, c, g, or t
  misc_feature (217)..(217): n is a, c, g, or t
  misc_feature (236)..(236): n is a, c, g, or t
  misc_feature (238)..(238): n is a, c, g, or t
  misc_feature (281)..(281): n is a, c, g, or t
  misc_feature (284)..(284): n is a, c, g, or t
  misc_feature (289)..(289): n is a, c, g, or t
  misc_feature (319)..(319): n is a, c, g, or t
  misc_feature (321)..(321): n is a, c, g, or t
  misc_feature (342)..(342): n is a, c, g, or t
  misc_feature (374)..(374): n is a, c, g, or t
  misc_feature (386)..(386): n is a, c, g, or t
  misc_feature (406)..(406): n is a, c, g, or t
  Coding DNA Sequence Number=SeqID_2053
tcagcctacgctctcggcgcatgagccgttgagttccacgttngtatttaccgcgctcctctcatttgtgcantcncgcntcgtccgactcacattancantnctatcactcgtacncgcgctgtcgactactgctgcagcgcatgacgtgacttccacgactatctgacgtcccctccnctagccggactgngcngtgngtgananatctctggantagtagcgtgtgcgcgggncngtgcatattactccttaccatgagcagccgtggcgacagtgancgntgcantaccggcgacgagcagtatcgacgctcgcnancgcgtgacctcagcattcctnagcgacacgtcgtgcttgctccggacacggcncgtctcgtacgngtacgctacgcgctacgcgncgtactgttcgtgtgatcagcggaactcctgcgtcctatcat

SEQ ID NO: 11833 - DNA, 563 bp, Glycine max
  misc_feature (398)..(398): n is a, c, g, or t
  Coding DNA Sequence Number=SeqID_2054
gaacatcattccataagctcaccataatcttgcgtttctgcggctctcttgcacttcactccctaccatcctataccagacacctaccaaacgacatctctatagaatacatactaatgtgcagtgtgttgatgtgttggtcgggcgaaccgcaagctgatgcatagcagcgattgatataggtcctcacatctacataatacattctagcccatattcgcaatcaaatcccgctctatcacatgagacccgcgagacatcagtcacagcacttaccgatctcattgttgcgagcgcggatatccgctagatgtggtctaagaggcgggctacgaatactaaccgccgccattacaactacaaatcataaactaacgaggtacaaccgacatgcctgntacgccgccctcaccgcacacattgtcctactatatgttgcacttacgttctactcaactaacttattgtgatcttagatcttctctattgtcatagtcttcttgttctctctgacgcagtgctcgtgggtgcggtaagcgtactccacgcctatatacacaaag

SEQ ID NO: 11834 - DNA, 240 bp, Glycine max
  Coding DNA Sequence Number=SeqID_2055
gcggcttggctcaccggatgctgttcggtgcctctatacaacctcatggacgatgctgccactgctgagatcaccacggtgcacaatttgcagtggctcaaatctggactggagatcaatggggatggtcttggagtgaaagtgagcaaagaactttttggtagggttgctgaagaagagatggctacgattggaccggaattggcgacacaaaacttcgtgacaggaatgtaccaggag

SEQ ID NO: 11835 - DNA, 587 bp, Glycine max
  misc_feature (121)..(121): n is a, c, g, or t
  misc_feature (153)..(153): n is a, c, g, or t
  misc_feature (178)..(178): n is a, c, g, or t
  misc_feature (346)..(347): n is a, c, g, or t
  misc_feature (421)..(421): n is a, c, g, or t
  Coding DNA Sequence Number=SeqID_2056
gctcgttctcgcattgtcgtctatacctacacactatactgtctcactgtcctcacccactatctcactctctactcgccgcgcacgctcgcgcctgtgtgatgcttctcatacttcgttncttcttctctgttctctgttgctgagttctgntaatttagttgcgttagtcgatatntgcatccctctactcgcgcctgcatcgcgcagtctgatcaccgatgagatcgcttcacattgtgaactatgtctcgtttactctggtgatggagagtatatgtgtcatcttatcacactcgcatctcactgattctcgtcgcgcgctctgcactgtcgccgcgtgcgnngtcgcccgcgcgtggcgcactactttgccgtcgcgtactgctctacttctactcatccgacgcgcacacaccancgcccactcgtcggctgtcttaccgtctgtatgcactcactgctagctctctcccctgtcttgtactcttgcgctacctctatctgtctctcaatccaccgccctctcttcctctcatctctctcgtgtctctcacatattgtaatacttctcatttctcatatgt

SEQ ID NO: 11836 - DNA, 522 bp, Glycine max
  Coding DNA Sequence Number=SeqID_2057
cccagcgtccgggttggttcatttgatctgcgacgggggagaggggggagaattgtgatggggggaggacagggtcccggcacaacctacaaaggggttaccattcatcagccaaagcgctggcaccctatcaccggcaaggggttgtgcgcgggcatgtgggtttgggtattctacagggcaaagcgagaggggcctgttgtattgggctggagacatccttgccaggggccccatgatgatcatggcaagggccattagcattccttaggcgtgagctccaagaccaggaagaccagaatttgaagtgtctgttgctgtggatgtgttgttcaaatgtgtcctttgatcaattcaataaatttggctgtgaaataagccccccccttttgcgtgagttcatgagcattagatatgtctgtgccccttccctgctaactgggatgaaagtcatgctatgtgttggttggattattacccatttcgtcgcttttctccgaaatttatgggagtggactcaaa

SEQ ID NO: 11837 - DNA, 260 bp, Glycine max
  Coding DNA Sequence Number=SeqID_2058
ttgtttctaccagtaacaatgtggaaattactttgaacttaaatactgcttttgtttacaacttctccagcaaaagaaccaaaacccaacttagaaaaatataccaaagaaaaactaatcttaaagatgttttggtttgaacaaaaattgctacgagactaaaaaatagagcttatatcgatatacattgttggtgtaaaaaaaaaaaaacaaaaaaaaaaaaaaaaaaaaaaaaaaaaacaaaagctccaaatctcttg

SEQ ID NO: 11838 - DNA, 461 bp, Glycine max
  misc_feature (135)..(135): n is a, c, g, or t
  misc_feature (139)..(140): n is a, c, g, or t
  misc_feature (142)..(142): n is a, c, g, or t
  misc_feature (190)..(190): n is a, c, g, or t
  misc_feature (230)..(230): n is a, c, g, or t
  misc_feature (234)..(236): n is a, c, g, or t
  misc_feature (278)..(278): n is a, c, g, or t
  misc_feature (369)..(369): n is a, c, g, or t
  Coding DNA Sequence Number=SeqID_2059
cttgcagtggttggctccacaaacatccaatcccacacagaccaccatagagggaggtgggggcggtatagctgtgattaaatcaatctatattattcatacatcatttctactcttttgtttcttttttctcanctcnngnataaactcaaacaaaataaaagataaggacagcaagagatggcgatgnggggtaagcttgttgttgtgtgtgtaggtgtgtagcacancgtnnnaataacacaaaagtaacacatacaacatccctcacacacacnagacacactaacatcagtacatacaatcttataactctccattctccttatcgccgttttgtgtttctttgtcctgttataaattgtatanataatattatatttgttgtgtgttttgaagagtatagagaagtagttggtgtgcactaccgaacactcatactcctatatgatttaggtggt

SEQ ID NO: 11839 - DNA, 177 bp, Glycine max
  Coding DNA Sequence Number=SeqID_2060
tgatagaaagatccctgcctaaaagattgccggggcctattatggaaaacggcctatgaaaataggaattggaggaattgtttttgatgatggacccaaagctcttaaaaaagggcccgcctgggtaaaagggtacctaatttcaaggggaacaaatgggcccagggttatatttgg

SEQ ID NO: 11840 - DNA, 366 bp, Glycine max
  Coding DNA Sequence Number=SeqID_2061
tgtacatgcttcgttcggccggtcgctctctccctcctctccgcactgctgcgccctctcctcgactcctcgtcgactcgtctcgcctgcttcgactctcctgcgccaaggtctgttgcgatgggcctcctttgctcgatgggcgcccctggttgagtttcattcgtgcgcagtttggttcgccttgccattgttgactgcgtcgagccatggatccttctatccttaccactgaggttgtacgatcttgtccgttgctgcatctcctctccgttttgctcgttgttgcatttgcgtcctgctcatcaaggattgctgctctccgctctgcctgccttcgtgttgtacttcctgtatgtgctatca

SEQ ID NO: 11841 - DNA, 528 bp, Glycine max
  misc_feature (148)..(148): n is a, c, g, or t
  misc_feature (340)..(340): n is a, c, g, or t
  Coding DNA Sequence Number=SeqID_2062
aggatacctgaatatgccatagcgtcgcagcagatcggtaaacacacagcataattcttcccgcacacacgcaacattctatcggattcggaaattggcgcttgaggacaggaatattacacggatataatgcgactgtgtacagacnagtctcatacgatcctaggtgcacggatatatgtatacctatccgcgacctcactacatgtatatcgaatactcatagagcgccttactcttcgcatcatgtgcacagctgacacgaatgcacatagactacagactacgctatactgacaacacgtgcggtgacacgcgctcacactatgacatctcgtanttgtacaccacttcatgtctatcgatcttgcactaggtactatgtgaaatgcgtcgtcgaggcgtcgcacgcaggctaccatgagtgtcgaacatacgctgtgcactctctcctcatccgccgctgattcacacctctacagacgtcctcgtacagagacgctgagcgcacgcacatagttatgctac

SEQ ID NO: 11842 - DNA, 334 bp, Glycine max
  misc_feature (208)..(208): n is a, c, g, or t
  misc_feature (245)..(245): n is a, c, g, or t
  misc_feature (257)..(257): n is a, c, g, or t
  misc_feature (264)..(264): n is a, c, g, or t
  misc_feature (287)..(287): n is a, c, g, or t
  misc_feature (289)..(289): n is a, c, g, or t
  Coding DNA Sequence Number=SeqID_2063
gcccgctcagaccaagactggcaaatctagacctatcgaaagacctggcctcactgaagatgaaatcgaagaaatcagagaagccttcaatctctttgacactgataactctggtatgattgaccctaaggaattgaaagctgccatgcaaagcttgggcttcgaatctaaaaaccccaccatctaccaaatgattgccgatttggancatgaaggccccctattgattttgataccttcttganagcaatcactgnaaagctnggtgacaaagaatcaagaaacgntntctccaaaatcttccaattattcgacagtgctatagtggatccat

SEQ ID NO: 11843 - DNA, 371 bp, Glycine max
  misc_feature (252)..(252): n is a, c, g, or t
  misc_feature (285)..(285): n is a, c, g, or t
  misc_feature (297)..(297): n is a, c, g, or t
  misc_feature (312)..(312): n is a, c, g, or t
  misc_feature (321)..(321): n is a, c, g, or t
  misc_feature (341)..(341): n is a, c, g, or t
  misc_feature (346)..(346): n is a, c, g, or t
  Coding DNA Sequence Number=SeqID_2064
tatacagaccactgaatgctgcgtctgctcacgcacactcgtctactctcctctgcaaccgccactcgcacgtcgcgctcctactccatatatgatacatacgatgacactctgatatgtagtctatgacacgctctcgcgcactgtacgcattgtgtgtgttacgcgtcgtggtgtggaccttgttacagatcgcgtttctgttagatcctctacgatgcgacatatactctgctcgcgcgcataagtggnagggacgaaacgagtcgagcaagatagctctgngatgaggtgtgntgctcaccagcaacngcatatgtntgcatcatagacaactctangtatntctacctatctgcatgataaaacca

SEQ ID NO: 11844 - DNA, 112 bp, Glycine max
  Coding DNA Sequence Number=SeqID_2065
atagcccaccaaccagcaggcataaggaccggcaaagagagagagacagcagttttcattatcccaacaggtctaagcccacagagagactaagcacccgggattatgacaa

SEQ ID NO: 11845 - DNA, 584 bp, Glycine max
  misc_feature (46)..(46): n is a, c, g, or t
  misc_feature (56)..(56): n is a, c, g, or t
  misc_feature (86)..(86): n is a, c, g, or t
  misc_feature (222)..(222): n is a, c, g, or t
  misc_feature (237)..(237): n is a, c, g, or t
  misc_feature (282)..(282): n is a, c, g, or t
  misc_feature (298)..(298): n is a, c, g, or t
  misc_feature (313)..(313): n is a, c, g, or t
  misc_feature (327)..(327): n is a, c, g, or t
  misc_feature (336)..(336): n is a, c, g, or t
  misc_feature (378)..(378): n is a, c, g, or t
  misc_feature (439)..(439): n is a, c, g, or t
  misc_feature (515)..(515): n is a, c, g, or t
  misc_feature (518)..(518): n is a, c, g, or t
  misc_feature (533)..(533): n is a, c, g, or t
  misc_feature (552)..(552): n is a, c, g, or t
  misc_feature (559)..(559): n is a, c, g, or t
  Coding DNA Sequence Number=SeqID_2066
agagggtctgtagcttgtgtcagatatactcgtgtaggacggaacntgagagatgnaaagcatctctcaccacaccatcccccacntcttctgtcagaagcttctgagtatagagctccaacttataacgctatctttatagacacaatagagtgagttggctttacaagctgcacactcgcgcgtggacagtacaaggtctctctctctacatgacggagngtgaggagatatcangaacagagaatagaggtgtgagcgagagagagcttcattacgatncatagtcatcagtctnaccgaatcgacttantcatgcttcacagngactgacgngagacggctgagatatccacaggaatcgagactcgtcgcatncatagacacgatctgtctactagtcagtatatggtgccgtgtgacagtcatatagagactnctacgatagatctgcactcttctcgtagaagagtcgagggaggggcgttagatcgcgcgcgttgctgctgagccgnccncagtgcggggtgagnatagctatgacgacgatgnatagagnacatatctgcatcgtactgctctat

SEQ ID NO: 11846 - DNA, 489 bp, Glycine max
  misc_feature (464)..(464): n is a, c, g, or t
  Coding DNA Sequence Number=SeqID_2067
catacgtgggccgagtctataatactacttatcacctcatactaccatactgtcgaaggctgtggtgcgtgtggtgtgtcgcttatattgttgttgtcttcttatctgacttaccaatgtcacgtgattgctgttgtctgctgacacgtactactcatgtctcgtcctgtataaatgcgcttatctctctgaactagcgctctatcttcaccatctacggtacttctatatatatgggtgtgtctgttgttcgctaaataacacattgtcagacagacctacacgcacactctctctgtctgtcctcttctgaatgtatacattctctactgatatttatcgatctgttgcgcggtcgtcgtgtacaacgtcgttgatctctctgatatacattgcatgctggtgtacgaatagtactaacacacataacgacgtgtagcataacatagttgtgtgttgcgtcnatgtgcacactaactgtcgtccatc

SEQ ID NO: 11847 - DNA, 457 bp, Glycine max
  misc_feature (230)..(230): n is a, c, g, or t
  misc_feature (263)..(263): n is a, c, g, or t
  Coding DNA Sequence Number=SeqID_2068
gaaagaccagcagctaagcttgctcccactgacacagcctacagctaccggcgtgatgggcggaggcggcttcgtgtccacgctccggtggctgccggacaccggcgccgcgctgcgctcgccctacgacctcctccgcggctggccggggctgctgctcgaccacccggccgtcgacgccgtgctctgggccgccgtcaccgccgtcgagtccgtcgccatcgcgggcntggtctgcgccttcttcctctgctgcggctgcnccttgtagtgaaagtcgatccatcagccagccggcccatacatgtcttctctcctgtccttctcaatgctccccgtttcgctcctgcttcgtctggatgcttatggtgtgcattatgtgatccagaacaatatgaaagaaatataatggcgaatcaatgttcatggaacgcctcgtgtctgtgaacttgagtat

SEQ ID NO: 11848 - DNA, 551 bp, Glycine max
  misc_feature (69)..(69): n is a, c, g, or t
  misc_feature (189)..(189): n is a, c, g, or t
  misc_feature (357)..(357): n is a, c, g, or t
  misc_feature (417)..(417): n is a, c, g, or t
  misc_feature (482)..(482): n is a, c, g, or t
  misc_feature (506)..(506): n is a, c, g, or t
  Coding DNA Sequence Number=SeqID_2069
taatatccgatatctctcttcaccaacaaaacccttcaccatccgaacagagagatatctcgtcacggnaagagaacgacaccgccggtgtgacacgtcggcggatgtccgatatgtgttattgatttttcatataaatatatatatagtggcataggaatccatctccactgcaggaacggcatcgcnactggcgaggagtagacacgcgcaaagtggacggggcggggataacgcctgcgtcacacccgcacgtatagaatggatagacacacatagtcacgcacagaccaccactgggcatgcataatcctctatgggctgtattgtaggttctaacgtctcaatacagatgangatgcaggtgagttgtaatctccttggaggtgtgcgcgtctgagaatatagatgggaggnggcactaactcacacatctcggctccttcataaccacatagaaaaaaggaggcggcgcccctcancgtatgtggtgtgcgtgtaatttntaaaagcacaaccgcatactagagtagggttatcccgtctcacac

SEQ ID NO: 11849 - DNA, 599 bp, Glycine max
  misc_feature (37)..(37): n is a, c, g, or t
  misc_feature (44)..(44): n is a, c, g, or t
  misc_feature (63)..(63): n is a, c, g, or t
  misc_feature (100)..(100): n is a, c, g, or t
  misc_feature (113)..(113): n is a, c, g, or t
  misc_feature (136)..(137): n is a, c, g, or t
  misc_feature (139)..(139): n is a, c, g, or t
  misc_feature (150)..(150): n is a, c, g, or t
  misc_feature (157)..(157): n is a, c, g, or t
  misc_feature (162)..(162): n is a, c, g, or t
  misc_feature (169)..(169): n is a, c, g, or t
  misc_feature (188)..(188): n is a, c, g, or t
  misc_feature (243)..(243): n is a, c, g, or t
  misc_feature (249)..(249): n is a, c, g, or t
  misc_feature (300)..(300): n is a, c, g, or t
  misc_feature (381)..(381): n is a, c, g, or t
  misc_feature (404)..(404): n is a, c, g, or t
  misc_feature (413)..(413): n is a, c, g, or t
  misc_feature (439)..(439): n is a, c, g, or t
  misc_feature (457)..(457): n is a, c, g, or t
  misc_feature (477)..(477): n is a, c, g, or t
  misc_feature (542)..(542): n is a, c, g, or t
  misc_feature (569)..(569): n is a, c, g, or t
  Coding DNA Sequence Number=SeqID_2070
atgctcacatcatgacatctatgctgttccgtatcangcgaccntaccgtacatctacgtcanagtactgtcttcacatccaagatgtcgatacgtatgnctgctagatttgnacacagccacgaatatcgctcanncnatcgtcgctanatctctngcccnctcacancatgtattgagtgctctangtatgctgtatgtagatactactctagctgccccatatcatgagcactgacgcancgaagntggtgactatgacaatcagcgcccagcgccatgagctctatgcgatgagtntttctcagctactgctacatcaacgtatgcagcacatcgtgtagtacgtccatgctaatattagaccgacggacgtcgtgntgcgactcttgcacgtcgtcctncgtcatcantcactacctacgacgcattgattgtncgatacgtcgtctactgncgctgacacgtcgcgtctgntaaattcctaggctactgattgtcgcgtctagtcatctagtcgcgcagtacccgctgcatcctancatgtccgtgtatccagctgacactcnataccatcgctgcgcggtggttgaatcgct

SEQ ID NO: 11850 - DNA, 393 bp, Glycine max
  Coding DNA Sequence Number=SeqID_2071
gtgctaccacatagggacatctcttgaaaattattgcaaatctgcagaatattgcggcgatatgccagaacttcctggaaaatgttctggaactcatgcaagacgtgagcaatactccaattggagaagaatatgggacggggggaccgcttattggaactgtgctaccatttatatttgctactaatcggacgggggctcattgaccctggaaaatcatacaaccacctcacggggagatatgtgctcccaccaatgacataaatactaccgttggttcagctgcactgacaacaattgcatattacaatgcgggactttcacaaaaaggataagcttattttaataaatacatccaaccaaccccaaacctttcaccgattaacatctcag

SEQ ID NO: 11851 - DNA, 566 bp, Glycine max
  Coding DNA Sequence Number=SeqID_2072
atccaaacacacaagagctcctaacccttacatcgctcacatgtacaaattcattgctgctttactcctcctcgctgtcttctccactcctttacaagcccaagaaatggtcttggaacaagtcggtgaatacattgagatcgttaatttcgaagacttcatcaaccctggcactgataacccagaagttattgttgtgattcctgaaccagaacaagaagaaggtgacgagatcgacgtccctgctggagaagtacttgttattggcgagtatgagtttgtcaatggtgaaactggtgaaggtgctttggctgaagaaggttttgtatctgaagaaggcactttatttgaaggagaactcaccattgtcgaagtagaatttgatcaagctcttattcaacaaggtttcctttctctttaaggaccatctggagagaagaactttgtcagtttgcataaaaagaaaaacataaacactttttattgtataagtttatatgtataaaggttgcttttttaagggttaaacatagtaagtaagtagtatgtagagctctgtaaagacc

SEQ ID NO: 11852 - DNA, 209 bp, Glycine max
  Coding DNA Sequence Number=SeqID_2073
cacaaatagttgtcttactcacctttatgaatatccttcgtgcttctttatcttttttgcaggttttgatgcagcccccgagtagtgaattgctagttgctatattgttcctcctcagtgttgttctatttgttgtggattactttgaagaattatattttgtgttcatagctgcaaccatccccttccttggcgttctgcttgaaaat

SEQ ID NO: 11853 - DNA, 581 bp, Glycine max
  Coding DNA Sequence Number=SeqID_2074
aggagacaacgagcgcatcgacctcctcctcctccccgagcacgagcgcggccccgaccccgatcccggcggcacccaagcccatgaccaagaaggcgaacccctcggtctgggacgcgctcgccttcagcggcccggcaccggagcgcatcaacggccggctggccatggtgggattcgtggcagcgctcaccgtcgaggcggcgcgcggtggcgggcttctcgaccaggccggcagcggcgctgggcttggctggttcctggtgaccgcgggggtgttttccgtggcatcgttggtgccgctgctgcagggccagagcgtggagagcaagtccagtggcttctggagcgcggacgccgagctctggaacggccgcttcgccatgctcggcctcgtcgcgctcgccgccaccgagttcatcaccggcgcgcccttcgtcaacatctaagacggcgtactgtagcgctgcggattctcttttcatcagctaacaaatcgtaatagtagtactaactgttgtagccacgtttatgtcacaaaaaaaattgttgcagccacgttgccgttttgtactatcggt

SEQ ID NO: 11854 - DNA, 499 bp, Glycine max
  misc_feature (81)..(81): n is a, c, g, or t
  misc_feature (227)..(227): n is a, c, g, or t
  misc_feature (278)..(278): n is a, c, g, or t
  misc_feature (361)..(368): n is a, c, g, or t
  misc_feature (399)..(399): n is a, c, g, or t
  misc_feature (410)..(410): n is a, c, g, or t
  Coding DNA Sequence Number=SeqID_2075
gatgctatagattacactcactatcaatatacatcaccactacatatacagtcttaactaatagtatagtactcattaccncgtgcagtctatcttatagttctcaccatgcacaagaatataattcagtgcatgtatatgtctgggccgcgcgggcgcgcgagcgagcgtattgtgtgagcagcaacgcgacacaatatccgtcgcgcacacataccgatggacanacaccacaggcactagaactccgcgcgcatcagaccacacacaactctacnccgcgcccctctcctccgccgccgctacgccgcgcacgacacgagccgctcacgggtccacggcgcagacgcgcagcgcacannnnnnnncagtagcgtgtgtgtgatattgttttaatgngagttcgcgtngacgtcatcagctatcatggttatggtattatgacctactgtctatgcagtattattatttataaatactgttctcatgtagtgtatga

SEQ ID NO: 11855 - DNA, 586 bp, Glycine max
  Coding DNA Sequence Number=SeqID_2076
aagtgccggaatcacaacccatcggggggtggatgcgatttttacagatgggaggaagcctacgcggcccatcttgccacagcacatccagtgggggcaaatcggtgctggtcagatgcagggcgggcaggcggctggagctcaagctgtgcaggcggcgcaggttcatcacgtgcagcagaacggagcgccggaggtgtcgcaggctgcatccttggcaagtacggtggcaggatacatgctggcggcggctccagtcgccggtcgtcagggtggcatcgtcgccgatgctgcatccataaatctggtggcgtcggtagcaaatctagtgattggcgtggccattctgatgctgctggttgcggatgttgtcttgcgcgtgctgaactaggtgtcgtggtgaagatgcgagagagactcgctggcattagtgctaagtgctatgtaaattaagctactaagtacatgtgttaggtggtcaaagtgtgttggtgagcaccgagcgatgctgtacccatgaagcgcacagtgacggtgtacttttggaggtgtactgcttatggtgtactagcgtcatccaaatatt

SEQ ID NO: 11856 - DNA, 359 bp, Glycine max
  misc_feature (54)..(54): n is a, c, g, or t
  misc_feature (66)..(66): n is a, c, g, or t
  misc_feature (69)..(69): n is a, c, g, or t
  misc_feature (73)..(73): n is a, c, g, or t
  misc_feature (85)..(85): n is a, c, g, or t
  misc_feature (91)..(96): n is a, c, g, or t
  Coding DNA Sequence Number=SeqID_2077
tggaagtgaaaaccgaaacagtaagacctccaaaatgaaatgagaatttgtttntataatgggatntantagncaaagaaccatntaattnnnnnnggttggggggggggggatctgatggaagatcaagatcatgttattaaataagcctcctatggtttgttaacaagaggtgttatagttatactgcactgattccagatccactataagggaatgtatacgaaaaaattaaatttgaagattatagtctatctaaaatctgaaactgagcctagtcaacttaaactcgaaagaaaatatcctatgatgcaaaaatttccattcctaagttcatacctgattaaacaaaccaccaa

SEQ ID NO: 11857 - DNA, 443 bp, Glycine max
  Coding DNA Sequence Number=SeqID_2078
cttcccaattataactatctgtagttaaaattagatatatatgcgtttgaattgtaaaactcctataatttggagtttccaactgatgtttcatttcgtctggaactttccaaatttggagattcactatattatcattgttattcttattattcctgtattccttaatgaaccaagtgcttcaaagtcatttaacgctgtttgtcacttagggcttatatttattatgttgagtaataattgagtttgagaatttgcttgcaatttgattgagaccacttgagcaaagcagggatgcgttgctactgctttatttattttgtttttttaatcagctttccaattgattttggttttgttctttaagaattatggctttgtggtttgtttcaccctttttcatttttgttttttgatcatcgataacaggactacgtgcccac

SEQ ID NO: 11858 - DNA, 411 bp, Glycine max
  misc_feature (29)..(29): n is a, c, g, or t
  misc_feature (267)..(267): n is a, c, g, or t
  misc_feature (354)..(354): n is a, c, g, or t
  Coding DNA Sequence Number=SeqID_2079
ctttttatactacctgctcgagctgcttnacctttatttggagcttagtgtaggatttcagtactatgaatattcaaaattgaaacaacagaaattcaattttatttattattgtgagaaatatgagcttttgagatatagttgtatagtaattggtgtcattctcaatctttttggcacatttttcaataattctttcacagaagattacaaacatgaatgggaatacatcagaagaatctttatcattgtcggtatcactcttancttcacaccttttgcaaataattgctcctcaatctgcaaaagatttatgggtcttcgacctttccaagtctttggtaaactctgctnatggtgtctatttacttcattggcccatcaccctcgctctccaatactctgaaagtc

SEQ ID NO: 11859 - DNA, 488 bp, Glycine max
  misc_feature (39)..(39): n is a, c, g, or t
  misc_feature (61)..(61): n is a, c, g, or t
  misc_feature (210)..(210): n is a, c, g, or t
  misc_feature (258)..(258): n is a, c, g, or t
  misc_feature (269)..(269): n is a, c, g, or t
  misc_feature (339)..(339): n is a, c, g, or t
  misc_feature (349)..(350): n is a, c, g, or t
  misc_feature (358)..(358): n is a, c, g, or t
  misc_feature (435)..(435): n is a, c, g, or t
  Coding DNA Sequence Number=SeqID_2080
agcatatgcatcgagcgaccgactcggatagagtagcgngaccttctatgacacgtatgtntacatatacttatgagtatatctgctcacgacacgtgtatagtctacatcagtatcacatcgttagcgcacgcgacgacactgtactcgcctgcttccttgtctactatgactggtgtctcgctctgcgctttcacgtactgcagacangctccgtacttgcgaagcatgtgcagtgagcgatcgacacagcgcgangctgccgcggnacgacatatagtcgctttgatgatctgcgtacatatcgtatcatacgagtgtcgtgtaagtgagataatncatacttgtnnttaataancgcacgatcaacgcactctacgtggcctgctgtggagcgcagagcacagcggtatagtgagtgtagtagtatatacnacacatctctactatcatcattctattctctactagtggctgcagacgggtgt

SEQ ID NO: 11860 - DNA, 443 bp, Glycine max
  Coding DNA Sequence Number=SeqID_2081
agaatgcagctgaacagcatttggcaaactctgttgaggaaatcacacaacagcagcttgagagagtcttcataaccaacatctttgctcagctctgtttggtcaagtatgctctgaagcacatgaataaagggagctgcatcatttactgtacttgagttaatgcttactgtgggaatccaaaaaccgtagtctgcactgctaccaagggaactagtggggcctcaccatatgggtctctctacatatagcgaatggggaataagggtgaatggtgtggaacctgggggagtttggacgccgatgcgccagcttcaaagcctgcagagatgattcagaacttggggagtgaggtgccagttacacgtgggctcaagcttgagagagagcaggagagtattgtgctggaaacttagttggactctacactacgttctgggcag

SEQ ID NO: 11861 - DNA, 492 bp, Glycine max
  misc_feature (449)..(450): n is a, c, g, or t
  misc_feature (455)..(455): n is a, c, g, or t
  misc_feature (457)..(458): n is a, c, g, or t
  Coding DNA Sequence Number=SeqID_2082
gctaccttgcttcttgtgtcgttgttcgcctctgccctgcgtggtcgcccccggccctgcgtcagccgcccatcacttactcctgtaataacacgataagaataatatactcacgagtgaacatacatttggtgcgttggtgattgttcggtcagttggtggtccgtctcggggtgcggcggtgcgtgctcgcgttgtggggctttttttttgttgtgttgtgttgttaggatgtggctcaattacgcggagacgcagcacagcgagcgtgggtggatccgcgcgtgacagcaggcggcgcgcgacgcggtggcggggcgggtcggggcgggtggtgagaggtgtgttacgagtgttgtttgaggtagtaatttatctcaccacgtgtttttgacgtcgacacggcggagccgctcgtccgtgtgcggctagaacagcagcgactacgnncaccncnntatttttatgctatattttattgatggtgggtgt

SEQ ID NO: 11862 - DNA, 356 bp, Glycine max
  misc_feature (159)..(159): n is a, c, g, or t
  Coding DNA Sequence Number=SeqID_2083
cttctgccatgattgtgtgattaggggatgtgatacatctgtgatgctagctacaagaaacgacgcatcggagaaggataatgctataaatctttcactagctggtgatggattgaacactgtgatgaaagccgaaggtacggttgacaatatacctgnctgccatagtaaggttgcatgtactgacgtattggcatgaacaactgaacacatcgatgcattagcagaaggacgatcgtatgcagggcagttgggaaggctggatggaagactcgcagcaagagccggtggtaggaacgatcgaccgcatgctgaatggaagctagacagctaggccgagtgtgtgctgcacgata

SEQ ID NO: 11863 - DNA, 431 bp, Glycine max
  Coding DNA Sequence Number=SeqID_2084
atttcattattttccccattttgcattttattttgtgacattttgaacttattaggaccctagtttcaaccactctcactcacactaattgttaataggatggagtcattaaatgtcattagtgttctgttctagaagcaatatatcaccactgcttataaatttattgcaatgtcaaaaaattcatgcttccaaactatgttaggttacaaattgttttattaaataatgtagttcaacattttcacttgatactggaaaagctgagagtcctagacaaaaagagctaatagttacatatcaagtatgacatcgacttagtttcatgtttgggaaatagaattttacagtctgccaaacagcataagtactcctagcagctggaagatgtctgatttttatcacaacagggcctgtttgcaatacgtttg

SEQ ID NO: 11864 - DNA, 506 bp, Glycine max
  misc_feature (67)..(67): n is a, c, g, or t
  misc_feature (203)..(203): n is a, c, g, or t
  misc_feature (392)..(392): n is a, c, g, or t
  Coding DNA Sequence Number=SeqID_2085
gagctatacttctactaatcgcagtcgatactcacactagacacgccgcgtccgcaccgaattctanacttgtatctctgcgaagatcatctgatgacctcgtctggttactccacatgagtacggtgcgctaaactgtactgtgtcccatgctactgatgagtgcggtctctctactgcacatccatcgatgtagtactgtntccgatacctattatcacatcagatgcaccttgctacgtagctgctgcactggtgtgtgtgtcgccgacctgtcatcaaactgctgcgcgtgtatcttctgctgctgcgatccctcacgctctcgcgctccagtgtctgatcgtatgatgcgcgaactcaactcgacgctagcgtcgacggacgtcgangatgtgagacgacacgatgaatgtatgttgatcgattgagatgactctgcttcagcaggtgtcgctgtgtattacgtcatttcactgtatacgcgcgatcgcttgagatactgc

SEQ ID NO: 11865 - DNA, 384 bp, Glycine max
  Coding DNA Sequence Number=SeqID_2086
agaaaggtctcggaggtttcctcaggatgatccgagaagaaggctttctgagatgtctgccagatgggaacctcttgcaaaccaaaatacacaacataggagcaacgcttattggtgtggacaagttcggtaacaaatactaccagaagctcggcgatactcagtgtggtcgacacaggtgggtagaatatgcatccaaggatcgttacaacgcatctcaagtgccagcagaatggcacggatggcttcatttcatcaccgatcacactggagatgagctgttgagtcagaaaccaaaaaggtatgggattgagcatagagagaacttctctggacatggtgatgcgtacatttaccattctaaaggacataccttgaacccgg

SEQ ID NO: 11866 - DNA, 356 bp, Glycine max
  Coding DNA Sequence Number=SeqID_2087
tctctctatcgtctctcggagatattactcagggcgttcttctgtggatcaaagatgaatcaatacaacgccttcgtgtctcgcgaggagatgatgggacttgatcgcagcaacgatctcgtcgtttgtcctaagcctcgacgtgtcggcgtactcgctaacaacctcacgcgccctctcagattacatatgagtcaagctgctgctgatttgtgtgattctgaagctggtgcagagcttttagacatcattcgtagaaaggaggacaatggtacaatagggccgtactttctcggttcgcctccgagcagagcagcgaacccattagcacaagacgcacgctttcgagacgagaa

SEQ ID NO: 11867 - DNA, 483 bp, Glycine max
  misc_feature (26)..(26): n is a, c, g, or t
  misc_feature (32)..(32): n is a, c, g, or t
  misc_feature (34)..(34): n is a, c, g, or t
  misc_feature (36)..(36): n is a, c, g, or t
  misc_feature (40)..(40): n is a, c, g, or t
  misc_feature (49)..(51): n is a, c, g, or t
  misc_feature (60)..(60): n is a, c, g, or t
  misc_feature (89)..(89): n is a, c, g, or t
  misc_feature (104)..(104): n is a, c, g, or t
  misc_feature (116)..(116): n is a, c, g, or t
  misc_feature (119)..(119): n is a, c, g, or t
  misc_feature (130)..(130): n is a, c, g, or t
  misc_feature (157)..(157): n is a, c, g, or t
  misc_feature (159)..(159): n is a, c, g, or t
  misc_feature (180)..(180): n is a, c, g, or t
  misc_feature (217)..(217): n is a, c, g, or t
  misc_feature (235)..(235): n is a, c, g, or t
  misc_feature (237)..(238): n is a, c, g, or t
  misc_feature (248)..(248): n is a, c, g, or t
  misc_feature (259)..(259): n is a, c, g, or t
  misc_feature (276)..(276): n is a, c, g, or t
  misc_feature (288)..(288): n is a, c, g, or t
  misc_feature (301)..(301): n is a, c, g, or t
  misc_feature (310)..(310): n is a, c, g, or t
  misc_feature (316)..(316): n is a, c, g, or t
  misc_feature (331)..(331): n is a, c, g, or t
  misc_feature (435)..(435): n is a, c, g, or t
  misc_feature (437)..(437): n is a, c, g, or t
  misc_feature (440)..(440): n is a, c, g, or t
  misc_feature (449)..(449): n is a, c, g, or t
  misc_feature (455)..(455): n is a, c, g, or t
  Coding DNA Sequence Number=SeqID_2088
tctctaactgtgaagagccattaacncatccntntnaatnactttctcnnncatcgctancagacctatacgacacatacactcttctncgtcacacaagatanggtcagatcaanttnatataccggantagggcgttcgatctcatctcggtcgngntgtcatactatctcgactatnatcggtattcgtgacatggcacaattactactatatnatgttatagcgtaatatntnngcggtatgantatctttgttnattacgatgcgcatgangattcgttacgngatacactaacgntcgctggcngtgatntgtctgtatagtaantgacttgttctatgatctgagcgaatcagctgaggcccacatcctgttgacgacgcatcgatgcttcgtcgcgcggtctcgcagtcctgcgcaacacacaggcncncancgcggtgtncgctcntccaccaccctgttatcgccttcgatgt

SEQ ID NO: 11868 - DNA, 476 bp, Glycine max
  Coding DNA Sequence Number=SeqID_2089
gcacgacttatacattgggccacgagctccaccaataatccactgtgagggtgaaattgggaaaggaagtaaagttaagtatgaactggacaagacaagaggacttatagaggaagatcgtattctttactcatcggcagactacccacacaagtatggaattatcccgataaccatttgggaagacagtgatcctatggaagagctggttctaatgcaggaaccggagcttactggttccttccaacgtgctcgagctataggactaatgcctaagattgaccggggagagagggatgactagatcatatcagatagtgctgatgaccctgacttccgatattacacagacatcactgagcttcctccacatcggctcgctgaaatcagaagatactgtgaggactacaagaataatgacaacgctacagatgatgttggagactatctaacatctgaaactgccattgatgcca

SEQ ID NO: 11869 - DNA, 370 bp, Glycine max
  Coding DNA Sequence Number=SeqID_2090
agctctctttgctggtgattccaggctgcacaaacccctgcgtattttcgggctttttggtactccaaatgcagaggtgtggcctggggtgagtaaccttaaggactggcatatatacccccaatggaaccctaatagtctgtcaacggctgttccaggcttgcatgagcttggccttgatttgctatcccaaaagttggcaaatggaccttcccagaggctttgtgcaaaggaagcaatgggacatgcttgcttccatgacctggactaggggcatctttagaaagacaaattattgatctatgcttctcttgagcggtggatcgttttaaaccaataaacatttacgggtttacttttcatatttgtg

SEQ ID NO: 11870 - DNA, 345 bp, Glycine max
  Coding DNA Sequence Number=SeqID_2091
taccaaaccacatattttctaaaattcccccttttgaggaaccttgtataaaaccaaaaaaaggggatgcggttccaaaaccccggggtgaaaagagaaaacttttaggggaaaaactaaaaataaataaataaataatacccctagcaagggaaacaaaattaagccccaagccccctgaagagggttggccaaaaagggactgcaactggggccaaaacatatgtccaaaggatgaaaacaaaaaattccccttcaccagctccaaaaaactgggggagggggcctataacctttggggggggaagggcattttgaaggagaaacccaaactggatacaaggg

SEQ ID NO: 11871 - DNA, 529 bp, Glycine max
  misc_feature (286)..(286): n is a, c, g, or t
  misc_feature (434)..(434): n is a, c, g, or t
  misc_feature (436)..(436): n is a, c, g, or t
  misc_feature (481)..(481): n is a, c, g, or t
  Coding DNA Sequence Number=SeqID_2092
aacacacagtatgagcgcaaagcgacgaagcaccacacgcgcgcgcggacacatgaacacacacgacaacaacacaacacattacgagaataacagatataatacatctcacgagaacatatggagataaaagtgatgagtgttaataataactacaacgagaggacacaattaggcggatgtcgtgaaacgcaggcgagcgcacctaaggacgcacagcaacctcgaagataaacaccacaaacgacacacaatatacacgccacgctagcagtatatacacgcnatagctatccacaccagagattacattatcacctcgaccggccataataaccagagcagcgcagtatatattctctcatattatctttattttgtgatctcactacctggatcgatagctcactatctaccgagtgacgacactagtntngctgtcttaatattctactattaccttccctctctctcatacaanactctttctcatctcttccatataactccgcaagatgacgactgtaat

SEQ ID NO: 11872 - DNA, 176 bp, Glycine max
  misc_feature (137)..(137): n is a, c, g, or t
  Coding DNA Sequence Number=SeqID_2093
gaaaaccatactgattgctgacacatgaagcatcagctgcacctgatcatgagctgatctataaagaaatggcttctgtgctccattggggatcatcaacgggaaaagtgtagtgaagtatgtggaacccagttcanttagagtgtcagcacacatggagcttggcaatggacatc

SEQ ID NO: 11873 - DNA, 568 bp, Glycine max
  misc_feature (62)..(62): n is a, c, g, or t
  misc_feature (136)..(136): n is a, c, g, or t
  misc_feature (188)..(188): n is a, c, g, or t
  misc_feature (337)..(337): n is a, c, g, or t
  misc_feature (352)..(352): n is a, c, g, or t
  misc_feature (388)..(388): n is a, c, g, or t
  misc_feature (442)..(442): n is a, c, g, or t
  misc_feature (537)..(539): n is a, c, g, or t
  Coding DNA Sequence Number=SeqID_2094
gtgaatacgtagcaattgtctatataacgaatatatttgggcggtttgtggtgtgtggtgtngtgctaccttcgttccctcacttcacgtcctaccgcggaccgaccgcggcagattgcgatgtacgttggcgtgngcggcgacgacacagcgggcgatttcatgtgttctcttatttattatacgcnattatcttatgtttaatttcagcatgtctcctggagagggctacggaggcgtgatgatgaatgttgcattattcatcaatcatcgttagacatatatgctgggtgtgtgagcgatcgataatattacagaagtgtgactagatagagcncactcacacggaacncgtcttgttataatatatagagtatagtatatatcntctggcgttattcggctgctccgcatatctgtttccttcggtcttctgttccanttttatttattcctgtttcatcgggagggggggagggcccccctccaccactcgggttatactttatcagagtattcatcctatatttattctannntatatgtttagtgtagaatcctcttcttc

SEQ ID NO: 11874 - DNA, 419 bp, Glycine max
  misc_feature (378)..(378): n is a, c, g, or t
  misc_feature (383)..(383): n is a, c, g, or t
  Coding DNA Sequence Number=SeqID_2095
cttcgaagggatgatcacatgagcaagatctacttgtacctatgccagaggatggagccaatactttgtaagacaaataattgggttgtttagctatatcttaaatactatgagttggaagatgacatcattattggttgtcataatgaatgactcgatgacttgatcactatattgtttcttcgtttatataaattttattggtcatacatgagagcttaatacgagttcctgcagcccgtaggactcactacttcaaaagtgcccgccaccgcgatgaagcctcagctcttgtccctttagaggaggtaagtacaagcgtgacgtatcacgggcatactgatcctgtgcgactgtatccgtcaatgcgactcaacnaacgnagctaagtaaaaagctggagcctatgagaactaccc

SEQ ID NO: 11875 - DNA, 566 bp, Glycine max
  misc_feature (44)..(44): n is a, c, g, or t
  misc_feature (484)..(484): n is a, c, g, or t
  Coding DNA Sequence Number=SeqID_2096
gggacaccacaatctggccgtgatatacgccacaaatataacgnggtctactcaaatctcacgtcctcctctctactcacatgtctccgctcatactatattcatcctcaccccacacgacaacacctccatgaacctacaaaacataatatctaaccactcacccactccttactccacttacacacgttgattctctgcgatgcgtacacccctgacacaacaatcacatatacacatgagatataatatcacactacgcctacacacgtgagcctctctctcattccaaaatcatatacttcgtgttgcacgtacatcatcttctctgtctatggcgcagctctacactctcaacaaccataactagttctatggtagcctactgggaacgatacgacatccctcatatacatgaccgcgtcatatcactctatttatgtcacactctactctcgatgtctgctctctataattatcatcntctatatatcagtacatcgtgcggcacaccactccaacatatgaggaggatcacttgagggaggcgacaacacctatactcg

SEQ ID NO: 11876 - DNA, 384 bp, Glycine max
  Coding DNA Sequence Number=SeqID_2097
tattatgggtaatttgatttccggggcttggaaaggatggggggggaatgatagagcctgttctggccccaaccccagaaaatagggccgggcttgggggtccacagaagaagttgggtcctaaccctggggggcaggcagggggccgtttcaagattctttttcataaaaaaaccccttcccggttttgggggatgtccgagagtttaggtttgagccccgtatatagggggtagctttgataaaaatattatttagaggttttttcaaaattttttttggaaaccctagttttcccgggcaattttgaatttccttttttggaaattagtcaacatgtcaaattttgccccaaataagcaagatttttgctttgggtggaaa

SEQ ID NO: 11877 - DNA, 422 bp, Glycine max
  misc_feature (267)..(267): n is a, c, g, or t
  misc_feature (287)..(287): n is a, c, g, or t
  misc_feature (298)..(298): n is a, c, g, or t
  misc_feature (304)..(304): n is a, c, g, or t
  misc_feature (308)..(308): n is a, c, g, or t
  misc_feature (313)..(313): n is a, c, g, or t
  misc_feature (340)..(340): n is a, c, g, or t
  Coding DNA Sequence Number=SeqID_2098
aacacagctatatgctcctctttactacttcggaggagttgaaaaacatgaaaagatggttttaaccttaaagactcctaataaagttatacttcaagactttaccgatttctacagaattatcacaaggaccaagagcggttctctagttattcagaacaagactccatcatgctatcatgagcttcctgcaggcactgttaagataaagatgaccgatatatatgatggaaacccagtagaatacattcacaatggtggcgctgntacagtgtcgcggataactnttgggagatanacttgntggntggcnaaaagaagaagccagagggtgatccantaaaacaataaaagaatagataggcttaaaaaaaccgagctaagagttattgctcgtggatatatatacgaaagcacatttt

SEQ ID NO: 11878 - DNA, 600 bp, Glycine max
  misc_feature (365)..(365): n is a, c, g, or t
  misc_feature (542)..(542): n is a, c, g, or t
  Coding DNA Sequence Number=SeqID_2099
atgcgttctatatgtgcggtcgcgtcgctctgcgagcgtgcggcggcacgctagtggcgtcagaggcggcatggccgatcgcgcgaaccgtgcagggacagccagtgtatagcgtctgtgacgtgtaaggtaagcataaatatatatagagaaagcagtgcacgtataccgtgttatatatcgagtcatccacttacaattcatgaagccaatctcatgcgcgacgcgcgcagagacggaccgaactagcgagagagacaatcagagtggcgagcaatagatgcgctagaatggtagtcgtcgaggtcacaaggcagacgacgcggcgacgtcgtccgctgccgatagatcaatatatatagtanataatattggtcgtctgagtcaggctgtatgagcgccacttgtgcctgccccagtcgtatcaatacgagaaatagcgtcagcagaggtgaaagtgggagccagtggagcgaggacgagaggaatacaggatggagtgaaacgaggagagtaaaacagagagaacggatatgtagaanggcgccgtcgtcaacatccacttcgtcgtggggatctgtgtgtctgtgtatccggtcg

SEQ ID NO: 11879 - DNA, 528 bp, Glycine max
  Coding DNA Sequence Number=SeqID_2100
atcagttttggttcgtcttctcttcgagaggaagctttgatttgatcgtaatcgatagattgttattgttgattaagagagttgagtttttttgtgatcggaggtgatggattggggaagtgtgacggctgaagatctcgtcgatgctctccgagaggttgattggtcgtcgccgccgcgtccgctgtctgagttcttctcaaggttcaccgttcctaaatctctcgctaaatgggacagccgcctcaagtgcaatctctactattaccgaacgaactacttcatcatgatcgtctttatacttggattgggatttcttacaaggcctctcgccattctctctgcctttttgactgcagtaactgtggcatttcttaatgacagctttgcaggttcctttagtgagaaggccacacgaaccatcagaagtttctccccacagttagctgctaaaatgagacctccattggcgcctgtcattcgtggacgcccatcagcaaagagagcaatctatatctgtggccaacc

SEQ ID NO: 11880 - DNA, 276 bp, Glycine max
  Coding DNA Sequence Number=SeqID_2101
gttggtggaagttgccagcccaatgatccaggtgggcccatggatatctcagatttctcccctggcactcagcagccctgttgcttcctcttccaataggaagaaaagcatgggtcttagggtgatgatgtagaaaaatgtctgtttatatccacttttctttcatctttctttcccttcgtcccatacttttcttacttctgggggtgacttcgatgatgctgctcatgcccaaaggagacatgagatttatcccattgcccattacgagaatag

SEQ ID NO: 11881 - DNA, 478 bp, Glycine max
  misc_feature (26)..(26): n is a, c, g, or t
  misc_feature (88)..(89): n is a, c, g, or t
  misc_feature (131)..(134): n is a, c, g, or t
  misc_feature (151)..(151): n is a, c, g, or t
  misc_feature (172)..(185): n is a, c, g, or t
  misc_feature (187)..(190): n is a, c, g, or t
  misc_feature (192)..(192): n is a, c, g, or t
  Coding DNA Sequence Number=SeqID_2102
cagagtggctctgcaaaaagacaatnttgaactctttgccgttaacaaccctttcatcccctccttttccccgagaggggggggaacnnccacagtgttctttttttctggaaacctcccgatggccccgnnnntttttttttcccccctncccgggaaaagaaaagggggnnnnnnnnnnnnnncnnnncncccccaaaaacaaaaaaaaaaaaaccttctgggggggggggtcgccccccattttccccgtaaagaaaaggcccccccccttccagcaggagggcaaggaaatctacctccccccctccggatccccatcatagggtggtgtaccccatacccaccccctccctcaggatcctcccccgccggcaataccacccacagcccacgtgcaagccacacacacgtccaatcgtcgacgcactagacccaaggtccgcccagccccagaaccacaaacagccttagtctc

SEQ ID NO: 11882 - DNA, 551 bp, Glycine max
  misc_feature (132)..(132): n is a, c, g, or t
  misc_feature (137)..(137): n is a, c, g, or t
  misc_feature (315)..(315): n is a, c, g, or t
  misc_feature (369)..(369): n is a, c, g, or t
  misc_feature (526)..(526): n is a, c, g, or t
  Coding DNA Sequence Number=SeqID_2103
atacaacacacacagctacatctctacacacacatccacgtagccacaaccactaccgcctctatacacgagccgcactcacgccatagcacaccacaaccagtactccactcgcaacccgatacatatgcngacanacaatctctactataaccacaccctcgccctctctcgcagacatatacgcagagtcaacacaacgccgcacgacacctctatccacaccaccaacctcaacccagcgccgaatacatatgtaacaccaaaccacaccctacataccaccccaccgcaatccctagacacacacactcncgcagagacacgaacacgacacacctacctcacacaccaaacctcacacacacnacacaacctcactcacactcgaagagagcctacacacacaccgaacgcgtctagacacacacacaccaccattactctacgcccaccacacacgccacgaccgaaccactacacagcacacaccgcgatacccacacacgcaacgcaaacgcaaccnccaagcatcagatccacaagacaac

SEQ ID NO: 11883 - DNA, 454 bp, Glycine max
  Coding DNA Sequence Number=SeqID_2104
tcgtgccgaattagacagagaaaccaatcggaggaaaatgaaactagtttggtccccagagacagcatccaaagcatacatcgaaacagttcaatctgtaagcattatttttaacaggcaaatgttactttcgttaattttgttagaaatattatttaatttggaacctctactttcttcctttatgtctcgtcaatcttaaagcgtgtaagcatcttttttgtgtttgtttggtctgtttctactgcattatttaccagtaatataatcaaaatagtgtatataaattaaatgaaggacgatctttattttacctgcaagcatgttttgtgagatttagttagaccaaatctaaattctaaaaaattgattattttttaatatcgataaatattaattgttaatttttgttaatcgtgttttattgttttctttgcagtgtcggattttccgg

SEQ ID NO: 11884 - DNA, 339 bp, Glycine max
  misc_feature (270)..(270): n is a, c, g, or t
  Coding DNA Sequence Number=SeqID_2105
tgcatctttggtcactgtcttataggtggggaaggtgtgtttacaacaacatccataagttcgttcagtctccattgacagtgaatgtggcggcacgtgcaatcaactttgtggcatcggtgtcacctgggaaagtgccactaactgctgtgcaatttttttgggtgaacttgatcatggacacattaggtgctttggctctttataccaaaaagcaacaatggaattgttgcacaaaccaccagtgggtgaagcaaaatctctcatccncaatagtcatgtggaggaacctattggatcaagctttgtaacgaatagcgatcgtactgttccttcgaa

SEQ ID NO: 11885 - DNA, 451 bp, Glycine max
  Coding DNA Sequence Number=SeqID_2106
gagcatcaccagcaagatcagcaattctgatcactgatttgaaaagcttttcgaatttagccgcttcttcttttgtaagaccaagttcaacagctttttctgcatcaaaaaccaatttccctttttcgtttttagtgaggctttcactgaaaacgattgtaagaacagctgcgcgatctaagaatttctcagcagtcgccgcttcttcttcagttagtccgagctcaacagcttttttcacatcaaatgtgtagttgttgtcttcctcaacaaatgaattgatgagaatgttgatgacacgctcgtttttctccaataattctttaatgatttgctgctgttcaaaaggaattcctttgaaagttgcagcgcttgcttgcccaggagctactgttgtgaaagtaagaatgatagctaaagcgaaaaatacaacagagctgagcgatttgct

SEQ ID NO: 11886 - DNA, 547 bp, Glycine max
  misc_feature (75)..(75): n is a, c, g, or t
  misc_feature (143)..(143): n is a, c, g, or t
  misc_feature (231)..(231): n is a, c, g, or t
  misc_feature (264)..(264): n is a, c, g, or t
  misc_feature (487)..(487): n is a, c, g, or t
  Coding DNA Sequence Number=SeqID_2107
gagtttctaccacacgacagatacgtggcggtgtcatagtcttgttcttctcattttctcattcactctcagtcngccgactgtcgctggcacaggtgcattggtcgtgatatgcttgtaagatataacgggagaaagtcggngtagcgccgagcgagatagcgaaatgaagatcgtttcgctccgcgccacgtgagcgccatatgtggttgtgccacagctcttggaganggagatgtctcttgaagatgactgaagctagangtccgacacataagatgtcccgatgcgcgtggatgtcgcctcgcttaagtctgtggtgatgaccgcatctgcttagtagacacacgacgtcgcgcctgacgactacctacagatgttgtgtcgcgcgctaattaattgtcttctcatctcatctctacgcttcgacgttccccaacacaatgatgcgtgtatccatctctgacgcgtcctacctcaaatagtnctagcactcactgtctctctgtgcctgtactcctatgatcagtcgttattgtcttgtgtc

SEQ ID NO: 11887 - DNA, 263 bp, Glycine max
  Coding DNA Sequence Number=SeqID_2108
ggttcttctgttgataaaccaagacaagtgcttattgatgaagaaacaagggatgtatgagcgctatgcagctctttttgcacttcgtaatgacggtggaaatgatgctgttgctgctattattgattccttgggctcaaaaagtgctctactgtgccatgaggttcgatatgggataaggcgttgccagagtaatgttaaggtaatatccgttgcattaatgcccccgacagtatcctcggtcaattgggtaaaacacctgt

SEQ ID NO: 11888 - DNA, 498 bp, Glycine max
  misc_feature (33)..(33): n is a, c, g, or t
  misc_feature (42)..(42): n is a, c, g, or t
  misc_feature (78)..(78): n is a, c, g, or t
  misc_feature (84)..(84): n is a, c, g, or t
  misc_feature (89)..(89): n is a, c, g, or t
  misc_feature (151)..(151): n is a, c, g, or t
  misc_feature (239)..(239): n is a, c, g, or t
  misc_feature (312)..(312): n is a, c, g, or t
  misc_feature (326)..(326): n is a, c, g, or t
  misc_feature (470)..(470): n is a, c, g, or t
  Coding DNA Sequence Number=SeqID_2109
attgacttgtcactttcacgtcacgcgcactcntctgtagcngatatggtcactcctcgtcctatctcgtgccgtatnattgancacanatagagcaactgcaccgtacagtcagatctcactcacatcagctgactcgcacgaggcctgntgtgtgcttgtcgcgtctgccacacagtcactcggagcctctacagttcgagcgtgtccttatgtagacctcagacttctaactcatnctcgtgccgcgaacttagatagcgcataacctccatagctcacgccgaacgcgtgtctcgttattgcagtgtntgcgatcagtgacntacatgatactgtcgtcatatcatacgcacgtatgatatgtgacatatgctgttcactcgcgatacacgcatatcttcgcatcacaccacatgcgagcccgtagactgcgcgctgccagtcgcagtcccttttcttagtgcacntacgtatatacacattcagtgccagtat

SEQ ID NO: 11889 - DNA, 588 bp, Glycine max
  misc_feature (26)..(26): n is a, c, g, or t
  misc_feature (28)..(28): n is a, c, g, or t
  misc_feature (110)..(110): n is a, c, g, or t
  misc_feature (151)..(151): n is a, c, g, or t
  misc_feature (257)..(257): n is a, c, g, or t
  misc_feature (350)..(350): n is a, c, g, or t
  misc_feature (386)..(386): n is a, c, g, or t
  misc_feature (392)..(392): n is a, c, g, or t
  misc_feature (425)..(425): n is a, c, g, or t
  misc_feature (457)..(457): n is a, c, g, or t
  misc_feature (517)..(517): n is a, c, g, or t
  misc_feature (533)..(533): n is a, c, g, or t
  Coding DNA Sequence Number=SeqID_2110
tagtctatgtatcgtgctgatcatancnactccacgtgtgcgtgctcgcgctgaaatactctcacagacaacacacagtctcatccatctgtcttataaatgttctacgngtactatatacactacactatacgtatctacactctacgancacaactaatgtactctatatacacgacatgacacgcacacgtactaccacacagactatcagtatatcatgatactatatgaatgcagtaacattacaaagcgtnatacgacatcaataatgactaattatatctgccgtaatctaacactactattgaaagtattgtgctatttgactgcgttctatacgacgtacncacctcacacagcatagcgctgatagtgctgcgccncgatcncatctgtctacttctcgctcgctgtatgatcgncgccgcgcggcatcacgacgctactcatccgngacgcgaccgcacgacgaccagtacgcgttaggcatgatgtcatgtctactcacttcttnatccaatgctgcgaangacggaccggtcgccagtgatgaatgcataagtgctgttacgcagtcatgaacac

SEQ ID NO: 11890 - DNA, 483 bp, Glycine max
  Coding DNA Sequence Number=SeqID_2111
gggtaagataacagcactcaggacgctagaccgggtggtataagtaatgggatttagaaatttccactatacagatgaattaagtctcttttcagataactataactagttaagcctatccgtctatgagcttggtatatttatatagaacctaattacttataactttactgtgttaatgatagtagaggcgatcgtctgcacgatgatcagggctttttcttctctgttaactgacactacatagttacttgcactgaaaaacactactcttataacgaggttttagttatatggtgtgatatattcgacgctacttacacaccacaagaccatatactctttctatgctataaatcctatatgtgttgtcctttagacttcttagtatcaacctttatagaggggggggggggcgcgccttctcctccttcccgctaccttcgatggggagagggctcctcgttatctctcaattttggg

SEQ ID NO: 11891 - DNA, 236 bp, Glycine max
  Coding DNA Sequence Number=SeqID_2112
gggaatgggaatttgctgctccaaatatgcgaaataagtcccttttatgacgtgtgagggtccatctcactctcagatccctaagcccccaaaagtgatccaaagggtatggccctcataatggtcaatggagttctgcccaatggtgctgacacactcagttgcatcgaagagctcatcaagcagacctcgggtggacaattagagcaacacgttggctatctgtgctgagtcat

SEQ ID NO: 11892 - DNA, 566 bp, Glycine max
  misc_feature (522)..(522): n is a, c, g, or t
  Coding DNA Sequence Number=SeqID_2113
gatatctctaaacacagaccgcgcacatccagtacgtgtctcctcctctagatatggtggtgcctctccgatcatatgcttgtttgtgatatacgcgttacttgtgcatatctggtacctctgccatgttcttgcttgtatcttgcatagacatgtgattactaccgtcatgccatacgcagctcctcggtcgccgtcctgtctctcgcctcgtgtagtgtcgatttcctatgagatacagagtacgtggacacatacacatcctaactccacctcttgctcgtgtgctgtacgccagactcgatcgagccctatcgctgagctcacacgctaacacgcacgatgctggacttatgcgtcgtatactcccacacctcatccttgtgccagtgcggtgtctcgcgtattatctacaatcatatgcacgcgcagtgaatgtctcatactccaggaacacgcgcgagtctctgcctcgctcaccgttacatacaactctctcgtacgcttctcagatccctatcnacactacacacactacttcatttgtctatgcctatctcctgatt

SEQ ID NO: 11893 - DNA, 428 bp, Glycine max
  Coding DNA Sequence Number=SeqID_2114
gctgccggactagtcgtcgttgtaagggagcaagtaggtggcggagcatccaggttccaaatcggtgcagggcgaggctccgccgtggaaccgcaggctcgctcacctcaactcactttttaggcgaacgactcgtcggcgtgcttctgcagcagcaggagcggcggacgctgctgctctgttgcggtcggcggtcggcggcgacgtgctttgatgcaagcaacatgctagttatttctacaatgcaaccgttgtttcaggaattgtttttgcaacccggccgttgtttcagaaattgttcctgcaatctctaaatttttgcaacatggtagttgtttctgcagcaatctggccgttgtttcaggaattgttcctgcaatcttcaattttttgcaagataatggtagttgtttgtgcaacacagtcat

SEQ ID NO: 11894 - DNA, 560 bp, Glycine max
  Coding DNA Sequence Number=SeqID_2115
tcaatggccgaatggccgttaccttcggagacacagctgtcattacccggtctcaaaccacactagccagccaccaaacataagtatcagacgcgtgctactaagaagttggtggatagaacaaactataactatatcatcaggtcaaagcatataaggcaatgcgttatatcttgacactatacctattgagataaattgcgtcgggcagcgacatacgagtgcttagtgaggcacttatgtggggctagaatatactgcgcctcgctgcgcggcgctccacaaactacttgctgtatcattctgtccggagtattaatactaatcgttgttcagagtctcgtcggcctcctatttataatatgaattttgaggtgttgcgtggatgtatgagcaacacatttgaggagcagatcaacggtaggcggcgccgctaatgctgagaagtgacgcacgtagatagagaaaaaagcacgtaacgcgtgggttattctgttctctctcgttcgacctgatcgcgcattctcgcgcgtgcatattgcgcgcactgatatgagacg

SEQ ID NO: 11895 - DNA, 555 bp, Glycine max
  misc_feature (253)..(253): n is a, c, g, or t
  Coding DNA Sequence Number=SeqID_2116
aaacacggttccacacttgcagaatcactctgtataaaaatatactcacattctattaacacgctggtcccaggcggccgcacaaccacgcggtcggcgaagttcctctcgtccttcacaatatggccttatcactcatgtggcgaaacagtggcgacaccacgcctcaaaaacccactcaacactacgtgcgtctaaaactacttgattataaatttgcgtgatcagtctatcatgcgcactatgtgacatnttgataataattattataatgaaaatagtctggcatatgtcaccttctttaaacccgctcggatatactgtgtttaaaaaaataataaaaaatatacaaacgtgtgaaaaagtgggtgaacaaacggtggtataagatggttagaaattgggttccatggtacaatggtgtcaacagtgctgtaaaatggtgtacactgggggcgcatggaggcggacacacctgcgtcatagggggttccctcgatacccgcaatgttcgagattgttgttgtccgcacccgcttgttcgttctgtaaggt

SEQ ID NO: 11896 - DNA, 551 bp, Glycine max
  misc_feature (234)..(234): n is a, c, g, or t
  Coding DNA Sequence Number=SeqID_2117
gggatatgcttcactggtgattactattattattattattattattattattaggcaatcctttaatataattcggttttgctctgctatgcagaatcgttgacgagagcagccaaagaaggtgcggtggtggaccctgtagagcctcagaaagttctagaagctgccaattctcatggggtcaataatctcaagcttgtcctcaccacacatcatcacgggggatcatgctgngtggaaatgaaaagataaagcaattgctgcttggaatgaaggtctatggtggttcaatggataacattccaagggtttgcactgataaggttgaaaatggggataaaatggtccccttgggcgctgatattaataatatttggggtcttcaccacacctttgccccccccaaagggccaccataagcctatttggtgttactgggcaaagaaggagggagtgaaccctgcttgttttttactgggaacaaaacccttggaatggcaggggaggcgaacttttgctatttttctccctggaacaaattggaggcccag

SEQ ID NO: 11897 - DNA, 596 bp, Glycine max
  misc_feature (76)..(76): n is a, c, g, or t
  misc_feature (536)..(536): n is a, c, g, or t
  Coding DNA Sequence Number=SeqID_2118
acatctactccatcaagcgtggtgtgcacaataagatgtttggagatgtataatgcatatactcaactgtctgggnacaacaaaaccacatgcgcctcgctattactcttgctcgattcgtcagtgctgcaacagctgcgtcacaactctgtgccacactcaattcacgctcgcgtctatatggactctcatactaaacacatacatctgcgagtgggcatcagacattacacacactaccaaccacaactcggctacttttgtggtgagcgtgcgaaacgtggatgtgagagcgctcctcctgctgccacttatattatgtgtacctattgtgctgaggacatactactgaattgtgttgttgatcgaattagcagtcatcaatccctcttccccgctcgggaatcgtggtgcgtccatctccctgctcgcatatgcaccgctcctgcgtgtataccatcatacggtgttactcgatttctgctgtgtgttatctctaaccacactatgcatgtcatcactatggcgtggagtgnatgctaactacctgtctgttgtatgcgcataccacacgccgacacgttatacactgtatg

SEQ ID NO: 11898 - DNA, 475 bp, Glycine max
  misc_feature (349)..(349): n is a, c, g, or t
  misc_feature (357)..(357): n is a, c, g, or t
  misc_feature (377)..(377): n is a, c, g, or t
  Coding DNA Sequence Number=SeqID_2119
atcccaggtcgagctgtgttgggtagtgcgattccgcagggtgcgcgggtggccggctgtgcgtggctccgtgcagaccggaagtatgagtaaagttaccatacgctcctccctccaccgcaggtccctgcagtctgtacgctattacataaatcatttctcgcttctttgtagggtcggtcgtgcggcggcgtgtcgctcgttggtgagtacctgaataacacagtaagagtggcagtagcaagacgggatactatcaagttaaactaatttctggataacgaagatgaggagatgcgagcacggatggagcatatgtgagtatctgtaagcgttggtccttgcgtcncacccagncagttgtgttgatgcctcgnggtgaacaagacataggtaacacagaatgatgccgccatatgaccctcatcagactaagagaaagaatgaggtgtggagtggtttatatcacatatat

SEQ ID NO: 11899 - DNA, 351 bp, Glycine max
  Coding DNA Sequence Number=SeqID_2120
atcagtctcaggtcgacacgcgcgggcggctgggtccaggtttctccggccgcggctcgcttccaccacggcagcagcagaatatctcgtggaacatgagaatagagcagtgaggttgtgttgatcgataggtttggatctcggttgcggtttgtgatactagcagtgcacaccaaggaagatattgcgggcgccttggaattttgttggcgatggatgatagtagctctagcaagagaaagcctgaagcgcagcgagagggtgagagcagcgccaagaggctcaatgtcaccttggggctggagtcccttgactgccccatctgctttgtgcccctcagtcctccgatat

SEQ ID NO: 11900 - DNA, 552 bp, Glycine max
  misc_feature (489)..(489): n is a, c, g, or t
  Coding DNA Sequence Number=SeqID_2121
tcccgcacttggtaatctcacaatatcctaacaagacgccgcgcgcttttggccgagctcattgggggtggtgtgatccatgtagttcttcatggggcctcttcctcctactgcgcccgttagcataaaacttgccattacggtctatgtgtaataagacagtactccacaaccttccgacaacgcgacccccttcagactcgcatctatatgctcaccgctttgcgcagcagcgattcactctgctgcatgcgcacttatattctcacatcagaatacctgacagattagagactacaagccgcgtgctcgctataggcgccatcaccacgcaacagagctcataaacgcactacagacctgacacgccactcctcgtcttcgtcgtgtgctacatcacggctatgtgacgctattaccattctccgacataggagtcgctcagcgaaggagactaatagacgcatgtatcggagggatcacagagancatgagatctacagcatctgcaagtaggacggtatatagaggttaatacgtctcatcacatta

SEQ ID NO: 11901 - DNA, 176 bp, Glycine max
  Coding DNA Sequence Number=SeqID_2122
gccacgaaatggaatagagtaatctagggagaaagtttgaaaggacatctgtttgtgagatttcctaagatacaattgctagcgcttgatgaaaaaaaagccggtgtgtgtgatgggaagacatatgaagaaatcaaaaattacatgccagaggagtattaatccagcaataagga

SEQ ID NO: 11902 - DNA, 436 bp, Glycine max
  Coding DNA Sequence Number=SeqID_2123
attgctgtacaatatccgttgtcgggctgaacatggtttacgccgctagttaattaacatcatgatccgtatgctagctgtacaaagcgaatgccctggccaggaactatcatttttgacccatcttttgataatcctttggcaagggtccacttttggatccactcaaaattttgagtcattaagtaaaataatactccctccgtcccacaatgtaagacgtttttgcaagctagtttagcttgcaaaaacatcttatattatgtgatggagggagtagtaaattcagttgtgtttctatagaaatatgaaaacggccctgaaattattggttgactcattttggtttgtttacttccgtgtgcaaggctgcgaataattttgagctcggaacactctgtttgtggcttgccgcctttcttttttcggctgtgtg

SEQ ID NO: 11903 - DNA, 173 bp, Glycine max
  misc_feature (45)..(51): n is a, c, g, or t
  misc_feature (66)..(70): n is a, c, g, or t
  Coding DNA Sequence Number=SeqID_2124
ggacagaaatgaattttggtctttgtaatttacttgtgagtcaannnnnnnatgagtagtctttgnnnnnactttgtaggttgtttcttgtccatgtgcattgggtcttgctacgcccacagcaatcttagttggcacctcacttggagtgtttgctagcattctcattgctc

SEQ ID NO: 11904 - DNA, 570 bp, Glycine max
  misc_feature (101)..(101): n is a, c, g, or t
  misc_feature (115)..(115): n is a, c, g, or t
  misc_feature (153)..(153): n is a, c, g, or t
  misc_feature (308)..(308): n is a, c, g, or t
  misc_feature (356)..(356): n is a, c, g, or t
  Coding DNA Sequence Number=SeqID_2125
gtgtccatcacactatctgctagagacgatgcgcgtgtactggatagcgacatcgtgcatcgtagcgatacacatgacgatatgtacgtcactatcttgancgctgcgccgcacnaggtatgtattactctctatctcaagtgtagcacagtntcgattacgcattacgtctaatctaaattcgcatggatatatcgaacctacatatactgttagacagataagcatcttagagatacgcgatcagattatcaccgacagagcgaaccgcgccgcgcagcgatacgtgttatcatatgagtcactcncgccgacgctatgcgcacgtcacagtctacgcggttgtcgatgatagngcactaatagcgcttattgaagaacagtatatgtagcatatcatcgcacactattatcgacatataatgtcgtgcatcgcgaatactcactatctaattcaactcgatcgcatctagtctgattcgatagtgtcacgatgtgatgtgtgtatacgaatctacgcatcactcttacctcttcactcactctagtcgtgcacctttatactccgta

SEQ ID NO: 11905 - DNA, 448 bp, Glycine max
  Coding DNA Sequence Number=SeqID_2126
aaaagaaatcatttgacggcgcctctccacactccacaaccatgcctcctaagttggacccgagccagatcgtcgacgtctacgtccgtgtaaccggaggagaagtcggagccgccagctccctcgctcccaagatcggtcccctcggtctcgcccccaagaagatcggagaagacatcgccaaagagaccgccaaggagtggaaagggctccgcgtcaccgtcaagctaacggttcagaatcgtcaggctaaggtcacggtggttccatctgccgcggcgcttgtcatcaaggccttgaaggagccggagagggaccgtaagaaggtgaagaacatcaagcacaatggtaacatttcgtttgatgatgtgattgagatcgctaggatcatgaggcctagatctattgctaaggagctgagtgggactgttagggagattcttgggac

SEQ ID NO: 11906 - DNA, 198 bp, Glycine max
  misc_feature (37)..(37): n is a, c, g, or t
  misc_feature (45)..(45): n is a, c, g, or t
  misc_feature (49)..(50): n is a, c, g, or t
  misc_feature (54)..(54): n is a, c, g, or t
  misc_feature (66)..(66): n is a, c, g, or t
  misc_feature (71)..(71): n is a, c, g, or t
  misc_feature (100)..(100): n is a, c, g, or t
  misc_feature (115)..(115): n is a, c, g, or t
  Coding DNA Sequence Number=SeqID_2127
caccaaggtcggctcggaagtctgctccggctaccgngggggtgnatannacgnacatgattccgntcggnaaccgtagcgctccgcgagatccgcaagnaccaaaatgagcacntgaacttctgatgcggaagctcccgcgtccatgagattggaccgcgagatcgcgcaggacttctcgaccgaccattcgatttc

SEQ ID NO: 11907 - DNA, 522 bp, Glycine max
  Coding DNA Sequence Number=SeqID_2128
tatgtttatgtcgatatcctccctcagagtttacatagtagagtctcataagtatacgcgttatagtacccgcgccgtgcatctgttaatataccgcggcgacgcacgcgcgcgccgagtcggaacgccaccatatatctccgcaaaattcgcggaatacgcccgcaggcgtcgaataataagctggcgcgcacacgatagacgcgcggcgtcgcgcggcatcggtacagataatatgatagacgacgggcggaggaggccggtgctgggatattatgactggtgtgtcagcgtgcgatattacgtacgggcccggcggcgtcgcacggaatattcggaaaggtgggtgcacatactcgtcgaacacgtcgagcgcgcagtcgcgttatatcatctctacacttcgtccatcgtggtagatcacgatgaatatagtgtaggcagatgtgtagatgggtgtgcggtgtatactactaagaatgtgctgcagtgtcatagtcaataactccagacatcgactat

SEQ ID NO: 11908 - DNA, 391 bp, Glycine max
  misc_feature (26)..(26): n is a, c, g, or t
  misc_feature (31)..(31): n is a, c, g, or t
  misc_feature (33)..(33): n is a, c, g, or t
  misc_feature (48)..(48): n is a, c, g, or t
  misc_feature (78)..(78): n is a, c, g, or t
  misc_feature (80)..(80): n is a, c, g, or t
  misc_feature (86)..(86): n is a, c, g, or t
  misc_feature (105)..(105): n is a, c, g, or t
  misc_feature (141)..(141): n is a, c, g, or t
  misc_feature (165)..(166): n is a, c, g, or t
  misc_feature (169)..(169): n is a, c, g, or t
  misc_feature (178)..(178): n is a, c, g, or t
  misc_feature (246)..(248): n is a, c, g, or t
  misc_feature (251)..(251): n is a, c, g, or t
  misc_feature (257)..(257): n is a, c, g, or t
  misc_feature (260)..(260): n is a, c, g, or t
  misc_feature (283)..(283): n is a, c, g, or t
  misc_feature (285)..(285): n is a, c, g, or t
  misc_feature (314)..(314): n is a, c, g, or t
  misc_feature (327)..(327): n is a, c, g, or t
  misc_feature (341)..(341): n is a, c, g, or t
  misc_feature (360)..(360): n is a, c, g, or t
  misc_feature (365)..(365): n is a, c, g, or t
  Coding DNA Sequence Number=SeqID_2129
gtagagtatagtagtagtgacagtanacgcngncttatatcacacgtngcttgccacgcgtcgctacagagattgggntntgatgngttgtggtttagtatatcntctctcagtcagaatacatcactcatcagagcgtancatcatacgattcatgactatatnnatntactacatnatccgtcacttattacttgcttcatcgtcgctattgctactgctactatatgatcatactgaatcatnnntanatcatnatncactaatactaaattcatacatnanaacatagtacgacaacgagaacaattcanatatagataatanagtacagatcgacngatcgtcaaatgatatggngatgnatagtatagtacgtactagcgtgttc

SEQ ID NO: 11909 - DNA, 434 bp, Glycine max
  Coding DNA Sequence Number=SeqID_2130
attaatcccattgctcctaatccaatgtcgtcccggccagccgtcgaccccgagtcgtccccggcggcgcagcaggctccactgctcggcaacgctgacggccggacacaaacaacaaccgttgtaggcaaggccctgagcagcaccgctgacctcgcgaagcacctacccaccggagccgtgctggccttcgaattcctctcgccgaccttcaccgccgacggcagctgcacggccgccaaccgcgcgctcaccggctgcctcatcggcgcctgtgccctctcgtgcttcctcctctgcttcaccgacagctaccgcgacgagacgggcaccgtgcgctacggcttcgtcacgcccagcggtcgcctgagactcatcgacggcgcccagcagatgccgccgcgggacgagagataccggctccgcgcgaggga

SEQ ID NO: 11910 - DNA, 577 bp, Glycine max
  misc_feature (61)..(61): n is a, c, g, or t
  misc_feature (66)..(66): n is a, c, g, or t
  misc_feature (338)..(338): n is a, c, g, or t
  misc_feature (407)..(407): n is a, c, g, or t
  misc_feature (419)..(419): n is a, c, g, or t
  Coding DNA Sequence Number=SeqID_2131
cctcaacctacatctagtgggaagagggagacgtacgtctctctctgctctctcactcccncaccncgcgtcactcggtggaagcactactgcataattcttataagattactgatacactacgacaacactttgtgtcctgtcgacgagcacgaaataataccggtataactaatataacagaatatagggatgtagcctacacctagttctacgatatacagtatggtaagacgcgagactcgatcgatttgtgacgataatatcactcagtctcactcagaccaccacatctcgataacatatcagcactgtgttcaatgactatgatatttcgnggtgttgtcaaatgacaagtcacgcgtagctacacaccaagaaacaacaaggtgacagaagctggcgcncccgccgtgtgngttggtggtgaggctcatactacatattaatatgctgatctctctcgctacaccatgatgcgtgttgttgttgttcgcttcgcgttctgtcgacactacatacagtggatcgacacacctgcacatccacaccgtgtccgcggagacagatgttcacc

SEQ ID NO: 11911 - DNA, 388 bp, Glycine max
  Coding DNA Sequence Number=SeqID_2132
gaaagcaaccatgtcgtggatgaaaggagatttactttccaaaaccaggaggcttgttggtggactcgctacaagagagcccgtttggcttaaagccatggaagcatcacctcctcctgtctttcctcgctctaatgggaacctcaagaagattgttctccctgaagatccctacgttcgtaggttcgcccgtaagcatcctgaagctaaactcgtcgagcccaacaaggtttcggcgtttattcctgatccagcacgggtatatggctgccgagtccttgaactgacgaagaatggcatcagcgaggatgacgccatgtctgtagctaatatggagtatcttgcagagagaaaggaaaagaagaaagcatacaaacgcctaaaggag

SEQ ID NO: 11912 - DNA, 548 bp, Glycine max
  Coding DNA Sequence Number=SeqID_2133
gaagccgacggctggaaaaccttggggacgtggacgacgaggtgggcagggtctgggtcgtgggcgtggtggcggacgttgattcggacgttgttgtgggtttttggtagaagattataagatatgcagcaagtgcttgtgcttgtttttaaggcagtctttggagcagatgttttattcctgtaattttcttgtatgagtttatatgcattcttgtttcatgatgctcttttcttgaatcaataatctgaaattatcttgcttaatttgtttcttttgaattgttgacatatctttctagtcgccaatgaaaaaaaatgccatgtttgtgttaagttgcacatcacaaaatttgtggcatttgcttgtacctttattgtagggaatttttcggagagaagttttaaagacgttgcaggagtgctgttgttagttagtcatgcagactttgttcatgttgccattttcttgcatcaataatttgaagttctcgtgtataattccttcctgttggataattgtcatatctctcaagtctccactgaaag

SEQ ID NO: 11913 - DNA, 505 bp, Glycine max
  misc_feature (43)..(43): n is a, c, g, or t
  misc_feature (54)..(54): n is a, c, g, or t
  misc_feature (144)..(144): n is a, c, g, or t
  misc_feature (195)..(195): n is a, c, g, or t
  misc_feature (235)..(236): n is a, c, g, or t
  misc_feature (239)..(239): n is a, c, g, or t
  misc_feature (422)..(422): n is a, c, g, or t
  misc_feature (459)..(459): n is a, c, g, or t
  misc_feature (478)..(478): n is a, c, g, or t
  misc_feature (480)..(480): n is a, c, g, or t
  Coding DNA Sequence Number=SeqID_2134
gtctctcaacgacgttcggcgtggacaacgtgtgtgtatgcanaacatataagnaaatatgtgcaacgcgtacagcaatcaccaacgaagacatcgtcgcagcggcgcacgcgtaagagacgcacgcgcattcatacgtgctcnttacacaacaccacaaacaaaatgagtcatacaaaccacatgttcatactntccgcgcgctactgtcgcacgatgtgtagcacgacgagcnngtntgtatagagatgtatatgaaaggcgatgcatagtagacgagccgtcatagacgcgacgccccgcgcgtgttgtgtgccgtcgccaccagattttattcagattgcgacatgaccgcataactcgcgctcattcatagttatgtcacacctcgctacctctattctgcgctccgttgttggtanataaattctaactcaattacaaacaagaattatgtangtgatttaaggagatatantngcatcgcgacgtgtttgtatactat

SEQ ID NO: 11914 - DNA, 549 bp, Glycine max
  Coding DNA Sequence Number=SeqID_2135
aggctcgttgcgcaagacatgcacatgttagcccacgcgcggcgcatgctaccaaagccgcgcctccgtcctactctctaaccggcgcctctcgcaggaacctgctgttttccctgacggcagcgacggtggtgacgggactgcagcctgcatcaatggcggagactattccgttattcgggatcagaaagaagctgaagaaggcagaagaagaagcggtggagatcgtgaaggaaggcttcgagacggcggagaaaggactagagacggcggagaaaggaatagaggcggcggagaagggagtagagacggcggagaaagaaatcgagacggcggttagttacaacggattgacacaggcgggagcagtcgtggctgctgagttcgtgggagttcttgtcgcaacttcggtcgtcaacggcattttaggacctgaagcccagaagtcgtagacttttatcatttcaagactgaaagacatttgatctttaagtgtaatattgtgtctaaaagtgttgttcattacgcgttgaacgtatcgtaattttg

SEQ ID NO: 11915 - DNA, 543 bp, Glycine max
  misc_feature (80)..(80): n is a, c, g, or t
  misc_feature (112)..(112): n is a, c, g, or t
  misc_feature (127)..(127): n is a, c, g, or t
  misc_feature (187)..(187): n is a, c, g, or t
  misc_feature (203)..(203): n is a, c, g, or t
  misc_feature (288)..(288): n is a, c, g, or t
  misc_feature (327)..(327): n is a, c, g, or t
  misc_feature (349)..(349): n is a, c, g, or t
  misc_feature (405)..(405): n is a, c, g, or t
  Coding DNA Sequence Number=SeqID_2136
agtatgatcgatcgagtgacgcctcgcgcgacatgtagcagtgctacttgacgcgtgttgtctggactcctccatcttgngactcactaccgatagcactagttcactggtnctcgaacaatagcantaagctagctgtctcagtcaaagctcgcatcaatacacatcatagatatatagaaatttnatgatatgacatcgantacatgcactgaacgtctactctcacggctctacggcacttatatgcgcggtgatctcaactctagtcgtcacagcgattgtccntgtgataagcgcatcctgagtcgcaactctgtatgtgantatacgcacgcatgactaatcncaccgataggtcgcatatgagagtaacgatgcaactagaactaacgtgcgcacatntagagcgacacactctagtatatcatgaagcgtcgtcaagtatatcgaccgaagatgacatgactagcgatgatttacgtctgagtatatactcattcgcgcgtgacaactgcgacagtacgacgatcgcgcaggtca

SEQ ID NO: 11916 - DNA, 489 bp, Glycine max
  misc_feature (369)..(369): n is a, c, g, or t
  Coding DNA Sequence Number=SeqID_2137
ggctggctattcaagagcttcagatctttggatcctttttcttgtctgtggcttctctgaagataaggaaattttggttgaaggtaagactgatgaatggaaggattcagtctctgaatcagattgactcgaccaatgggcagaatagtctcgtgttccagatgccgactatcttgattggatatatgatgcttgaaaagactcagtgctgcgagtgagctgagaggactatgttgattgaagtgtctgatgccccctagaggagtctatgatgataccacagtggttgagcttgataatccagggacattctacttcatcagtcgctgaaagggtcactgtgagaatgctcagaagcttggtagcggnggctctagactgccaggaaaggcaccaggctcgctgactcttgctgatcttcaccagctgcttcctgctcctgctgatcttgaaggcctggctgctgctacccaccaatacttggcaagg

SEQ ID NO: 11917 - DNA, 346 bp, Glycine max
  Coding DNA Sequence Number=SeqID_2138
atggccacgaagctccaactgtttcgattcatcttcttcctcagagcttgattttcaccggttacgcattcatcttcttaaagtcgtccttgatttcatcatccacgatctccatttattgtatgtttcgctcttgcaaggcggtggagaaatctcagtataaaaagcccggttgatgttcctacacgattgaggtgatgttgcttcgtttctgggaggctaggaatgttaggcagggtgatgaactcaaaacgatgaagatcaaggcttaaaattaggtgtaatcagaatttagacttttagactctcctctgttgatacggttcagtgattcgatccgttttta

SEQ ID NO: 11918 - DNA, 298 bp, Glycine max
  Coding DNA Sequence Number=SeqID_2139
aattcgatgtgtaagttctctgaactcgttatttttcatgagagttattgccagcttattactttgaactaatcctctttaacattcaagccccaaaagaattgttccctaaaaacccgcaatctctggaaaaacactttccagggatattattccccctaatcccgggggaaaaaaccttcctccccctgtaaaaaaaagaaaaccccaaaccccccttttcaaaaatcccccccccttttttgggtgccccttttcgctccccccaactctgtttacgccgcaaaattggcggata

SEQ ID NO: 11919 - DNA, 589 bp, Glycine max
  misc_feature (564)..(564): n is a, c, g, or t
  Coding DNA Sequence Number=SeqID_2140
agacctctctcgttcttgtttgtcagtccaaacacaaggttctatataccaaattgaaggaaatttagtatagatttcagaaacaatgttaatgacaacataaaggactaagggggtgtttcagattctactaaaaggagacatcattttgaaattttgatcacgccaatgtgaccggggttcagtgaaggtcacaaaaataacatcaattttataaaaagataacttttacaacatttcattttcaagggttctacaaaggaagtgtaaaaacaccttattacaatacacaaaacacaagagacactaagataaactcaaactagctaagagaaaaacttagaagtcaagattacctcagaaaagctacaaaagaaaggattgatgggtttttctccactaaatccttgaggtggattctgaggattccgctctgaatccttgaggtggttcggcggcaagctatgacggctcgtggtggctaccggtggtcgtggtgggtggcggagaagaaggtgtttgggtttgggtgggtgtttggagatgatgagagtgaaaaaaatngtgtttttcacactgaagaacatat

SEQ ID NO: 11920 - DNA, 568 bp, Glycine max
  misc_feature (38)..(38): n is a, c, g, or t
  misc_feature (169)..(169): n is a, c, g, or t
  misc_feature (319)..(319): n is a, c, g, or t
  misc_feature (392)..(392): n is a, c, g, or t
  misc_feature (474)..(474): n is a, c, g, or t
  misc_feature (487)..(487): n is a, c, g, or t
  misc_feature (543)..(543): n is a, c, g, or t
  Coding DNA Sequence Number=SeqID_2141
ttggccatctaccttctactaagaggcactgggaaatnattatacatactcggcacaagtagaatatcctaacaccacctttgcggcgacacaacaccctctcgactatctaatcatgtgatgagcgcgtgcgatactaatcacgcctatagtaatacttcaatagttnacactatcgatagtactataaacgtgccaccacaccccatacgtcaacaactctatctctccctcactcactgaatacgaagataccagcgtaactatatcatctggtacatcgacacacctctctctggcgacacttacactacataantcatatgacgacaacaaaggccacataatcgatgatggcacacataactattctaatacaaacgcgctacatntcgccttgagacggtatataagcatccacacaacctttgacaaattttccctcgtattctgcatacttgactatgtcacctncactatctaaccncacacagacacatcatctctacagtgctgaaaaaatatctatcctcttctttctcnccatctatactaatcggtctgttct

SEQ ID NO: 11921 - DNA, 365 bp, Glycine max
  Coding DNA Sequence Number=SeqID_2142
gttgttgagggttggatcttttgctggacgaaatggctctcgtaatacctgaaaaatttcaacacattcctccgtattatgaatacaaacatagatggtaaaagaaaagtgatgtttgctatgacagcaattaagggagttggtcgaagatatgccaacattgttttgaagaaagcagacattgatttagacaaaagagctggagaatgttcagaggaggaggttgagaaaattttaacaatcatgtcacatccccgtcagtacaaaattccagactggtttctaaacagacagaaggacattcaggatggtaaatattcccagctaacttcaagctcactggacagtaagcttcgagatgacct

SEQ ID NO: 11922 - DNA, 489 bp, Glycine max
  misc_feature (90)..(90): n is a, c, g, or t
  misc_feature (293)..(293): n is a, c, g, or t
  Coding DNA Sequence Number=SeqID_2143
ggctgttccaactccgatgaagtcagcgtgtatgagcactcacatgctaatatactgtaaatagatagttatcgatcattctaccaccgncgcacagcaggattatactcatacgagatagaacaatggatgagagagacgacagcatcgcacgagtcatactcgcgccaccatatgtcctatccgcgaacacgcatgcactccgtgacatatatacgctggagtctgtatagattaatatgaccgacatagtcacgatatatatgatactctacctactgtacgtatcattnctacaacacatgattcggcgaacgagtgtgcgtcagttcgcgtagttgccgatatcgcagcgcgctgagatcatgatgcgtcgtatacgtacgagcgcagtgcttgtgctcagtcaatatcgcgacagagcgctcgctacaactaatgtgatgctgtactctgcatatctcatattactctcgtgcgatctcatgc

SEQ ID NO: 11923 - DNA, 501 bp, Glycine max
  misc_feature (67)..(67): n is a, c, g, or t
  misc_feature (95)..(95): n is a, c, g, or t
  misc_feature (97)..(97): n is a, c, g, or t
  misc_feature (106)..(106): n is a, c, g, or t
  misc_feature (113)..(113): n is a, c, g, or t
  misc_feature (181)..(181): n is a, c, g, or t
  misc_feature (184)..(184): n is a, c, g, or t
  misc_feature (388)..(388): n is a, c, g, or t
  misc_feature (424)..(424): n is a, c, g, or t
  misc_feature (434)..(434): n is a, c, g, or t
  misc_feature (476)..(476): n is a, c, g, or t
  Coding DNA Sequence Number=SeqID_2144
agaagagaggagaacatacgcgagcgaggactcagagagaggtagaggctgtctgtggcgcgcgcgncttagttttgtgtttctctgctcccgcncngcacgcgcnggcgtantccctcatctagagccgcgtagccagaggtggggtgattgcactgtcgtacgtatatcacatcgatgnganggatgagagagcgaggcttgggtgaggatgtggatacggcgaagatgatatatagtatagagatagagaacgcgggaaaaataacatactcctccatcgcatacatgcactacgaatatatgagagacttgcgtgtcttcgcgatcttgtcctccactctccacataactcccaatcggaggggggcagagagagagctgtgangttggagataagtgtatggtatatacttcatattangtattattanctatctatataatcagttgagagtgtgagtcagatgttggantcgtattgatactctcgtcctctcc

SEQ ID NO: 11924 - DNA, 394 bp, Glycine max
  Coding DNA Sequence Number=SeqID_2145
agcgtgcaaggaccccaagatagacaaaaaaaaagatatatacagacataaagaaacagagaaaaatgacaacccactaggtacaaacgtgactcaagtgtatgtagaacaactacagggaaaaaacattttttagataagtcaggctcacatagagatagatacaaagagatagaaagcgacacacacacacactcgagagacagagatacatatagagatagagagaactatataggaagaatgagtgactacaaaaaaagatggaaatcgcctcctcaccaaagagcagaacaagggggaagtgtgagtgtgcacaaatgcgcacattcatttacaagtgaatgagagaaatagaaaggctgcaggcatggcgggacgaaccacacaaaaa

SEQ ID NO: 11925 - DNA, 195 bp, Glycine max
  Coding DNA Sequence Number=SeqID_2146
ggatgtctataatgtgtcacagggcaaggattatgccttggagaactttaagattcaatgaatctgtatgtaacccatataatgctgactttgatggtgatgagatgaacttacatgtcccacagactgaggaggctaggacagaggctattttgttgatgggggtaaaaattactggatgcatagagaagaaac

SEQ ID NO: 11926 - DNA, 423 bp, Glycine max
  misc_feature (78)..(78): n is a, c, g, or t
  misc_feature (125)..(125): n is a, c, g, or t
  misc_feature (280)..(280): n is a, c, g, or t
  Coding DNA Sequence Number=SeqID_2147
agagaggtgcacttactgtcgagacactccgcgcggatatattcacgcacacgtgcgaggtatttgcgcggcggatgnaggtatattgagagttgtgatggagtaccaccgggcgagcggcgcgnggcgttcatatataatattattattagataaatatacgtgggtgaggcagacggtagagttaattatgggtaaatgccactactcgcgtcacagtatctgcactagtttagcgtgatacatgtgtaaagtttagtgtggttcaacacacttgttntggataggtgggaggacgtaaaggggagtcacccacatggcgtgctcgcggtgcgtcatcgacagtgcgccacgtgcgggtcgaaacgcgcggcgtgccgcgggcggcccacccaaccacggtgacaaacacgcacaactctc

SEQ ID NO: 11927 - DNA, 525 bp, Glycine max
  misc_feature (52)..(52): n is a, c, g, or t
  misc_feature (77)..(77): n is a, c, g, or t
  misc_feature (98)..(98): n is a, c, g, or t
  misc_feature (133)..(133): n is a, c, g, or t
  misc_feature (162)..(162): n is a, c, g, or t
  misc_feature (170)..(170): n is a, c, g, or t
  misc_feature (176)..(176): n is a, c, g, or t
  misc_feature (212)..(212): n is a, c, g, or t
  misc_feature (232)..(232): n is a, c, g, or t
  misc_feature (244)..(244): n is a, c, g, or t
  misc_feature (252)..(252): n is a, c, g, or t
  misc_feature (281)..(281): n is a, c, g, or t
  misc_feature (332)..(332): n is a, c, g, or t
  misc_feature (352)..(352): n is a, c, g, or t
  misc_feature (370)..(370): n is a, c, g, or t
  misc_feature (391)..(391): n is a, c, g, or t
  misc_feature (422)..(422): n is a, c, g, or t
  misc_feature (468)..(468): n is a, c, g, or t
  misc_feature (476)..(476): n is a, c, g, or t
  Coding DNA Sequence Number=SeqID_2148
ctacagatgacgtcgcacaggcgatctcaggaatgacacgcggcgtgaggcnatgcgctgtagtctctgtgaataanactagcgacagtgagatgccnacgacgtgagagcacacatgctatatatcagcagngacgtgtatgatagagtgcgactaaatgnagcggtgntgagangatatgtgcatctagaacactatcgtgtgtgagatnaataagtagtattgagccangcatcgataccnagcgagangctagatgtgtacgcgactacgattgtancatgtgatagttgtatctgtgtcgacgcacgatatatatatcctagtcgcngcacattactgagcgactancgaattagcgttcatatngatgtatcgtctcgtatgaangatgctagttgctcagtgcagtctcgatgantagcgtcatgcacacgatgctgacacgtgcgatcactcgaacgcgntgtgctgnctgctacgatatttacatggtatcactatacgtcgatgagagcatcctg

SEQ ID NO: 11928 - DNA, 337 bp, Glycine max
  misc_feature (273)..(273): n is a, c, g, or t
  Coding DNA Sequence Number=SeqID_2149
accactcctatctctatcatgactgtgcgaaccgcaaccgtatctcaccccacgaaacgcacccacacccctcccaccttactctccccttcatctgctactccattccaccctcatgttcagacccctcctcacccgctctcacaccccatcccctaccttctctacaacctctccctctccctccccacatcccctcccaccgacatcgcaccctctacctctaccaactcgccctccacccatcagctcaaatcaacccccgcccccctntcatacctcacccccgcaaattatatatcccataatttctctctcctcctacactctaaacaac

SEQ ID NO: 11929 - DNA, 583 bp, Glycine max
  Coding DNA Sequence Number=SeqID_2150
acagccaactatcacctagcttgaggatgacgggttaaaggcagccgctgagcgaggagagcagtcaacatgttaagcagatgtttgctgtgatgggccatctggaagaggcttttcgccagtggttaagtgggaagacttttttcgccgttgaaggcatcgagaacgtatacattggcgttgagatgcaatctgctcttgtttgaggtgttacgcagtaggtatggggtggagttagtccacaccagggagtcttcttctcttgaaagcatgcgaggaagggtatcggggaatctgatgcgtcgagggaggtgataccctgacggacggatccccgtggagtactccaagaagcgtcaggcttattgggcggggacggcgtctgcaaagaaacatgattcagatcagatcagtgagagtttttcggcgggaaaattatatcaagtccatacgaggctcatccagcaataaagatgtcaaatcatggatccggcatattaaacaagatgattaacctgcctcacggggttatccaacactcgttgaattcattagagatcctagtagtagtctcaatccacat

SEQ ID NO: 11930 - DNA, 327 bp, Glycine max
  Coding DNA Sequence Number=SeqID_2151
gaggaaaaatcaccaatggctattgaacacttttactttctcaaagacgagaagaaccgtcgaggcgtcttctaggatgacatccccctcctcaaaacctactgtttttgaccttattccacaagcatataaaaggcggatatagaaatcaaagatatggccaagaaagtgaatgacttatgtggtatcaaagagtctgatactggattatcagcaccaatccagtgggatcttgtttctgtttagcaaatgatgcacgaagagcagcctctttatgtggcacgatgcacaataattataaatccaaactctaaagattccaaaaat

SEQ ID NO: 11931 - DNA, 347 bp, Glycine max
  misc_feature (319)..(319): n is a, c, g, or t
  Coding DNA Sequence Number=SeqID_2152
agaaattcattctctcaaccatttttactttcacatgagtcagggtggacggcggttcgggccctgaccgagccgtcgtttggaccggccggcggcggaccggaccgggcagcaccgcggtccccttttcaggcaccggaccggtggccgaaaagctcgggccagaccgtaggaccgaggcgggggcgaggtggtgatcaccgaggcggcgagagacagctccaggtgctaatcggagggaataacataatggaaaggcagggtggctcacggtgaactccatggaggggtcggggaggctgaggaagcagcgacgacnacataatggacgacgaacgacggcagca

SEQ ID NO: 11932 - DNA, 578 bp, Glycine max
  misc_feature (146)..(146): n is a, c, g, or t
  misc_feature (195)..(195): n is a, c, g, or t
  misc_feature (207)..(207): n is a, c, g, or t
  misc_feature (252)..(252): n is a, c, g, or t
  misc_feature (420)..(420): n is a, c, g, or t
  misc_feature (423)..(423): n is a, c, g, or t
  misc_feature (521)..(522): n is a, c, g, or t
  misc_feature (548)..(548): n is a, c, g, or t
  Coding DNA Sequence Number=SeqID_2153
taattgtgactaacgtcgcgcgcagcgacgcaagcatactaatgattgaacattgtcgagaatagaataatcgacgatagtaatacaggcaagagaggcgctgttatagtgcgcgaggttgagatatctattacatacaaacacanagagcgcgatgatatgttatggtgggagatgagacgcacagagatcgangtaactagtaancaactgctcaatgtacctaacgacaccgacatgtatctgtatggnactatgtagagtgtctatctctagcttaccagcactgtttggtcaatacaatcacgagacagcatgcacgacacaatagcttgtctgctcagatgacattcgacgggctagtctcactcagcatacacacagatcatgagatacataggtatagatatagatcgatcntanacaagaatatatgagtagtacgatacttgactcgttatatgttccggtagacactacctctctgttagacgatcactgtcatacatacgtcgatcganntttactatcactctatcattcatatnagagcgactccgtgtcatcttcatgtagca

SEQ ID NO: 11933 - DNA, 515 bp, Glycine max
  misc_feature (136)..(136): n is a, c, g, or t
  misc_feature (155)..(155): n is a, c, g, or t
  misc_feature (160)..(160): n is a, c, g, or t
  misc_feature (199)..(199): n is a, c, g, or t
  misc_feature (230)..(230): n is a, c, g, or t
  misc_feature (237)..(237): n is a, c, g, or t
  misc_feature (246)..(246): n is a, c, g, or t
  misc_feature (250)..(251): n is a, c, g, or t
  misc_feature (254)..(256): n is a, c, g, or t
  misc_feature (269)..(269): n is a, c, g, or t
  misc_feature (315)..(315): n is a, c, g, or t
  misc_feature (323)..(323): n is a, c, g, or t
  misc_feature (326)..(326): n is a, c, g, or t
  misc_feature (331)..(331): n is a, c, g, or t
  misc_feature (333)..(333): n is a, c, g, or t
  misc_feature (375)..(375): n is a, c, g, or t
  misc_feature (394)..(394): n is a, c, g, or t
  misc_feature (402)..(402): n is a, c, g, or t
  Coding DNA Sequence Number=SeqID_2154
tgtatgtggatcgtgcgctagctgtgtagtgtcgtagtgtatggttgattatgttactaccacacctacacgcacggtgtgtgtgtgtgctcacactcacgcacgataatagcaggcgtgtgtgcagtggctgtcncgcgtcggctgtggtcgcngtgtngttgtgtgtgcgacctatgcgaccgcgtatggtgttgantgccgccagacgacgctggtattactgtgtntatattngattctttntccnngtnnncatacgaaaaaanacagaccatatatgatagagtgacgcgtgatattgtgcactagtantcgttgtngantttgngngcagatacacaccactactagataattgcacgtaccagaccncacgacgacctctactccncggtattngtgtgtgactacacacagtgtgtcgctgtcggatacacatccgtgtgatcgatagcgcacctgcgctgccatagtgattgctgtgcccatctctgtatgtgctgatgcctgcg

SEQ ID NO: 11934 - DNA, 572 bp, Glycine max
  Coding DNA Sequence Number=SeqID_2155
tcttcggcatgagcacggatggcacgaacgaggcatgcctgctcatgcccgtccgggagcacgagcagccgcacacacgcccacacgctctgcagcaggtgctcgatggggtggctacgggcccgccagccagacaccgacggcccccggacacagagagaggagcggtcgaaggttactgtcacgcgtacgccggcaaaggagctcgcgtacggcaaggaagagcaaccgcagccgccagccgctccaggctcgggcttgccggccgtggtcagctggccacggtgacgctccagcaggtggtccacgcagacgcaggttctgtgatcctcgcgttgcgcgtgccagtttccggccgccgtccgtccgcgctcgcgctcctcctccgtggactgagcatacatctcttgccgacctggtcctcgcctgcatccctcctaacctcagcttcatccgcatcgccgtcaatgacttcggccgtcaccaccgcctccaccatgctcgccaccgtaagccgcccaacacgccgcgcctcattcaggccgtcaccaggtgcaggtaggtgccgtttt

SEQ ID NO: 11935 - DNA, 447 bp, Glycine max
  Coding DNA Sequence Number=SeqID_2156
gggcatttccacacgtgtgacgaggggggggatataaagggcaaaaagggggggagcacaaaggggggcgctaactggaataaattaacttgggggggagagggcggtattgcccgggggaaaccccagaaaaaaagcggggtgaaagaaattggccaacacccggcgcagaggggggagagggttataaagccaaaaggggggggtgggctttaaaagaccttacacaggagagagagagagagccccacaacgctttgtcccagagagatgtccaccagggggggaaaaggggggttaccgcggcgggccaaaagggggttttttttgggtttaacgggggggaaaatatcttttatttttttagggaagatcgggggaaaagaaatgtgtataatagccggaaaaaggggcgttttcaggaggagcgaaatgcgcccttctttg

SEQ ID NO: 11936 - DNA, 490 bp, Glycine max
  Coding DNA Sequence Number=SeqID_2157
taagtttgttccacctgatgtctcagggaacacactgggcaagaaggggaaacgatcttcgaaaggagaacttcacgttttagtgaaggaggcaaagaatttgacagcaaataaagccaatggctctacagatgcattctgcaaaagttatcttctcccagacaaagggaaaagctcaaaacaaaagacagcagtcatccgtagatcctgcaatcctgcttggaaccacacttttatctacccagatataagcctacaggagctttctgaaagatcgttagagctgactgtgtgggaccatgatagaattgctagcaatgaattccttgggggaatgagatttaatttaggcacaggcaagcactatggcaagtcagttgactggatggactcatctggaaaggagctcacattatggcagcgcatgctggaaaggccgaacctttgggttgagagctcgattaccctcaggccttcattggacagaaca

SEQ ID NO: 11937 - DNA, 450 bp, Glycine max
  Coding DNA Sequence Number=SeqID_2158
tctcactctcagcttaaagagcatatcatcatcatgactaccgaagagaaagagatcctcgccgccaaattggaagaacagaagatcgatcttgataagcctgaagtcgaggacgctgatgacaatgatgaggatgactctgacgatgatgacgacgctgagggacaagagggagagaccggaggcaagtcaaagcaaagcagaagtgagaagaagagtcgcaaagctatgctgaagctcggaatgaaacccatcactggtgtcagccgtgtcaccgtcaaaaagagcaagaatgtcatgtttgtcatatcaaaacctgatgtgttcaagagccctgcatcggacacatacgtgatcttcggagaggccaagatcgaggacttgagctcgcagatccagtctcaagctgcagagcagttcaaggctccggatctcagcagcatgatctca

SEQ ID NO: 11938 - DNA, 524 bp, Glycine max
  misc_feature (169)..(169): n is a, c, g, or t
  misc_feature (199)..(199): n is a, c, g, or t
  misc_feature (305)..(305): n is a, c, g, or t
  misc_feature (309)..(309): n is a, c, g, or t
  misc_feature (315)..(315): n is a, c, g, or t
  misc_feature (478)..(478): n is a, c, g, or t
  misc_feature (480)..(480): n is a, c, g, or t
  misc_feature (485)..(485): n is a, c, g, or t
  Coding DNA Sequence Number=SeqID_2159
gagtccagtcgatctcatgccatcacagctctctacactctcctccccacaaccccacgacccacttcctccgctcttcatcgcttctatctgactgcgcacgacctcacgcgccctccctcgaccttctgccagccatctctcactgcgtggctgactatgaccgtgnttccatagagcatcacttccttgcctgtantgacgcttatactcactctacatctactcatcgcactcacaacgtctattgagactccgatctcttcacaggcgtctctctaggattatcttatctgcggacattntcanactacnactcactttctgatcactactcatcgtgtacggtgagatctgcttgaggttcaggtcttacattgtgccttatctgccatgtactagataacgacgcgcgataatactgctgctcattcggtgtgatactatcattgacacgaggcacgtctgcagtcttacncncactnaccatctctatatataacgcggtgcagtcttacacgact

SEQ ID NO: 11939 - DNA, 548 bp, Glycine max
  misc_feature (32)..(32): n is a, c, g, or t
  misc_feature (249)..(249): n is a, c, g, or t
  misc_feature (330)..(330): n is a, c, g, or t
  Coding DNA Sequence Number=SeqID_2160
ttggtagtgatagtgcgagcgatttgcgtgcnctggttggttgttcgtgacccggcatcgcggggattgttattatattattaatcattttaatttctctggcggcggggaggcggaggcggtatcgttgagcgcaatgggtttgtttcctctctttgttttttatttcgcggcactgggtatttagagggaggaaggtttatgtaggtgttttggggggagaggtgttttgtggagttttgtatttanaaagtagggaggtgataaatatatatgtggagggtgcgggagggttaatatatttatcttctaggccgttgttatctttancgtccttttattatgtatataaagacgccctcacacggaattgcgacgcgccacgacgcgggacacgggcgggcactgagggccacacagaaaagcagtacaaggaggacaagtatagtcctgagcagtagaggagaaataatatcgggtgtgtgcgagtgttgtgagatcagatactatgtgtatcgtcttagtaccttgcgcgagacagaaattga

SEQ ID NO: 11940 - DNA, 550 bp, Glycine max
  misc_feature (27)..(27): n is a, c, g, or t
  misc_feature (39)..(39): n is a, c, g, or t
  misc_feature (44)..(44): n is a, c, g, or t
  misc_feature (221)..(221): n is a, c, g, or t
  misc_feature (245)..(245): n is a, c, g, or t
  misc_feature (313)..(313): n is a, c, g, or t
  misc_feature (318)..(318): n is a, c, g, or t
  misc_feature (388)..(388): n is a, c, g, or t
  misc_feature (398)..(398): n is a, c, g, or t
  misc_feature (447)..(447): n is a, c, g, or t
  misc_feature (501)..(501): n is a, c, g, or t
  misc_feature (516)..(516): n is a, c, g, or t
  Coding DNA Sequence Number=SeqID_2161
tagtcaagagatagggcgcgaatatanataactgcaacnccccntccgcggcgcagtaggctacgggcaacagagataaacactacacacacacaatctattgtgacaccacctatacagagtggcgcaatacatacactcatctgcccatcccacacccctacccacgagtgactcaataatcagaggtacaacacagacgccgggtgtgcgcgccatanaatctcgtcgcgcacaatcaatanaactgcagatgaaaccagatcacgtcgacgacgacacatcgtgtgacgagtatctcctcctccataantgacnccactctaatacgcgaggatactacacgtctgagagatcattctcgcgcgacccaactcatcgcatatancagctacacngccacacggaaagataacggtcgccactgatacatcacacaaacgacgngcgtcatcatactagactacattattcatctctttcccttcacacaatgaacancgtctcacacatatngtccagactatacagtcacaatgcgatctgccgc

SEQ ID NO: 11941 - DNA, 544 bp, Glycine max
  misc_feature (336)..(336): n is a, c, g, or t
  misc_feature (432)..(433): n is a, c, g, or t
  misc_feature (437)..(437): n is a, c, g, or t
  Coding DNA Sequence Number=SeqID_2162
gaacaccctaagactggcgacgccaaccgtcgccacaaacactagcaccgcaggatccgaactagacaaacctacgagtaccgtacatactcttctcccatccatacctcactcccatagtctctgcttatgtgagacagtcaggtcgagtggctgtatgttagtctgttttccggttactcttctctctatatttcggtgctttgtcatcctgttcttcataaaatccaatataaaccataaggcctccccaccacaaacccatcaaccgactccctcctccacctcgacacaccgaactcgaggcattctagatcacccgcgagcaagaccgcngccccaccccgcagaacggtctcacccagccatgaccaggcgtgtatcccacatgtcaggggatcgcttgctttatatatgaattttgtttatacnnttgntgaagattacccctcccaactcactcgcgaagaaagtcgacccatcacagaggaaaaaagagcgagcccgccgcgccacctctggagttagcgctagcctctaagat

SEQ ID NO: 11942 - DNA, 479 bp, Glycine max
  misc_feature (315)..(315): n is a, c, g, or t
  misc_feature (347)..(347): n is a, c, g, or t
  misc_feature (375)..(375): n is a, c, g, or t
  misc_feature (454)..(454): n is a, c, g, or t
  Coding DNA Sequence Number=SeqID_2163
atacacttcatatcgttgctgttgttttgttcttttcgttcattattatttctcgtattttgtgtgttttgttgtgtgtggtgttgcatttgttttatctattcttcgggtgtctattctcgctcatactccgcctcgctatcttctgcttccacgttcgcacgtatatctcgtaagatccactactgtcgcgctacgtcgtgaggctcagaacatcattcttagaagagcatagtggctaccgcgcgaggcggcacaaagagcacactgcgggcgaccacacagaccgatctacatagaccgtcgtcgcacggncgcgtgccacacacatatccggcacgcccgtnaattacacggaggggaaagacagagganttgtacgtattctcactgacaggctgttctctcaatcgcacttcatacatgctcgtgctgcatcgagtgcatctgaacntaggtcctattacacttcctgctgc

SEQ ID NO: 11943 - DNA, 381 bp, Glycine max
  Coding DNA Sequence Number=SeqID_2164
aagaaatggcttcgctcggtttcaacctcggattctccttctccggtgtgaagaatcgacaagtttccgtgaatggaagagctcgcgttatctcctgttgttcctcttcttcttcagaagcatctcagcaggggatttctaccacgaagcctcctcctgagatagagctcgagttcttcggtccgaagcctgggagcgacgggacgtatccgagggataaagcgaaagctgtgagcggagagaagcttctgagaagcatcatgcaggatagcaagatcgagctttacgctacttacgggaaagtgatgaactgtggaggtggaggaagctgtggaacttgcattgttgagattcttgatggcagagaacttctgaaccaga

SEQ ID NO: 11944 - DNA, 494 bp, Glycine max
  misc_feature (167)..(167): n is a, c, g, or t
  misc_feature (330)..(330): n is a, c, g, or t
  misc_feature (334)..(334): n is a, c, g, or t
  misc_feature (469)..(469): n is a, c, g, or t
  Coding DNA Sequence Number=SeqID_2165
actaacacaatgctacaaacctggtgaagagaatatatacttctatagcataacagacgcgtagagcacacagtagacacgtgtgacgaccgacaagagagagagccgagacgagatgagtacactggttaacaagatagcacgaacaacagtcacgagacacagtncttgtattgtagttctctatttttcacacgcctggatgttcctctattatcgaattctctcactcaagaagactaagatctaaggcatataggcgaaatcagcacggctacgaatctattatgcatatgtcatcatattcgtgattatcttactagacagtanaacnaatatggagggtgagagagggcgaggcgagatgggcgatctgtttgtagtattaagttttagtatggagttatgtcctcagttttggtgatagatgtgagtggatcggtgcgtcgacgcgcgtcttgaggtgtgntagacgacactttcgggtaagtgct

SEQ ID NO: 11945 - DNA, 589 bp, Glycine max
  misc_feature (92)..(92): n is a, c, g, or t
  misc_feature (178)..(178): n is a, c, g, or t
  Coding DNA Sequence Number=SeqID_2166
acgccgcgagacactggctgatgtacgcgggcgtgcggagtgtctgcgtcgtgacccaccgccactgactgacaccactgactgccctgtcnctcgctatgtctcgcggttcgtcctgcgctggtgtgtcgcgcgtctgcacggtacgccgtcgtcggctgtgtggtccctgtggtancatctactgtggactgcgcgtgtgttgagtgctatgatggtgcatgtatgaggagtgacgttagtactacgcgtgggtcggagcgtctgctcggccgcgcttctctctcgcgcccctttcgtctatgcacatcttctgtatctctttgtgctactcttctataatctttctctatgttgagcatatgctttcatgagagtgtaatgtgagtgatactagatattaacgtaatgggctgataccacgtgagataagtctcgatccatgcttgctctccacgttgcatctcgcatgtgtgcgtgtgcctctcgccgcgcgcgtccgccatgatttatctctacatgtatctgcgcagaggtgcgatgtaggtgggcgcatgactgctgtattcaagacatttcgagcgctacg

SEQ ID NO: 11946 - DNA, 226 bp, Glycine max
  misc_feature (36)..(39): n is a, c, g, or t
  Coding DNA Sequence Number=SeqID_2167
cccaatcttttattccttatgagactaaagactatnnnnggactaaagatgatggcatcatcaagatccactgctagaacacatgaccaagaacatgtcttaaaactttataatgatcacttccaaaaacaagctaataatgaaattcgacgagaaatgaagaaatctaatgagatggaagcttgcacttttgttccgaaagtgaatcgagtggatccaaataatc

SEQ ID NO: 11947 - DNA, 581 bp, Glycine max
  misc_feature (55)..(55): n is a, c, g, or t
  misc_feature (106)..(106): n is a, c, g, or t
  misc_feature (113)..(113): n is a, c, g, or t
  misc_feature (118)..(118): n is a, c, g, or t
  misc_feature (210)..(210): n is a, c, g, or t
  misc_feature (329)..(329): n is a, c, g, or t
  misc_feature (333)..(333): n is a, c, g, or t
  misc_feature (453)..(453): n is a, c, g, or t
  Coding DNA Sequence Number=SeqID_2168
ctactattccttcgcatcgaagctaatgtaattgttagaaatagctcctatcgtngtgtagactgcgactcaatgacgcgcgtcgcatcagtgaagttctgagtgnatatgantaganagcgcagcaggcagcaggaagtgatgagccgtacgctgaggattatccgcgcccgcatacagtatgattagtcgactgtgcgtagcaggcgnctcgcctgctccttagcgcgtggagtgtgaggagtatcgcacaccgccaaccacgtctctgatgtattgcacccacaacgcacttacgtcggtgagggtgcgtgtggtggtcgcgcgcncgangccaagcggatgagatgtaatagaagagatacataaagagtcgttagacagaaacgagacgagaacgaatgcgataatcgagctgtgatcagacatgagctgtgcgcatgccgtgggtcncggcagcggggccgtgagtggtcgcgcgcggcactgtatcggaatgtgtgaagatgcgagatcacgactactgcctctcgtgagatcactgggtaccgtgagaagcatcggtcgcgagagacgactat

SEQ ID NO: 11948 - DNA, 550 bp, Glycine max
  misc_feature (100)..(101): n is a, c, g, or t
  misc_feature (103)..(103): n is a, c, g, or t
  misc_feature (115)..(115): n is a, c, g, or t
  misc_feature (207)..(207): n is a, c, g, or t
  misc_feature (338)..(338): n is a, c, g, or t
  misc_feature (399)..(399): n is a, c, g, or t
  misc_feature (429)..(429): n is a, c, g, or t
  misc_feature (473)..(473): n is a, c, g, or t
  Coding DNA Sequence Number=SeqID_2169
tataccgtgtcgagtgcatcagtgcgcacacgcgcatcatatcgcagcactaattacgcctctacacataacctccgcattgagagaattaggaaaagannanacacaccaatgncaccacgctgcatactgatacaacacggtcacttcgcgagacgtgcgagcacacactagcgtatcagacacatacacgccttccgcgccccnccaccaacacaagtctaacgccacacacacagaagttgcgcactacgacagctctacattgcacagtcttctatctagctcatcagcgaagcgacgcgactacgtgaaatacacgttgatcgtacgtctcncgaatatgtccaacatactactatcgcatcgtcgagagcgcactacggtcgtcgcgcgcangtgtgtgagatgcatgtgaggattactgcnaccgctgaactgctctctacactgctgcacatcgcgctctcccncacgtcatgtgcgcttcactcggcctagtcctgacgtcgagtgatcacatgtgtagacgaaacttcacacatgagct

SEQ ID NO: 11949 - DNA, 507 bp, Glycine max
  misc_feature (63)..(63): n is a, c, g, or t
  misc_feature (176)..(176): n is a, c, g, or t
  misc_feature (415)..(415): n is a, c, g, or t
  misc_feature (423)..(423): n is a, c, g, or t
  misc_feature (436)..(437): n is a, c, g, or t
  misc_feature (444)..(444): n is a, c, g, or t
  misc_feature (475)..(475): n is a, c, g, or t
  misc_feature (477)..(477): n is a, c, g, or t
  Coding DNA Sequence Number=SeqID_2170
gacagacacacaacagcgaatacagactaaacagcgcaaacacacgcgcaacactcctcacancgacatatactaacacttccgctcactcaccccgcctcacctcctccaccctccaaccatcgcacacgcacacccacacacacacactaccacccacacaccgctccctaacnccaccgcgatcaaactcagcgccaacgtagaaactacgcagaacacacacggccgagccggcagacattacaaaccaaccgcgcggcaaccgcactataaacacactatatcactaatatcacatatcaaatcatacatgaaccactgcacaccatagcatataaattactccgtcgtgtagaagggagtgttagcgtgcggagtggagtgtgggtctttggggtgcgtggcagaatgngcaatagnattggtgcgtgtnnccggttntcatttagaaattgtacagtcgtggtcattntntggttgtgagtggattgattattctattag

SEQ ID NO: 11950 - DNA, 275 bp, Glycine max
  Coding DNA Sequence Number=SeqID_2171
gacatacatggttaaaatacgacagtgggtcaccgacaactggaagaatcaccgaagtcaccgttaaaggacgagaagaacttccctctccgtgacaaggcagtcactcgtgtttgggaacaggaacccctgaagaagtcccctggggggcaactgggagctgatatcatttggtgggcccccccggggattttccccggttaaggaccaaggcgcgcacattttgaaaaagttgtgggggaaaaaaaggtaatttaattctggcccccagtaag

SEQ ID NO: 11951 - DNA, 442 bp, Glycine max
  misc_feature (43)..(43): n is a, c, g, or t
  misc_feature (47)..(47): n is a, c, g, or t
  misc_feature (52)..(52): n is a, c, g, or t
  misc_feature (56)..(56): n is a, c, g, or t
  misc_feature (86)..(86): n is a, c, g, or t
  misc_feature (115)..(115): n is a, c, g, or t
  misc_feature (126)..(126): n is a, c, g, or t
  misc_feature (155)..(155): n is a, c, g, or t
  misc_feature (219)..(219): n is a, c, g, or t
  misc_feature (221)..(221): n is a, c, g, or t
  misc_feature (347)..(347): n is a, c, g, or t
  misc_feature (354)..(354): n is a, c, g, or t
  misc_feature (416)..(416): n is a, c, g, or t
  Coding DNA Sequence Number=SeqID_2172
gcatcaatcgcagcgtcgacactatatatagatacgataatanacgncctcncgcngagcgccgggcgcgcgtcgccgccgcggcnggccggcggccggcaccagcgcgccgcgnacgagtgcgtnacgcgagcggcagagtcgttcgcgtccantcgatttcctggcgaagtagatgagctcaggagcagtacagagtgcacaagtgatagttgtgangntgtgctgacgcacgagagtgggagaggaggggttgatgagcgcgacgagacacaagtggatagagagacgaaatatacttcacacctccactcgtttgacgagtaacagccctatatatcgcaccngcgacanacaccgaccctcaacacaaacaaacaacagcgcagaagcgagcgcgtgggggcggggtggcnggtgaggagtcggctcgttctccact

SEQ ID NO: 11952 - DNA, 583 bp, Glycine max
  Coding DNA Sequence Number=SeqID_2173
aagaggcagagctccaccgtggctatcatcctgcccatcgacctcaacagtcagttgccattcacgggtaaccatatgtctgttatttcagaatctgatcttcttcatcttggggttttacctccaaaagaactctactcttggcggatttgccgcggggccactgttctgacggaggacacccatgagtctgtcgtctatgttccttttcttatccgcggccttgctcttcatatttctcccttcttccgtggcctccttgatttctacgatctgaacttgacccagttgaatcctaattctatcttgcaagtttccattttattcatctgtgtgaggcctatctcgggattctcccccatttcggcctctagaagtatctgcatcattgtcggcccgggatggctcggggacaacactgtaacaccccaggtgttacttaggggtttcactcaagaccacacaagtaagcccatcatcacatgtgacttaagttgggaaaagtacaccaaagttggagctcaagatcctaagtaagtgcaacccaccttaaaaatcataccttggcttgttatgcacatat

SEQ ID NO: 11953 - DNA, 520 bp, Glycine max
  misc_feature (98)..(98): n is a, c, g, or t
  misc_feature (117)..(117): n is a, c, g, or t
  misc_feature (142)..(142): n is a, c, g, or t
  misc_feature (173)..(174): n is a, c, g, or t
  misc_feature (200)..(200): n is a, c, g, or t
  misc_feature (219)..(219): n is a, c, g, or t
  misc_feature (294)..(294): n is a, c, g, or t
  misc_feature (306)..(306): n is a, c, g, or t
  misc_feature (363)..(363): n is a, c, g, or t
  misc_feature (368)..(368): n is a, c, g, or t
  misc_feature (407)..(407): n is a, c, g, or t
  misc_feature (411)..(411): n is a, c, g, or t
  misc_feature (436)..(436): n is a, c, g, or t
  misc_feature (439)..(439): n is a, c, g, or t
  misc_feature (458)..(458): n is a, c, g, or t
  misc_feature (464)..(465): n is a, c, g, or t
  misc_feature (476)..(477): n is a, c, g, or t
  misc_feature (480)..(481): n is a, c, g, or t
  misc_feature (483)..(483): n is a, c, g, or t
  Coding DNA Sequence Number=SeqID_2174
aggcgtcgacctagagaggtttagatcacacgacactagtgcgcgacatagcgtagagctactagacgcttcacctgtcctattggcgtagcgcaggngcgcgctcagctagacacngagctacagagcatgacaacacacnatacgcgagcgcctgaagggattgaggtggnncatatctattataacgatgagcaggnggtcgcggggagtggtgantactcactcctgccgcactagacacggagacgatgattgtatagtagagtgtgagagatgatggctgcatattanctggcgcgatgnggagaatcccactagcacctaccagctacccccccagcggaggagggtgaatgacanatgangatttaccattagatgatggcggtggctgcgcgagtcancccncttctcacactcacatgggaggtgntgnatgcgcccgctccctacancaatcnnaccaccacccnnccnntncccccccactgtttacaaacacattcacacaaacccc

SEQ ID NO: 11954 - DNA, 395 bp, Glycine max
  misc_feature (68)..(68): n is a, c, g, or t
  misc_feature (80)..(80): n is a, c, g, or t
  Coding DNA Sequence Number=SeqID_2175
gagctgcttcggtctcaaaggaaaatgtccgtacgacatcgtcaagtgcacccactcccgtgttcccntctttctctcantctcactccctctctgaagcatcagaggcttttcctcctttgagagagtgaccagaagctctgaagaagtatttgctgaaataacagtctgaagaaaagttaatgaaacagtgaagatgtacaaatgagctgcagaaactggaagcgtggtcaagagattaggggtagtgacaggacctctaaagagttatttgtgaaaatacaagttaagagagttgccacactgatgtaaggcttggggacttaaatttcagttctgaggcaagacatacaagttgtccctttacaaatggaggttctcaacgtctattcttg

SEQ ID NO: 11955 - DNA, 567 bp, Glycine max
  Coding DNA Sequence Number=SeqID_2176
aaggtattctatatcagcgtggacatatacataatacaatgagggagcgcggcgaatgtctcatttttataaatcttatttcgcgcgcgcattctatattccactacgcccgttttcttgtagcaggggggcgcggtgggcgcgagcacgcgcgcgttcatatttctctggcgggggatatactagtcctattatatatagtgcgctgcaggatttatatataatagtagcggacggcatattgtgatattctctcatatatggtggaggaatatattagcacgcatgttgcgggtcagattattcatatatctagcggcgtgagtacaaagagcgagaagaaggtaattttgagttgataataaaacgtggcgaagatatagagggaggtgaggtggtgtggcgggggcgcttacgttccacgagtaacttccactatcaaaacctccgcggtggtatgcgcaagagagaaaaatacgagggcgttaacatcgcagcgaagcggggagagaataaccacatcttcataagggagaggtggttcatcgcccgggtctataagtgatt

SEQ ID NO: 11956 - DNA, 529 bp, Glycine max
  Coding DNA Sequence Number=SeqID_2177
gatggtgacttggaaggatcaacaaataatttgggaggtgaaattcacgattctcaaaccttctcaagtggacaattaccttacttgagtaaacgtcatggtgctgaaaaaatgactcctaatccttttgactctgcaactgatggacagaagcatggaaatccttggaaagggactagaaattctcagcagataaatccgggaatggtgtcatcacattatgaggtagcagatggagaaatcaagcattataatatcatatacaacaataatacattcaattacaacatcaatacgacttcttggaatggtcattcaaaaagaaagttttaaaaatgaactcagagaaaatgattatttaaaattggtgaaacagggaaaggacaattaacttttgaattttttattttttggttgtgaagtataactgtataagtgaagttaagatgagtcagattttattgttgtttagattctttaatattcttttataaatcttacttggtatgaattattcttggtcaatgtc

SEQ ID NO: 11957 - DNA, 438 bp, Glycine max
  misc_feature (139)..(139): n is a, c, g, or t
  misc_feature (209)..(209): n is a, c, g, or t
  misc_feature (219)..(219): n is a, c, g, or t
  Coding DNA Sequence Number=SeqID_2178
ctcctccaaggatagtcatgcgtgtaccatttcatctcacacacccaccacagaagtccttctcctccaacactcccccacactctaaggtgggcatctcagccgcactccgtgcgtatagcagggtcactctagcctncatgatggagaggggagaggttcggtcgcgtctcatgctaccctcgccaaatgtgttggctacgagagtngacatttgtncttattatgtggttggtgtgtgatgtgtctcaatatgtcgttctgtctgatgtgctctatgttttctacacctctcgcgcgggcgccgatgcttaggtgactattagtatattttacttcttcttttttatgtggggtggctaccacatcagtctattagtatttattagtgtgtggtgtgggtggcgggggctccgtcgcgccacaatatgtgttgta

SEQ ID NO: 11958 - DNA, 574 bp, Glycine max
  misc_feature (99)..(99): n is a, c, g, or t
  misc_feature (184)..(184): n is a, c, g, or t
  misc_feature (203)..(203): n is a, c, g, or t
  misc_feature (284)..(284): n is a, c, g, or t
  misc_feature (313)..(313): n is a, c, g, or t
  misc_feature (362)..(362): n is a, c, g, or t
  misc_feature (376)..(376): n is a, c, g, or t
  misc_feature (379)..(379): n is a, c, g, or t
  misc_feature (385)..(386): n is a, c, g, or t
  misc_feature (406)..(406): n is a, c, g, or t
  misc_feature (448)..(448): n is a, c, g, or t
  misc_feature (452)..(452): n is a, c, g, or t
  misc_feature (456)..(456): n is a, c, g, or t
  misc_feature (468)..(468): n is a, c, g, or t
  misc_feature (477)..(477): n is a, c, g, or t
  misc_feature (539)..(539): n is a, c, g, or t
  Coding DNA Sequence Number=SeqID_2179
aatcgtggacgtcgacatgctgcatcacaactgtctcttctccacaagctatatctcgtgtgtgattacccgctgcatcgtatcttccgtccagcgcgncgaccgcgctgtaatatgtgttatgacagatctgtctgaatcgcagctgataagcgtagcgcgtgccgacggacagtcgatgttntgctcagtatatctaatantgtagcgtacaatactacacgagatatcacgaacacacatatgtgcggttgctctgtcgagccaacttctgcgctgcactncaacaacgatatagcgattatgtgatganagattatacgattgactcgccgcgcgtgctgttgcgcgcctacccatcnactttcattttttnccncagcgnncgccccccacgccacacccnagtgacgtcgaaacgtgatatgactatcagattgttcccagngctncatnacacgcgcacgnctggacgantctgcttctgcgacgtcacgactactactaagagagtcactacacatattccattcattcangtgagatgtcacacgcgagcggctacatcattgtg

SEQ ID NO: 11959 - DNA, 345 bp, Glycine max
  Coding DNA Sequence Number=SeqID_2180
tggtccagcaggtcatgtttgctttccgaagatctcttggtcagtccccgagggtgataaataccgggtgtgggacctccatgaataatcttgagcctgccttgggatatggcctggttttaaatacccgcgaaaggttccataataatagaaccggtaccaggaaagtgcctccctaagttgttgattatactcatttggaccgtatggtcaaaaaagagacacctttcaagggagattgccttttttcacataagtaatttatagcacctatggtggatgtcatggcatgggggatttacccaaaggatcttggagccacctgaagatttggaaccctgagaa

SEQ ID NO: 11960 - DNA, 563 bp, Glycine max
  misc_feature (408)..(408): n is a, c, g, or t
  misc_feature (428)..(428): n is a, c, g, or t
  misc_feature (494)..(494): n is a, c, g, or t
  misc_feature (516)..(516): n is a, c, g, or t
  Coding DNA Sequence Number=SeqID_2181
aggccttgctgcgatggcataatcccgagcgcggcatggtttcgccagccgagttcattcctctcgccgaagaaacaggcctcattattccgctgggcgaatgggtcttgcgcaaagcctgcgccgaagcgatcacctggccgctccccattaaagtggccgtaaatctttcgccagtccagttcaagagccgcaatctggtccaggcggttctgaccgcgctggcttattcgcggctgccacccgagcggctggagttggagatcaccgaaaccgtgcttctaggcgacaccgacgcgaatttggccaccctccatcaactgcgcaaactcggcgtgcacatttcgatggacgacttcggcaccggctattcttcggctagctatctgcgcagtttcccgttcgacnagatcaagatcgatcagtcngtcgtgcgcgagctcacggaacggccggattgcatgggcatcgtccgcgcggttgccgggccttgnaacgagtcttgccatcacgacnacgggcgaaggggtcgaaacccaggaacagttcgaccgcctttgtgc

SEQ ID NO: 11961 - DNA, 469 bp, Glycine max
  Coding DNA Sequence Number=SeqID_2182
ggtcaattgaccgaagcagttcaacatcatccttacactgttatactgtttgatgaaattgaaaaatcccatcctaatatgttcaacatgatgcttcagatcctgaaagataaaagactaacagacaataaaggcataacagtaaatttcaaaaacacacttcttataatgacatcaaatgttaaaagcaatataattaataaaagaagccacaaaattaaatttaatctaaattacaataagaaggatagcagttataacagaatcaagaacctagtaactagaaagctaaaacaatacttcaagccagaatttttaaataaattagataaaataattatcttcgaacaactcacaaaactagagataaagaaaattactaacataatgctcagagaatatgtaatagactgaaaatgaaagatattgaacttcaatgacatagagattccaagacatagtagtaaag

SEQ ID NO: 11962 - DNA, 577 bp, Glycine max
  misc_feature (64)..(64): n is a, c, g, or t
  misc_feature (114)..(114): n is a, c, g, or t
  misc_feature (117)..(117): n is a, c, g, or t
  misc_feature (124)..(124): n is a, c, g, or t
  misc_feature (127)..(127): n is a, c, g, or t
  misc_feature (129)..(129): n is a, c, g, or t
  misc_feature (145)..(145): n is a, c, g, or t
  misc_feature (150)..(150): n is a, c, g, or t
  misc_feature (174)..(174): n is a, c, g, or t
  misc_feature (190)..(190): n is a, c, g, or t
  misc_feature (192)..(192): n is a, c, g, or t
  misc_feature (194)..(194): n is a, c, g, or t
  misc_feature (198)..(198): n is a, c, g, or t
  misc_feature (216)..(216): n is a, c, g, or t
  misc_feature (232)..(232): n is a, c, g, or t
  misc_feature (257)..(257): n is a, c, g, or t
  misc_feature (271)..(271): n is a, c, g, or t
  misc_feature (281)..(281): n is a, c, g, or t
  misc_feature (295)..(295): n is a, c, g, or t
  misc_feature (298)..(298): n is a, c, g, or t
  misc_feature (352)..(352): n is a, c, g, or t
  misc_feature (367)..(367): n is a, c, g, or t
  misc_feature (381)..(381): n is a, c, g, or t
  misc_feature (406)..(406): n is a, c, g, or t
  misc_feature (412)..(412): n is a, c, g, or t
  misc_feature (414)..(414): n is a, c, g, or t
  misc_feature (418)..(418): n is a, c, g, or t
  misc_feature (423)..(423): n is a, c, g, or t
  misc_feature (426)..(426): n is a, c, g, or t
  misc_feature (430)..(430): n is a, c, g, or t
  misc_feature (453)..(454): n is a, c, g, or t
  misc_feature (500)..(500): n is a, c, g, or t
  misc_feature (502)..(502): n is a, c, g, or t
  misc_feature (519)..(519): n is a, c, g, or t
  misc_feature (531)..(531): n is a, c, g, or t
  misc_feature (546)..(546): n is a, c, g, or t
  Coding DNA Sequence Number=SeqID_2183
gagcgcgctcatccgtgctgcgcgtgtcgccgccgtgacccagcacactgtacgcacgtctcantctctctctcctatcactatctaacgcatatgatctccagcagcagtctncantcgttcnacncntacccactgacatcancgccncatccgtgaccatgattgctgatngagtcgaatctcacgntntntcgncgtctctctactcacgtncagcgatctctgtcantgtaatcatgtagtatacatcagtntgcataattgaacntagatgaacntctacgtccaatcnaangcaacaagactctacctgacgtacacacccgcgtaccagcagcgttccatgtangacaccactccccgntcgctgcaacgtgntaccaactaccgccacatctgacgngcgatncntcgntgtgntgncgcncgactgatatcgtccgctcgccnnccctcccgcggtcacgcactcacgacacgatgaagacaatgaatcnancattcgacgccaacgantgctgccgtcgnagggaatgccgccgnaccgcgaggcgcgtgaagatgagtcagctat

SEQ ID NO: 11963 - DNA, 430 bp, Glycine max
  Coding DNA Sequence Number=SeqID_2184
aagcccggccggcatgggtggtggcggggcctgctctctctcctcgcggctcggggctggcgcgggatggctttgcgcgtggagacgccggtctgcttcagggcctggcggcgcggcggccggcttgcgcggcgacgtcctcccgtggcggtggtgcccaggtgcgttggttcgacgcggcggctacgagtttgtcttccccctccttccccgtcgcgggcgcgcggcggtgttcatcggtcagcggtggctccggcggcgacgcgcggcctcgggcgacactactccgggtggagaggaggcggtgacgtggcacttggctacaggctggcgcgacggctgactgcggtgccctcccggcccagatctgggccctttggggccccatatgggtctaggagggcctggcccggattcgtctgcgatggcc

SEQ ID NO: 11964 - DNA, 447 bp, Glycine max
  Coding DNA Sequence Number=SeqID_2185
gaacctatcgcgaaacttattcacgatagaattcatgcacgtgaggaattgttttgtaaattttcgaagattgaattattattttgaaattgatgatatcacgtttggtacaagtccatttcctatagctgctgttaatactgcttgatacaatgccttatcaaagaataaactatttgcatgattcttttgcgtatgacaagaatttacctgaagtgaaaacagcgaaaagtaaaccgtgtaaacattgtgtgcatgaaaaaataataaattatgataatgagggacggttgagtgtgcaaatttttgcagaacacctaaaatttgtgaataatgaaactgttcaacctgtgaaaatgtatgaatgtttctctgattgtagatgcagaaaaataaattgtaaaaatatggtaacacaggttgcagtaccaataaggacgcaagtat

SEQ ID NO: 11965 - DNA, 502 bp, Glycine max
  misc_feature (43)..(43): n is a, c, g, or t
  misc_feature (52)..(52): n is a, c, g, or t
  misc_feature (336)..(336): n is a, c, g, or t
  misc_feature (365)..(365): n is a, c, g, or t
  misc_feature (427)..(427): n is a, c, g, or t
  Coding DNA Sequence Number=SeqID_2186
tgtacggcatatctacactccgctactcctagcccttatatcngcatcctcnctatcgactctcgtgctctcacgcctctcgcgccgtcccagatctcttgatgcgcgctcaaccatctacctggtacatctgttatactgtgtgctctgagtctctatcgtggttacttctccctgttttgcttgtagtatgtcgtcttcttccttatagatgtgtattcgagcgtattcctgacgcgcgatgttatctacataatctatcatcatgataccttaccttagtcgactgctcttctcgcgcgctcttcgcctatgtatgagctcgtcacatactcnccgctcgcgtctcctccctcagtatgccntctctgtctgctatacccgtcttccagtcttacacctctcggctccgctgatctcattccangtcgtcacacatctgctgctatgtatgctatctcgactgtcctctctactacgtgatgcacatctctgtccgcgt

SEQ ID NO: 11966 - DNA, 579 bp, Glycine max
  misc_feature (30)..(30): n is a, c, g, or t
  misc_feature (152)..(152): n is a, c, g, or t
  misc_feature (337)..(337): n is a, c, g, or t
  misc_feature (356)..(356): n is a, c, g, or t
  misc_feature (369)..(369): n is a, c, g, or t
  misc_feature (380)..(380): n is a, c, g, or t
  misc_feature (402)..(402): n is a, c, g, or t
  misc_feature (421)..(421): n is a, c, g, or t
  misc_feature (432)..(432): n is a, c, g, or t
  misc_feature (447)..(447): n is a, c, g, or t
  misc_feature (478)..(478): n is a, c, g, or t
  misc_feature (484)..(484): n is a, c, g, or t
  misc_feature (486)..(486): n is a, c, g, or t
  misc_feature (516)..(516): n is a, c, g, or t
  misc_feature (552)..(552): n is a, c, g, or t
  Coding DNA Sequence Number=SeqID_2187
gtcatctccctgtgatgctacagacgcagngtcagctcacatcagtcatgagtaacagcacaagactcgttacgcgcgtctgaccgctccgcacaccgctgatagtatacagagctatacgcagccacctactcatgatgagaagcgcgctnaggactaccagtactatatacacactatctcttatatcacgcggcgatctcttccagatacagactcaggcatatagatgatgcagtatatgatccgactcgcccttcacctctttgatatatacgtccaacgccgtgcgcgtatgagcgatgtagtctacacagacggtactctgatcgagcantcattagcatacaatatgntcatgtattaatnaggacgatganctagacatacctgcggtcaaantaatgatacctagtgacgnctactcacatncgtcgaatcgtcgcnctatcgacgcgatgcactcacaatctccccnggacancncgaggatctcgctcacataggacctgctcntcgacggagagtatcatgagcgcgatcagacgctgncgatccgttcatcgctcaatgatcgtc

SEQ ID NO: 11967 - DNA, 519 bp, Glycine max
  misc_feature (260)..(260): n is a, c, g, or t
  misc_feature (263)..(263): n is a, c, g, or t
  misc_feature (359)..(360): n is a, c, g, or t
  misc_feature (490)..(490): n is a, c, g, or t
  Coding DNA Sequence Number=SeqID_2188
gcccacacacatattacctctttatcagtactcagtcttacgagtaatatatatctacattgatgtttctcaacactagacccactcctgctccctgacaacgctacgtcattcgtattatgtactctaagttaggtccgcgccgcctgtcattctaatttgtatgcagccaagacagacactgtagtatacgcatgtgatcgtgtctacgcccaatactacacgactcgctcttgtatacgcgacgacatcacgccggnaanatctctacctcaccgttgtattcgctcgtcgcgatcagtgtcatagccgcactgtatgtacgcatcgcgcacaacactagcaatcatatatatctnnttattcatactcatctctattacatacgtgacaatgtgagcgtcgtcacactatacatgtacttaacaatctaaatgtctagtatatagagctctgtgcgtcatgcaccgtcgtggagcacgttcgtcgntaacacgcatgcacgtagtatgataccat

SEQ ID NO: 11968 - DNA, 592 bp, Glycine max
  misc_feature (57)..(57): n is a, c, g, or t
  misc_feature (149)..(149): n is a, c, g, or t
  misc_feature (155)..(155): n is a, c, g, or t
  misc_feature (289)..(289): n is a, c, g, or t
  misc_feature (332)..(332): n is a, c, g, or t
  misc_feature (334)..(334): n is a, c, g, or t
  misc_feature (456)..(456): n is a, c, g, or t
  misc_feature (460)..(461): n is a, c, g, or t
  misc_feature (524)..(524): n is a, c, g, or t
  misc_feature (530)..(530): n is a, c, g, or t
  misc_feature (548)..(548): n is a, c, g, or t
  Coding DNA Sequence Number=SeqID_2189
agagaggctactactataccgtgagcgacagtaacttactacgacatacatattgancatcgtacatagacggtgtgatactgagtcaacgagagatgtggtcatgaggttgcgatactcacatagatattggatgatgaatagtaggnaggaangagagaagagaacactctagatatacatactaatagtagataacaacacacggtacggacgtaataagcagccacatatcgacgtatcccaactaccacactacacgacgctcactctcactgactactctcantcacgcgacaactactcgacacaacacaatatctgaccgtatntngtgcgatgaagatcagtgtgatatgcactagagcatcgtacacgaggtgtgcgataagatcacacactcctacaccaccacacgagtagcgtgagacacgttcgatactaatttgtgagttnattnntttcatcgctagcgacctacgataaatcacgctatagtgacagagcacgtatgtgtgtatgtntagagntaatcatacttatacganagctacgagcgctcatacaacacagacactatagcagagccgat

SEQ ID NO: 11969 - DNA, 461 bp, Glycine max
  misc_feature (402)..(402): n is a, c, g, or t
  Coding DNA Sequence Number=SeqID_2190
cttcgcgagcggcaggacatttagattcaacgacgcgcttgtccagccaccacgtctccccccccccccaccgttcccgcggcgccagtcgcggcgagttattctaccaaacaaccacaacaccacaccctgtacccacctttcttcccctccccgtcctttttttcgcctataacacataatcacattacacgcagccacttgtccattacacatttaacacaagagcatcttcacatttcacgttgatcgtcccacaccacgcccctccacccattataacgggttggcgcatatctcacggctacacccagaccacatccccgacgggtgggggcgcgagggggcgagagagtgtgttgtacgagctcggcgcgtctggggcgtcgttgagcacgcggnggaggagatttagcgggtattcgcacaaggtcagaggtacgttattagcgccagagagc

SEQ ID NO: 11970 - DNA, 303 bp, Glycine max
  Coding DNA Sequence Number=SeqID_2191
gcactactcgtcctttggggcgctgctactccctgcccaccatggtgatggcgactactccggcatgggaacgggcggcgccgcccccgccttaagccggccagtgccctttccatgccccccgtggcagccaatgaaacccaaatggcccccccttggccatttgggccccccttttgtgtgtgtgggggggcggggactaatgggaaccccgggaaatcccgggggtacaccccgcggattgagcccccccccccctccagggggaaacagggataattcggtgttctccccgaggaagag

SEQ ID NO: 11971 - DNA, 599 bp, Glycine max
  misc_feature (71)..(71): n is a, c, g, or t
  misc_feature (116)..(116): n is a, c, g, or t
  misc_feature (119)..(119): n is a, c, g, or t
  misc_feature (124)..(124): n is a, c, g, or t
  misc_feature (172)..(172): n is a, c, g, or t
  misc_feature (174)..(175): n is a, c, g, or t
  misc_feature (296)..(296): n is a, c, g, or t
  misc_feature (363)..(363): n is a, c, g, or t
  misc_feature (428)..(428): n is a, c, g, or t
  misc_feature (523)..(523): n is a, c, g, or t
  misc_feature (557)..(557): n is a, c, g, or t
  Coding DNA Sequence Number=SeqID_2192
gtcattactcgacatcgatctcgctctgcagatgatatctctatcgtgtcgatcgctcgctcatgtgtggnctgagctgcgtggtgcgttcgtgtgtgatgtcatcatccgctatnttngtatntctgcgtctgatacgatctatgtgcgtcctgtcagtagctgtgtcgcncnntcgctcgtctctcgtgcgtgatggtatgaggtacgtatatactatcactatactgctctttatcgatggtgtgtaggtgtgactgatacgagcgaggacacgactcgacaaatagctatgngttgcgacgtgcacgactcatgtgcgctctgaccggtcatcgcatacgcgcgacgttcactgctcgntgtcgcgcgctgtcgtgttctacacgtcatcgtcgttgcgctgcctcgtgtcgtgattctctccntctatcgtattactactgacgtagtgctcgctcgctattctgcttgatagtgtgtagttctgctgatctcagctctacaatagcacgtcctcgtntacactatcaacactatagttgatggtgtgtgcntcgagatacgttctcactcgtagctgattactgtgacgtcat

SEQ ID NO: 11972 - DNA, 469 bp, Glycine max
  misc_feature (33)..(33): n is a, c, g, or t
  misc_feature (94)..(94): n is a, c, g, or t
  misc_feature (120)..(120): n is a, c, g, or t
  misc_feature (145)..(145): n is a, c, g, or t
  misc_feature (181)..(182): n is a, c, g, or t
  misc_feature (204)..(204): n is a, c, g, or t
  misc_feature (277)..(277): n is a, c, g, or t
  misc_feature (287)..(287): n is a, c, g, or t
  misc_feature (290)..(290): n is a, c, g, or t
  misc_feature (324)..(324): n is a, c, g, or t
  misc_feature (326)..(326): n is a, c, g, or t
  misc_feature (367)..(367): n is a, c, g, or t
  misc_feature (394)..(394): n is a, c, g, or t
  misc_feature (424)..(424): n is a, c, g, or t
  Coding DNA Sequence Number=SeqID_2193
gattcgatatattgcacgacccagcgcagtgtntgcctcccgcacgcttttattcgcgcaccgagcacatgtatcacacacacctactttaatnttcacacacaacaagaataattatcncacccaaaccacatgtcttatatangctacattgttgtggatgttcaccgcaactaagacnntttctctcgccacaccactctncctactcgtactccactatatttggtcacatctcactagtatatctaatagcacttcttaccatccccaacanatttcatacnttntaataagaacgcgagtctaaacttaacgagcaananaaacgtagaagtatgtataccatccaaagacaacaacacanaaacacatttacattattgttcatcgncagctaatagcacaaacacacaccacccanctcgtcacgccaacacaagggcaaaccacacacataagaaatata

SEQ ID NO: 11973 - DNA, 432 bp, Glycine max
  Coding DNA Sequence Number=SeqID_2194
ttgtagttctcagaagacccgaaccacaacctgtgattgagcccgaatcatcgtaccccacatcgagttttctcagttcatgtcacttatgtggaaagaaactccacggcaaagacatatacatgtacagaggagagaaagcgttttgtagccctgagtgtcgttcgagtcaaataacgatggacgaagggacggaacggtgtagttcagacgcttaaggtctgtgggaaagtcaggtgggccatatacgagggagcaacaattatctactagattcttgcgcgttagcgtcactggtgtggggggggaattacattattaaccagtaatggtgaagctagtgcagagatgcgatagtattgtcgtgtatactcatactcacgaagctagtttgaagcggagacggaggcttggcacgctagcggagtctat

SEQ ID NO: 11974 - DNA, 425 bp, Glycine max
  Coding DNA Sequence Number=SeqID_2195
gacacaggctccttttccagcttttttcagaaacttcaatgccaatgcctgccctatgtcctccggaaatttattttggggttcaaacaacccttccttttttaacaaaaatgtttgggtttcagaagggttgggttcacctgatcaggagagggtcaagtgggtgcagaaaaattacatgatttccaatttttggtttggccctcaaagatttccccagggccttcctttagagggcaacccagcctaaagatatttagtttccctgtgggttggtcccgactccaattttgggctctttttgggggttcctttttttttttttttttggaattttcaaaatgataaattctttggttgggggggaaatttttttaaaaaagggttccattccaaggggtcattttttttcagatttccttaat

SEQ ID NO: 11975 - DNA, 584 bp, Glycine max
  Coding DNA Sequence Number=SeqID_2196
cgctcttctagttactctcttaagttcatacgtttcactatcagggtatggaactcttcatgatttcatactaaaattcttctatggacaaacaaaattggtgctactgatttaagcttaatggcacgaacaacagttcctgttatgtagtatgtgggccagttataaaatttggatgaacactaatttgatttttgtgttctgtttgattcatttagctgcaggttgagtgtgtcagtaggtgtgcttgatgagatctctttagactgaaaaacgatgttaggctccatgtgtaatatttatggactttcaaattttttgactgtttgtgtatttttgctggagtaatttctttttctcccatactacttttctattttcagtttttagggattgttttgtaaaaagattgggaccctatttgactgtactgcgcagatcattcctcatcttcgttccagcagcccctggagatcgacgagaagttgactgcagtttattttgttcgtacaatgattaaagaaaataaattatggagttcactagcctcggcaaattcagctcggctcagacgtatatgttta

SEQ ID NO: 11976 - DNA, 432 bp, Glycine max
  misc_feature (204)..(204): n is a, c, g, or t
  Coding DNA Sequence Number=SeqID_2197
actacatttctcacgcgcaaatcgtctcgtggttcctttcttcccctccgtccacccaaagcttccgctcttcgaatcggtcctccaatccatggcgacgctcgccctgccgcccaccgccgccaccctgccggccgaggaagacccgcgcacaggcgagaagccatctgccgacgactctgccgcggatccgagcgacatcgnctccgggtgggttttcctcgggaagtctgatgtagtgccggcggaccaggccgcggccgccatcgatgccgcgggtcaccgacgcctcggcttctcgccactgccgatgttacctatctgggtgcagatggtgctcggaggcgtagtctacacggccgtgccgttctacaagagggccagacagcttgaagacaaggcgattgaaaacgtggaaactgctttggatgt

SEQ ID NO: 11977 - DNA, 572 bp, Glycine max
  misc_feature (280)..(280): n is a, c, g, or t
  misc_feature (282)..(282): n is a, c, g, or t
  misc_feature (333)..(333): n is a, c, g, or t
  misc_feature (337)..(337): n is a, c, g, or t
  misc_feature (514)..(514): n is a, c, g, or t
  Coding DNA Sequence Number=SeqID_2198
acataatggacgtccttgcgttccgtcattgtagcgatggtatcatcctcgtatacgactcacgacgcctcgcacatcacaccactcactaaccgcgcagcgcacactcaggtggcgcgctcgagtgctgtcgcctcgtctcgcaccgcggcgacgccgaggcaggagagacgtggcgagggcgcgcccatcggcgtgtgtctactccagtaatctttgcaccgctcggccgcgcacgcggtgactcaccctgcgggcgcgacagcagcagcgacaatantnagcgagcagcactattatcgttatagattcgacgaagttaagatagtaagnaatngtgtcactcgcttcacacgcatgtcgacacagcgctgcgagggacggtgagaccaatgcgcggtgcggtactgggcgttccgcgcgcgcgggcggtagtagtcgtgctctgctctttctaccctggcggctgcgtcatcagcgagcattcgtcgtgcgcggcgcctcatgaacatanctgtcctgatatcgtcgtccttacactgtccaaatcacgaataactgtcgcgacgcgc

SEQ ID NO: 11978 - DNA, 424 bp, Glycine max
  Coding DNA Sequence Number=SeqID_2199
gacgaacgcaaaagctcgcctgagaggcgttgtgttcgacatggacggaaccttaacggttccggtcatcgatttcgcggcaatgtacaggactgtcctcggagaagacgagtacaagcgaatcaaggcggagagtcctaccggaatcgatattcttcaccatatagagtcgtggagcccagataagcagcagaaggcgtacgagatcatagctgattatgagcaacaggggattgataagctccaaatcatgcccggtgctgttgaactatgtagctttcttgattccaaaaagataaagagggggctaattacacgcaatgttaagaaggcaattgacattttccaccaacgttttggggttatcttttcaccggcactaggcagagagtttcgtccatataaaccaaacccggatccgctg

SEQ ID NO: 11979 - DNA, 481 bp, Glycine max
  misc_feature (350)..(350): n is a, c, g, or t
  misc_feature (423)..(423): n is a, c, g, or t
  misc_feature (454)..(454): n is a, c, g, or t
  Coding DNA Sequence Number=SeqID_2200
tagttacactcttcctgcgctgttgtcttaacacccgcacacctaggacggacacagaagaataaaccacacagcgtctcgtgatctactaccgtactactctctagtcgccaccacatacatcagataatcataatgatattcacttcatatcgtctgtaagtaacgattctgattgagtgttttattgtatgttatataataatgtacaaactactgagtggactatatcagacaccttagacaggctcatatctgtcgtatctactccacacttctctctggtcgacacctctagaatatgtctactattctcctatattcgacatctggtctattctattgagctncacatgtctcgatgttgtctgtgtgtgatcagctcattgctcacgcgctcgcgactctctcatcgatattatnactgcgacgaatgtgccacgaccactcattngaatatatctcgctgtgcgacaagcac

SEQ ID NO: 11980 - DNA, 491 bp, Glycine max
  misc_feature (39)..(40): n is a, c, g, or t
  misc_feature (98)..(98): n is a, c, g, or t
  misc_feature (110)..(110): n is a, c, g, or t
  misc_feature (132)..(132): n is a, c, g, or t
  misc_feature (176)..(176): n is a, c, g, or t
  misc_feature (201)..(201): n is a, c, g, or t
  misc_feature (221)..(221): n is a, c, g, or t
  misc_feature (227)..(227): n is a, c, g, or t
  misc_feature (243)..(243): n is a, c, g, or t
  misc_feature (356)..(356): n is a, c, g, or t
  Coding DNA Sequence Number=SeqID_2201
atcatcgattacagcgacacgtatcacaaatagaaggannattatgattataagtatttatatgatatagaaagataaagagatgtagggcagatagntggggagatatncacatacaatagaatagtaaangaaatagaataatacaaatatgtatagataatggtaatatgatntacagacatagactatatacaacgngataccaaagacaaacacgntagggnacaaggacaaccagtnaccgagggtagcggacagagagaaggtaacacacaacagggacacgagcaggagctttttatagaatcgatagatgtggttgtgagcgcagcgtcacttgtgtgtagtgcgtntggagtgtaaagtgacgcgctgcgagcggcgggcaccagcgccgcacacacgccggagcatcacaacgcacgcactcatcgagaacgcggccactaatagagagcaagacccagaacctctagcgcacgagaata

SEQ ID NO: 11981 - DNA, 520 bp, Glycine max
  Coding DNA Sequence Number=SeqID_2202
aattagggtccgtcagtaggctggctggcggcggcggcggcgacggcggaggcggcggcgacggcgatgtcttcctcctcccgtgcgtcgtaatcaggcggaggtcgcgggcgtagggctccatcaaggtcgcccgtgcaagaagcctcctccctggaagatactagtgttgcgtccatgaaattgtgagctcccaatcttctctaccaattcttcctcgtccttctttccatttctgatggtatgaacactcgaatcagaggctggttgtggattttttttcagtggcatagtgatccctgctccccattccttgcagaactatggctcgatctcagggctacaatcaggaggtttgaagctgcaggtggtgatgactggcaaccatgattggaacagcgccaaagaattggaacaggggatgaactgagtcaacaagttctagagaagaatgcagagattgaaccaaaaatgttattggcaggtgtatttacaggatttgtactgcattaatagctag

SEQ ID NO: 11982 - DNA, 553 bp, Glycine max
  misc_feature (297)..(297): n is a, c, g, or t
  misc_feature (449)..(449): n is a, c, g, or t
  Coding DNA Sequence Number=SeqID_2203
gcggcggctactattgtgctcctcaccgtgcgcgacaacaacaggaaaacgcggtgtgccaaccaaagtgcggtgtgtgacacacacacgcggtaaatacccggtgcgccaccactcgcgtcactatctgctctcgctcaaaacaggaggtgtggtggtccaacacacaatatatactaatcgtcaagcagtgcggatacgctgtgcgtcggcgtgtgcgctgcttctctcaccacttctcctatcgtacaatacaataatataacagattgtgtgtggcgccacatcgatacaganagaaggcgcgggtgtaatagagagtaggtgggaacaagacgtgtgggacgttcgtgtctcttcttacacatatatctgtgtgcgcatatcatgtagtacacttcgtcataatatcttaatagatacgggtgatacgactaactatcgacatncggtcgcggcgcggtcctgcgtaccacactcactccgcgctgtgcagtggctcggcgactcactcgtcggatatgcgtgtatgatccatatacacgcgacaaag

SEQ ID NO: 11983 - DNA, 439 bp, Glycine max
  Coding DNA Sequence Number=SeqID_2204
taatggcgtcgctgcaaagctcagggatgttgacgaaagagcagatggtttatctctttgatcgattcgattacttgacctcgcaatctgatgtgaagaaaagaatctccgacgccgttgaggacaaacaggaagctgtagcggttacaactgcaattcaagaagagatattcttggagatgggaattgacccaggatttggtattggatgcttgggaaagctgaactctgcgtttgaaaacgataaagagttgatgattggtttctataagtttctcgctaaggaggagatggcgtgtgaagaagctgagcttggtccagatgggtttgaacagaagatggaagctcaacgacagttacatgaacagcaactggagatgctaaagtatatgcgtaagtttccacttgacgaccaatctgcaatccttaaaaagctcca

SEQ ID NO: 11984 - DNA, 585 bp, Glycine max
  misc_feature (94)..(94): n is a, c, g, or t
  Coding DNA Sequence Number=SeqID_2205
aatgcataggactcaggtgctcgcacacaagagtatgttcatgttcgcgtcgaacagcgcatggaaaggtaaagcatacaactggtctaaggtntaaagaaagagtaaagctacagcaagaaactcaggaccctgaagaaagaattctgctgtaatggtactgttgtcaaagaccctgaggtgggacaggtcatacaacttcagggtgatcaaagaaagaatgtttctactttccttatgcaggctggcatagtaaagaaggaattcatcaagcttcatggtttctaaggcctaaccaaaagtggcaatttagcttcatgctaaaatacatagagcccgctgattacatttaatagcaccagcagcaacagctgataaatgtgcatcctagcaattatcagtcacagcgacaatctggtaaatcgtaggcaaaagattagcaaacacttctccgtggtcttgagctataaggtagtatagagagctcccttccacataatggagagaaagcattgggacggttgccttgtaaaagcacagcgtgacacagttgacgtgtggcgacgactggtgcgctaagatagt

SEQ ID NO: 11985 - DNA, 527 bp, Glycine max
  misc_feature (41)..(41): n is a, c, g, or t
  misc_feature (55)..(55): n is a, c, g, or t
  misc_feature (219)..(219): n is a, c, g, or t
  misc_feature (263)..(263): n is a, c, g, or t
  misc_feature (266)..(266): n is a, c, g, or t
  misc_feature (317)..(317): n is a, c, g, or t
  misc_feature (367)..(368): n is a, c, g, or t
  misc_feature (376)..(376): n is a, c, g, or t
  misc_feature (379)..(379): n is a, c, g, or t
  misc_feature (417)..(417): n is a, c, g, or t
  misc_feature (445)..(445): n is a, c, g, or t
  misc_feature (460)..(461): n is a, c, g, or t
  misc_feature (475)..(475): n is a, c, g, or t
  misc_feature (478)..(478): n is a, c, g, or t
  misc_feature (480)..(481): n is a, c, g, or t
  misc_feature (483)..(483): n is a, c, g, or t
  misc_feature (502)..(502): n is a, c, g, or t
  Coding DNA Sequence Number=SeqID_2206
cttacaactatccacaaaatgagagaattcggtcggagagngggtagtgtggaanagcgagagaaatagagtagatgtggctgtgtgaaaatagacagtagaggaggaagatagatgaacctctccacgcacactcctcactcactccactccactgtcgcgtgtccgctcttctggctcttcgtcttgctgcgcattacgtgcagctttcctgccaanagcgacacaacgcccgcgcgagagacacgcaccgccgagcaagngcngagcggcagaagagcgacgcagaagagagcatatgcgacgtcacacgtgtngcatcagtcgtaagtaaataagttattgatgcgatatagttggtttagtnnattatgtnatntacgggagtgatcaacactctgcacgtctgagtgatantatgagatagtgtagaggatagcgtggnggagagggagaaagnnccggcctccgcttnctntnntngggggagaggaagaggacnaggagcacaccgcaacggcgcgaaa

SEQ ID NO: 11986 - DNA, 183 bp, Glycine max
  misc_feature (28)..(28): n is a, c, g, or t
  misc_feature (47)..(47): n is a, c, g, or t
  misc_feature (49)..(49): n is a, c, g, or t
  misc_feature (67)..(67): n is a, c, g, or t
  misc_feature (108)..(108): n is a, c, g, or t
  misc_feature (117)..(117): n is a, c, g, or t
  misc_feature (141)..(141): n is a, c, g, or t
  Coding DNA Sequence Number=SeqID_2207
acccaaagcatagaacctcatttaatgncaaacaagttatggcagcnantagaaaacccgtccgtgncatttctttttgtatatccgggtaaagcgttggcaccgganccaagtacnccatccacagaaatgatgttaccntaatattccgaaagtggcagaccaaagcattgtgactgccca

SEQ ID NO: 11987 - DNA, 537 bp, Glycine max
  misc_feature (31)..(31): n is a, c, g, or t
  misc_feature (191)..(191): n is a, c, g, or t
  misc_feature (193)..(193): n is a, c, g, or t
  misc_feature (195)..(195): n is a, c, g, or t
  misc_feature (200)..(200): n is a, c, g, or t
  misc_feature (278)..(278): n is a, c, g, or t
  misc_feature (332)..(332): n is a, c, g, or t
  misc_feature (421)..(421): n is a, c, g, or t
  misc_feature (462)..(462): n is a, c, g, or t
  misc_feature (474)..(474): n is a, c, g, or t
  Coding DNA Sequence Number=SeqID_2208
taatttataaactactatctctcagtaatantacatatacacatatatacatctctcagaacacaagagataagcacacagacagtaatcaccacagagatagtagaacaacagataaatatacaatacacagttatacataacacatatactatacgacatcagcttcgaatagagtgttgaatcgaatntntnatganatagacagaagagagagtgttgccgatgtgtgtgtgggggtgtgtggaaggtgtactcaggggtgtctagtgagagtncagactgttgtacattagatgtgtatattcgcgtgtgtagtgaccgtgatagtntggtacgtggttggatgttgttgttgtgtatgtcctctcatgtcgccgacaaagctcacacgcctcgtatctctctctatctacttcanatattaattatatctatttatatcgtagagaagtatgatcnattatacacganatctactcgtgtgtatgagatatcgctctcatgtctctcggactctcatatcgatgcataata

SEQ ID NO: 11988 - DNA, 169 bp, Glycine max
  Coding DNA Sequence Number=SeqID_2209
gctcaaaagtccgtaacctgaccatagataatggcctctgcataatggaaaagtgaagacacctcaatatataacttggacaagtgaagacactgagtatttcactgatcatagaccattcgaaccagagagattgaaggcgcttcgcatccagtaagcaaagtattat

SEQ ID NO: 11989 - DNA, 388 bp, Glycine max
  Coding DNA Sequence Number=SeqID_2210
agggcgggttgttgtcaaagctcaattttggggttggttacagagggatacttgcttgtttagaggggtatatgaatattgccaaggggccggcagggggattcgtcaatgggcaattgaagaacaagtatggggggggtttcatccgggggaataatgttttttcccttagttcctcaaagagggctttaaaaaaggggggtttgaaagtataggaatctgaattttttggttttgtttttgtttggaagacggtttttaattttaaaagctttttgggcggcccttttgttgcaactttagttttttgtaactgattttccccgggttttttttgaaggtaaaacggtatggcccgtttgtaaaaagcttgttgacatattttagt

SEQ ID NO: 11990 - DNA, 485 bp, Glycine max
  misc_feature (32)..(32): n is a, c, g, or t
  misc_feature (35)..(35): n is a, c, g, or t
  misc_feature (46)..(46): n is a, c, g, or t
  misc_feature (91)..(91): n is a, c, g, or t
  misc_feature (121)..(121): n is a, c, g, or t
  misc_feature (125)..(125): n is a, c, g, or t
  misc_feature (174)..(174): n is a, c, g, or t
  misc_feature (186)..(186): n is a, c, g, or t
  misc_feature (192)..(192): n is a, c, g, or t
  misc_feature (204)..(204): n is a, c, g, or t
  misc_feature (230)..(230): n is a, c, g, or t
  misc_feature (281)..(281): n is a, c, g, or t
  misc_feature (283)..(286): n is a, c, g, or t
  misc_feature (288)..(288): n is a, c, g, or t
  misc_feature (291)..(291): n is a, c, g, or t
  misc_feature (316)..(316): n is a, c, g, or t
  misc_feature (319)..(319): n is a, c, g, or t
  misc_feature (371)..(371): n is a, c, g, or t
  misc_feature (383)..(383): n is a, c, g, or t
  misc_feature (386)..(386): n is a, c, g, or t
  misc_feature (426)..(426): n is a, c, g, or t
  misc_feature (437)..(437): n is a, c, g, or t
  misc_feature (444)..(444): n is a, c, g, or t
  misc_feature (451)..(451): n is a, c, g, or t
  Coding DNA Sequence Number=SeqID_2211
atatacacatcgtacatatagttgtgtatgtnagntcgtaatacgntcgcttatgatcttgcgtctgtaggtgtgctacggagcgatgcantggtagtctgctcgagtgtacgatccgcgnaagnataaatcaatacgactctaagtcgactaggtacgcaggtgcgcatcgtngccgtctgtagnagtgcnctggttgcatgnctccgcgcatacacctcctctcatcncctgcgatctctcacagcgtgacagcgtactgacagtagtctctcactctngnnnntnttnttcgtgtttcctctctcgcgtcgtnctntactcactatcgttctctatacctgtcactcttctctctgttgtgcgctctncgctcatcgtgntcntctgctttagtaacactagtcgctagcatctgtatagatnattgtatcgcntggcatncgcgctntacgactacgcagcagagcgacctcatcgtgcgt

SEQ ID NO: 11991 - DNA, 314 bp, Glycine max
  Coding DNA Sequence Number=SeqID_2212
ggtacgagtacttttctaggcaaaggaatttgataaggaagaagagcttccgaatagaaagtatcataagcagccatatgaatgccgggacagttccggagaccggaatgcggaatttgtgcttccagaccgtgtatgttacaagtgtgaaaacgggaggagcatagatactaaccttagttgcatgattcatgctcataaagagagttcattcattagatagggtcttatctctgatgaaagttgttctccacttcatttaccggattctacgtgattgagcttgactcaagcatgaaatactgtgcagctaa

SEQ ID NO: 11992 - DNA, 479 bp, Glycine max
  misc_feature (60)..(60): n is a, c, g, or t
  misc_feature (109)..(109): n is a, c, g, or t
  misc_feature (141)..(141): n is a, c, g, or t
  misc_feature (175)..(175): n is a, c, g, or t
  misc_feature (177)..(177): n is a, c, g, or t
  misc_feature (220)..(220): n is a, c, g, or t
  misc_feature (225)..(225): n is a, c, g, or t
  misc_feature (273)..(273): n is a, c, g, or t
  misc_feature (284)..(284): n is a, c, g, or t
  misc_feature (291)..(291): n is a, c, g, or t
  misc_feature (356)..(356): n is a, c, g, or t
  Coding DNA Sequence Number=SeqID_2213
gagcatgcgcgcgtgtctagacgaacgataaagacgatagcagtgcggcagggcgtccgncatgcacctatcacatatacctatacactcacaatacacacgtcccaangcagcttcgcgtggttcatctgtgtaggctgnacaggagataggtgagaggagtgcgtcgagtctngngtactattaagtgatagttatatgtttgagatatgtactctangtagntatgtgagatgtgtcagtagatatatatatagagatctggctattatntaaatatatcntcatcgnagattaatattacactcacatcacggttagagtctcgatatagtagtcacactcctacacacacnatatccatactcctcgtccacgctatacacgcgcgagacacgcgcagcacgcgtccacatgcatacacaaacaaaccgacaccactacaaccaacatctcattacaatcacccggacgaactg

SEQ ID NO: 11993 - DNA, 593 bp, Glycine max
  Coding DNA Sequence Number=SeqID_2214
gatagatcataaactgcacggcgagtgagtagatcgacctaaccgatactcaattatgccctcttgccgtcattccaccacttatcaccatatatcaccttctcctctctcttaccatctactcttccacacaatcttatcctactctggttacaatatgctaacccctccccatgtcagactggataatagagccagtgaggttatccggcagagtcactccgctcgcgtcccttcaactgcattacagcggaagatgagctgataacagagtaggtaacgctgaagtataagagaaagatcaaactaacctatgcaggttgacacgaggatcaaaacaaggccggtcgagaagtacaggaaggagacacgagagaaaagggggacccctccacacaccccgcgcgacccgcaacggactctgctcttctctatctcactctctgtgagtctcgtcatcatagaaactctacactgaaacctactaggtgctagatctacataacatactaccatatacaatatcagttataaaccatctactccaataatcccttctcgcgcgcaagacacagagctacttacggtgcggc

SEQ ID NO: 11994 - DNA, 303 bp, Glycine max
  misc_feature (78)..(78): n is a, c, g, or t
  Coding DNA Sequence Number=SeqID_2215
ttacgcatctctcttgcgccgctctcgcccgctcggggcggagctcactggccaccggccagccgccgacggcgaatntgcccggcgcgacgcactctttctcttccctctttcttcctccctccagcttcccttttctgttgtagagaggactaggggcgagcccctcctctgatctgtcgctctgtcccgaacgcgtgggcatcgcgcagcgccagcgctccggcgagggcgtcaacgaccatcgcgcgaggttggacgcttctttccccatcctctgtgcgtctgtccaccgcgtcgcgg

SEQ ID NO: 11995 - DNA, 577 bp, Glycine max
  misc_feature (69)..(69): n is a, c, g, or t
  misc_feature (276)..(276): n is a, c, g, or t
  misc_feature (282)..(282): n is a, c, g, or t
  misc_feature (404)..(404): n is a, c, g, or t
  misc_feature (507)..(507): n is a, c, g, or t
  Coding DNA Sequence Number=SeqID_2216
atactcgtcaggagatagtgtcgatagtaatgagatgtagtgcagatcatagctcatacgtgagtgagnccgacactatctgacactcgcagtagcgcggtctacctgatacatatacggatatagaaggtcatcatctatcatcttcacgtatataatcatctatatatgactatatacataacatctggctcaagtcaactatcacctccgactacgtacctcgaggacggtgttggaagagagacataataggaccaattaagaggcataatngcaganagtaaagttatgagatcgcgtagataatatggcgtgtgagagataagagaatatcatatcacatagtgtagtctgattatgtagatatcgatctgatgagaagtcgaactctggagggtgangtgcgtctaacatatgatatgtggaagtaatatatacagccagggccacgcgcgagaggactatctgcgtactgatgacttctcagtatacacccctatacanctcctcctactcgtctatcaccagaattacactgacgagtgtaatatcatcactatacgcgtgcacgagt

SEQ ID NO: 11996 - DNA, 182 bp, Glycine max
  misc_feature (42)..(46): n is a, c, g, or t
  Coding DNA Sequence Number=SeqID_2217
gctcggtacccctgaaaataactgcataaggaacattccttnnnnnggatgacccaaagataaacgcattgatgcaacaagcagagttattaagttcactagctctaaaagtagatgcagagaatatggaccaaagtcttgaaaatgcatggaaggtgaggcttgatagtcttaatggcttt

SEQ ID NO: 11997 - DNA, 578 bp, Glycine max
  Coding DNA Sequence Number=SeqID_2218
aaatctcgatcctctgtttcttcctcgtcgccgggatctcgatctcctcctcggaagaggaggaggagactatctacaagatcctccaggacaacggactcccgtcggggatattccctaaaggcgtgacggaattcaccttcgacggcgagacgggacggttctccgtttacttgaaccagtcgtgcgacgccaagtacgagacggagcttcgctacgacacgaatatcacgggaacgctgagctctgctaacgtaactgatttgtcgggaatatcggctcaggatctgttcctgtggtttccggttaaagggatccgtgtcgatgtcccgagctcggggcttatatacttcgacgttggtgtcgttcgcaagcagtactctttgtctgtgttcgagacgccgagagattgcgtcgcggttcgtcgtgaaaatgaggttgaatcttctgtgttgtcattgcatcgagtagatgaaactcttgggagaaacgttatttagccgtggagagttttatttaagaaatgttgttatactatacaccaccacaaagatagacagattgtcctctcatcaaaa

SEQ ID NO: 11998 - DNA, 567 bp, Glycine max
  misc_feature (124)..(124): n is a, c, g, or t
  misc_feature (253)..(253): n is a, c, g, or t
  misc_feature (271)..(271): n is a, c, g, or t
  misc_feature (273)..(273): n is a, c, g, or t
  misc_feature (361)..(361): n is a, c, g, or t
  misc_feature (397)..(397): n is a, c, g, or t
  misc_feature (436)..(436): n is a, c, g, or t
  misc_feature (469)..(469): n is a, c, g, or t
  misc_feature (471)..(472): n is a, c, g, or t
  misc_feature (482)..(482): n is a, c, g, or t
  misc_feature (506)..(506): n is a, c, g, or t
  misc_feature (525)..(525): n is a, c, g, or t
  misc_feature (532)..(532): n is a, c, g, or t
  misc_feature (538)..(538): n is a, c, g, or t
  Coding DNA Sequence Number=SeqID_2219
cacgccttgcgaaacgactgatggaatatgagtctgcgcttcacaagacgagacgctccgcgtgtcactgtgttcatactgaggagatacaacttagataatacgtaaataccactcgaactgncacgttctactctggtccacacacttgtgacgaacggacagtactctcctctcactccgcggtaggctcacaccctcgccgacatatgcgtttcgaacgcgaaagcctggagatatgagtgtctcacgncacgcgcctatcgcaccnanccctgcgtaagactatagcatattacatcactccgccgacaccctcctctatctgccgatctgacacagaaccgatgacgctgcaacngaagactccgtatataggactcgacgcacccggcangcagtgcctctagactgcagtgtgtgtctcaattgacanagcactcacgataactcgtgtactactcagccncnncacacgatancgctgcgcgatccgcgccatatancacgagtcgtcacgtcctnacgccgntctacngctctctactgtagacgagctcatgatga

SEQ ID NO: 11999 - DNA, 434 bp, Glycine max
  Coding DNA Sequence Number=SeqID_2220
ctgccaagctagctacgcgcacgagctctccatggccgcatcggtagcctgcgccttcttcttcgacgccgagccggtcggcgagcccggcgtgcacgccctggacgcgtgcgcgctctgcaccaagccgctggcaagggacagcgacatcttcatgtacagaggggacacgcccttctgcagcgacgagtgccggcacgagcagatgcagctggacgccgcctgcgccaggcaggcggccagggcggccgcccggaggcagaagcagttctcttcagcaacggagtccgggcgtgcacgccgggagtcctgggaggtgtccgtcgcgagctaagcggcgagagtggcagagaccgtatgtacttgagctaacaagctccgcatggaagaagctgccgttgccctatcagcgcgagatcgaggagactctcctt

SEQ ID NO: 12000 - DNA, 441 bp, Glycine max
  Coding DNA Sequence Number=SeqID_2221
gctctagaaaatttatactctctcaaaaaatgccaaagatcatgtggaagagcctccatctttgcttcccgtcaaatctcaccaaatgctactcttcgccgtgccttcctccattggccgccgccgctgctgaggacgacgatcccagccgtccctctatcgttctcatcaacaacttcaacctactctaccacaacgaccacaacaactatcaccaccgtgtcgttgacttaccttcctcatccaccgccaccaccttctcctcttctgccacgtcatcatacgaatccgagagccaagacatttctcctgaattatccgccgctttcgcttcccgtcgcttcttcttctcttcccctggccgatcaaatgcaatcaccgactcaccggaaacacggtcaagagaactctctgataatagcgacagtgccacgaccaaga

SEQ ID NO: 12001 - DNA, 563 bp, Glycine max
  misc_feature (152)..(152): n is a, c, g, or t
  misc_feature (355)..(355): n is a, c, g, or t
  Coding DNA Sequence Number=SeqID_2222
cagagtgtgttcacgaccgcggagagagaagatgtagaggagagggaagagaggggaaaacgaatattttatgtcaacacccaattttttgttagatgcgcacatatcagcagatgaaagagaggacgtaggcgatatttgtttcgcgcgcnacgtgttgccgccacctttatatccccgccgtatattttggcgcaccaccattttatccccacccatatatttattcacacgaccccacagccacacgacgcgtgttatattacccccgctcttgtgttgcccccccatctttatgagtgagccccagattttttcgcgccggtttgtatccccccgttttttttcccacacnttttaatcccgcctgttctgttttcactattggtgtaccgcgctcacccagacacaccccccaccgttatcttgcgcgtccgccaaacattggtgtggcgcacaaaattttctacccttctctttctcccgtggtagatccccataatgatatacaggaggcgtgtcccctccattatttacagacacacccctcagtttgtttttag

SEQ ID NO: 12002 - DNA, 418 bp, Glycine max
  misc_feature (58)..(58): n is a, c, g, or t
  Coding DNA Sequence Number=SeqID_2223
aacatcttcctctgtactcaagaagacttcaccaacttttcttcttcaatcgacgatnagcaccggcgcaggaagcggcacgaccaaaggcggtagaggaaagccaaaggccaccaagtccgtctctcgttcttcaaaggccggtcttcagttccccgtcggaagaatcgctagattcctcaaggcaggcaaatacgccgagcgtgtcggcgccggagctccggtctatctctccgccgttctcgagtacctcgccgctgaggtgttggagcttgctggaaacgcggcgagggataacaagaagacgcgtattgtgccgaggcacattcagctcgcggtgaggaacgatgaggagctgagtaagcttctgggagctgtgacgattgctaacggtggtgttttgcccaacattcattcc

SEQ ID NO: 12003 - DNA, 538 bp, Glycine max
  misc_feature (183)..(183): n is a, c, g, or t
  misc_feature (287)..(287): n is a, c, g, or t
  misc_feature (355)..(355): n is a, c, g, or t
  misc_feature (428)..(428): n is a, c, g, or t
  misc_feature (444)..(444): n is a, c, g, or t
  misc_feature (454)..(455): n is a, c, g, or t
  misc_feature (492)..(492): n is a, c, g, or t
  misc_feature (494)..(494): n is a, c, g, or t
  Coding DNA Sequence Number=SeqID_2224
agaagcacagcaacagcccagtgtcattgtataccccaacaaggctgctgctacatcacaacaacaaccaccaaacactatcaaaaagcgcatcatgctggtacatttcagcgacatactttagcaagggcgaaaatcccccaaattgaaaggtcatcaaaccaataaagaatgcactattcncgccacatggcaaaatacttcatgggaccacctctccacacaacatccctgctcggaatactccaactcccaatacggcccatcataccatctaataccagagnaaagacctcttgacccaaaaacccatgcatcatcggaacactaacatactaccccccaaatactcgangagagacatttttcatttaagacacttccgccatactattcctcatgaagccgagcagcaaacctcacacaangcacataatctctcanaacaatatgnngacactatccgaggcggaattcaccaaactatacggncntgagctactagcccacagaagatcttatttactgtgacgcccgg

SEQ ID NO: 12004 - DNA, 150 bp, Glycine max
  Coding DNA Sequence Number=SeqID_2225
gggagaagagctttatgcttatatggtatatggggctatcataggtggtatagtaacctactatttacgacttattgatcttgaaatatgagatattgaatggagaaggatgatggagaggtgatggttatgtgaactttctgaaagaat

SEQ ID NO: 12005 - DNA, 589 bp, Glycine max
  misc_feature (56)..(56): n is a, c, g, or t
  misc_feature (61)..(61): n is a, c, g, or t
  misc_feature (105)..(105): n is a, c, g, or t
  misc_feature (136)..(136): n is a, c, g, or t
  misc_feature (154)..(154): n is a, c, g, or t
  misc_feature (245)..(245): n is a, c, g, or t
  misc_feature (291)..(291): n is a, c, g, or t
  misc_feature (410)..(410): n is a, c, g, or t
  misc_feature (469)..(469): n is a, c, g, or t
  misc_feature (535)..(536): n is a, c, g, or t
  Coding DNA Sequence Number=SeqID_2226
cacgatctctcgcttaagacttaacgcagtggagtatatattatatcatcagtggntatanttagtatggtggagcgcgacgcgcgacgcgatagtgcagatatncgcattgaatgtcgccgtgtcatggctgagncacacacacgacacgcanagcagacgaaacaggacggggcgcgagagctcgtgtgattgtgtgggacacatcgtgtgtgtggtgagagtgtagtgaggtgcattgcggnccacacagtcctctgcgccaacgcgccggcggcaggtatgacgatncagtcgactccgacgccatttccggcatcagcactccatcacgtcaaatcacacacaggaacacgagatcagccaggtgtgtctagaaaaaggcgaagacacagaaaaggcgaaggcanagcgtgcagagttgtactgcggcagtgagtctgcgcatagtcaggctcgtgtctcactnttcaccaggcgtgactgcagcgctaagcgagggaatcgccgagcgtcacacaggttgttttcgcanntcaccacacgcacgcagcgagtagcgacgcagcacgcgggttcttttggttcg

SEQ ID NO: 12006 - DNA, 530 bp, Glycine max
  misc_feature (275)..(275): n is a, c, g, or t
  misc_feature (329)..(329): n is a, c, g, or t
  misc_feature (363)..(363): n is a, c, g, or t
  misc_feature (419)..(419): n is a, c, g, or t
  misc_feature (427)..(427): n is a, c, g, or t
  misc_feature (471)..(471): n is a, c, g, or t
  Coding DNA Sequence Number=SeqID_2227
gtagctgctcgaggattgtacgcctcacgcgcgtactgggactcgaagcagagatacatgtgtattcgctatacgcatgtgtagagtgatcatcgcaaatcttatatagctgtctctccgctcatgacaacgagtgccacgtcgtgcactcgccgtcgtgacgctctcgtcatgatgatgagatcgactctgctgcgtgcttcgacgcgatcatacgctcactggtgctcgtgtgtgatgcagttagagacgacttaccgatagtgcagactgantaccctgtcgtctaccagttgcctgctagatgagtgaggatggtgtcgctatcnagctacgagctgcatcgtacctgcgtcgtaagcnatctcgccacgagctcggcgagtgcgatagtcactgtactaccttgtcgtcgcacncacgaccncaagatgactaccgtaatcgacttatctcaacatgttggttatnacagttcttgagtgaggtcgcgctgtacggatcgtgatagcagcgcgattgcgtgtctc

SEQ ID NO: 12007 - DNA, 512 bp, Glycine max
  misc_feature (185)..(185): n is a, c, g, or t
  misc_feature (281)..(281): n is a, c, g, or t
  misc_feature (347)..(347): n is a, c, g, or t
  Coding DNA Sequence Number=SeqID_2228
gtataggtgcatcactcccgagtaattggtaaagagatagataattataatgtgtgcatacgtctgtttagtggggcgttggttagaaggttgcgatgtcgttgtgatgttaggtctgcatatttattactaattgcgtttgctgagacgtgacataacgagcgagaagcggtaacataagtaantcagtgcggtaatatatacgtcttgattttgctatctgcgatacctattggtggagtgtggcgtggggtggtcgagtgcagcgcgatgcggcaacngtgagatgagataacgtaggaagaagtctgtacgaggagactctggatacgacgagatccctttcntttacactaactatagtgagagtgcgatatttatttattgttgtgtgtggtgtatgggagtattatgatgatagtagtatgagcttcaacagtctggtagattagcactgtcaggctcggcggggtggaatcttctacatatattgataagaggagcgcgcgcga

SEQ ID NO: 12008 - DNA, 473 bp, Glycine max
  Coding DNA Sequence Number=SeqID_2229
cgattaacgagatcttctgctccacccgaatcatcgacatcgacggtaaagaaaagcactggccattgccatcggccaaattcgatttccactatccaaacagctgtggtgtgcgctacgaagccgaagagatccgcaaagccatccgtgccggtaaaacagaacacgaaaacgtgccacacagcgacagtttgggaattgcccgtgttcaagatgaactccgacgacaacttggtgtccactacgaaggacacgatgactaaattattatatatattcctcttgttacattttttttaaattaccacttgaatccaatggtcgccagtatatacggtagtttttagattttagtttcgaaatatttctgcatataaatttgtatataatggcgaccaaaacctcccaacttccaatgaattaaaatgatgtacatttttttattcattgtcatgaccacaaactgttctatt

SEQ ID NO: 12009 - DNA, 375 bp, Glycine max
  Coding DNA Sequence Number=SeqID_2230
tctccgcctccgttcaaatgggatcctcgcctgcgccttcgccttcgccttcgacttcgccgccgatgccgatgatagggagggccggcaacctcaccgtcttcatcacgccgccgtcgccggccagcaccccgcgctcctcgcgcccgtccgactccccaaggccggacttctccacccctacctcccgcacgggtacggcaccgcctccgccgcagaagagcgctagcccgcccgcgccgccggtcaagttctcgccccctgcaccgctcgtgaaggtgtccctgcctcctgtgcaggtgcccccgccgcagtacggataggcttctgcggggggcaagcacgacggatcggtgttcggcttcttatgggacg

SEQ ID NO: 12010 - DNA, 550 bp, Glycine max
  misc_feature (127)..(127): n is a, c, g, or t
  misc_feature (129)..(129): n is a, c, g, or t
  misc_feature (140)..(140): n is a, c, g, or t
  misc_feature (159)..(159): n is a, c, g, or t
  misc_feature (175)..(175): n is a, c, g, or t
  misc_feature (179)..(179): n is a, c, g, or t
  misc_feature (190)..(190): n is a, c, g, or t
  misc_feature (338)..(338): n is a, c, g, or t
  misc_feature (458)..(458): n is a, c, g, or t
  misc_feature (502)..(502): n is a, c, g, or t
  misc_feature (517)..(517): n is a, c, g, or t
  Coding DNA Sequence Number=SeqID_2231
gctcgctctgtcgagagaacggagcagagaggagcgacgcgtgcgtcgcgaccgtaagtgtcatatcttggatatataggtagtcgaggaaagaggtcaaattgaggcggccgtctgagtcgtggantngtgtgcgtgangagcgatgtggtgctcganagagacgcatcgcagntttngtggtcgagtngagtacatctctctatcgttgatgtatctccctctacagctagcccaactgatgtcagactacgatagtagtatacaatactatatgctagtagtagataataattctatgactatgtatgacgctctctccatacattctattctanattcgacaactccagcaacagacacatacgacaactaaacccgagtgttgttagtgatgatgttgatgatggggggagggggggttgggggtcgctgatcgttatgtcttgatctactgnatggttgttgtgactcccggttactctccattttcgggtgtggnttgcgacacaaaganacattaaataacagacaacaaccacgacatcag

SEQ ID NO: 12011 - DNA, 382 bp, Glycine max
  Coding DNA Sequence Number=SeqID_2232
gtatggcgtgttggcctttcaggcagcgcggttggttgttattcaaattttggtctttctcgaaggctgctattggctacccctgttggcttggtggttcattgttccgtgcccttgtgtattattcatggaggtacctcttcggttgaggcgacttactctatgctctccattctggatggcggcgattttcgtgcacgagacttccggctgtgtgctttctgcgttggggcctcccttgtttctctttgcgggtggcacatggcttcggctttgtctttgattgtggctggggtggtcagggattggctcttgattgcggtctcgtcctctgtttgttaggacactgtcaccccgttttgcttatttggtcccggttatg

SEQ ID NO: 12012 - DNA, 386 bp, Glycine max
  Coding DNA Sequence Number=SeqID_2233
gtatacttgcacattacaaatactttattattctttttaatttctttttatctcactttttactatcacattaacacattatattatctattatacctacacttctctttctttcttttttcttttatctccctaagtgtcaactaagatgacatgtattatttttcaatatttttttcataaattttaaggggaccgtaattcttttaacatggtattttaaatacactttgtgaaaaacttaggggtcatggtccgtgcatgtatacttccattttcaattttatatgaaaaaatataattctgtttatatcttgtaattaatccaccacattaatttttgtacaaaaaatgccgattgttgcagatgcgctgcacgcttctga

SEQ ID NO: 12013 - DNA, 530 bp, Glycine max
  misc_feature (57)..(57): n is a, c, g, or t
  misc_feature (125)..(125): n is a, c, g, or t
  misc_feature (183)..(183): n is a, c, g, or t
  misc_feature (443)..(443): n is a, c, g, or t
  misc_feature (467)..(467): n is a, c, g, or t
  Coding DNA Sequence Number=SeqID_2234
gattgcggaggaggttttagccactcgtatgtaatatagagaagtgattcttatttnttgtggggtggtgtggcgtgtggaggggtgatgggtgctattgtggcgcgttgcagcgatgttttttngtgggcgacaacaaaacatcagagagaaacgagcaagagccacacccacgcacgccgncgccatccgtgttcgccacaggagtagagacaacagaggaacgcacgatgaaagaaagaacagaaacacaaggtcgctactattcttcgcgacttttctgtctacgtcccataaacaacagacgctctcatagaataaaaaatatgagaaacagcaacaagttaaatgagcgttgaggtgggtgtggtcgctcggtcaaactgtggtggaggaacgagaaacagaaacgggggggtacaccacaaaagcacagcccagancggcatcactcggtgggagggggnaccacggtggggggacagggtccgccgccaatcgaggagcagagtagatctttcaacttcttt

SEQ ID NO: 12014 - DNA, 570 bp, Glycine max
  misc_feature (57)..(57): n is a, c, g, or t
  misc_feature (62)..(62): n is a, c, g, or t
  misc_feature (128)..(128): n is a, c, g, or t
  misc_feature (200)..(200): n is a, c, g, or t
  misc_feature (480)..(480): n is a, c, g, or t
  misc_feature (506)..(506): n is a, c, g, or t
  misc_feature (533)..(533): n is a, c, g, or t
  Coding DNA Sequence Number=SeqID_2235
atacgtgtatgacggtgcaacgcacacaccacccccaacccacccaccgcacagcangtggngattatcgcctgtcctactgctggtcgtgtacatattgataggctctagtgatatattgttgttantctggctactatcacttgcggtacaatattcaatgctggcgtagttggcttagataaggctatacatacagngcgcttatctatatattgcgcgtttctcttatattacatcaccaccgtctttcatccgcatgctgctgacactgcgcactgtcggcgaggtcatacagatcacataatgtgggcgactaacacctcgtgtcgattctgggtgagactcttatgacactcgtgctctctgcgtcgtctcttcaccgtgtcagtttgtatgtgtttatgtttggtttgtgtcactaacagcgctgtcacgcaggaaccactagtgctgtgggcgcgggccccgacaagaccngacctcgcgcgtccctgccctactantgcgtgtatatgtttgtcttggatacntcatccgttccgatgaactacgcgcatcatcaactgc

SEQ ID NO: 12015 - DNA, 566 bp, Glycine max
  Coding DNA Sequence Number=SeqID_2236
gaataactcagtttcttcgacaacagtgactgaatctgggagtgtcaccattagattggttgacttgataagcgcttcgtcggttgaaattctagaacctgtggatggtacgcaagaggctactattcctatttctagtcttccggctatcgtttgtttttctcctagttatgactgtcccatgcacatgatagggaatcgacacagatgtttcggcttggtaactcagctggatggcgtcatatcctctgggtctaccggcggtatgagtcatgcgttttggtctgcgaaccttccttgttaaccctatatcttcccagcggttcccccctttggttaagtttgtggggaccctttgccggggtgaacccgtttgcccctcaaacaaatgaaaaattttgttggggcgttaacgaaaaaatctggaaaaaattggtgtttatttggggaaaccccttttgtaaaatgtccgccaaaattcacaattattttgtttttatgagggaaatcatatccctcctcccgaaaaagggttgggaaggatgaaataatttttacgccgaaat

SEQ ID NO: 12016 - DNA, 585 bp, Glycine max
  misc_feature (280)..(280): n is a, c, g, or t
  misc_feature (285)..(285): n is a, c, g, or t
  misc_feature (287)..(287): n is a, c, g, or t
  misc_feature (501)..(501): n is a, c, g, or t
  Coding DNA Sequence Number=SeqID_2237
tcttcttacatgtaccgcgctataactacgagcacggctatattatcatatcacacagcacggctacacaagactcatgatctggttcatcttatttcgaatatatacatcgcgctgtgccagataccactacgactcacgatagatgtctgtgtacactagataactcactcgtgcacagaacacactacatcgcatcagatcatatacatcacctctacatcgtagattgatgatgtgaacagcgtatatctgctcagcatccaacctccgatctcantggcnancgactgctgagcacgagctgacgtctgcgatagtgcgaaatctgataagtcctcacataataaatacaagacagctaagtctgtacagacgatcacacaacatcgagcacgactatagaacaatagacaatatataacacattcacatcgcgcgaagcgacacacaacatgactgctaacgtcaatctctcgctaatgttatgtgcgccagcanactcacgagacgcctacggcggactacacaggagtagcagaacgaagccgtacgctgcagttcatatgagctcgcgatacggtg

SEQ ID NO: 12017 - DNA, 529 bp, Glycine max
  Coding DNA Sequence Number=SeqID_2238
aatacatgagtgtgttcgatcctatttttaggaaattagttataaaattaaaaatatatatttattataaagattataaaaaaatgacatcataaattttgattaatatttactttaatagataactttttacataaatcactcgttttgaaagattaatctttagttctcgactacttggctagattcatccaaaatagttccttctctttactttatttattcgcattaaattggctctggtgaattggtaggtgtgtgagatctggatttcatttttttactcctaataataaatgaacccaatgttatattatatttatatcatgtatgtatattatatggcacaaaataaagaagttacagctagaattagggcctacatgcttggaaactacgagaccmctttagctaaagtggaagtgcggaacacccattgcgaatagtattagacttttcagggcattcatgagggctttaactagaaattccgagtaaagccaagaggtgtaatatactcatattcatg

SEQ ID NO: 12018 - DNA, 345 bp, Glycine max
  Coding DNA Sequence Number=SeqID_2239
caccgtctaaagctcggaggcacaggcgagtgatccaggggcaagggtagccaagctaaacaaccccaaaggacaggggcagccccgcactcggctgtaaaacagtacaagaggccaccgcctaaagctcagtcgcacaagggtgggaccatgggtccaaggaaccaatgcacaaagcgaaacgcgaatcataaagcaaaaagcaaatccctacagcctgcagccggcaccggatcctgccggcagccggacgataatccccaaggtcctcggtcttccgactccagaaacatgaagagagcagcgaccgacgaaggacgaagccgcgagccgagcaacgctgag

SEQ ID NO: 12019 - DNA, 477 bp, Glycine max
  misc_feature (43)..(43): n is a, c, g, or t
  misc_feature (168)..(168): n is a, c, g, or t
  misc_feature (175)..(175): n is a, c, g, or t
  misc_feature (202)..(202): n is a, c, g, or t
  misc_feature (218)..(218): n is a, c, g, or t
  misc_feature (225)..(225): n is a, c, g, or t
  misc_feature (284)..(284): n is a, c, g, or t
  misc_feature (291)..(291): n is a, c, g, or t
  misc_feature (314)..(314): n is a, c, g, or t
  misc_feature (420)..(420): n is a, c, g, or t
  misc_feature (432)..(432): n is a, c, g, or t
  misc_feature (440)..(441): n is a, c, g, or t
  misc_feature (452)..(452): n is a, c, g, or t
  Coding DNA Sequence Number=SeqID_2240
gcgacgtcatcacgcgtatcgttctctgcgctgtccagtgtcnttaagtaccatctctctctcgaatcgccaactagtatgtgtcatcagactgctgcgattgacacacatctctctagtgacgtgtctcatcgacatatcgtatgctgctatatacagtccccctanctactcnccgcatgagtcgtggtgcatgtggttncgtgcttgtttattcngtatatngctttatctactatatgatagataatcgctcatatccttctcgatctgactcgttatgntcctagntatgctctgcgtctgtcgtgctntcgtagctcgcgtgcgcggctgtgcttcgttgtacgatctgtatagtgcgacagtcgagcgagatcgtactcacgtatatgtgtcaacgcacgatagtactcactncgtagtgtaggncgagcgcnncgcacttctgntgatactccttcaatcgcactgttg

SEQ ID NO: 12020 - DNA, 543 bp, Glycine max
  misc_feature (245)..(245): n is a, c, g, or t
  misc_feature (420)..(420): n is a, c, g, or t
  misc_feature (455)..(455): n is a, c, g, or t
  Coding DNA Sequence Number=SeqID_2241
ggctatgtctttaagcatgcgactatgagttattcttcgttcattattattctctcttcaatcgccataactcaagtcgctttttaacaagctgtcatctccaccaactttccgcctacctgtccatctacacacaccacactcgcacacgcccctttcgtccactaatgtccatccctccacgtagttcaccacactcacacattctctcatacgctatgctaatactctcatatccctcacanctaacacgacacacacccgacacatccaacgattacataacacccaaactcaacaatcacgcacactcgacaagatacagaccacagaacagacgagatggcacaagagcgcgcgcagaggagtcgagtaaagtctgtcaggtgtattatcgagtgttgaaggaactatgtcatngatggtattatgttgtatagtgttatataattatntattactatcatatttttataatatactctacattattattatataagtcatttctcatactattcttcctgattgaatatatcccat

SEQ ID NO: 12021 - DNA, 146 bp, Glycine max
  misc_feature (37)..(37): n is a, c, g, or t
  Coding DNA Sequence Number=SeqID_2242
gacagagtggtctacatgatgcggaaattttacctgnagcagatgttgattccttggccagagccggaccacttgcttccttacaaaatcaaaatccggcatctccgagaacaccaactgctatctctataactcaaaaagctacc

SEQ ID NO: 12022 - DNA, 545 bp, Glycine max
  misc_feature (326)..(326): n is a, c, g, or t
  misc_feature (479)..(479): n is a, c, g, or t
  Coding DNA Sequence Number=SeqID_2243
gcacttgcggcgacctgtgaaagatataccactatgacaactcagactaagccctactatatacacccaagaacagtcatggataatgttgtgatgctatctctactatacatcgtatatttataaacgagcattattattcatacgcctagcatactacacaatattatagtggttgtgcccgtcgcctaacattattatatacttgattatatcgataacttcgctcatgcgtacacgatcttacacatacatcgtgtaacaactaagacagaacgtagatactctcgcatgatctatttcaccgacgcgctctacactactancgtacagtgtattatcccttatcattgatgtacatattcaccgtctaatcaaataatatactatcatatatgttagcgacgactacatagatcatcatgctatatacgtatagtataacgaacattattaggagaccacgatgatctactcgnacagcacatacgtgacatatagtattacctcggtctcgctctagactatatataccaccacacgct

SEQ ID NO: 12023 - DNA, 488 bp, Glycine max
  misc_feature (26)..(26): n is a, c, g, or t
  misc_feature (29)..(29): n is a, c, g, or t
  misc_feature (51)..(51): n is a, c, g, or t
  misc_feature (64)..(64): n is a, c, g, or t
  misc_feature (101)..(101): n is a, c, g, or t
  misc_feature (114)..(114): n is a, c, g, or t
  misc_feature (117)..(117): n is a, c, g, or t
  misc_feature (134)..(134): n is a, c, g, or t
  misc_feature (150)..(150): n is a, c, g, or t
  misc_feature (161)..(161): n is a, c, g, or t
  misc_feature (173)..(173): n is a, c, g, or t
  misc_feature (214)..(214): n is a, c, g, or t
  misc_feature (231)..(231): n is a, c, g, or t
  misc_feature (275)..(275): n is a, c, g, or t
  misc_feature (281)..(281): n is a, c, g, or t
  misc_feature (284)..(284): n is a, c, g, or t
  misc_feature (294)..(294): n is a, c, g, or t
  misc_feature (316)..(316): n is a, c, g, or t
  misc_feature (320)..(320): n is a, c, g, or t
  misc_feature (328)..(328): n is a, c, g, or t
  misc_feature (333)..(333): n is a, c, g, or t
  misc_feature (356)..(356): n is a, c, g, or t
  misc_feature (408)..(408): n is a, c, g, or t
  Coding DNA Sequence Number=SeqID_2244
tgtgatgatgtcatcgtactatcgantangtatctccatacaagacgcgancgacagtgatgcngctcattcatgtacgacggtctcatcgagtactatangataccgcagcancgnacatgcgacacgctgangtcgacgtgatgtcgnagctacgtgantagcgagcttantcccggataagcctgatgtagtgagtcagcgtccatgatangtgctgactcagtgtantatgattcctgcagctcgtgattgtgcttgacgagtgctgttgngatgantangtatgtcgcnagcatatcatgtgtctacatangctngtagcgtncgctntgctcgtcacatgtggacttagncttcgcatcgatcgtagtacagatactcggactaaactgacgtctacgacanctgtgacgagtgctgatcaatgacgatggacgaagacgtagtggtattacagtcgtgagacgtgcactcgcgtatgagta

SEQ ID NO: 12024 - DNA, 292 bp, Glycine max
  Coding DNA Sequence Number=SeqID_2245
ccacgccgggtccttcaagtgccgtttccaccgcaccaactctcagggccacggccacggccagggccagggaagccgcccttcttcgcctccttcaccggccgcggccaacgcagtgccgcggcacccggcctcgccgtcctcgtcctccggcaccgtcgcgacccagtgacgtgacccaagtatcagcctcgaaaatcaagaacgctcgacaacagagagggacgggaaggtcatatcggccctccctttccccccgggccggggggcgcaaacggaaggtggcccggcg

SEQ ID NO: 12025 - DNA, 545 bp, Glycine max
  misc_feature (45)..(45): n is a, c, g, or t
  misc_feature (97)..(97): n is a, c, g, or t
  misc_feature (111)..(111): n is a, c, g, or t
  misc_feature (113)..(113): n is a, c, g, or t
  misc_feature (148)..(148): n is a, c, g, or t
  misc_feature (228)..(229): n is a, c, g, or t
  misc_feature (253)..(253): n is a, c, g, or t
  misc_feature (262)..(262): n is a, c, g, or t
  misc_feature (339)..(339): n is a, c, g, or t
  misc_feature (388)..(388): n is a, c, g, or t
  misc_feature (447)..(447): n is a, c, g, or t
  Coding DNA Sequence Number=SeqID_2246
atactggtgtcgctgccggataatccacacctaattctgtcggtngtagagtctatattctatgagctgcgagtgcgataccacgatagtaatagangagaaggagcacancncatagtggctccggcggggtgggcgcgccgattcngcccgcagaccgagcggtggcgcggagagcgagacggcgtggtggtgttgtgagagtaggatatagacggcttgctgatnntctttgcctgttctttccggtctngcggtctantatcgtctcattactctctcgtcgctcatcagtgactatatgggtagacagctctgatgatctgttggcgtggtcgntccggcgggtgatgcggacgacatgtgagattgtaacaaattacgtggngtgggtgaagatgggcggtgatcaagctaagttgtgtatataatcttggatgtagtgtnggagagtcgtgtgcgtgcggtgcggggctcttctctctctcacaccactcaaggcatactacatacgacatacgagaactcttctcgtgcccgtgcac

SEQ ID NO: 12026 - DNA, 187 bp, Glycine max
  misc_feature (43)..(43): n is a, c, g, or t
  misc_feature (80)..(80): n is a, c, g, or t
  misc_feature (85)..(85): n is a, c, g, or t
  Coding DNA Sequence Number=SeqID_2247
ttatacaccgatccaacaccacgcggcgcgagcgtggcggcancgaagatgctgcaggggaaggagctgtcatttatcantatcncggactcggataccgcgattgaatgcgtgcgccagtttgaaggcagtgcctgcgtgatcgtcaagcacgccaacccgtgcggtgtagcggtggcggccacgc

SEQ ID NO: 12027 - DNA, 432 bp, Glycine max
  Coding DNA Sequence Number=SeqID_2248
agatctcaacttatcattttatggtaagattagtgatatatcaaaagcttaaataggaagcttttacactatagtggatagttttgctattcactgagaaaatggccgtcggatatataaacttgtttgcaattccatggacaacgttcatggctgaagaaagtctttactttatcaatggtgtacttccccttagagctgagctcaccatccgacactgactgggatttatacgtgtaaaccttttcttctagtcggtagctctgactttttttgggcaatgtgtctcattttccgataacctgctgtaatattcaggcaatgtgcactaggtggctagtgctggatgtgagatcaaatgaattgcaaggactttactttttctttcccttagaattaaaagattttcgggacctgcaggaaggacagttc

SEQ ID NO: 12028 - DNA, 573 bp, Glycine max
  misc_feature (129)..(129): n is a, c, g, or t
  misc_feature (263)..(263): n is a, c, g, or t
  misc_feature (272)..(272): n is a, c, g, or t
  misc_feature (354)..(354): n is a, c, g, or t
  misc_feature (507)..(507): n is a, c, g, or t
  misc_feature (516)..(516): n is a, c, g, or t
  misc_feature (534)..(535): n is a, c, g, or t
  Coding DNA Sequence Number=SeqID_2249
tcgctcagactgtgacttcgcgtgtcgtcactgagctactactcgtaaacagacatacacgagacgaggagcgggcgtgtccaccacgagcaggtcacgacgtggaacaccgagggacatgtatagtgngtgcctccactacttgctcgtcgtcttctcatctatgtttgattattcagtcttccgccgcggtgcgcttctgtatctcagcgcgcacgtcgaggtactcagtgagtatatcgaggtatatatatattcgtgtngtgttgctntcgtctgttactgctcgcgattgtggggacacatcgcgagctacgtgaccgttatcgtgatgattcattctgttaattatanagctgtttcgtcacctctctgctcagatcgtcacacacaggagagtgccgtgaacgcaacacaggagacacaattgatgctccaatatagatcaccactctagacctgtgctcctcctccctctctccctctgacccggcgtctgcgagacgnacgcagcgncgaactcttttgaaaaannaatacgtgtattagtgtgtgctcactcagacttacgca

SEQ ID NO: 12029 - DNA, 271 bp, Glycine max
  Coding DNA Sequence Number=SeqID_2250
tgattctggcgttggcggtcttcaccgtcgccatcagcatccgccaactcgcgatcatcggtggcctggactactcaggcgccgttatcgattcgcagcaacgactcgcccggctgaaggcccttcgggtccgatcgactcaggcgatattcctcgctggagtgccattgtggatggtgttcccgatcttcctattgcagtcggtcggacgctacgaggtctttcgcgcgttcgatagcggctggctcatcgctgacctcgcgttcggact

SEQ ID NO: 12030 - DNA, 557 bp, Glycine max
  misc_feature (75)..(75): n is a, c, g, or t
  misc_feature (177)..(177): n is a, c, g, or t
  misc_feature (212)..(212): n is a, c, g, or t
  misc_feature (280)..(280): n is a, c, g, or t
  misc_feature (315)..(315): n is a, c, g, or t
  misc_feature (318)..(318): n is a, c, g, or t
  misc_feature (333)..(333): n is a, c, g, or t
  misc_feature (350)..(354): n is a, c, g, or t
  misc_feature (415)..(415): n is a, c, g, or t
  misc_feature (423)..(424): n is a, c, g, or t
  misc_feature (435)..(436): n is a, c, g, or t
  Coding DNA Sequence Number=SeqID_2251
attcctagacgacctccgacacgaacacgctcgcaacaccgcacattgctatcacaatacatatatctcatctcnacatccagcgctggtgtcgtatcgaatcatgagctcgagatatcctatagatcatgtgtacatacgcgataccagacgtgtccgcgcctatcgacgctcgtncatcatctctcaatcataatcgcagtgcgaggagngcggcgcacgatcatgtgtcgactgtacttctgctcgctagtgcgcgatgattcctcattattataanatcatgatctcctcgcacgcgccgtgcttgcacgntanttgtttgctcactgngcagcgctcacgtacgnnnnncccctcgcctctctcatcaatacacaccacctcgttgacgatgttatcagtcttcgatatntactcccnnaaagagctatnnttcatcgaatcaggatacctagtcctgcgctcacgcgaacacgcacacgcctcgtactatatattacctcccgctgtcgcgtacacctcctattacatatgatccacatcatcggtcgctg

SEQ ID NO: 12031 - DNA, 554 bp, Glycine max
  misc_feature (39)..(39): n is a, c, g, or t
  misc_feature (50)..(50): n is a, c, g, or t
  misc_feature (87)..(87): n is a, c, g, or t
  misc_feature (136)..(136): n is a, c, g, or t
  misc_feature (163)..(163): n is a, c, g, or t
  misc_feature (169)..(169): n is a, c, g, or t
  misc_feature (178)..(178): n is a, c, g, or t
  misc_feature (188)..(188): n is a, c, g, or t
  misc_feature (210)..(210): n is a, c, g, or t
  misc_feature (256)..(256): n is a, c, g, or t
  misc_feature (274)..(274): n is a, c, g, or t
  misc_feature (301)..(301): n is a, c, g, or t
  misc_feature (303)..(303): n is a, c, g, or t
  misc_feature (360)..(360): n is a, c, g, or t
  misc_feature (395)..(395): n is a, c, g, or t
  misc_feature (449)..(449): n is a, c, g, or t
  misc_feature (455)..(455): n is a, c, g, or t
  misc_feature (472)..(472): n is a, c, g, or t
  misc_feature (486)..(486): n is a, c, g, or t
  misc_feature (490)..(490): n is a, c, g, or t
  misc_feature (529)..(529): n is a, c, g, or t
  Coding DNA Sequence Number=SeqID_2252
gctatagatgtatgtgcctcactacagtgacagcggtanccgtagcctanctagatcttctctctcgtcatcgcgcacctgtctgtnagatatcatcatctgctgtagttcgtagtagagttatattaattttatnacgtatgtccgtccgcctccctactcncacacncacacgatncagactttanatttatgatcatctctataacnatgctcacgctatctcgctgctctatatctactagcacatacgtangagcagtcacgcagtgancattacgtgtcgcacttgtacgtgtancncgtgtggcagtgtgctcgctgtgacgaatctacgcatccctttgagttgtacgtctntagatcatctatgtctgatgaatgatgcagagcancgaggtctgagcgcacactatagagcgactgtgtgtgtgtgcgcgtgatgcgancgagcnatcagacgcacgtaccngtgacgagaatcangtgngtgttgtgcccggccccatatcactcatatatccatatngttgctctacatactatacatatga

SEQ ID NO: 12032 - DNA, 355 bp, Glycine max
  Coding DNA Sequence Number=SeqID_2253
gaacattcatgtcctctaatctattcattttcttccttgtcatggctacaaccaatggtcaggctccagcaccaaccccttcaggtccaaccaacataaccgcagtcctagaaaaggctggtcaatacacaatgttcataagactcctcaagagcacccaagccgcagaccaaatcaacactcagctcaattcttcctccagccaaggcctaactgtgtttgcccctaccgacaacgcatttagcagcctcaaatccggaaccttaaactcgttatctgaccagcaaaaggttcagcttgttcagttccatgtccttcctacactcttgaccatgcctcagttctaaaccgttag

SEQ ID NO: 12033 - DNA, 480 bp, Glycine max
  Coding DNA Sequence Number=SeqID_2254
gtctctacttcagaaacggtggcaaacgaatctggttctcaagcttcctccaaacctcaggttgccccatcatcctcctccctctcctcttctccttcctcacacgtcaccgtcaacaacaagaacaagaagaaccaaagactacactcttcctcatcaaaccttcactgttcttggcctctgttgtggtcggtctcctcatcggcttcgacaactacctctacgcttacggcttagcttacctcccagtctccacctcctctctcatcatctcctctcagctagccttcaccgctttcttcgccttcttcatggtgaagcaaaggttcacgcctttcactataaacgccgtcgttttgctcactctcggcgccggaagccttgcccttcacgcggacggtgacaagctccccaaggagacgcgcaaggagtatatagttgggttcgttatgaccgttgctgcagctgttctctacgcgt

SEQ ID NO: 12034 - DNA, 578 bp, Glycine max
  misc_feature (37)..(37): n is a, c, g, or t
  misc_feature (269)..(269): n is a, c, g, or t
  misc_feature (372)..(372): n is a, c, g, or t
  misc_feature (391)..(391): n is a, c, g, or t
  misc_feature (412)..(412): n is a, c, g, or t
  misc_feature (522)..(522): n is a, c, g, or t
  Coding DNA Sequence Number=SeqID_2255
attgctctctcgataactcatggtcacgacgctcttngatcatgaagctgccgactatcatggcgtctgcagagcagcgacgcttcgatgatcgcagcagcgcgctcctgtgccacatctcgcgcgacgacagcacgtgtaattgcatgcatacgtactttgacgtcggcacagcagttactcatgtatatagcatagagtgatgcgatgcgcgtcgatacatacgatactcacagaatacaatgaggtgatactagactactcatganttgtagaacgatagtcacacatcaatcacacaactgagtagatagatgtcgatagcacgagtaagtgaagtgcggagccgactcgtagcaggactctagtgcngcgcgcatcacgaatatanatctacagaatactcgacacnaccgcagcaccgtgagatagtgagtgatgcgcagctaccgcatcaccaccctgagagtgcacattcgctctctctctccctgacactcatcacctagacgcgggatgagngctatccggatgctatcgagctcgacgcagcaggtgctcgatccttctgagctgta

SEQ ID NO: 12035 - DNA, 527 bp, Glycine max
  Coding DNA Sequence Number=SeqID_2256
ggaacggaccgactgcgagaaatcaaaccacaacgtgttacattacattacatggcatctcatgaaacttgaagctacacatatatatttgatagtaacataagggaaagagaagacggcgaaaatagaaggtgaaagttactggacaaacaacatctcttattcattcatctctttcatccttgcttccgaacacaactgtactgaattagctcgtatacagacaccgacctaaggccgccacgatgatgatgactggttggagcaagagcatcgatgagcgcggaggatcttgacagagatcaaagtggaagagctctgagcgacgggtgctcaacgagagctcacgaggaaagggtgctggcacacgccgcattctatcgtctccgagccagaggctgggacctgcacctggaggtgcactgtgcagatggggcatgcgacctcccgcattcgcttgccagaagatccgtctgaagacctcgaacctgaagatgacttcttgtttatatccatcgcttcctgaa

SEQ ID NO: 12036 - DNA, 446 bp, Glycine max
  misc_feature (63)..(63): n is a, c, g, or t
  misc_feature (218)..(218): n is a, c, g, or t
  misc_feature (371)..(371): n is a, c, g, or t
  misc_feature (389)..(389): n is a, c, g, or t
  Coding DNA Sequence Number=SeqID_2257
cttcacttccaaacaacataggtaaaaagactggttgctgtccccagtccaaccacgaacganactatacatgtcagatataatgagagaattatttttttgtttattacaatattgctatcttgtgtcctttcttgtgctttgtattcgttcgttgttttgttatatatacaggtagatgtatattctattatgtactatattatgttgtgatagtngtggagagctaagatatttgttactatttatatttttctatatgcggagcacaatcgtatcttttttgattatctattatattgttgtgatcgcgtagccttccgttgttcgtgattgttgcaggtggtgtgggtgagggtctcgcacagaanaatacttgactactatgnttacgcctatattcccgtagccagctcgaccggtgggcggctcagcgctatgtatag

SEQ ID NO: 12037 - DNA, 554 bp, Glycine max
  misc_feature (59)..(59): n is a, c, g, or t
  misc_feature (129)..(129): n is a, c, g, or t
  misc_feature (279)..(279): n is a, c, g, or t
  misc_feature (346)..(346): n is a, c, g, or t
  misc_feature (514)..(514): n is a, c, g, or t
  Coding DNA Sequence Number=SeqID_2258
atggagacgccatgcactatagagagatgcaggactcgactagagctagacgagacgtngggctgtgagttcgataattagagactctggtatggatgctagtataccgaggagatgagggtcatcgancacgatcagtcttgtgatacaactgtttcaacctaatacgcgaggagcggggagtgcgctgcgatgacaggagagctgcgattacatagacatagactgtatatattctctagtagctagtacgacaaggtgaatctaggatgatgaggnagatagactggatgagatgatagatcaacttatgtagacgcatgtactgcgatctaagaccacaacnagttctagggtacttctgagcgaggagtggtaactgtaataacacacacgtgcgacctcagacgcagtaagctgagaagaaggaggagagtgaccttcccatcccttacctcgtatcgatcgctaggagagggaggcgcgcagctcctatttaattgtgaaccgcacnaatagtgatttatgcgctggcagcgctcgaagtaatacaa

SEQ ID NO: 12038 - DNA, 587 bp, Glycine max
  Coding DNA Sequence Number=SeqID_2259
ttagtcgacactaccggtgaacgcacgagtgtattagtcgtatataatatagaatgggggcggaccgttgatggcaccgtcgcctacgcgcgttgttatggagtctgctgtctcggcaactcaaatatttgtgaaggacgtcggatgcttgacccagaccgtattaaagtagtaggcggcggggctatatctgctagttggaaattcgtggattaacctttagcatgtacggctgtgcggcgtgcgttggcttttctgatcagaggaggtgctaagcggcgcgtgggttctgcgagctccacggcgcgcgtctttggtgtttaaacataaggtcttctactacccatgtccccgtagtttcccctcccctatcatcacaataattcgaaactgtgttacgcttgccttttcaaacagggctaaggcaactttcctgagctacagtaagacaaagagaagggggcacgaatacatcctgtcgggcggggcgtggggggagggaacatattcgtctaagacacacgggccttcgcctccagcggcgggccccgcagggttttagtgggtgtgccccagacgtcgaacag

SEQ ID NO: 12039 - DNA, 378 bp, Glycine max
  Coding DNA Sequence Number=SeqID_2260
gaggagttggtcaccttctggaacatcgcattcccacggtggctggagctgctgatccgtttgcaggccaatggcctgcgtcggttcgagctgcagtgtgcactccctttactcaggagctgcctggagggtgggaagaactggcacgttgtgcagcagatccctgaggtgcgcatcacaagcaccgatggcaagaagtacataaggtacaacaaggcccgccgcatctacgagacgaatgctcagtgtgaagagaagtctacctaaaaatcttggagtacttggcagctgtttggtagacatgtttggtccgaccgtccctactgctccaggagatgtcgtggtttacatcagggagtcgtcgtgttgttactagaa

SEQ ID NO: 12040 - DNA, 296 bp, Glycine max
  Coding DNA Sequence Number=SeqID_2261
gacaacccggcgactgcctttggcgccccgaaccccggacgaaggccgcagggcgggcaacctggaatcggaaacgattgtccgccctcgaccggaggttcacgccgaaaaaatcacaggaccgcccgcaccagtcgaacgcgccggggccccgaacccgtaagggacggaagcacccacacaaccggatggcccccctgagctagtttttgattcggcttcaccaccccccaggatcatcacgtacatcgcccccgccaggagacacccggaaaccgcacgacaggcacaactca

SEQ ID NO: 12041 - DNA, 568 bp, Glycine max
  misc_feature (30)..(30): n is a, c, g, or t
  misc_feature (543)..(543): n is a, c, g, or t
  Coding DNA Sequence Number=SeqID_2262
ggtcagtaccacgacgatgatatgttaatnattaagtattagatgtacactagaaactacctatctctcctcatcatcgcgcgaatgaaaggaatatatggtgtatgcgtcataatctttcattgtagatttgagtacggtgacttgtgtgctagatatatatcttcgccggtcgatcacgcccctcatacatatgctcctccgcgccgattctatcgctattgtttctgaatatcaatagttcatcttatctctctcatatcaccgtgtacttgtatctctatactctctgacacaatacaatcacaacgcagacacctctactacacacgatcgatgcgtgaaagtatacccctgcgagctagccatagctaaccgagaagagacggacgaagagcacgaccgtcgtgagtggttgcgggtacgcagcgcaggcgaggagtcatcgtgagaggagtgacacgtgcacctagtggactactctataggtgtgccgtgtactccgtatgcaacatctctccgatagacggtgagacgatcgcnagtaatcgcacggatcacatctacg

SEQ ID NO: 12042 - DNA, 547 bp, Glycine max
  misc_feature (134)..(135): n is a, c, g, or t
  misc_feature (295)..(295): n is a, c, g, or t
  misc_feature (310)..(310): n is a, c, g, or t
  misc_feature (427)..(427): n is a, c, g, or t
  misc_feature (443)..(443): n is a, c, g, or t
  misc_feature (482)..(483): n is a, c, g, or t
  misc_feature (515)..(515): n is a, c, g, or t
  misc_feature (522)..(522): n is a, c, g, or t
  Coding DNA Sequence Number=SeqID_2263
gggtgtttattacatcctctcctatatggcaatccaaatttgtatctgttatgttttctagtgctgccctcaatccggacgacaccacgagatgtatgcgagtagataccaagagtatgtgtggggctgatttnntctatgcctcactatctaaataaacaacttactatagtgtcttcccgcacgacagtggggacccacacactacactaactgttttgtgggtagaggggttttaagagcctgatagaacaaaggccggcgcgtgtgatggagtacagagaccgagatatanaacaaaaaaataaanagaggataatatgggatattgtttcttgtatggtttctagtttctttatgtcattctccttcgagcccgattaacgacgcttgtagtatatcattatgtgttgttaattctgttatnattctactggcttgtntgctttctgcttcgtttttgagatgggggggaggggaannccctcgctcctgtcatgtcactcctcttattngggggcnctcttggtagcccataatttagccc

SEQ ID NO: 12043 - DNA, 546 bp, Glycine max
  misc_feature (460)..(460): n is a, c, g, or t
  misc_feature (474)..(474): n is a, c, g, or t
  Coding DNA Sequence Number=SeqID_2264
ttcatcttttgtctgcgggttgagagcttattttttatgaggcgtagaaacatgttattcaagtatacaaggataacacaataataattatttctttctgtgatagcgttgcctacctcaaatcactacaactttcttgtatttgcaaattgcaatcacgatgattgttgaggaatttaggagtttgttgcagtgcactcaaaaataaaggatagaaggttcattttgtagtccttgattattaatgtaaataattagatataggtgaaggggattgaattttgcatttgcatgtactgtggactagcagaagactgaggttaaccataggaggcactagtaactttgactagtatgtatgacaaaaaaacatctctttgaaatcagttacaagccatgacttaatgctggcttcacacttttaagtcacttaactagtttgcttgaaagtgtgtgggtnccatgcctatttanaaattgactccacctcttaatagctgatcttggcaagttcattataagtttctgttgatatcctagagggaa

SEQ ID NO: 12044 - DNA, 599 bp, Glycine max
  Coding DNA Sequence Number=SeqID_2265
taaagacttgtccacttgtttcctcacttaccacactctttcttcttctttccaagatatggagccggaagagaacggaggggagaaagagaggatgagaaaggaaggggaagacataactctcctcccatttgggatggctacttacaagatgcaaggcgatgtctggctttcgcacgaccacgatgaccaggagagattggcttcgctttgtagcgttgcggattcgtggctaaaacagcttagggtccaacatcatgacttcaactacttctgcaccatgtcgatgactagtcctcgtggctaaaaacaaacccggtttccatgtttgtttgtttgtctgctcattgtcatcgtaaaagtcccaccgtttctttgtttatggaaccgctggcgttttctaaaaagagtgatctggcttttgtagcgttttggttaggatatagcgttttaagacacctaaccttttgagaaaagtgtatgtcggtatatagagtttgttgtcttgttgaaacagagtaatcgttgttacttgttgcgtgttgaaacagagtaaatgctttcttgtaagtttatattacatcatccttcacttgaaa

SEQ ID NO: 12045 - DNA, 237 bp, Glycine max
  Coding DNA Sequence Number=SeqID_2266
gagaatttaattgtttcaccctgcttgagtgcttgtggtccaaataaaatattgatgaagttgagatcccagggaggtatcaaggctttactaggagttgtaagatgtgatcaacctgatgttctttcacaagttgcacgaggaattgccaacttcgccaaatgcgagtctcgagcttctagtcaaggtttgctttcttgtcaatatttattgccaatggtgcaaattttactgaaa

SEQ ID NO: 12046 - DNA, 363 bp, Glycine max
  Coding DNA Sequence Number=SeqID_2267
cataattgcccgtgttggaaacatcctgggtgaccaaaccgtgaatgtgagctttatgagtgtgggaagaccatcgggtaggaccaaggctattatggctattggtgtcgataaaaaacccaccaaggaggctttttccaatattggacccgggccccccctttaaaagttttttttccccaagctctagccctagttgggtaatggtatcccccccccccaataaaaaaggtatggggatcccccacccatggagggggcgttttagaaagtaaaaaagctccttttggttaaaaaaaaatgttttttttttccaattttcaagggcccatgcccttcaaatgatttagatctgtttttccc

SEQ ID NO: 12047 - DNA, 463 bp, Glycine max
  misc_feature (90)..(90): n is a, c, g, or t
  misc_feature (109)..(109): n is a, c, g, or t
  misc_feature (130)..(130): n is a, c, g, or t
  misc_feature (222)..(222): n is a, c, g, or t
  misc_feature (348)..(348): n is a, c, g, or t
  misc_feature (397)..(397): n is a, c, g, or t
  Coding DNA Sequence Number=SeqID_2268
gtaactacacacacgtcagtacactgccgcgctaggtgaattctttctatgatattactgtatatgctttgtctcttacagggcccatcntcgttctctcttatattancgtgtgttatatatatatgtnttatatattgcacctattagacgactatcaagcaacttctgagattgcaagtacggatgtgcctttcagtctgaagggtgagacgacaccanacccgtctttcatttatctatgtgattggatttccgctccttctcaagtagctgggtggttctggctgttgtgtctttcatctctattcttctccgttatattagtatcattattataaaagtatnattcaaactatttcttaccattcacctctctctctatagtgctagtagntaagagtaacccgtcacgcagcatagtatcattttcgtagtgaaacgtatactcgctcgatcgtgg

SEQ ID NO: 12048 - DNA, 485 bp, Glycine max
  Coding DNA Sequence Number=SeqID_2269
agaagacgacagtcgcccgcacaacaaagtacaacacagtgcaggggctcaattatggagaaagcaattcaaagacagagagctctgcttgaacatcttcaacccatttcttcaagttcaaatttttcctctcaaacccatcaatctacggatctctcagcttcattatgttttgctgggaattcttcgcttggtcaaacaggtggatcagatgatgacgtggtgattgtagctgcatatcgcactgccatctgcgaagcaaagcgcgggggctttaaggacacccttccagatgaccttcctgccacagctctgacggctgcactacaaaaaaccaatgcggacccctgcgcacttggagatattgtcgcggccacactactggcacctcgacccgatagccgacttgcgtccaccctggctgtctctcatccaggctccccagagactggccctccccgacatgccactctccagagttcatc

SEQ ID NO: 12049 - DNA, 572 bp, Glycine max
  misc_feature (361)..(361): n is a, c, g, or t
  Coding DNA Sequence Number=SeqID_2270
aggacgacgccacaggtcaagacttggagatcgttgaggctatgtcccttgttgagtggttcgctaacaactacaagcgatttggtgctaacctcgagttcgktaccaaccgttctcaagagggatctcaattctgcaraggttttggtggaatcggtggtatcttgagatacaaggtcgatttgatggcactcaacgagtacgacgaacaagacgtcgactatggcaactcatccgatgaggacatctgacgacgcgataacttgctctgctcgaggcctytagattgcacgcaatagacctacttagcgcccatacactagtcacaaataatcaagtgggcgccactttytactacttntactacaccacaactttattaccttcaacttacaacaagaaagaaatgagcgaataaacagactgatttgaggatggggagaaatcagcctgatcactaggtgcatgcaatcatagggtttcaacgagcttcaaaaacaaaagcaaacagaagggggactccggggggattttgtctatattgatacgtaggagagcttttactcttcctt

SEQ ID NO: 12050 - DNA, 549 bp, Glycine max
  misc_feature (75)..(75): n is a, c, g, or t
  misc_feature (166)..(166): n is a, c, g, or t
  misc_feature (184)..(184): n is a, c, g, or t
  misc_feature (238)..(238): n is a, c, g, or t
  misc_feature (291)..(291): n is a, c, g, or t
  misc_feature (322)..(322): n is a, c, g, or t
  misc_feature (327)..(327): n is a, c, g, or t
  misc_feature (337)..(337): n is a, c, g, or t
  misc_feature (414)..(414): n is a, c, g, or t
  misc_feature (427)..(427): n is a, c, g, or t
  misc_feature (431)..(431): n is a, c, g, or t
  misc_feature (472)..(472): n is a, c, g, or t
  Coding DNA Sequence Number=SeqID_2271
cgcgcgctgtagtgacgatcaacatacagacattatagcgtgttgcatgtgcgcttggctgttgtagaatacatngcaatacatcacactgaatgaatgcgcgagcgtggatgaggtgtgtccgcattgcactgcttgctacacaattcgcctattgtacacgcancggtagtctctcgttgancgtgttactcactatgttctcggctatgctaatacgcgcgagtcgtctcatatnctatacgataatgttgataatatggcgcatatatatcgcggtgcactgtgacnactgtagttgtgagacgcggatataatcggnagcgncggcgtgcgncgcgtcgcgtatatgacgacgtccgctactactgttacttagtataactagtcgcagcggacgttgtagcgtagtanagcacgattgatncgtngtctgacgtcgtgatatcgatatatatcgcacacgcgtacncgactcagctgatatatatctatgcgcgcgctcgtctctaatacgacgtacgactgcaccgtcgagtaccgtttatt

SEQ ID NO: 12051 - DNA, 143 bp, Glycine max
  Coding DNA Sequence Number=SeqID_2272
agatctaaatgacctttgacttgtaatatgattatctgatgcgcttatcggggctaaaccttggtgatttccgaatatggagtaaaatattatatgaccatttattcatcgggagcctgagtgccccaacagctccttggaac

SEQ ID NO: 12052 - DNA, 518 bp, Glycine max
  misc_feature (94)..(94): n is a, c, g, or t
  misc_feature (191)..(191): n is a, c, g, or t
  misc_feature (196)..(196): n is a, c, g, or t
  misc_feature (323)..(323): n is a, c, g, or t
  misc_feature (395)..(395): n is a, c, g, or t
  misc_feature (404)..(405): n is a, c, g, or t
  misc_feature (471)..(471): n is a, c, g, or t
  Coding DNA Sequence Number=SeqID_2273
atgggctggtgcttctcgcacctcatccccgctgaactgcggtgcgtccgtgcgtgcgtgggctgagatgtgttgggtcggtctgagatgggcngcagtgctggcgcgggatggtagtgagtgttactctgtacctacttactatgatgagaataatataggagaggaggattccgcacatcacggatgtncctcntgatcattccatagagacacgtctcgaggaatgaggagttctaatatgtcgctcgttagtgtctaagtcgtaatgtatgtgtacagatgatgatcataagacgtcatgtctttgcgccccatctatnagtctcgggcggcgcacccagatctaaagaccacaatactatgtagcgtgataaacatatcactctctctgncgtaggtgnntactccatgcgggacggtctccctagcatcctcagtcgggtgatgtctcatcactattctgcgatnccctcctcctcgcgtggctggagagaacaaccacatccatactacat

SEQ ID NO: 12053 - DNA, 181 bp, Glycine max
  misc_feature (65)..(65): n is a, c, g, or t
  misc_feature (156)..(156): n is a, c, g, or t
  Coding DNA Sequence Number=SeqID_2274
gtttgggcattagtttatgccaagggggagcgggcgatgtgacggagttgcaaattggcgtgaancataaaccagggtggtgtgaaggtctgggcgacaagggtgacggagcgaggagggactatcgggggaaactcggtgagggaactgttttcnattcgagcttggaaagaaagagtgg

SEQ ID NO: 12054 - DNA, 275 bp, Glycine max
  Coding DNA Sequence Number=SeqID_2275
tttcgctttcctaaacttactgaatttgatcttcttcatgattgttacaaagtactttgtttatagagctgaaatttcagattccatagatgtacttgcacaagaactgaaggagaagacagctaatgcgtcaaactaagtggttccaagtgattagttgattggacattgatatatggacatcttaatattgtaaatacctatttaaagacctactatatttatcgcaaaaaaaaaaaaaaaagaattcctgcaagcaccgaaagatctattaa

SEQ ID NO: 12055 - DNA, 576 bp, Glycine max
  Coding DNA Sequence Number=SeqID_2276
aatatatctgctccgttgccattgatgtctgcattgagagagttagactcctttctgacgccaaaacctctgtcgacaacactagcagattccccatcacttctggacattaccctgccggatctagcgtccaaaacatgtactactggtctcaaatgttcaacaaccccgacttttctatgtacgactatggccgtgataccaacattcaaatctatggcactcccaaccctcctgtctatgatttgagccagatcgtcgaaccagtccacatgtttgttggagagtatgacgagctcgctcccctcgctgatacctccaatttgagaagcaagcttactggctcaagccaagtcgagtacagaacctatccccttggccatgccagcttcatctggggtttagatgttgccacttacgtcaatgacgttatcactgtcttaaactcttaattcacttaataatgatgaatctgtttttatccaaaggtttaatgaaatatttatttttattacggatagaaatgtttaaagtctaggcccatttatgaaaaagggcctcgctcaattaataaga

SEQ ID NO: 12056 - DNA, 480 bp, Glycine max
  Coding DNA Sequence Number=SeqID_2277
agacggtgaacaaggccaaggcgcacgacccggcggccaaggccgaggcggaggccaggaagcaggagcggatccacgaggcggaggccgccaagcgggacgccatgcgccacaacgccgccgccaaggagcacgccaccgccgcgtcctaccaccccaccaccggcgccggagtggacgcccgcgacgtcgaggtggagggcgcggccgccccgcgcgcggggagcagcgacgacggctacctgccggtgtcgggggcggggcactgggtcggcgagggcggcggtcaccagctgcccgcgcgcggcacgcccggcggccactctgcgtgatgacgaattgacgagactccatccgatgtgatttgcgtgtgaactggctggtttggcaaatagctggtataccttgtgtgcttgttcgagtgtgacccctcctgtagttttgagctctcaagagctgtgcttatttacgttgtgatct

SEQ ID NO: 12057 - DNA, 398 bp, Glycine max
  misc_feature (112)..(113): n is a, c, g, or t
  Coding DNA Sequence Number=SeqID_2278
tacacaccgaagaccggaccaacaagacaaccgacttctacaagatgccttcaggacaaggagcgggtaccaaccccatccacaacaaacagaagaagaagaaggccgtcgnnctcgacgaagatgacatcgcatacaaggcgaagctcgctgctgagaagaaacagcgtgaggatctagccaagaccgttggcaagggcaagggacccctcaacaccggttcccagggaatcaagaagtcgggcaagaaataagcgctggtcataccaacggccgaccggccgacgagagaaaggcgatgcgatacgacgacgatttgacatgaaagataccacaagccaggagtcatgacttggcagggcgctcatatacacatcacattgatgcatgggaataaa

SEQ ID NO: 12058 - DNA, 579 bp, Glycine max
  misc_feature (27)..(27): n is a, c, g, or t
  misc_feature (85)..(85): n is a, c, g, or t
  misc_feature (245)..(245): n is a, c, g, or t
  misc_feature (254)..(254): n is a, c, g, or t
  misc_feature (284)..(284): n is a, c, g, or t
  misc_feature (309)..(309): n is a, c, g, or t
  misc_feature (452)..(452): n is a, c, g, or t
  Coding DNA Sequence Number=SeqID_2279
gctactccgagttaagtggctgaacangcataggagagtatagaacagcactgtgccgacaacagttggtggaccgataataatnaacagaattagcgtatggtatctgaccgtcactggactgggagtgtatgagacggatgtcttatccaatcgacattgcgttacacatcggacatgtctgtctcggcttatgtatagcgatcgactctgctatggacgtgggcgctatcgtctatcatgcntcgcataantatacgaccttctctgcttcgaggtgtctntctgcgcgcgcgtcatgcactacgnaccagcggagatattagtgatgtactctatatatgtcgtgcatattgagagtagtggttggtgtatctagagatcgtgggtacagacagatgctgtcactccttctcgtcactatacgacgcagtggcgagattatgcgtctntagttgtgttacagcagctccgaacgagcgcgcatcgacgtgcagagtgggagtgaggatgtagtgtggtatataggttatgtgtagggatacgagcagatgtagataggagcacgcgtatacaggt

SEQ ID NO: 12059 - DNA, 477 bp, Glycine max
  misc_feature (26)..(26): n is a, c, g, or t
  misc_feature (69)..(69): n is a, c, g, or t
  misc_feature (100)..(100): n is a, c, g, or t
  misc_feature (102)..(102): n is a, c, g, or t
  misc_feature (105)..(105): n is a, c, g, or t
  misc_feature (111)..(111): n is a, c, g, or t
  misc_feature (169)..(169): n is a, c, g, or t
  misc_feature (196)..(196): n is a, c, g, or t
  misc_feature (259)..(259): n is a, c, g, or t
  misc_feature (264)..(264): n is a, c, g, or t
  misc_feature (330)..(330): n is a, c, g, or t
  misc_feature (336)..(336): n is a, c, g, or t
  misc_feature (348)..(348): n is a, c, g, or t
  misc_feature (402)..(402): n is a, c, g, or t
  misc_feature (414)..(414): n is a, c, g, or t
  misc_feature (421)..(421): n is a, c, g, or t
  misc_feature (424)..(424): n is a, c, g, or t
  Coding DNA Sequence Number=SeqID_2280
actatactacattacgtctgtctgantatgctcgacgcgtatagatagtacgcagctataacacgtaanactgtgcgcaatatctctcgatctgctctcntngtncatatncagcgactctacgtatataagcatggctatagtacgaatcatcatgacatgctacgtnagataggatgaatgtgagatctatcantcatcatgaactatcgactatcgcaagacctattatatacagcgactcacgatactgcgacgntgtgncgcgccgagtcgcgcgcgagtctgacctaggcactgtatgacgggttctgatgtcgctgatatcgnagacgnaaagctggcganagacagtactggttcacgatacagatacgcatatagaacgtcagacgggactancgtcatagcacncactgcnagntgatcgacatatcggcagcgcgacgaatgagctcatctactaatactatatac

SEQ ID NO: 12060 - DNA, 518 bp, Glycine max
  Coding DNA Sequence Number=SeqID_2281
ggtgagcgaagcaatttggcataaagttgttgcgcctttgtctaagtgtgagaagaaccgagtaattattcgaaatgaacttggtccaggtagaagtctagaatatcattgtcattctaatggtaaagatcaaggcgtccagtttttaaaattcaatgaagaaaggaactttgaatttgtcgatcatttttttggaaaaaaaaataaagtgaattgtgttttgaggcaagggttgtggatgcagagttcttctcgagactttgaagcataccatacaagtaaaagtaatggtaacaattgtggacagactcgtgaatggattgcgagaacagatggaacatactttcaaagaaatcgaattaagccagcagcttttgtgtttgcttggattaataaaaaaccttaaaaaaatctaattgatgtttctgattaagacactcaaaatctttaatcgtttctaattttaattattgttgttcgttttgtaaactttgtcatgattctgctttcgtgtcgaa

SEQ ID NO: 12061 - DNA, 457 bp, Glycine max
  Coding DNA Sequence Number=SeqID_2282
cgcagacggtggttcgtgctcaagcgagggaagctcctgtggttcaaggatcaatcctccgccttaacccgcggatctatcccgcgtggggtgatctcggtgggagattgtctcaccgtgaaaggagctgaggacgtggtgaacaagcctttcgccttcgagatttcgagcgggaacatcaccatgttcttcatagctgataacgagaaggagaaggaagagtggatcaactctattggaaggtccatcgtgcagcactcgagatcggttactgattctgaagtccttgattatgatcaaaggcggtgacttctttttttagctctatgctatgtttgattccgtttattgtacctgtgtatgtatgtatgcctttctcaagttcttgatccgactctctgtctcttgtgttatggttttgttctgtatctgattctattccacttttgtctttcca

SEQ ID NO: 12062 - DNA, 501 bp, Glycine max
  misc_feature (361)..(361): n is a, c, g, or t
  misc_feature (447)..(447): n is a, c, g, or t
  Coding DNA Sequence Number=SeqID_2283
gtctcaaaaaattgggccccatggcgggaagagcccccattaggtaaccccccgtgttttttccccggggggggggtccacaccccccctggaaaaaaattattcccccaaagaattagaaagcctacatggggggcagggatcccccccgcccccctagagtttatttgggccccccccagccccccaccaagggatccacattccttttcccccagcctaatcccttccaggatctggttgcgaggaagatgtttttgcccattccgggagagttgtccacagagggtgggctaacctgcaattctgttgccgcagagtctcgagcttttcgtcggtcatcactttacacgtacatcanttccgcgttcccattcgttggccaacgctgcttttgccactccatcacgtcacccatctcttccaaaatgtgagcagagagagtgncgttggtgtcagagactcagaggcgtttgttagcacttggcagcgattcgaagc

SEQ ID NO: 12063 - DNA, 597 bp, Glycine max
  misc_feature (67)..(67): n is a, c, g, or t
  misc_feature (115)..(115): n is a, c, g, or t
  misc_feature (181)..(181): n is a, c, g, or t
  misc_feature (503)..(503): n is a, c, g, or t
  misc_feature (512)..(512): n is a, c, g, or t
  misc_feature (522)..(522): n is a, c, g, or t
  Coding DNA Sequence Number=SeqID_2284
gcgcactcagagcatcgattgtagatacgtcgtatatctgagtagcaagacatcaatagcgagcggnagttagatagaatgggtcgcgcggaatgtcagtacgacgtcatgactnaacacgaacgtgcgcggcgcgcgcgatgtctactgcactgctagatcatatctgctgctaagacantagacatggtcgtgagataggtggtgtatgatgagtgcgtgtagaggacgacgatacaatcagtattacgtcgttactcgctatggcatcgtcacgacatcaccatgatagtacattgtttacaaattgaatgacagagagacatacattatgagttagttacgtacgagtaatgattacaatctcgaactgtatatagaaaatagagagctgaacactatgagaagttactacttctgctatcgtcgaggcccctactaatgtaaataaggaggaagacgtgtgacgctactctgtggaggtacggcggtgagtgcgagtncgcagcgangggtagaganatctgcgatacaactagttaggaggagcgcaaccacgctagtctggtgacgcatctgcgcacgatgagctgtgaa

SEQ ID NO: 12064 - DNA, 559 bp, Glycine max
  misc_feature (513)..(513): n is a, c, g, or t
  Coding DNA Sequence Number=SeqID_2285
ttttgatgaagctcagaaccatgcaagcaactgtaacagctacgtaggccccccccccccaaagtattgtcatataattctggagatagattcagtgcttctttattaagtgtttattgctattagctttttaatttctttaagaatgtcattgccctgtaatatgctgctctcttgcccatgctttttgactaacaatcttcaaatagatatgtaccatactcattttattagacctcactaatgcgatatttggactctttcaattgtggatgcagtggcaaatgagttgaggttagacattctgtcagttggagttaactttttattacgtgtaaggtgaatgatctatctgatgaattctacttttgctcatttatttagtaatgcaatttagtttagttttaaattctatgaaaaataactcttttattattaacagaatttgttaaaagacaattagcattaacatgtattaatgtatatgaaaatatgtagacatggtagatgtcngaggataaaagttttgagtttatgctttctttggacaccaatttgg

SEQ ID NO: 12065 - DNA, 409 bp, Glycine max
  Coding DNA Sequence Number=SeqID_2286
gaggctgcagtatgtaccagacattaaatgtgattagtctcactcatcagacaccttggtcattggagtggcacctgttaaggttcaatttagtgtggattaaatgggtgttaccactatgaaccatggctgcaaatgtggaccaaattgctcctgcaacccctgcacttgcaagtgaagtgttgggagagcgaggttcaacagagatagcccctaatttagaattattgtatcccactgatgtgcaggaataaggcaatagaattaatgtcggatggcttttgccgctagggatatttgtgtttaacaaacatccttacaataaaatgcttaatttctaagtatatggtaaaatgattgctttgcagcgttacttcttactgtggcaagtgatgtgcatttgtttgat

SEQ ID NO: 12066 - DNA, 372 bp, Glycine max
  misc_feature (29)..(29): n is a, c, g, or t
  misc_feature (35)..(35): n is a, c, g, or t
  misc_feature (39)..(39): n is a, c, g, or t
  misc_feature (41)..(41): n is a, c, g, or t
  misc_feature (44)..(44): n is a, c, g, or t
  misc_feature (50)..(50): n is a, c, g, or t
  misc_feature (74)..(74): n is a, c, g, or t
  misc_feature (89)..(89): n is a, c, g, or t
  misc_feature (100)..(100): n is a, c, g, or t
  misc_feature (123)..(123): n is a, c, g, or t
  misc_feature (162)..(162): n is a, c, g, or t
  misc_feature (164)..(164): n is a, c, g, or t
  misc_feature (166)..(168): n is a, c, g, or t
  misc_feature (172)..(176): n is a, c, g, or t
  misc_feature (181)..(181): n is a, c, g, or t
  misc_feature (189)..(189): n is a, c, g, or t
  misc_feature (191)..(191): n is a, c, g, or t
  misc_feature (195)..(195): n is a, c, g, or t
  misc_feature (229)..(229): n is a, c, g, or t
  misc_feature (258)..(258): n is a, c, g, or t
  misc_feature (265)..(265): n is a, c, g, or t
  misc_feature (298)..(298): n is a, c, g, or t
  misc_feature (302)..(302): n is a, c, g, or t
  misc_feature (304)..(304): n is a, c, g, or t
  misc_feature (306)..(306): n is a, c, g, or t
  misc_feature (314)..(314): n is a, c, g, or t
  misc_feature (323)..(323): n is a, c, g, or t
  misc_feature (329)..(329): n is a, c, g, or t
  Coding DNA Sequence Number=SeqID_2287
gcctagtacgagacagaagagacacggtnatgagnagcngncgngtgcgncacgcacgagcgcgagcggggcgnagggaacgtcagcanccgcgtagcgntgtcgtgttcttgtgtgtcggtnacgtcgtctcttcgatatcggtatactcatgcgcagttngntnnngtannnnncagcnacatgcancntganacatcaacacagtcgcccctactcactctatcanaaagcgagatgcagagtgacgcacctacnaaccacnaccaaacaaccacacaacaccatcactgaccgngagncncngtctcacnaacccccangagcgncgcgcgatcacagcagcgagtaaaccgttagcgcagcgacgac

SEQ ID NO: 12067 - DNA, 577 bp, Glycine max
  misc_feature (40)..(40): n is a, c, g, or t
  misc_feature (69)..(69): n is a, c, g, or t
  misc_feature (120)..(120): n is a, c, g, or t
  misc_feature (138)..(138): n is a, c, g, or t
  misc_feature (142)..(142): n is a, c, g, or t
  misc_feature (232)..(232): n is a, c, g, or t
  misc_feature (416)..(416): n is a, c, g, or t
  misc_feature (435)..(435): n is a, c, g, or t
  misc_feature (456)..(456): n is a, c, g, or t
  misc_feature (543)..(543): n is a, c, g, or t
  Coding DNA Sequence Number=SeqID_2288
agttctcgtcagttgtatgtcccatagacagtgtctgcanacttattgatggtatgtatgagatgatgnatgtcagactgtagtactgagtgcacgtcgtcatacgttcgcgcgcactancgagcgtcactgctatantcancacatgagtatccattatttcactcgtatcgagtacgaccggtgatcgtcgactagatgctgtctcatcagctttgcttatcacatatgnactgagttgcgaccctcgatctacgtctatggcgaacgactaatgtgtgttcgtatacttcacactatatcgtcgagacgatagtgtattcatgtcatataagagtcacaccactctcgtaagtcgatacggctacatcgtgcagtgtgcgatattctgcttctgttctagacatcaatatctncgcatcacgtgcgagtatntgtgatcgtttctatacatcnactactcgctatcctgtcatctcgacacacactacagaatacaatcacactacgcagtagataagacagttacgatgcagaggcaantatctatgagatcatcgtactatggagactcgac

SEQ ID NO: 12068 - DNA, 263 bp, Glycine max
  Coding DNA Sequence Number=SeqID_2289
acatccagtttgtttgttctatgagcagcgtgcatcttctttgtcctctccaccaagcagtgtcgactgcgccatctccccccaggttgaaaatgttcctgcaagactggttaagacaccttgctgtaaccatatgtcttgagctcacacagaagacctgacaagctttactctttgtgtttgttacattttgtactgctcggatgtctaggaactgcaaatgctcaattatgaggaagtcttcaggtgtactcaattaattg

SEQ ID NO: 12069 - DNA, 597 bp, Glycine max
  Coding DNA Sequence Number=SeqID_2290
acactcatggcttgccaggctgcaggggtctatggggaggtaggaacaggggttagagaatctgggagaggggttagaaaatatgagggagggattagaaaagatatgggaggtctgcatgtgtctgtctctctatgatatgaccatctgtgactcagtctggtggtctgagattcatatgtcttgccaatacagcatagggcatctttcatccaagttgttcaaaattcaaatcagtaggctcatgtcatttgggtggcaaattgggtggcaaaatgtatgtgtgattgacactgaatccaaatgagaacacaggaactttgtaaaaggtgtgttgtgatacaagtgatgcttactgcatgttgattgtagggacttcccagtctgacatgacactgtcagactgacaaggtgactctcacaaggtaagtctgtcaagaccagtctgtcaggggcactgtgctacaagacagatgtggtcaaagtacatgtttggcatactagagtattgccatgaacaggatgacaagtgcagcctactaaaagcagcctacctggcagcacacacagtcaagtaccatggtccaacctttgtga

SEQ ID NO: 12070 - DNA, 498 bp, Glycine max
  misc_feature (389)..(389): n is a, c, g, or t
  Coding DNA Sequence Number=SeqID_2291
aagaaagctcgctttctggatatgaagagcaagttctttgataataaagatccagaagaggttattcaatatgatgagaacctggataactttgatgcaattaacagtgataaaaactatagctcttctggcaagaagagagaaaccactgataagaaagaacatcaacaggctgagagaattgcgaagaagctgaagggcacaggaaagaagaaggatcccaaaatggtggagaaggatgtcgcttatgatctgattggtagatataaagatgctagtcgaactaagcaaggaggaatataaaagtgggtatattttatactgtaaaactagacaaaagacgcttatgcttggtgttttgcttaagtacgttacgaatttttttatcngcaagaatttttatgttatgcgttgcttattgaactttgctgagtgtattactgtattttactttgatttgcatacctcttgattatcatcatgcctttcagatttgaa

SEQ ID NO: 12071 - DNA, 331 bp, Glycine max
  Coding DNA Sequence Number=SeqID_2292
acatggcttctcaaactccatttctctccatctccatctccctcgccctcgccgcctttctcttcttcattacagtctccgcagatcccgacatgctccaagacctctgtgtcgctgatctctcctccggaatcaaagtcaacggcttcccttgcaaagacgcagccaacgtcacatccctcgatttcttctcgcaaggaatagcgaatccaggcctcaccaacaacacgtcaggtgccttggtcacaggcgcgaacgtgatgaccatccctggtctcaacacgctcggcgtctccctcgctcgcatcgactacgctccaggcggcttaaa

SEQ ID NO: 12072 - DNA, 548 bp, Glycine max
  misc_feature (64)..(64): n is a, c, g, or t
  misc_feature (122)..(122): n is a, c, g, or t
  misc_feature (298)..(298): n is a, c, g, or t
  misc_feature (324)..(324): n is a, c, g, or t
  misc_feature (425)..(425): n is a, c, g, or t
  misc_feature (521)..(521): n is a, c, g, or t
  Coding DNA Sequence Number=SeqID_2293
acgcggtctgctgactgatctacatcggcacaactggcggcctgtataacatacgatcgcctcnagcgccacagtctagcaacgctcgcgcatcgtgccgctgtcagcgctacaacacacgnaggccgaacgcacgtgacagacgcgtgtgcagctgagactcagcgtcacacctagcgcgactgtcgctctatagacgacgttactcgactctcggcacacggatattcaccgtccacccgactgctctgtgatcgtctgtatagatgacgtcaagtccgtcgcggagattcctctngagatatatgttagatgcgctatagntgtgtgcgatcgtgcacttcgcgtcacgctgtactgaccacatgctaatctatatcactatctcgcatgctatcgtcgcaggactatatcggactgatatnctgacgatctctctcacgcaaacggtctctagtcgcgtaatgagtcacacgcatcctgccctgtgctgcgctagactctcgtccacctcgccgtgntcgatggtgtagctctcactgctcgca

SEQ ID NO: 12073 - DNA, 556 bp, Glycine max
  misc_feature (75)..(75): n is a, c, g, or t
  misc_feature (395)..(395): n is a, c, g, or t
  misc_feature (412)..(412): n is a, c, g, or t
  Coding DNA Sequence Number=SeqID_2294
aatacaataaatctctgcccgcggcgcgcggctattcacaacgtggtaatagatattaaccacgcgcggcgagtngtaatattccggattcgccgcgtttgtcgctcgggggcgcggggccgtccccaccacccgcgcgctattaatattaccgcgcgcgctaaccgccacacaaatatcacacacacgcgtgcgcaatataaaagtaatagaggggagtgagtctcggaacacatcaatatactgaggccgatatacgacgcggagagctccggtagaatacatatataatattaaggtcgacgttaaacagtcttcgcggaagagataatttgttgtataaaagaaggtgcggtgggcaaaggaggataataatgggcgggagcgggcgcaanaccggcacaccaataanatataacatacaaaaggtgcccgcgagaggcgtaactcatataacaactataggaaatacttacccgggtatcgtgcagcaaacacggcccgcacgagagccgcaggggctggataagggcggcaaaatatcgcagggacgcta

SEQ ID NO: 12074 - DNA, 518 bp, Glycine max
  misc_feature (35)..(35): n is a, c, g, or t
  misc_feature (154)..(154): n is a, c, g, or t
  misc_feature (171)..(171): n is a, c, g, or t
  misc_feature (173)..(173): n is a, c, g, or t
  misc_feature (204)..(204): n is a, c, g, or t
  misc_feature (229)..(229): n is a, c, g, or t
  misc_feature (246)..(246): n is a, c, g, or t
  misc_feature (280)..(280): n is a, c, g, or t
  misc_feature (290)..(290): n is a, c, g, or t
  misc_feature (297)..(297): n is a, c, g, or t
  misc_feature (329)..(329): n is a, c, g, or t
  misc_feature (447)..(447): n is a, c, g, or t
  misc_feature (471)..(471): n is a, c, g, or t
  misc_feature (482)..(482): n is a, c, g, or t
  misc_feature (488)..(488): n is a, c, g, or t
  misc_feature (490)..(490): n is a, c, g, or t
  Coding DNA Sequence Number=SeqID_2295
gagagacgactcatatggctatctgcgtctaaaancaacacgacattatcacactccctatatgctggtcagaatatgaatgatagctatcacgtgctcagacacgatgtctagatactatataccaccatatatcatctatacacaatctagnctcgatccagtgtgagngntggcgatcgtctcattacgattgtcactcgntcatgacgtaacggtacatgcgctnatatgagatagatatgngaccgtacgcactagttctcacatcagatgatanggatgaccangcacacnacgcgatatgtcacgcaatagcgcatacatcntgcaacagccctagtaggacacgctactctatcacaatagacgtaatttaacgaatccatatctctcaatgtcggtactagtgtgagtatcgtgcacatcgcgtcctgcgcctgtcgncgcctagtgcgtctgcttactctntgtcgcttcantatgangngcgacggctgcacagacagtgcgtcaca

SEQ ID NO: 12075 - DNA, 379 bp, Glycine max
  misc_feature (50)..(50): n is a, c, g, or t
  Coding DNA Sequence Number=SeqID_2296
ggagttctctctaaaaccttcagctttaaagatgactcgaacaagttttntcatagtagtagttttagcaatatgcagttttcagatgatggaatcatctccagatttagccaacaaggtgaaggcaaataatattcaatatgacgcgattaattgtcgaaaacatagcgcagttataaccgaatttggagctgtgggtgatggaaaaacatcaaacacaaaagcgtttaaggaagccataaccaagcttgctcctaaggcggccgacggtggagtgcagctcattgttccaccaggaaaatggctcaccggaagtttcaaccttaccagccattttactttgttcatccagaaagatgcaaccattcttgcttctcag

SEQ ID NO: 12076 - DNA, 159 bp, Glycine max
  Coding DNA Sequence Number=SeqID_2297
tctcccttcggcacctggtatatatgcattaaaaggatgttttcccactctcaactgcataaggataacacaggtgaacctttgctatgctccttttattttttttcctaatccctatttgctctccttttttctaattttacagtgcttaaagttcct

SEQ ID NO: 12077 - DNA, 355 bp, Glycine max
  Coding DNA Sequence Number=SeqID_2298
ggtttgttttgattctcttgctagtttcttctttttcagtctctactctctttctcacaggctggggttttcacaaaattactactatgttatggtctcaattagtagaaaactagagatgaaaagattagaatacaaatgcgacgtgaaatcttaggataagtaaaaattatctgagccttaagattttagattaaattataatattaagttcacttgtgtaattgtttatgatttatgggtgaaaaatctctcgggtggttactcctagaagaggagattctcttttcttttaatttatttatatatatattttttgcattcctaccttaggaagcccactaggtcgaagggc

SEQ ID NO: 12078 - DNA, 572 bp, Glycine max
  misc_feature (306)..(306): n is a, c, g, or t
  misc_feature (383)..(383): n is a, c, g, or t
  Coding DNA Sequence Number=SeqID_2299
cgtgcactttgtgtgctgttgacctctccactatacaagcactattgacccttccgtaccaataactatatttgccggtccgtctcgtttgaatattagttagtcgcaaagaacggccccgcgcggcggcccgcggcggttacactaacgcaaaacacatataaataataattactgggcatgagtagagttgggtgcctggtgtggttcgtctattcttctctacatctcaccatcctcggctgagccgcgcgcgccgaaaccacacaaaatgagacaacggagtatagctacctcctatacacnatactgtctctatgtgaagtggtatagtagtaaggtcggtgtgggtttggttttgggtcgatgtgtattttctctgnttgtaaataacataatacacccagctcctgccgacattattacaacaagacactaacacaccatcaaatgagtaatacggtgcgccaactcgcttttctcacccatcgcccctccatcgtacccccccctcgctggcgcagcgcatataggcgccgcgcgctccccccgtacgcaagtgagttgcagtt

SEQ ID NO: 12079 - DNA, 501 bp, Glycine max
  Coding DNA Sequence Number=SeqID_2300
agaactcgaggtctcatactgctcattatcagaagagtctctcaaagtcataggcaagtcttgtccaaacctcaagaccttgaagaaaaactgcgtcggttacaggcgtcctcgagacgagtctgatgacgtcgctctagcaatcgccgaaacaatgccaggacttcgccacctccagctcttcggggacaggttaacagacgttggtttaaacgccattctcgacggttgtcctaacctggaacatcttgatctgcgccagtgtttcaacgttgaacttgttgggtatctggagaagcgatgtctcgagagggtcaaagttgtgagacgccctaatgactcggttcatgattacccgttcgatgcaacggttaacgacgtgtcttcatcagacgatggcgacccttatggtttatctgatgttgatataatgtcggaagatgagttttactatgatgacctgtcagaagatgctagtgacaactctgactttgacccgta

SEQ ID NO: 12080 - DNA, 421 bp, Glycine max
  misc_feature (239)..(240): n is a, c, g, or t
  misc_feature (242)..(242): n is a, c, g, or t
  misc_feature (245)..(246): n is a, c, g, or t
  misc_feature (289)..(289): n is a, c, g, or t
  misc_feature (291)..(291): n is a, c, g, or t
  misc_feature (293)..(293): n is a, c, g, or t
  misc_feature (296)..(296): n is a, c, g, or t
  misc_feature (300)..(300): n is a, c, g, or t
  misc_feature (309)..(309): n is a, c, g, or t
  misc_feature (323)..(323): n is a, c, g, or t
  misc_feature (326)..(326): n is a, c, g, or t
  misc_feature (384)..(387): n is a, c, g, or t
  misc_feature (389)..(389): n is a, c, g, or t
  Coding DNA Sequence Number=SeqID_2301
aagtgttgatgtacatccgacgccgacacactacacttaacataatatattatatataaatcatagtatctatatgttattattgttatattgttagtcgcggcttcttgtgtctctcctattctctcgaggacagtgatagttatataccgctatgtgtacagttacgtcatctattcctgccttgtctgttgtttggtttgattgatgtattataatgttaggtatatatttagtanntnttnngggcggttcccactgcgatgctagtcgtaattatctagattgntnancanctancatcagatnatgacagagatgcnctncgatctatacgattgatgtaatagtatgtttagatttatagtatagatatgtacgttnnnngngtgtgatgagtatagtagggtgccgtcattgt

SEQ ID NO: 12081 - DNA, 551 bp, Glycine max
  misc_feature (35)..(35): n is a, c, g, or t
  Coding DNA Sequence Number=SeqID_2302
ttgaacgcccctacaatggaacctccgtcgactcncaacaggaagcgacgccttgcccatctctctatggaggagaagatgtacagaaagaagttaaaaaacagagttgcagctcaaacttcaagagatcggaaaaaagcacgtatggatgaactggagtcctcagtttcttctatggctgaagagcttgaagcaatgaaaagacttaatgaaagaatggaggctgaaaatgtgttactgaagcaacagttacaagacgcccaagctaccaatgctgcgcttttggagacattactggaaaaagaaaaatgtgcctgcggcaagaatcagaagagcaataatcagattgttcctgttagtttcccatccaccttgtcacgacctgctgagtcgatgagacaccctctgctgaagggaccggaagggaaacgagcagacaacctgaaaagcctgacgatcttgttgatggcataccttctctccccgaactcctcgccgatctcggatctgacgaagatctgccagaccttggagacttggagcgattcgct

SEQ ID NO: 12082 - DNA, 515 bp, Glycine max
  misc_feature (139)..(139): n is a, c, g, or t
  misc_feature (147)..(147): n is a, c, g, or t
  misc_feature (214)..(214): n is a, c, g, or t
  misc_feature (239)..(239): n is a, c, g, or t
  misc_feature (250)..(250): n is a, c, g, or t
  misc_feature (261)..(261): n is a, c, g, or t
  misc_feature (270)..(270): n is a, c, g, or t
  misc_feature (307)..(307): n is a, c, g, or t
  misc_feature (337)..(337): n is a, c, g, or t
  misc_feature (353)..(353): n is a, c, g, or t
  misc_feature (355)..(355): n is a, c, g, or t
  misc_feature (378)..(378): n is a, c, g, or t
  misc_feature (382)..(382): n is a, c, g, or t
  misc_feature (411)..(411): n is a, c, g, or t
  misc_feature (414)..(414): n is a, c, g, or t
  misc_feature (425)..(425): n is a, c, g, or t
  misc_feature (428)..(428): n is a, c, g, or t
  misc_feature (431)..(431): n is a, c, g, or t
  misc_feature (433)..(433): n is a, c, g, or t
  misc_feature (437)..(437): n is a, c, g, or t
  misc_feature (446)..(446): n is a, c, g, or t
  misc_feature (463)..(463): n is a, c, g, or t
  misc_feature (471)..(472): n is a, c, g, or t
  misc_feature (487)..(487): n is a, c, g, or t
  Coding DNA Sequence Number=SeqID_2303
ctactcatcgtagtaatagagtgtaataatatgagatataataaagagatgatatagtgatgagtgacagatttaagtagtatatgagatattaaatagaattcagacatatgtatacaagagaagagagtgtggagangtagagancactccagacacgcactctcacgacaaaaacactacttcacactcacacacccatcaaccacactcnacacatctcaccaaacacacgcgangagacacacanatgagagtgtnatgtgatanctataaacatataaattaattttgtagtataaacaanaatctcacacacactaacacacacattacntatactcatgactatncntgcgacgtacgactgcgcgacgncggntcaagtgcgactacaagatcctgccaganacncgagagagagnggnagngngagngcacgaganaagagagggagggtgangatgtgtnngagggggtggggtanggcggccgtcggtcgtgccgaatatatt

SEQ ID NO: 12083 - DNA, 452 bp, Glycine max
  Coding DNA Sequence Number=SeqID_2304
tgcgtctcaagacttcgaactcgacaaatccctaattcccaaaactcccctctctctcggatctataaccaagagtgtgatacgaaacgatgtcgtctcctcgtgaagagaatgtgtacttggccaagttagccgagcaagccgagcgttacgaggagatggtcgagttcatggagaaagtcgccaagaccgttgactccgaggagctcaccgtggaagagaggaacctcttgtccgttgcttacaagaacgtgattggtgctaggagagcttcctggaggatcatctcttcgattgagcagaaggaagagagcagagggaacgaggatcacgttgctattatcaaggactacagaggaaagatcgagacagagctaagcaagatctgcgatgggattttgaatcttttggattctcatcttgttcccgctgcgtctttggctgagtctaag

SEQ ID NO: 12084 - DNA, 557 bp, Glycine max
  misc_feature (46)..(46): n is a, c, g, or t
  misc_feature (263)..(263): n is a, c, g, or t
  misc_feature (366)..(366): n is a, c, g, or t
  misc_feature (369)..(369): n is a, c, g, or t
  misc_feature (444)..(444): n is a, c, g, or t
  misc_feature (488)..(488): n is a, c, g, or t
  misc_feature (495)..(495): n is a, c, g, or t
  Coding DNA Sequence Number=SeqID_2305
gaacacattgcgacaactctcgagctcagtgtgcgtggtagtacgngtgctatcgattcacgcaccggcgcctggcggggtgtagatatatatcgattcagcgcgatacgtgtgtaggccacgcgtgactcctcgatgcattgtcattgtgtggacttgcgcagctgactgtcgcttctgcctcgttgctcatgctcgtgtcatctctgtgtgggtcgtggtctgtggtctcccctcgtcgcgctcggctgctcgctcgctcnctgctccacctcacgcgcgctctgacatgatctttcgctacctctcactaacccgctcgctgctcgtactcggatatgctctgcgagatgtggtagctgtgangtnattcacatgctgtctcatctctctcactcgctcctcccctatcctcacgctctgtcgcacctctactctcccacnctgtcgatgtgatgtcgcactcttcacgacgacacgatggcgcntgacctnatcggtctgcggactactacccagataagatagagggagcaatacagctagttcatggatct

SEQ ID NO: 12085 - DNA, 128 bp, Glycine max
  misc_feature (33)..(33): n is a, c, g, or t
  misc_feature (37)..(37): n is a, c, g, or t
  misc_feature (41)..(41): n is a, c, g, or t
  misc_feature (55)..(55): n is a, c, g, or t
  misc_feature (57)..(57): n is a, c, g, or t
  misc_feature (62)..(62): n is a, c, g, or t
  misc_feature (66)..(66): n is a, c, g, or t
  misc_feature (93)..(93): n is a, c, g, or t
  Coding DNA Sequence Number=SeqID_2306
ttactatgagcacaccgcagctacactaccaanactntagnggtgtaggcccttncntgaanggangggaggcaaggaagccaggtttagtcnctgaagggttcatgagacgcaaagtctacgcctca

SEQ ID NO: 12086 - DNA, 537 bp, Glycine max
  Coding DNA Sequence Number=SeqID_2307
gctctgtcaagctatgaatccactcatttcacaatcgaacctcaatttatttcctgctaacaactacaataattaccctatattgaaagatctagacaaacaatatcaagcgaattgcaatcctaacaaggcctcttgttcctatccaaacccacatcaacccttaaacccatatactagtatgcctttatcgcatcagtttcaattttattcgggacatcaaatgctaaatccaagtatgtacatgaatgcgaatccatctaacttaaatcttccatttatgtcactcccccaaatgatgcctaacaggcaaatttacgggactggatatgacccaagaatttctcatgctttatctaagtttcatgagaatcttacccaaaacattccaaatattaaaataaataaagtttccaaacctcaagagcagtaaattcggcaggacaaagcattcgaaaaaagactagagcacaagcagcaactcatatactattaagaaaagtactcctatacgccctgtttacttattctctgaaa

SEQ ID NO: 12087 - DNA, 161 bp, Glycine max
  Coding DNA Sequence Number=SeqID_2308
tgtcattgccctttctgctgaagcatgtgtcaaaagtgtgttaatacagcgcgcagggcggttctcttatggagtgatggctacctctgttgccccattctcattttggagttcgtgcggcgcactcaatcttccccttgctttaaaccagggaggagcat

SEQ ID NO: 12088 - DNA, 181 bp, Glycine max
  Coding DNA Sequence Number=SeqID_2309
gctacaacgccaaaaccaaagaacagccgcccgcttgcagcctgaggcgggcgctagagctggcgattccgatccggtgcgcctcccgcgcttcttcctctccctgcgcgccaattcttcccatgcctagccccaaatcgcttcctgcacgccacaaatcgaagcctcaaagcctccaaat

SEQ ID NO: 12089 - DNA, 217 bp, Glycine max
  Coding DNA Sequence Number=SeqID_2310
ttctccgacacaaatcgcattccctccccaattcgacgccatatgccaccgccagacacttcccgcgccacctcccagccctccgccaccccgcaggagaccccagaaagtaggcgccccgcatgacctcccaacccctcacaagagcctgaacgcaacaaagtgtccgaacacttcccctaacctcgaacaaacagaggtgtctcgcgggccctcc

SEQ ID NO: 12090 - DNA, 563 bp, Glycine max
  Coding DNA Sequence Number=SeqID_2311
gcagggaaatgaacgggagccccaaagggaggccgcgaaaaagagcgagaagaaaaaagacggcccacgagaggcgaaaagcaggcaaaaataggaaagggccgaacggaaagacgcgggaaggagcacagggcaagcagtgcggaaaaacaaggaccaccacgggaaacgcccgaatcgacggcacataaaccagaacttatcgaatccgagagggagcaaaccaaaatgggtgaagtcaagaaaccaatggcaacatgctaagagggcgcgacgaagacacccacggagagagaaagcctggtacaaggaccaagaggcatccgccgaccgaagaagaaggttggtggaaggagaggccgaaatgacggcatacgggagcaaaaacgggttgaggacaagaacaagaacacgggggaaaaggggaccgaaagcgcgccaacaaccaagggccgcaccgaggggaaagaacaggggacgccagtgggcctatggacggaggggaccaacggggggaaacctcccgcgcccggcacccgaccggagaacaacaaccgcggttg

SEQ ID NO: 12091 - DNA, 414 bp, Glycine max
  Coding DNA Sequence Number=SeqID_2312
gtgcaatcgatacacccttgatcaatacccgataaaccaccgaccacctttgactctctcacgctgcaacggcgcgcacgttctggaattcctccgctacctcgaccaggacggaaaaaccaaggttcacgccgaaacctgcggatactatggaaactcccaccctccgggaccctgcacgtgtcccctgaggcaagcgtggggcagcaccaacacactcaatggccggctacacagcccctacgaggagaacggcggcacgccggacacgaacaccgacgggacacgcgcagagaagtggaacaccacggaagcaacggacacgcatcgacagagcacaggcaaagcgaggagcaaaaaaacgagcaagaacgaaccaggagcacacgacaagagacgaagcgaagcagaggc

SEQ ID NO: 12092 - DNA, 579 bp, Glycine max
  misc_feature (68)..(68): n is a, c, g, or t
  misc_feature (104)..(104): n is a, c, g, or t
  misc_feature (151)..(152): n is a, c, g, or t
  misc_feature (177)..(177): n is a, c, g, or t
  misc_feature (313)..(313): n is a, c, g, or t
  misc_feature (339)..(339): n is a, c, g, or t
  misc_feature (438)..(438): n is a, c, g, or t
  misc_feature (458)..(458): n is a, c, g, or t
  misc_feature (484)..(484): n is a, c, g, or t
  misc_feature (491)..(491): n is a, c, g, or t
  misc_feature (504)..(504): n is a, c, g, or t
  misc_feature (548)..(548): n is a, c, g, or t
  Coding DNA Sequence Number=SeqID_2313
atctgcgacgcacggctgtctgacgggccggcgcatgaaaatatagatataaaaatgcactggtgccnaccgtatcacgtgtcagtactatacatcactacttntgatgttagcaagtgcactcacactatacaagtacatgcgtgaactnntacacgtttatctcctgtcgagcgnactgtatcacgtcgctacgcgtagctactacgacgtgtggagtgcctacgtggcgcggtcaggtgtcgtgtgatggcgcgcgctgacctcgcacgttgcatgaggaagtggatagagcacctcaccccttcgccgngcacggcgaagaatctcgcgcgtatnttcctgttgttatggcatctctcacaagtcgagcgtgacgccatcagcgtgatctgcacctgtagctatggtctgttaatgttcgatactcggcgcatntctatgatgtacacacacanagatgtgacacatcggaagtatcacnagcgatngatactacatgcntgcagatatatcacagtacacacgaagagctatacgactcctcngtctctgcagacgtgcgtcgtgtacctctga

SEQ ID NO: 12093 - DNA, 367 bp, Glycine max
  misc_feature (29)..(29): n is a, c, g, or t
  misc_feature (132)..(132): n is a, c, g, or t
  misc_feature (191)..(191): n is a, c, g, or t
  misc_feature (213)..(213): n is a, c, g, or t
  misc_feature (228)..(228): n is a, c, g, or t
  misc_feature (236)..(236): n is a, c, g, or t
  misc_feature (248)..(248): n is a, c, g, or t
  misc_feature (289)..(289): n is a, c, g, or t
  misc_feature (296)..(296): n is a, c, g, or t
  Coding DNA Sequence Number=SeqID_2314
caaacggtatataactcaaacccattaanaccagtaacaactgcccttgtatactagtaacaccgacgacgcactttaatgtgacacacagtaacgaccactgttgaggccccttgtccgctaaaaccctanactggagccactacttttcttttcttctccttctctacactatttcttctatatgtttnaataactcctatcgacaacgcncaaatggagtatcanaatttcanatgctaggctgngatttgtccttcagctcggcagtcggcacgaaaaccactanttggttntgcaagtcacgctccgcggttccagcgccgcctggtgctgctgctgatgatagcatgtcccccttgagtct

SEQ ID NO: 12094 - DNA, 413 bp, Glycine max
  misc_feature (362)..(362): n is a, c, g, or t
  Coding DNA Sequence Number=SeqID_2315
aatcttggcagacttggactcttccgaagttccaaatccaaacaatccagtaatcttctcctttacttcctttactgctgtaatctccttcttctctcctgccttttcttccttttgttctactgaaggagccttactttcaaagactaatgcattatttcttgcgaaattattcacatctccaccacctcctctaattggcttgacgacatgcttatcaaacaaggtaaatccacccttgtttctattatttccactggcttttcctcctcttatagatttattatcattgttattgccatccaagatatttccttcagcatgagctggcttcaattgcttcaacatcttcaattccttanctgccaaacccaagttgttttgtaaaagttcgatttgagcagtcttggtgg

SEQ ID NO: 12095 - DNA, 462 bp, Glycine max
  misc_feature (427)..(427): n is a, c, g, or t
  misc_feature (437)..(437): n is a, c, g, or t
  Coding DNA Sequence Number=SeqID_2316
tatctacaggtatctgaaattgggaaaatgtttatcaaatatctgagcttctgctgttcgaagcatacaagttcatctcagcgacagtatccaactgtgatagaagagctatgtcatcaatttctgttggctgatcttaggaaatcaaccaacaacttcgatgaaaaccaaatagttggaagtggagtccttagtattgtgtataaaggttctctccaactcaatggtgttactgagtgtacagttgcaatgaagcgaatatgtgggaacaccgaggaaacacttaagcatttcaagaacgaaattgagttgctctgccagcttcgtcatccaaacttgatgactctattaggattttgtgaccacaaagacgagaagatgtggatatgagtcatgcccatggactctcctgatcgcctatctgatngatgtgaaangaccactacatggagcatagctaag

SEQ ID NO: 12096 - DNA, 169 bp, Glycine max
  misc_feature (94)..(98): n is a, c, g, or t
  Coding DNA Sequence Number=SeqID_2317
tccatttacatgatttattgttagctattatcaacaagctcagttgatgaatgctttctatctaggtgcgatatcgtttgtatggtgaatgggnnnnngatgatgagcgcattcctatgctcttatctgcaagacaaactgccaagttggacactagacgtattttgaa

SEQ ID NO: 12097 - DNA, 561 bp, Glycine max
  misc_feature (56)..(56): n is a, c, g, or t
  misc_feature (115)..(115): n is a, c, g, or t
  misc_feature (126)..(126): n is a, c, g, or t
  misc_feature (130)..(130): n is a, c, g, or t
  misc_feature (249)..(249): n is a, c, g, or t
  misc_feature (291)..(291): n is a, c, g, or t
  misc_feature (295)..(295): n is a, c, g, or t
  misc_feature (299)..(299): n is a, c, g, or t
  misc_feature (326)..(326): n is a, c, g, or t
  misc_feature (341)..(341): n is a, c, g, or t
  misc_feature (372)..(372): n is a, c, g, or t
  misc_feature (388)..(388): n is a, c, g, or t
  misc_feature (393)..(393): n is a, c, g, or t
  misc_feature (413)..(413): n is a, c, g, or t
  misc_feature (437)..(437): n is a, c, g, or t
  misc_feature (480)..(480): n is a, c, g, or t
  misc_feature (512)..(512): n is a, c, g, or t
  misc_feature (525)..(525): n is a, c, g, or t
  misc_feature (535)..(535): n is a, c, g, or t
  Coding DNA Sequence Number=SeqID_2318
gtatggtgatagttatctccgacaggaggtgagtctagttacagagtaagcacatntcctcacatgtgtgtggacaactgtccggcagacactgataattcgcgtgctagcaatnttatatcaatntggnggtgaatgtgagggcgcatctgactattggatgtgtggtggtgcgttacagttcacgtcacctctatcggcgcatgcctgtccaatcgcgagtgtgtcgacttagtatacagagtgttnacgctactatgatatgtgttgagaacgacggcgtgagcgtcnattngagnctaatcttactcgtatcttgaatgtanatactactctcattnatatgaacatgcgatctcgtatctcgcttgntgtgacatagttgtantattnatgttatgtctaatggcctncgtcgtttgtgagctccgctcggngtcagatagtctacgatcgacgagtcatctaaagcttatatantaccgctcatccaagatatttatatttctgtngtaattgtgaganacgcgtgctntactatcttaatgtgtgtgtcggcag

SEQ ID NO: 12098 - DNA, 600 bp, Glycine max
  misc_feature (33)..(33): n is a, c, g, or t
  misc_feature (105)..(105): n is a, c, g, or t
  misc_feature (162)..(162): n is a, c, g, or t
  misc_feature (225)..(225): n is a, c, g, or t
  misc_feature (247)..(247): n is a, c, g, or t
  misc_feature (285)..(285): n is a, c, g, or t
  misc_feature (295)..(295): n is a, c, g, or t
  misc_feature (311)..(311): n is a, c, g, or t
  misc_feature (313)..(313): n is a, c, g, or t
  misc_feature (335)..(335): n is a, c, g, or t
  misc_feature (350)..(350): n is a, c, g, or t
  misc_feature (468)..(468): n is a, c, g, or t
  misc_feature (496)..(496): n is a, c, g, or t
  misc_feature (512)..(512): n is a, c, g, or t
  misc_feature (541)..(541): n is a, c, g, or t
  misc_feature (550)..(550): n is a, c, g, or t
  misc_feature (554)..(554): n is a, c, g, or t
  Coding DNA Sequence Number=SeqID_2319
gatgttcgtcattctagctacttcaggtcgtcntatgtactgagtggcacgagctcgcatggtatgccccaccccacaaggtatatgtaggctcgaactccactnctcacttcctgctaggaagagagataagtataacataatatcaacaccccctacgcnatgacgaggtgtcattcgcctctcgtcatatctcttctgaagagagattatcttaatatgtantattgttggcagttagttaagnagtacatctcgtgagaagacatagagtctctatgcgtncaatagcacnctctctctacgtggtntntgttatttgtggaagataatanatactagttgcgatncctcccccgacgccgccgccccgcgcaaccacaacataaatatatgagcgacttcgacgccccccacaacggagtcgtgcgaggatgtaagatatatagtatatattatagagagaantgcgctccgccacgcgcgcgcgctgctnatatgaacatatatantagtagtagtggcccacctaggacaatgnatctgctcnctcngatgagatgtatatatattatgacacaactacatcctctctttgta

SEQ ID NO: 12099 - DNA, 575 bp, Glycine max
  Coding DNA Sequence Number=SeqID_2320
tgacacaaccgcatgactcgacgtactcttactcacatgcactagccacgactcactctctctttaccagatagttggcggggcgcaatgcgcttacgtccttcatcccacctcatctcttcatgggtctactgctgctcccgtcaagtcctctgcgatggatgctgtattaatataagtgatgtgcgaagatggacactccttcacgcttactccctgcgtggctgtatctgttcgtgtagacctacgtcacgtttgagacaccaccaccccccatctcagcacatcacctgcacccgtatttgttatatctgattgtagaagcatgtatatgcgagagtgtatgtgctatgtgcactgttatgactccacccgagcattgatgtaatatggctgactgtctaggatgctgtggtgtcgtgatgtgtcgtcccgcgcggcacctcgcagcgacatgcacattcatcgtctaaattatcaagctataacgataatgcgtaacattcgtatattatacggtatatgcattcatcatttcgtcactgtcatatgtatttactcttcctacatcacta

SEQ ID NO: 12100 - DNA, 508 bp, Glycine max
  misc_feature (58)..(58): n is a, c, g, or t
  misc_feature (107)..(107): n is a, c, g, or t
  misc_feature (109)..(110): n is a, c, g, or t
  misc_feature (181)..(181): n is a, c, g, or t
  misc_feature (211)..(211): n is a, c, g, or t
  misc_feature (269)..(269): n is a, c, g, or t
  misc_feature (428)..(429): n is a, c, g, or t
  misc_feature (474)..(474): n is a, c, g, or t
  Coding DNA Sequence Number=SeqID_2321
atacacctctacatatttgtcctcacattatctcttgcgacccgattcgcggagtcgntgacagctcaccacacagcagagacgcactcagcgtacacacagcgtancnncgggcgggtacgtcgagaattgttacttgttagtatctagtcgcgacagatacgcgaggatgtagcagaangtagatagatgccgacatatgcatgagagntgcagatgtgacagacgaatgagacgagtagcctgactgtagacgctgactacgacgncccagtatactcgtcgaaagtgccaatacacgtatatgatgtcagtaggtgcagtgtgctatgtttgatggagtgctgatgtgtgatggtagtgattgaagttgacggcatcctgcggcgtgtatacatagactcagatataagagagtagacacacgnncactgactcctctctgacacctcgacacacagcacagcacgcganccagaccgccatcctgctactagtgtgttctcac

SEQ ID NO: 12101 - DNA, 418 bp, Glycine max
  Coding DNA Sequence Number=SeqID_2322
aagttctggcatatggtttcttcaacatcgactggccggctttttggctctgacggtggtcgttcttctctggctccggtgactcgaccttccttcggtactgtcactggctctgactatggcgaaccatcttcttctttgttggtgtcgtcgggatcttctccgggtcttccccagatcttgcttgctcttcgtttccacacttctctttgttacaatcattccagatctcttaattgattgcttcttcattccctctgtttaggtagctttttcaaatcgatctttttcaaatcgttaaaagcctctggtgatttttcaggaaaatcaattgaatcgagatcggttgaaggtgattggaacctccacctgtagctaagaccgtcttcgtgtctacttttactcctactgagtcgtt

SEQ ID NO: 12102 - DNA, 597 bp, Glycine max
  misc_feature (563)..(563): n is a, c, g, or t
  Coding DNA Sequence Number=SeqID_2323
ggcagtggcagaaccgtaactcccactaccactgccgagctcgtcagctaccttggcagctcggagagtctcaacatcgttctgaccaagacctttgacttcactggctccgagggctcagcaaccgaagctggctgtgcgccatggggtaccggctcaacttgccagaaggcgatcaacaaggacaactggtgcaacaactatcagcctagcgcccccaaggtcaccatcacttatgacaaggcgggcatggccggcattacggtcaagtccaacaagtctattgttgggcaaggaaacaagggcacgatcaagggcaagggcttgcgtctctcgaacggtgtgagcaacatcatcatccagaacattcagatcacggaactcagtacgtcaatcacccctgaaagtcccatgttcaaagactgacaagagcagaccctgcctatgtttggggtggcgatgctatcaccctcgacggggccgatctcgtctggattgaccacgtctccatctcccgtattggtcgccaacacatcgtccttggtaacaacgcctccggccgngtcaccatctccaactgcgacatcgacggacgaa

SEQ ID NO: 12103 - DNA, 356 bp, Glycine max
  Coding DNA Sequence Number=SeqID_2324
aatgcactgtctgtatactatttggtgccttttcgatcgtactcatgtgtctattcccttcacagcaagataaacatggcctatttaccacatttttcatcggtcatggatttctgaaaaattatgtcttgtgactaaatttctggttaggttgactgggttcatctggatttgagagggtggtactaattatcttagtgaagttattagaaaaggagttggtagacctatcatgtttgtcctggtggcacttctgcttgttttctgatcagcatcctaagctgctaaaggataaaagattcctaaatgtgaattgcattcctcattgtacactgcacatcagttgtgtggtccat

SEQ ID NO: 12104 - DNA, 385 bp, Glycine max
  Coding DNA Sequence Number=SeqID_2325
attccatactcccaaacgtgcaagagtaatatttatttaaataaaccaaaaaaatgcctagatcagcagttttcgccagatccaaatcatttgcttcagcagctccctctcctctctctccctcttctccctcttcttcttcttctgctcccaaatcccccagctctgatgcattctctcccagatccaacagagcaaaggtctctttctaatttatatttaaaaaattaatatgattccctctctcttcactatctacattctctctcctctttatctcccttttgcaactttcttttgatattggagttgtgaatttattttggaggaaagaagaatcgtgtatgagtgagatgattttcccacgttgttgtatgattagtta

SEQ ID NO: 12105 - DNA, 476 bp, Glycine max
  misc_feature (103)..(103): n is a, c, g, or t
  misc_feature (131)..(131): n is a, c, g, or t
  misc_feature (136)..(136): n is a, c, g, or t
  misc_feature (161)..(161): n is a, c, g, or t
  misc_feature (191)..(191): n is a, c, g, or t
  misc_feature (197)..(197): n is a, c, g, or t
  misc_feature (224)..(224): n is a, c, g, or t
  misc_feature (444)..(444): n is a, c, g, or t
  Coding DNA Sequence Number=SeqID_2326
gtataccgctgattctcacacatataatataccttctagtgtacaagttcggcatactagctcacataatcatcatcactacacatctagcattggtgtcctnacacacatcgatgtgatgtcacgtagtnctatncagtctacatgacttgccgtctggnttcgtctgtctctctcgcacgatcgacagncgaagngagcaacgaacagtcactgacactacntagctcgcaacacacagcatagcatcacgagcaatcagctagtcgcgtaccgcatctgtcgacgcgtggagtgacactgctcgtcgacgagtatattcatatactgccatcggccagtctcgagtgatactgagagttgtggtggctcattagtgtcatctactcatatatatatatgctctattcactctagagtgtgtcatacatcacgctagtcaancaacatcacgcaacaaacgacagctaccgata

SEQ ID NO: 12106 - DNA, 325 bp, Glycine max
  Coding DNA Sequence Number=SeqID_2327
ttgtactttccttaagtagagatgataagggggctcattcaggtatcttgggagcgtgtggcaattggtattttttttattgtttgcaccattgcccaaaacttgaagctacactggctaggcagatacaggcacaatttcaaaccttctggcaagcaagctcttcaggttagcagcttattatgaactaatattgtgctcatttttatcttatagtgtgacaaccatgtatgtgagcctgtgagttagttactactttggtattggtctatcgattttgctttttttattaaattttttttatcaatgttagatgaaccaacta

SEQ ID NO: 12107 - DNA, 370 bp, Glycine max
  Coding DNA Sequence Number=SeqID_2328
aatattcaaatgctgtagggttttatatttaaagttgtctatgagatactgtttagattagaaggtcactcttgataagacttattgcatgaaacatcattttagctgtgttgtttttttataaactgttgattgtttaatcaagttgtagtcttataatttttttatcattgttaacttctataaattaaattaaaatagttctctttgcctatttattatggttagtcaaatcaatcgcccattattatatttcattattcgatacctttaatgaatgctaacttgaattttcccacttgccgctgatttcagatcgagtaactgttatctgtgcacaagtgattatagaactttattctttcttgcc

SEQ ID NO: 12108 - DNA, 449 bp, Glycine max
  Coding DNA Sequence Number=SeqID_2329
aagatatggtggtcccggccgctaaggacttcatagatctgactttgtccaaaacccaaagaaagacgccgactgtagttcacaaacattatcagatcaaccgaattcggcacttttatatgaggaaagtgaagtacactcagcagaattaccatgaccgcttgtcccagatactcacggatttccctaaactggacgacgtgcatccgttttatgccgatttaatgaacgtcctgtatgacaaagatcattacaaactggcactgggacagctcaacatagccaagaatctcattgacaatgtgtctaaggattatgtgagactgatgaaatacggcgactcactgtatcgctgcaagcagttaaagcgagcggctctggggcgcatgtgcacaattatcaaaaggcagaagcagagcctggagtacctggaacaagtgcggcaacat

SEQ ID NO: 12109 - DNA, 492 bp, Glycine max
  misc_feature (301)..(301): n is a, c, g, or t
  misc_feature (467)..(467): n is a, c, g, or t
  Coding DNA Sequence Number=SeqID_2330
tgaacactttactcatcgctttgtcagttatagggcaagcagctgccgaccggctgctggtggcttcatacggaaatgaaactcatgctggcgccatccagacgctcgaagtactgcctagcacaagcgcaaattctagccatgcgatgaaagttacccaagagaaccacgagtgtggaactttgcctacatggttggatgcgtcccttggcctggataggatagtctgtctagacgaatcagctgccaatgctagtctcacaatgttgagccttggtgatgacggcagcctccaaaaggngtccaataccagtgtgctgggaggagcagtatcctcggcgtcctacaataacaaatccgcattagcccttgctcactacggacccgagccagccatatcactgtttactatcgatggggaaaacaaattttcgtctttgcaaaacatcaccttccaggcgcctgancaaatccatcaagcggtcgtcgatc

SEQ ID NO: 12110 - DNA, 440 bp, Glycine max
  misc_feature (42)..(42): n is a, c, g, or t
  misc_feature (158)..(158): n is a, c, g, or t
  misc_feature (160)..(160): n is a, c, g, or t
  misc_feature (173)..(173): n is a, c, g, or t
  misc_feature (175)..(175): n is a, c, g, or t
  misc_feature (189)..(189): n is a, c, g, or t
  misc_feature (212)..(212): n is a, c, g, or t
  misc_feature (219)..(219): n is a, c, g, or t
  misc_feature (245)..(245): n is a, c, g, or t
  misc_feature (272)..(272): n is a, c, g, or t
  misc_feature (394)..(394): n is a, c, g, or t
  Coding DNA Sequence Number=SeqID_2331
gtgagtaaaactaacaatcgacatatttagtgtatgagcgtngaatactgagagctggtttatgattgtgagcatatatgaacggcgtatgtaagagtagagtcgggtcatatgaagatgattgtggacagtagtagttacatagatgtttgtcgtcntntcgatgagctgcntnagagtagttatgcngactaaaaggagtagatgcgtantgagtancgtgtgattgtgtgtgtacacttaanacgtagcggatgatgtagtgagatctntgtagacgctcgagaaatatatatagaagagaaagacgactcatgatcgcgtgacagtattggtgcatgtggataatagatcgacgcctatagtatttatacatgcttgcatcgatatatgntcgtccatatatattatactgacatgtgcaattgtcgtcgagagta

SEQ ID NO: 12111 - DNA, 374 bp, Glycine max
  misc_feature (94)..(96): n is a, c, g, or t
  Coding DNA Sequence Number=SeqID_2332
gttgtacagtgtacttagctgccatggctgccttccacctcctcttcgtcctcgtgcttgcgctcgccgccagcaacagtgccagcacagtggnnnctgcggacgacgatgatgtgcggctgcggcaggaggccatggtgcaggccctcggggtagtcacccgcttcgacctggccaacaccgaccccgaagcagtgaggcaggtgaagcgggcgctcgcggtgctggactgtgaggtccaggcccacccccagcggtggaagaccatcttcaacgccgttgacaaggccatggatagcggcgccgacgaccgtagcagtgaggaggcgtcctcatcggccaaggagctgctggagcaggagttcggcccgtgt

SEQ ID NO: 12112 - DNA, 589 bp, Glycine max
  misc_feature (518)..(518): n is a, c, g, or t
  Coding DNA Sequence Number=SeqID_2333
agtacacgaatcagtctcctacggctagacccggatcggcacatgatcctcgctgccaacagctgcatgtcgcgacttgtagataatcaatatagtcacctgtcttcagatatcgcacacgaagagcatacgagtgcgctacctatacatagatagacatatagatataaagactaagactcaagatacgtgatagagatcgactcaagccacatacaacatgtcgactactatatctctctgtctatgcactgtacgcatctcgtctatgtgccattcctctccctgacgcgccacgtcgctctacagcatccgcacgtccagcgcagaccctcatcgacccgccgcactcatactctacctcctcttctacacatacgtctcacacgccgactactactctcaatgcggactgtgtcacgtcgctgtcacaccacacatccgcaccctacctcatgctcggcgtactcactatagatatttagtatgactcactgtgttatcgtgattactcgtanctcgcggaattttctctgtacacgatagattaaccgactagcatatgatcatcctctatactagcagaact

SEQ ID NO: 12113 - DNA, 492 bp, Glycine max
  Coding DNA Sequence Number=SeqID_2334
gaccgcaaatagtgtgtgcccttgtggctctgtgcccagaaaaaaagtatttgtgcaaaaatcctaatctaattaattacatttgtacaatctcaagcggattaaattgttaaattcatagaaaagaaaatcaacaggatttgtctcagaaattaggagacgataaatcattgtctgaacatttacaacttccgattcaacgcgtcaacgactaccaattgctcctgaaggaattggtccgatacagtgcatgtcttaatgaagactgtacaaatctcgaaaaagcacttgatttgatgctaagtgttcctagtcgagcacaagacgataaatttacgaatagtattgaaggatatcgtggaagtatacataaactcggtcgactattacacacgattggtttcaattaatattggaacagtacaaaagaacgatattattttattcaaaggacaatatgattgtaagtcgcgaatttccaaatcgagtgat

SEQ ID NO: 12114 - DNA, 554 bp, Glycine max
  misc_feature (76)..(76): n is a, c, g, or t
  misc_feature (91)..(91): n is a, c, g, or t
  misc_feature (133)..(133): n is a, c, g, or t
  misc_feature (137)..(137): n is a, c, g, or t
  misc_feature (162)..(162): n is a, c, g, or t
  misc_feature (185)..(185): n is a, c, g, or t
  misc_feature (187)..(187): n is a, c, g, or t
  misc_feature (261)..(261): n is a, c, g, or t
  misc_feature (301)..(301): n is a, c, g, or t
  misc_feature (334)..(334): n is a, c, g, or t
  Coding DNA Sequence Number=SeqID_2335
aacgcatcacgtcacatcagacatgactgagtactcagatgaccaacttatattctattctagagacagcgcgacnctgaaggaattcaantactagacacacgagtgatagatgcagtagcgacagatgcanaggncgatcgagtacagtctatcacatcnatgtatgaagtgacgcacactcncnactcacgcatatagtctatattgatatgtactgacaagcgtagcatagaccgatctagatatcgactcctctcnagcctctgtccgcagagaatcacgcgcacgcacgaagcgngtacgtatatgtgcacatagacatcgagactcntacatctcgctgagactcgaacggacttaatacgtactatcacatcagccatcgcctctagctatgagcacgtatgacgatcacgtatgcacacactgttctatatctctaagtccgttcatctacgcgcgcgcgtaccgctggtaatattcagcacatacaatcgagacacgatgatctgagtacgtccagataactccttgtcgctgtagcaactgta

SEQ ID NO: 12115 - DNA, 573 bp, Glycine max
  Coding DNA Sequence Number=SeqID_2336
tactcgacgattgcggtacgggccccccctcgagtcagctacgtaggccccccccccctttttttttaagttacttataggaacagtttaaggcccaaaccatttaactcatccacgtcccaatccgataaaccaccatttaaaatcatactttgtttactaaataatcacttctctctgataaattaactaaggtttcttatagacgcatttaaagtttcctttatccaatgatatttcttttcttttttcttctatccaacgatttttcattcttccgaaatactttgatgcatctggactcttttgtccaaatacatttcactctttgactttgtaccttgcggatatccactacatagtttggttggatcactaactacctattgcctaagagtctaaaactacttctagtcattgatttatttatataataattgaatgtagatatgatgtatgtactggggatagacaatggattaatgctacagcaaaaaaaaaagataatggattaatgaatccaaaatactcttttaacgtattcttttgtgtattcactcttcattatagcta

SEQ ID NO: 12116 - DNA, 145 bp, Glycine max
  Coding DNA Sequence Number=SeqID_2337
atcgcagcagcacagaagcaacatcttgcagtcacctgctacacacgagatagaaaaaccatttctcaacagtaccttctctagttctagctacatggcttccaacgcgagcatgttggccgtgttcatggcttgcgcgctcctc

SEQ ID NO: 12117 - DNA, 261 bp, Glycine max
  misc_feature (230)..(230): n is a, c, g, or t
  Coding DNA Sequence Number=SeqID_2338
tttttgcggttcttcttgattaaattcttttttggtaaggattcccctcaatttttcactgtgggctctttttttcctctcagtcttttcgggttggttttaaaagaatagatggcaacacacggtattaaaaaaatattaataataaaaagcggaagatagacacaaaataggactgaataataaaacataatctggactcttcaagttgctgtttgatttttcccaantaatttgcttcactcttctgtacaatttttt

SEQ ID NO: 12118 - DNA, 555 bp, Glycine max
  misc_feature (61)..(61): n is a, c, g, or t
  misc_feature (107)..(107): n is a, c, g, or t
  misc_feature (331)..(331): n is a, c, g, or t
  misc_feature (407)..(407): n is a, c, g, or t
  misc_feature (515)..(515): n is a, c, g, or t
  Coding DNA Sequence Number=SeqID_2339
atatatccgctctatgtctgcctatcccatacacacatcatatgtactcaccacacacccncgctctcctcgctcttgtcgcactcgcatccaccgcacgcatgtcntatgtaaatattgatgttactcaatagatccactatgtacaacctcgcgcatgacacactacatctcaatactctaacacacccgaaatactatgagtacacaacgactcacacatatatgcgtctgtgccgctaatatctactgcgtcatcgggctctcgtacatttatctctcgcctccgcgcgcgccgactgtgctgcgactcgtctctctgtgcgcacgntcgtcttgcgccgaccgtgctgctcgtcctctattgaccgcacggcggtgcagtatgtatatcgtgtggatggcgnttctctccgtagtccagctccccctcattcctcaacagctacgccctcacacgactcattatctctcatctctctaccatatatatatataataaatgtgcgatgagncctgacgacacatcttattttctgtacacactctccacta

SEQ ID NO: 12119 - DNA, 595 bp, Glycine max
  misc_feature (416)..(416): n is a, c, g, or t
  misc_feature (563)..(563): n is a, c, g, or t
  Coding DNA Sequence Number=SeqID_2340
tattgcgtcagtttcacacgcttgcgtaccacaactctctcacattgttcggtataccataatcatataatgaatcactcgcgctcgcatactatctcaggctattcttcgtcgtacatgatcgcagtgagggtattattcagagttgtacatgtagccatatcatagtccacgcctctctcctccttaataaaaaacaaatcatataaacagaggcggggcgtaacaatgtgggacggcacgtcataataatataacatctggcgtgcacactcgtgcgcgggccagctacgacgtaatattaatattcaagtataggggatattccatgctacgctcgcgcgccgcacgactattgcgcttatcttatcgtatatgggaaaggttatgcgtggtagtcatatattataataatnactgtgtgtcttacttagagaatatatatatgtgttgtgtgggcggtctttctctttatttttgagaaaaacacccactcgtatttgagttgtcacttcctatccgttgtctgtctttattaatatctgttgttcttcgagtggtanctcttacacccctctgtcctctttgagagata

SEQ ID NO: 12120 - DNA, 544 bp, Glycine max
  Coding DNA Sequence Number=SeqID_2341
ggtgcctgcccggattgaattggaacagtgaagaaagagagatgttgtttcaggtgggcgggcagggagtcgcccccaccttcttcgagatgggcggcggctcaacaacttccggcgagcctccgcgccgctctgacatactccatcgggcgtctttggcttacggagacccttccttcacaagctcctcgacttcgaagacgaatccttccccttactcacgctcggccgcgaatcccacaccttacgaaccacagatgcccccttttccgaatctctctacggccctccgaggaaaaccagccaatatcgccctcaagaatggcaacgccactaccagcaaccccggcttacggaggcgccagaaaggtcttttccggttctttttttggttggggttgccggatttggaaacccaagctgctttcaatcctccaccagaaaaaggggaaacccgggcttccagcccccctctatggggagatgaaaccccaaccacctttttttcccccggtggtcaagggccaacctccctggatgccgg

SEQ ID NO: 12121 - DNA, 569 bp, Glycine max
  misc_feature (80)..(80): n is a, c, g, or t
  misc_feature (84)..(84): n is a, c, g, or t
  misc_feature (123)..(123): n is a, c, g, or t
  misc_feature (162)..(162): n is a, c, g, or t
  misc_feature (175)..(175): n is a, c, g, or t
  misc_feature (196)..(196): n is a, c, g, or t
  misc_feature (249)..(249): n is a, c, g, or t
  misc_feature (251)..(251): n is a, c, g, or t
  misc_feature (296)..(296): n is a, c, g, or t
  misc_feature (322)..(322): n is a, c, g, or t
  misc_feature (460)..(461): n is a, c, g, or t
  misc_feature (463)..(463): n is a, c, g, or t
  misc_feature (481)..(481): n is a, c, g, or t
  misc_feature (497)..(497): n is a, c, g, or t
  Coding DNA Sequence Number=SeqID_2342
atcaggagagatcagctatacgaatagtatacatgagaccgctacacacactatatacacatacatacactcatacttcnactnacatcacgcctgtctgcgactctactcaccatcacgtantacctcgccgtactgtagtcgcgcactctacagcgcgtngtatagatgacgngagtatatatacactgcgcgntcagtcactgagtccacacacgatcgatcgtctcaatcgagcatcacaactantngctcacatgactacgttatataacgtactatcgtcgatgttacangctgacacgaccgactcattacagtncatattatatcttacacacgagaagcatgcacgacaactgaatatatacagctcgtccactcgtgcgcagacatatgcatcgagtgctggtggctgcctgtctctgcgtcgtgctgcgattctgccgcctcatctctnntnatcgttctcatatcatanattatctatacatgcncactactgtctatcgtcttcactatctcactcttgataatctatagcgcttcaccagagctgtgtcttatcg

SEQ ID NO: 12122 - DNA, 470 bp, Glycine max
  Coding DNA Sequence Number=SeqID_2343
gaaattacttccttcactacttaatgaattccaatctttttcaacaacaaaatactatgaaaagatcacaaaaatctcaaaactattacatcccaaaacttaccaaaacctccaatatgccaaaacttgaaattatcagcaactccttcgacccaaaccacaaaaaacaagcacatgatgaaaacaatgataaagaaaataaaaacactgccaatcttcctacccgcaaagcgaataatattaaaaaactcaactatatcaactcaatcttcaaaggtatcgatgtcccaaacaccacaaaaaacaaatattctacaaagactcccaccaatcttcgtggttcacaaatcacagaaaaacctagcttcaaaagccccacaaatatgcaaacaatcaatttcaaacaacgaaaagcctctcatggaggagaaccaatgacatttgaggccaggttcagtccaataatcaga

SEQ ID NO: 12123 - DNA, 428 bp, Glycine max
  Coding DNA Sequence Number=SeqID_2344
tggtttcccgaaatgcgactcaaatacccaatatcatgttagactcaccggatttaacgccggccgccaaggattcgatcaatcattttcataattttaaatatgattatccacaagaagtgcttaatacacatccatccataatggtatgctccgtattaaaagaacaatgcaatgctgactcatctctgccaaagcgcttggtcactgttctattggctgctctacgctcaaatggatcgtttggtgtgcatgtgtgcatcaatacaaccgatcgttttatgcatcaattctattcgaagctcggattcaccgaaattttcgaagacaccacaaaagtgtatttaggtcgaaatttctgaaacacaaatttacgttaaacacttttgatttcatcgaattttcatacgtgacaaccgatcgattag

SEQ ID NO: 12124 - DNA, 434 bp, Glycine max
  Coding DNA Sequence Number=SeqID_2345
cccgcgagaaccgaaggccaagaaggctggcgccacggggttgccaaaccgcagccgccccgttggaacgggtattcagggcccactggccgacgccaccccactcaccacatttgtgcttccccctttgtcccccccccgctcctcccatgtacccactctcacattccgctcactgcgccgcctgttcgttccaatcccccctctcccctcactaaacccacgtgcacaccaaactaaaccgacaccaccaccccgaataccacccctacgcacaacatacttatttctccacctcctagatcgtaacctctcccatcttgctctctccttctttctgccgtatcgccctctaccctttctccctgctaaccctactcatacccatgcaacaccaaccaactcaaataaaacagccaaacacactatcatcc

SEQ ID NO: 12125 - DNA, 240 bp, Glycine max
  Coding DNA Sequence Number=SeqID_2346
gggaactaaatagcaggccctcttataaaaaaaaatggcatctttgccccttggacgggacttttttttttttgtttatgaaaaccccgggttttgaggcccaaaaatctggggggacttgcccaaccgacaaaaacaggtagtataaagggagggttccactttattaaacaacttttggcaattttcaaaaaacccaagggagaaaaatttctctgtcttgaagagttaaagttggga

SEQ ID NO: 12126 - DNA, 539 bp, Glycine max
  Coding DNA Sequence Number=SeqID_2347
attatatctggttttgcgtctgctatatctgtgtcgatgagaatagtgtgcgtatacagtttgtgctgcgatttactctagtgtagtcagttgtataagttggcggctgcgtctccgtatctcttatattcactatcttggttacattagcgtccttgtcggagatgactctaccgtattcagataggatatcgcagttcttcggttacttatagttatcctatgtcatacttacacctctttgtcgcgatatacacgaggcatagagctcataatctctcatatcacgcggacctagaggagcagtgcgatagtgtctgcggctcagaaagcacttcactgcgttcggcacatgctttgatatctagcacgatagcacatatcagaactatataaggaggcgattctgcgaagcgaggggaacatacactacttttcggcagatgtgtgtcgcctctttattagcgacgatatattgttatcttatatgtgacctggtggcgagttagagtcacagagcgcgctccattaacagaaga

SEQ ID NO: 12127 - DNA, 329 bp, Glycine max
  Coding DNA Sequence Number=SeqID_2348
aaggctaggatcatcaatggacaaagaatgatacttctttctggctccattcactaccccagaagcacccctgagatgtggccagatcttattcagaaggcaaaggaaggaggtctggatgtcatccaaacttatgttttctggaatggacatcaaccttcacctggcaaatattattatcgaggaatctatgatctcgagaggggcatattgctagttcagcaagcacgcctttctcttaacctcagaattggcacttatgtttgtgctgaatgcaacttcggaggattccctgtttgactcaagtacatcccaggtattttcttcag

SEQ ID NO: 12128 - DNA, 420 bp, Glycine max
  Coding DNA Sequence Number=SeqID_2349
gctaggcagaaccagcaccgccatggccttcgccgttctcgcgctcaccgagctcctgggcaccagagaatttgtccccgcgattcatcatcgtccactacttcgactacgtccaaggatcgagctggaacgcgccaagtgaagcggatcgaggccttcttccacctccagcaccctctactgctcccgtccctcgccgagcctttcttgtgctccccgatgctggagcccaggagccagatgatcccgaggatgattctacatggagttcggcttcgaggagtagttaggaggtcccaggcaggaggcctgaccttttcgatcgttgctacttttatgctagccttcttaaggcaaacttgtttaaacttatgattgttctcagatattgttgcttccgctgactcgtctatgatcgag

SEQ ID NO: 12129 - DNA, 592 bp, Glycine max
  misc_feature (429)..(429): n is a, c, g, or t
  misc_feature (467)..(467): n is a, c, g, or t
  Coding DNA Sequence Number=SeqID_2350
gagacagatcgactctcaccatctcccttctatttcctccgctacaacacgcgtcgtactcattcttctggacctatatctatctcatcctcacccctcctctccgctcttctacaaacaaccttggcttagtctactaggctcctctccaaacataattcatctcctccactcatccctcccgtacatcatctgtactcactcaacacacacacactccctcgaactaacaacaccggcccctcatcacaccacacctctattgccaacacgactctatatcaacaggctactcctgtaaagagaacacacacacacacatcacatccgatgagctacatataacatcgaacagactaaacacttaatatacttcccccacaaccacagagatctcacctcgcacacaactaaacgaacgcactcctnacaataggataatccaaggtcaataatcggaagagagnatacatgagatagacacacccctcgccctcactcattctctcggtctgtgctctctatcacgcacacacgcacacacacaagtttacacccacactattctatcatcttctactactaccacatt

SEQ ID NO: 12130 - DNA, 586 bp, Glycine max
  misc_feature (364)..(364): n is a, c, g, or t
  misc_feature (504)..(504): n is a, c, g, or t
  Coding DNA Sequence Number=SeqID_2351
gtcataactaactacagctaacgctgtactcctctctcccatccataataggaagaggaaaaagcgaaggtgaataaggaggattttgcgggagaagtaaatctcttatctcacgtctatatctccagtgctagcgcggtctcctctctctcgattaggccatccgtcgtccatgcgagcacgccatctatacgtcgtagtattttagctatacctcctcatccacatccctcgtgccttcgcttcagttatccatgacctgcggaaagcggcgagcggcccgctgcgggagaagaaaacagaatatatatgtgagattacaaaattttagagtgagtgtacaacagcgaaagaaaaggagagncgcgtactcccccccctgcagaacaacacagacaagaaggagagaaacacatttatacgtatcacacgctctgactctttcgtggggagaggtacgtacggttttatctcattttgtcacaaaagtatacataaatgggngtcccccccatccttaattgtcttattcaacgtacacccttggtgtcgtcttcctgggcgcggttcgtcacagtgtagtatg

SEQ ID NO: 12131 - DNA, 327 bp, Glycine max
  Coding DNA Sequence Number=SeqID_2352
gagtaaagagctagatatccaagtttataatctgattgattgatctgtttattttattcttgctaacatgtatagactttttctccatcctttcattctctaataatattatctgatatgtggttcagactcagtttttgactcactaagtaagtagccaaacaatttctcgggttcctgttcaagttgattcctttgataaggtgactttttctagttctttttgtcaattgaactttcagcttggtaaattaggtgattgctatctggttaaaacattattttatttcacaatttttctttcttttctctttgcaatttagttac

SEQ ID NO: 12132 - DNA, 438 bp, Glycine max
  misc_feature (377)..(377): n is a, c, g, or t
  Coding DNA Sequence Number=SeqID_2353
atattatgtaatcagcccgagcggaggaagaacagaaagggtgtgcgctgacacaatactgttagataatgcgtgctctatcatgtttggtagcagggtgcctgtgacgtaggaaatatccgagcatctagaactcttgcagctggttgcgagttgccagtccaaggtacaagaagaaggttgctaaagtgtatgtatgttgtagagcctaacgtccaatatgctgtgactgcggatacagatatgtgtgtgcctctaggtccgatacgatgaggtataaatcgccagcataactttgcatagcgggtcaaggcgtgtcgagcttgtatttctcgaaccgatgttggctcgatgaaggcgaaggcgtatgtaagatntatatagtaataaaacacagaaagagaagaagaagaaggagtctgtgattcggatcgtcgc

SEQ ID NO: 12133 - DNA, 562 bp, Glycine max
  misc_feature (75)..(75): n is a, c, g, or t
  misc_feature (327)..(327): n is a, c, g, or t
  misc_feature (333)..(333): n is a, c, g, or t
  misc_feature (336)..(336): n is a, c, g, or t
  misc_feature (339)..(339): n is a, c, g, or t
  misc_feature (425)..(425): n is a, c, g, or t
  Coding DNA Sequence Number=SeqID_2354
ttctagtcgcaatcaagaaaacgcaaccgtcattgtgcatatgacgccccagcagcactgtcgtcccccaccaantacatctacacctatatggcagacattctaaaactcttaatctcaatattcctatgcattacgcgtgatgaagatgcaggcgtgggcgggtgttgggagacgtggatcgcggcgtgggggaggtaaggaggggggcggacaagcgagtcgctgggtttgatgggttgatgagcgggtggggtcgtgggtgaatattaggggcgtgttagcggagttgtgttgggtgggtgggtgctggggtggttgtctgtngccttnttntcntcttgattttttttttctatctttgttttattaatatgtatcttattgcaccaccgactcaacactcttatatattttttagttanttgggtcggcgggcccgcgcggcgcgaggagcggaaggagggaggcgcaggacctgaacgaggaagaggagcaacaggcgcgcgcaagagggaagagacaaacggagcaaccgaggaggcaccagcagcaagaaaac

SEQ ID NO: 12134 - DNA, 390 bp, Glycine max
  Coding DNA Sequence Number=SeqID_2355
gctcgaggctgcaacaaaggatgagctgcaagccagggttgctcagttaaagaaggagctgtcacagacagactcagtatatgatactgagaaactggctgagaggatagctaaactgtctggtggagttgcagtcatcaaggttggtgctgccacagagaccgagcttgaggatcgtaagctccgaattgaggatgccaacaatgcaacttttgctgccattgaggaaggttattgtacctggtggcggtactgctctggttcatctctccactcatattccagcactcaataacaaccttaataatgcagataacatactataatcctacattatacaaaatacactaatagcttctacagcattgattactcagaatgcttaaatat

SEQ ID NO: 12135 - DNA, 543 bp, Glycine max
  misc_feature (30)..(30): n is a, c, g, or t
  misc_feature (77)..(77): n is a, c, g, or t
  misc_feature (168)..(168): n is a, c, g, or t
  misc_feature (173)..(173): n is a, c, g, or t
  misc_feature (422)..(422): n is a, c, g, or t
  misc_feature (430)..(430): n is a, c, g, or t
  misc_feature (512)..(512): n is a, c, g, or t
  Coding DNA Sequence Number=SeqID_2356
tcactacgaaactaactcgcgcacaccacncaacagatgtctcttacgatagagacggagataccgttgatgactancgagccactgtactcgcatgaatctttatatccgatctgactaccacgctgtgacacgtgctcatccgtcgtcacagcgctacgcgtatcnatgtnctgccaccacatttggatactatatatactgcagtacacgctgcagagatacagatacggagagatagacgtacacgacatagtagcgcgcatcgctagcacatgattatgcctggacactctactaactactcacgtgacaactatagaatatctattgcccgccacgtctccagtccgctacaatcgcagcgcacacagatctactggtgatctgtatgtgcaatgatcctactatcctctactgcnctatttcnatcaaccgtcgcagtatcactacccgtgagcgatcgcactccgcgtagtctgcgctccatcttgattatgaacatgctcctnactagatggagagtcaactcgcagtacgatc

SEQ ID NO: 12136 - DNA, 521 bp, Glycine max
  misc_feature (283)..(283): n is a, c, g, or t
  misc_feature (408)..(408): n is a, c, g, or t
  Coding DNA Sequence Number=SeqID_2357
aaaggaatatatcgccgcaccggtcgcagccagtcgaccaacgacataccaccgacagaaatattagatccacatcatcatgcggagcaagagggtatacaatcccttccggtagaagaaaatcccaactatagataccgaagtgtaagacgttcaggtgtgtcaactatatcatatataagacaggtacatacatgagcgaacaaagagaaactcttcatagtagtgatcatgtgagcagacggctgtgttgcagcgccgtcacattgcggacgcccgcacnaaaaacacatgcgtcagcttctaaacacaaccctcgaaaagagaaaaacaactgaacaagatgtcaaggattcattctcatagaaatcgctagactatacggctcgattccgctgtgtgcgtctnttctgcattacgatataatagagagcacaactagaccacatataaaacagacactctcctctcttttctgtgcggcgaggtgcccgccatcacacaacggtgcaccagacgcg

SEQ ID NO: 12137 - DNA, 477 bp, Glycine max
  misc_feature (151)..(151): n is a, c, g, or t
  misc_feature (176)..(176): n is a, c, g, or t
  misc_feature (281)..(281): n is a, c, g, or t
  misc_feature (362)..(362): n is a, c, g, or t
  misc_feature (427)..(427): n is a, c, g, or t
  Coding DNA Sequence Number=SeqID_2358
tcataatccactctagcacgcgagggggcgccaggtcagcacggctggctatctccactcatctcctcctctctggctcaccatcgccatcacccacgtacgtagaaaaatatgaagaaggtaaagaacattaacagcatgcaatgagatncaatcttctacaaatgacaaaaccntatcgtgttagacgcagaaaagtctggtagcctgattccctctggatgtagagaagtcttacggtctataatctacacatgctggattatacatatgttataggnatccccaacttcatcaactattcctccctaccattatacataccaacagtttgcaatgaaaaccgtcaacacactctgtcntctgttgttcctccactccctcctctctcctcctccacatatagttgtgcttgagtgggtaatgnttcttatatcactagtagaacagttgtgtggcactcctcttattgatagg

SEQ ID NO: 12138 - DNA, 571 bp, Glycine max
  misc_feature (64)..(64): n is a, c, g, or t
  misc_feature (198)..(198): n is a, c, g, or t
  misc_feature (229)..(229): n is a, c, g, or t
  misc_feature (471)..(471): n is a, c, g, or t
  misc_feature (516)..(516): n is a, c, g, or t
  Coding DNA Sequence Number=SeqID_2359
tcgaagttgaacgtggtctaatatatatgactgctggtcaatcaagtctgcgtcacctactccncacgcgctcactcatcctacacgtctcgcgcaccgtcgtcccacagcgcttcctccacgccacactcggcggccgctgcgcataccgcgcgatctgtcatcagccacgccaccacatactctctgtgatagttnatatctcggacgacgtgatatattagtctangtgagactcacgtcgctactccctaagattgtgtgtcgctagctgaaaccataggcggccgcgtgcaatccacatgacggaagaagaacaggagcatgagtatgcatgagagctgatgattgtgagataagtgaaaggcagagcagcggataagaggtggtgggtacggaagaagaggcgacgcgcacacgcgtacgaaccactactcacacctccggacgagactcgcggtgcggggagtngcgcccacgccacgtcgtctccgtctctactcgttctctcctcanaagtattgtttgcgttgttcatcaggcggaggcaaattcattcctcagagagagg

SEQ ID NO: 12139 - DNA, 431 bp, Glycine max
  misc_feature (224)..(224): n is a, c, g, or t
  Coding DNA Sequence Number=SeqID_2360
ggtatgttctgctctatcatcatgttctttgtgggtacaaggatctacgtgcatgtgaagccagaaggaagcattttcacgagtattgcacaagttctagtggctgcttatagaaaacggaaagttgagctaccaagtgagaagcatgttgatggggttttctatgatcctccacttactgggacacaagtttttttaaagctaccactgaccaaccaatttangtgtttgaataaagcagctgtaataatggagggggagcaaaaccctgatgggagtagagcaaataattggaaagttgtcatcatccaacaagtctaagatgcgaagtgcttggcaaggacttgccaaatatgacctgcagggttctcacgatttacttgcatgactctgcaggtacatttaattgtcgcaggcctacgaagttcgaa

SEQ ID NO: 12140 - DNA, 311 bp, Glycine max
  misc_feature (49)..(54): n is a, c, g, or t
  misc_feature (89)..(89): n is a, c, g, or t
  misc_feature (111)..(115): n is a, c, g, or t
  Coding DNA Sequence Number=SeqID_2361
gatttctgatactttagtttggccaatttatttataacctacaatttcnnnnnngatttcatgatattattttgttgaatctttgtttntgtgatctgttagggaacaggnnnnntataagaaccctgagaacaatagttgttggagacgtccacctgtagaggaggttctggcaaaactaacgactaatttcaacaaagtacactccaggcagtgtgcagatgaggctgaactggctgaacatgttgtcggtttgacatgtagcctagcagcctgaagttttggattgtaactaattgctctcctccctg

SEQ ID NO: 12141 - DNA, 445 bp, Glycine max
  misc_feature (38)..(38): n is a, c, g, or t
  misc_feature (94)..(94): n is a, c, g, or t
  misc_feature (98)..(98): n is a, c, g, or t
  misc_feature (117)..(118): n is a, c, g, or t
  misc_feature (121)..(121): n is a, c, g, or t
  misc_feature (134)..(134): n is a, c, g, or t
  misc_feature (141)..(141): n is a, c, g, or t
  misc_feature (206)..(206): n is a, c, g, or t
  misc_feature (220)..(220): n is a, c, g, or t
  misc_feature (227)..(228): n is a, c, g, or t
  misc_feature (252)..(252): n is a, c, g, or t
  misc_feature (260)..(260): n is a, c, g, or t
  misc_feature (295)..(295): n is a, c, g, or t
  misc_feature (302)..(302): n is a, c, g, or t
  misc_feature (307)..(307): n is a, c, g, or t
  misc_feature (309)..(309): n is a, c, g, or t
  misc_feature (311)..(311): n is a, c, g, or t
  misc_feature (315)..(315): n is a, c, g, or t
  misc_feature (342)..(342): n is a, c, g, or t
  misc_feature (346)..(346): n is a, c, g, or t
  misc_feature (349)..(349): n is a, c, g, or t
  misc_feature (352)..(352): n is a, c, g, or t
  misc_feature (354)..(354): n is a, c, g, or t
  misc_feature (358)..(359): n is a, c, g, or t
  misc_feature (387)..(387): n is a, c, g, or t
  misc_feature (416)..(416): n is a, c, g, or t
  misc_feature (420)..(420): n is a, c, g, or t
  Coding DNA Sequence Number=SeqID_2362
taatactcttctatgctctatctgctctctgtgatacntctacatctttcttatctcttgctatctgtccgtctccgatcagtctttctatgtngctnttctgctctctacgtatcnnatngttcagataatcntggcttnttttttacctatacgtcctgtctctcctctcactgtcctatattcgttctatttaatagtccgtngtatacgttgctantctatannatagtgtttatctatgattatatngaattatnaaatcctactataaaatcatgaagttgtcacgatnattatanctccntntnttangatctacacacgacacagcagcaaacnaganagnaanangagnnacgccaaatcgctccgcatatgccgacngccagccacgacgcaagcgcgatgcacangacnccacacgctgtgctcagagcgacag

SEQ ID NO: 12142 - DNA, 547 bp, Glycine max
  misc_feature (44)..(44): n is a, c, g, or t
  misc_feature (46)..(46): n is a, c, g, or t
  misc_feature (54)..(54): n is a, c, g, or t
  misc_feature (65)..(65): n is a, c, g, or t
  misc_feature (88)..(88): n is a, c, g, or t
  misc_feature (105)..(105): n is a, c, g, or t
  misc_feature (208)..(208): n is a, c, g, or t
  misc_feature (216)..(216): n is a, c, g, or t
  misc_feature (234)..(234): n is a, c, g, or t
  misc_feature (254)..(254): n is a, c, g, or t
  misc_feature (256)..(256): n is a, c, g, or t
  misc_feature (397)..(397): n is a, c, g, or t
  misc_feature (428)..(428): n is a, c, g, or t
  misc_feature (443)..(443): n is a, c, g, or t
  misc_feature (459)..(459): n is a, c, g, or t
  misc_feature (461)..(461): n is a, c, g, or t
  misc_feature (468)..(468): n is a, c, g, or t
  misc_feature (470)..(470): n is a, c, g, or t
  misc_feature (478)..(478): n is a, c, g, or t
  misc_feature (507)..(507): n is a, c, g, or t
  misc_feature (509)..(509): n is a, c, g, or t
  Coding DNA Sequence Number=SeqID_2363
gctatatatagtgcgagattatcgatatatgaagtatcacacgnantagattantaagcacacanatcgacaaatgtatacagtatangtacttcacacacatcngtatcacactccatatatcgagtgattatatatgtgatgataacaacctcctacatcattcgcgctcgctctgcgacgtagtcgttcgtgcggtccactacanccacgtcncgatctcgtactgagcgntggcgacacgtaccgacatncnacacacacagcgtgctgtgtgtctctctctcgtctcactgctgacactcgcactcgctactgaatatctgcgcacgaccaacataggcgtcatatgtatatctatttttctaaaccacctcaatgagtagattataacaanacatatagatacgagcaagagacgacatganactacgtacacaacncgcagacactcgtatncnatcatantnatcctaantatatctatctagatgtcctcgtgctgcntngcgcgcgcatcgctgccctcagtgcatgtatcgctgtg

SEQ ID NO: 12143 - DNA, 510 bp, Glycine max
  misc_feature (296)..(296): n is a, c, g, or t
  misc_feature (325)..(325): n is a, c, g, or t
  misc_feature (425)..(425): n is a, c, g, or t
  misc_feature (430)..(430): n is a, c, g, or t
  misc_feature (436)..(436): n is a, c, g, or t
  misc_feature (438)..(438): n is a, c, g, or t
  misc_feature (444)..(444): n is a, c, g, or t
  misc_feature (448)..(448): n is a, c, g, or t
  misc_feature (457)..(459): n is a, c, g, or t
  misc_feature (468)..(468): n is a, c, g, or t
  misc_feature (476)..(477): n is a, c, g, or t
  misc_feature (481)..(482): n is a, c, g, or t
  misc_feature (485)..(485): n is a, c, g, or t
  Coding DNA Sequence Number=SeqID_2364
gttgaagctgccacggatggattctcagatgagaacaagattggccaaggtggatttggggtggtttataagggtgtcttccttaacagacaggagataactgtgaagaggttgttagttaccttcttgctgggtgctgtttagttcaggaatgaacctgttcttgtggccaagcttcatcatacaagtttgatgagactatggggattttgcttggagggacacgagacgatccttatctatgaatacataccaaacaaaagccttgatcgctttttatttgaccctgtaaaganagagagttagattggtcaagacgctacangattattgtttgcattgctcgaggaattccagatttacacgaaaattcctagctataattataaccgtgatctcacagctggtattgtttatagatgaanatttnaacccnanaattcngatntggcttggnnnaattttcangctgatcnnactnnttnattccggaggatttttgggactatg

SEQ ID NO: 12144 - DNA, 236 bp, Glycine max
  Coding DNA Sequence Number=SeqID_2365
aataagtcgctaacagataggccgcgtcagttgcgtttgagcggccgttccaggacaataaattgcaattcagtctaactcgaccggcatgagagagctatggtctttggcctgggcggcctcgatctgtttggactcatcattcctggaaccatgttgcaagatacggctgtggcacccagtggcttcattaaatttgtagccggcatttgtcctctgcctcagatttatgctgg

SEQ ID NO: 12145 - DNA, 597 bp, Glycine max
  misc_feature (72)..(72): n is a, c, g, or t
  misc_feature (167)..(167): n is a, c, g, or t
  misc_feature (203)..(203): n is a, c, g, or t
  misc_feature (209)..(209): n is a, c, g, or t
  misc_feature (420)..(420): n is a, c, g, or t
  misc_feature (561)..(561): n is a, c, g, or t
  Coding DNA Sequence Number=SeqID_2366
agtggtgttgtgttgtacacgttacggatagagagtgtacaacagccgaggttatgaagacacagtatatgnggtggagcggagagagagaggtgtatgtggtatgcacaaggatggtggagtagtatgtattgtgttttctatctcgacgagtatagattcacgtngttgttgatgttacggcgcacaagtataataagagntagagntacaaacagcacaaaaggagagagacacacaaaaatattagtaaacagaaggtatgtatccaaatatgaattactttgttgattaaggtgaatgagtgagggccccgggtggcatctcacaatggtgtagttgagagctgtcagtggacaccaaaagcagttatggctctattttatctcccccgtagtgagacacgccatattagagtanataacaacagaggatagataaatgagtaacttacttttgccacctgttcgggcgcgaccccccgcctagtttgtgtaggacccgtgttccgcctcacccccacccctcataacacaacaagataatgtatagatattgtgncaccgccagaggtgtcttccatattgtgacgcccgt

SEQ ID NO: 12146 - DNA, 540 bp, Glycine max
  misc_feature (35)..(35): n is a, c, g, or t
  misc_feature (135)..(135): n is a, c, g, or t
  misc_feature (224)..(224): n is a, c, g, or t
  misc_feature (263)..(263): n is a, c, g, or t
  misc_feature (283)..(283): n is a, c, g, or t
  misc_feature (502)..(502): n is a, c, g, or t
  misc_feature (514)..(514): n is a, c, g, or t
  Coding DNA Sequence Number=SeqID_2367
ggtggtgatccatcttgatcgttcagtagtacgantatgtagtctaatcggtacggctcgattatagtgtctcgtgctatatgatctggtctcacgtagctcagtgagatgattgatcacgtgagaatataaagngatgagagggtgcattgaagaagtgtgatagactatgatataatataacaaaaatgtaagacgacaaatagaagtaatgatatattatngtctagaacgacagcccgcggattagatgtcagggacgngcggagctgtatgaggtgtnagcggagagtcataatgacagccagagacgcgggacgtgtgtatatactctcgatatatgttgtgaggagtgtgatatgttcgtagtattacacaacataacgcgagagagcacagcactcagatacagagcttctattgctgtatatactaattacagataactatagaatagggatgatgtaacgtgcgtgttatgcgtagtttatatgtctagttntcgacgatgtcntgagtctcgtagagcgcattgagtgt

SEQ ID NO: 12147 - DNA, 551 bp, Glycine max
  Coding DNA Sequence Number=SeqID_2368
gctaccgctatgacctgtttatttgcggaagatgctgaatttgctcgacgagcctattatcctgcaacatctcccagatggggccactggtgaagctgctatcgtcttactatggtggaaccacaatggatggaataaactggcctggtgatgatggtcggactaactccattacaattcacaaaccaacctaaccacaagcaccgcgcataaataaaatgttcgagcgctactggaggtctgctagaattaactcccgctatgtatctttagttctcctttgcttggccacagaattttgaacccccctggttggtaaacgcttcacttccacactttggaaatggccctacagtttgtatctttcccatgtgcttgtccttactctggctctgcattcaattacaggcacctatacgtaattctgtcgtaattcctggcagatccggcgtgaccaccaaatataacaaaaaacgcaaatcatcgcctatgtcttcttactgttatttggcccccttcattctgtgagtcacttttccagattgtccaag

SEQ ID NO: 12148 - DNA, 559 bp, Glycine max
  misc_feature (363)..(363): n is a, c, g, or t
  misc_feature (454)..(454): n is a, c, g, or t
  Coding DNA Sequence Number=SeqID_2369
gatcataatatatacctcattcctctccaacatcccaccacctctcctcaccctaagatctgcataacctaccattctctatctccccaccctcctcccgccctacacaccttccttgactcttcatatctcttcaattgtgctgtcctatcatctagcgctctctatgatcatttagtttttaatattatctcctagttcttgttactttatatttatatatgattattatactttaatataatatagtattgtgattagtcatttgattataacaacaacacagataatcccaccaaccaccctccccactttcaatactactcacatcaatattaattaattaatcacctatacttatanacactgaactaaatacctagatgctagaaagcacatctcgcgccgcgcgcctctcttctcaccaccttctctccttaccgcatgactgctntgttctcctcgaacatctcatatacgtggtagtctgcgtgtaggatatgcttctgccacgcacgtcatgtcctctacgctgtgtgtaggtatctttgcctcgcac

SEQ ID NO: 12149 - DNA, 155 bp, Glycine max
  Coding DNA Sequence Number=SeqID_2370
ctcccattgtgttttgtcccttgaactttaactcctgtttgaaattggcttacagatatactactcaagaaacattggctgtacccttgagaaatgaggatagagaagagaactacgcttagaatcttgacagttgaatcatccatttcagacaa

SEQ ID NO: 12150 - DNA, 236 bp, Glycine max
  Coding DNA Sequence Number=SeqID_2371
gaaacagttttgagtcatacctcgttgctattgtcaaccccagcaagcaagcacttgataagtgggcagaagacaatgatataaccgcggacttcaattctctctgtgaagattctaggacaacaacgtacatacttgcacccctccgccggatggccgaggttaccacgcccaccgggcctcattttattaaagctgttcttcttcacccactcccattcgacatggaacgcgcc

SEQ ID NO: 12151 - DNA, 572 bp, Glycine max
  Coding DNA Sequence Number=SeqID_2372
gaagttgttctaccatggtgtgcgatgtgctatccggaaccagggaggttgcaggaattgtgtcttcatgtggagacttctgctcactcactcaaaacagtgtgatcacggggactgctcagttcccagatgcagagatctgaaggtattcatgggcaaggccaaaatggttactgctggaccctgttgtgccatggaatgctagcggatcagaaattaaccccctaggttttctcgagcagaagatttgttgatgaaaatgcaataaatttgttgttggctaaccggattgcaagttgcgaaataaataaaacggcgacctggtggcgacggcagcagcagcagagttatttgtttcgccggttttcctgaaacttgtgggaagaaggcggaggcttacatagacagacatcctgacaaatgtagtggtgtaggtgcaatacctgtatatgtttcctgcaggccatagatgatggatcgacaggatataggattattttgtttcttatttattttacccccctctcccccttgaccccattgagttgaacaaggccgcagttttgctcagc

SEQ ID NO: 12152 - DNA, 170 bp, Glycine max
  Coding DNA Sequence Number=SeqID_2373
ctgttcctaagaggcctaaaggaatatgtattggccaagtattgattccatctaagggctggcaaggttgatttcgtcccgatcgcgttcatcctctggtatgctattaggcattcttctttaaggacatatgtcctcccatatccaaaaataatggtagcggtggtagt

SEQ ID NO: 12153 - DNA, 559 bp, Glycine max
  misc_feature (109)..(109): n is a, c, g, or t
  misc_feature (195)..(195): n is a, c, g, or t
  misc_feature (244)..(244): n is a, c, g, or t
  misc_feature (335)..(335): n is a, c, g, or t
  misc_feature (352)..(352): n is a, c, g, or t
  misc_feature (395)..(395): n is a, c, g, or t
  misc_feature (398)..(398): n is a, c, g, or t
  misc_feature (459)..(459): n is a, c, g, or t
  misc_feature (477)..(477): n is a, c, g, or t
  misc_feature (482)..(482): n is a, c, g, or t
  misc_feature (493)..(493): n is a, c, g, or t
  misc_feature (529)..(530): n is a, c, g, or t
  misc_feature (534)..(534): n is a, c, g, or t
  Coding DNA Sequence Number=SeqID_2374
tccgcgcatgattactgatgtactgatacagcgtatcgtgtatacagcgcactacgatactcacgtagagacgcactacgcacgtcacgccgccacgctatctattatnatgatgatacatgatcgatcagactacgcttcactcaacatatgacagtgacggcagtgcagtgtacactcatctcacgcgatcanctcccgaacatagtatacatcagcacacgtgactgactgctaatcgaanatgactcgtataggtcgtcaatgagtcagctatgcgacacatagcatgatagctagatgatgtagagtcgactgcattactatcaatgtgncatagtgtatctatgcntactctcgtacgctctcgtatctcacagcgcgaactgattatntanatatatgctagtcgtcacatcagctgtcacgctatcagtcgtgctgctgaacgtgatgagntactacttacgagatgtntacantcatgaaccgnccctcacatgcagactgacctcagtttcaatgacanntatngtgctactacgacgattacatcagc

SEQ ID NO: 12154 - DNA, 470 bp, Glycine max
  Coding DNA Sequence Number=SeqID_2375
taaaattctgttcctcatgccttgccactcaactcctttgtatagtcacttacacaccaatgtgccaactcgcttcctgacttgtgtacctgatctgcaaagtacacctgaccctgcctatatggatgaagcggaattgttttaccatgatcatatttcttggcttgctaaaaacttcccagagactaaaccaaatctattgttctcgcatattgtccactttgactcacttcaaccaaagttggactcattcctacgttggggtggttactcagaagtggcatcttttttccacactcattttccttctgaacgagttgggacaagagttgttgttcaagaaagagcagcatctatgtcaggttgtgttgcagaatgagtggattaagagttttgatttgcaacaacttactagatttagtgagttctatttttttatgtttgdgggaccatatgactgcctttcatga

SEQ ID NO: 12155 - DNA, 244 bp, Glycine max
  misc_feature (43)..(43): n is a, c, g, or t
  misc_feature (72)..(72): n is a, c, g, or t
  misc_feature (147)..(147): n is a, c, g, or t
  misc_feature (152)..(152): n is a, c, g, or t
  Coding DNA Sequence Number=SeqID_5365
tggttttttcatatcccgtcttcaaatacatggacatgcagantagttgtcccctaccgtcctagaaagtanttctaatttcaatagtctttgacttcattttagaagactttatattctactagagacatacaatactacgcacanaatangtatacaaacatatacacaatattcatcatgaatatacctcccgccattgatctactgctagatatctgatgctactaaaatacttggcctt

SEQ ID NO: 12156 - DNA, 485 bp, Glycine max
  misc_feature (420)..(420): n is a, c, g, or t
  misc_feature (456)..(456): n is a, c, g, or t
  Coding DNA Sequence Number=SeqID_2377
gctacttcgctctgttcagagttaccactacgacattcctcgatagcggcgcgaacgaaaacacagcgcctcatcacctcattaggcttaatagtgcctttatttattattctgctcgacacgcccgcatctcactctcagcggcgactacacgtcggcgtgaacagatacgccgcaacacaaatcagctacataccttcttttttatttgtaccatcgcgctactcacaacaactctctgcttcgcgtcgtgcgtcgtggcgggttgcggatcttatcgacacggcgtccaaaatcactctcatacatccgtcgactggtattcgtcagacgcttgtcttcgtctcacacactccgcagagataacattgtttatcgcttggggcttacgtgtgtcctctgttctctcaccgtacacantaataaaaggaaaataatggtcatttatatatatanctaccaccgcgcgcgcattgtacaatcga

SEQ ID NO: 12157 - DNA, 537 bp, Glycine max
  misc_feature (174)..(174): n is a, c, g, or t
  misc_feature (203)..(203): n is a, c, g, or t
  misc_feature (275)..(275): n is a, c, g, or t
  misc_feature (277)..(277): n is a, c, g, or t
  misc_feature (305)..(305): n is a, c, g, or t
  misc_feature (336)..(336): n is a, c, g, or t
  misc_feature (339)..(339): n is a, c, g, or t
  misc_feature (392)..(392): n is a, c, g, or t
  misc_feature (447)..(447): n is a, c, g, or t
  Coding DNA Sequence Number=SeqID_2378
ataagtctaacgacagtgccccggcgagtgcgcgctagttccgtctatagtcttcgcctcaatcgcaatgcgcggacggtcgcgcagatgtcagtcaacgcatggacgcagtgtagttcagagcaaggcgataccacgaaaggccccccgcgtagtatatatatacccacgccntcatcgtgcatatgaggatgaataatccncacccaccgccacaaatatcgaatgatagagtagagccactcccacgagtaatagctatcacgcaaaagtancncgcacccgcgcgccaccgcgactctgtntcctgagagagtgcagtcgcgagggagagcngcncctcgcccgcgcccgtcgtatctacacgctgattgatgtattgattagtgtcncgcgccgacacgcagacacacacgaatcactgccattgttgacaatgcataagcncaccccagcgcaatgtgtgtctcccaggaaagccacgtgcgcactctgatgatctacctatagctgctgctatcacgcatctcagaattg

SEQ ID NO: 12158 - DNA, 555 bp, Glycine max
  misc_feature (97)..(97): n is a, c, g, or t
  misc_feature (269)..(269): n is a, c, g, or t
  misc_feature (354)..(354): n is a, c, g, or t
  misc_feature (434)..(434): n is a, c, g, or t
  Coding DNA Sequence Number=SeqID_2379
tgacatacgccgctatatactttccacataatccacgtcccttataatgatccgatgctgtaatgatatatctcgagtgataatatctactgttatnagtctgtatcgtctagtagaacatagtctgtacgtagatgtggtccatgatcaccaacatattataacatgacaaggtacgctcacatcagctatatagacacgatcaagatagaatatacgccaaaatgaatgagtagcgaacaaccatcactactgtgacgcgctattcntcgtatcgtgtatatctgtcatccttctgcaaacagacggatactcctgtgcaaacaccacataactcaaggatatattgacatntatttaatgtactatagatacgaggatatgcgtacgaagatacgaggaaaaatatacatgacgagtgtagtaatgacgtncatataaacagcgagcaggatggatcataaaacacaactcatcgagctatcgcacacacaagatacacgcagcgcgaactgacattcacgagaagatgatgacagcgacgcgtcgttgcat

SEQ ID NO: 12159 - DNA, 503 bp, Glycine max
  Coding DNA Sequence Number=SeqID_2380
actagtcagttttactgagtctctgttagcttcttcttcttctagatctgatcgcgattttcgccggaagaggtcttgttatatctatgggtcgtggaaacagctgtggtggaggtcaaagctcactcaattatctctttggtggtggtggtgatgctcctcctcctaagcccgctccagctccagctccagctccttctgctgagccaaccaaggctactgcacctgcacctgcacctgtagctgtgactgcaactgctctcaccaccgctactaccagcgttgagcctgcagaggtcaacaagcagatctctgctggtatcaaaactcctgttaacaactatgctcgagctgaaggacagaacaccggaaacttcctcactgaccgtccttcgaccaaagtccatgcagctcctggaggtggatcatccttggattatcttttcactggtggcaagtaaagtataataaaaacattatgtgtaatgcaaatgcgtatccat

SEQ ID NO: 12160 - DNA, 571 bp, Glycine max
  Coding DNA Sequence Number=SeqID_2381
tgaaggagtcagcagtccagtccccccctgctgccggaagatatggcgatcgcgctcagattcgccgccaccccgccccgcctcgccgcgccgatacctccgacgagtgcccctcgcgcacatggaggagttgtgcgcgtcggcgcccagggcgggactcgctgtggcaggagactggcaatggcggccgcggattccgctcgctgtcgggccaagagagagggcgacggcgacggcgtcctcgcgggagtcgccgtccacggaggaaccggagcggaaggggaagatcagctgagcgtggtaatgaagttcggtggttcgtccgtgtcgtcggcggcgaagatgaaggaggtggcggggctcatccaagctttccccgaggagcggcccgtcgtcgtcctctccgccatggggaagaccaccaatctactcctcctcgtacgactgctttctggtcattttttcagacttacagccaaaaaaagttgtaaggctcactgtttcagtacatcaagaatcttcagtcacggaagtgttagttaaagtgaagtttgcatcttttgtcataatc

SEQ ID NO: 12161 - DNA, 576 bp, Glycine max
  misc_feature (27)..(27): n is a, c, g, or t
  misc_feature (82)..(82): n is a, c, g, or t
  misc_feature (110)..(110): n is a, c, g, or t
  misc_feature (129)..(129): n is a, c, g, or t
  misc_feature (166)..(166): n is a, c, g, or t
  misc_feature (183)..(183): n is a, c, g, or t
  misc_feature (185)..(185): n is a, c, g, or t
  misc_feature (214)..(214): n is a, c, g, or t
  misc_feature (318)..(318): n is a, c, g, or t
  misc_feature (328)..(328): n is a, c, g, or t
  misc_feature (331)..(331): n is a, c, g, or t
  misc_feature (337)..(337): n is a, c, g, or t
  misc_feature (386)..(386): n is a, c, g, or t
  misc_feature (396)..(396): n is a, c, g, or t
  misc_feature (445)..(445): n is a, c, g, or t
  misc_feature (511)..(511): n is a, c, g, or t
  misc_feature (544)..(544): n is a, c, g, or t
  Coding DNA Sequence Number=SeqID_2382
gagatacaacgctcgacgagagcatgntgaatcgctctatctcgactgcaaataagacgatgtacacgctatagatgcacanataggagatcactgcgctcgtcggtgcngcgtgtcgtggctgtcgancgacagtgtagagcagcgagtctgatcgtacgcttgntggttacggacgcgtcntnctcgacgcatcagctcgagcgatgtagantgacgcatgatggtagtgacatgacgatcacccaatgcgacaccatatatgctgctagtgagagtcgacgtgatagtgatcgtgactgtcgactatactaacantcgcagaagncancttgtntagtgaacagtacgcagatgagtaagatgatgagatgatatacgtcgangaacgtaggnatggtgatacatagtcatagtgcagatgaggcggatacgcaccatgctnccgtgagtgatgtgagcaggaccatcgtgatgagatcggctgagaagtaagtaaagctgatctacnagatgatccgccgcacatgcgcaagactgcatngctgtaagactgaaactaagatcggtactgaa

SEQ ID NO: 12162 - DNA, 584 bp, Glycine max
  Coding DNA Sequence Number=SeqID_2383
tagtgccaattgtgagctgtgcctctactcgatacacacaccgccgcatcaccactcatactctactccacgtgcattgcatctcagcctctcgcactatatgcacaccagacctcgactgctcgagacgtactctacagacactgacacgatgtgcacaaccgatcagatcatcagtaaagctcgacagcactagactacatagcagactattacattgcgacttgaggcgcaccatccctcaacgcacgcgcgggctgactgaccgagcatacaagtcgggcgccgataggatactgtcacatccgacacacctcacgtcgtctactctcctcctcgggcgtcgtactgcagctcgcgactgagacactccacggtcccgcagcgcatgcgatcgtaatagcgagcgataaagtcaacgtacgaatgtataacatcgctatatagacagaacagcatgccatataaatctcgaatgatatacagaacaagagcacaatagacaaccagtgatctaaatagagtgctactcgtacatcgcatatatttctgcggagcgcgacgtatcgccgtgaattatatgg

SEQ ID NO: 12163 - DNA, 509 bp, Glycine max
  Coding DNA Sequence Number=SeqID_2384
caatgctacatatgctagtgttgattgatgacatctacaaatatgttaaagatgttgtggaggggctagttgccccagccaccataatcgggagttgttatatcaactgctgtgggttcccttccccaagtgtccccctccgtttttgataagcttgtgaatgacagttggccggatcccttgcttttggctgtatttatctagtattccaagaacgcagcttagcttggcttaaaaattgtacccagccgctcagattctgtgatttttccgcttgtgttatcgccgaagaccaatttttgtgagagagtttccctttcttgtcatatttccagaaacgtggaaggtcattgttttatacctcccctttctactttgcttatttttttgtggtttgtgctggtttgcaataggtgagttcccttattcccccagccacccagtgtagggctcccctgttaatttaatctttatttgaaagaaaatgagccaaagcttttccttttcaa

SEQ ID NO: 12164 - DNA, 558 bp, Glycine max
  Coding DNA Sequence Number=SeqID_2385
gatcctggcatgaatgcagctttgaaaaggctctttccagaaggcattgaggtgtaattgatgaatgttgggggcaagacgctggcaaccgtcctcctgaacatgagagtccgtggtggcatagccgtctgaggaatgatctcgcagtataatctcactctacttgaaggcgtcacaaatttgtcacagatcagatataagtggattattatgcaagtctttagcttcatggatttcgctcgcatatatctcaagttcttggagtttttcctgacaaatatcagagaggggaaggtagtgtatgtggaagacatatgtgagggacatgagaatggcccttcaacattggttgacctttgtagcggtcgcaatgcgggaaaacaagtgctcgtcgtttctcatgagtaaaaagcatgtgattatcgtgttcaatgggaagtcatcagtaatatttctggtttttttgctgaaaaattggcggtcaagacatcgccttggcagtcactttcctcacccgtatgacgatgctatgagttcgcgatagtctcgagagcagta

SEQ ID NO: 12165 - DNA, 491 bp, Glycine max
  Coding DNA Sequence Number=SeqID_2386
ggagacgctttgtgacctgtatgacacactaagtatcacacaagctgttatcttctgcaatacaaggcgtaaggtggattggctgactgatagcatgcagaccaaagacttcactgtgtctgccatgcatggtgatatggagcaaagagagcgagatctcatcatgagacaattccggactggatctagcagagttctaatcactactgatttgctggcacgaggtattgatgttcaacaggtctcattggtcatcaattatgacttgccttcaaatcgtgaaaactatatccatagaattggtcgaggtgggcgatttggacgtaaaggtgttgcaatcaactttgtcactgaaaatgacaaacgtgtactgagtgatattgaacatttttataatacaactatacatgaaatgccaatgaatgttgctgacctgatctagtgattctgagccgaaatatggactttctgaccgtacatccttgaggaag

SEQ ID NO: 12166 - DNA, 488 bp, Glycine max
  misc_feature (72)..(72): n is a, c, g, or t
  misc_feature (94)..(94): n is a, c, g, or t
  misc_feature (163)..(163): n is a, c, g, or t
  misc_feature (165)..(165): n is a, c, g, or t
  misc_feature (232)..(232): n is a, c, g, or t
  misc_feature (234)..(234): n is a, c, g, or t
  misc_feature (308)..(308): n is a, c, g, or t
  misc_feature (345)..(345): n is a, c, g, or t
  misc_feature (373)..(373): n is a, c, g, or t
  misc_feature (403)..(403): n is a, c, g, or t
  misc_feature (410)..(410): n is a, c, g, or t
  misc_feature (440)..(440): n is a, c, g, or t
  misc_feature (462)..(462): n is a, c, g, or t
  Coding DNA Sequence Number=SeqID_2387
ggatcggacggtagattgacatacatcatcgtacgacgttagtacgctgtcgatcgacgacgctacatagtngtcggagagccgagaagcgtcngaccgcggatatataatcgaccactcatatcacacactacacgagcgacgtatcgcagacgtatacgtnangacagctgtagtgtatatcgacacgtacgtacaacatcgtacgacgacgtatagtacatatatacgnantcgcgtataggatcatcgcgatactagattatgtacatgagtagaatgagtgattcgcagcgtacgtctcacgncagttcgtaagtgaatcgacttcgctcagatgactantacacgcgtgctatgaccgcaatcgagncacgctatatctgtgtctacggcgattttnatcacgncatcagtatacgactaccgtaccaagcgtncaaatatgatcatgatagtagnagatactcatactcacatagcacatt

SEQ ID NO: 12167 - DNA, 527 bp, Glycine max
  misc_feature (32)..(32): n is a, c, g, or t
  misc_feature (72)..(72): n is a, c, g, or t
  misc_feature (142)..(142): n is a, c, g, or t
  misc_feature (181)..(181): n is a, c, g, or t
  misc_feature (244)..(244): n is a, c, g, or t
  misc_feature (368)..(368): n is a, c, g, or t
  misc_feature (413)..(413): n is a, c, g, or t
  misc_feature (472)..(472): n is a, c, g, or t
  Coding DNA Sequence Number=SeqID_2388
atgattcactctataccactactgcaccatcntgccatcgctcatacacaacaatggcgcatgtgtacatanatcgctctgcgtgcgttcacacgactcgctgtctcatctcaccaaacgcagcatctgagcgccacctgcntcaaatctcgtcatagctctctgtctgtgtcactctcantatatctcacgcgctataaagatacagctgtcgtggcatcgtacgggcgcgatatctactacngacgaccatctaccgtctgctgttgtctgtgtgtgtctgcttctagctgtcgtgctcaatacatactcaccgactgtgcagagacactatacaactatggcgcgagcagaggtcgtcgattcgngtagccgtccaccagcggtctcatatcacgcggtccttctatttntatatcatcatctctgtctcgatacgtattattgtgttatttatgagctatagtgcagncgctcagagcacaaataacggtcgagtgagtgtgatgtaacgacgacacgctacg

SEQ ID NO: 12168 - DNA, 384 bp, Glycine max
  Coding DNA Sequence Number=SeqID_2389
aaaactactctgccgccgaagccatgccgccgccgcagaaaaagaccaaggtggaggacgaggtgccccgcgcgacggtggccagcgccgtggtgtcgctgaccaactggatgcgcgagcgcgcggcggaggcacccccgaacctgctcgcggacgagcgcgacgacgtcgtggtgctccagctctcgctccgccgcgtcccgcccaagcccaccaccaagccgcacctcctcccgctcccgcaccccgtcgtcgcccactcggccgcctccgtctgcgtcatctccgacgaccgcgccggctccggatcccccgccgccgcccccatccttgacgcggccaggtccctcgagctccccgtctcggaggccatccccttctatg

SEQ ID NO: 12169 - DNA, 355 bp, Glycine max
  misc_feature (85)..(86): n is a, c, g, or t
  misc_feature (95)..(95): n is a, c, g, or t
  misc_feature (190)..(191): n is a, c, g, or t
  misc_feature (201)..(201): n is a, c, g, or t
  Coding DNA Sequence Number=SeqID_2390
attggaactcgattgattgatgagtttttagctaagtctaatgtctcacgatgcaacgatttcagagagactactgatgtaattnngcaagttgnttataaaatgttcccttggcggtactgcatctgtgaacacattgcgatgctgatgcaaacatgtgtaatattgtttttgcagataatccattggnnaaaatttggntgagctttcctgacaactgccaaggtttgtactattgcaacatcttaagtgaagtcatcagaggaaccttaaaatatgtggtcaatgaaaactggaggaaactggccttccgggaagaacctccccgaggataaggttttttgatttgcaggga

SEQ ID NO: 12170 - DNA, 477 bp, Glycine max
  Coding DNA Sequence Number=SeqID_2391
gctttcgggtcattgtctttgtcaaagactctggcatcatcaggttcgttgacctgcagatccacaccgaccccaacatcccttactcagaaacccctagtggctggacggtggtcacatggatcctggaggggctcaatgagggtttggaaacccggggtggtttgagcttccggcaggagcacgaactccgttctagtgatatctccaactacaacttgccccagtctctatttgttaccaaccccattctcagcgcccatgaagatggcttcttgtacctcaggaccaatgtcagtagcagaaccagcagcaactcgagagtgatcactgttgacatcaagcatgggaagctgctggatgtgcaggacttcgatatgcagagacccaacacctacatgcgcaccgccatctccagccatctcatgcccccagtttcaaaggagaatttgaaacgacgagcgacagtgcctcagt

SEQ ID NO: 12171 - DNA, 542 bp, Glycine max
  misc_feature (51)..(51): n is a, c, g, or t
  misc_feature (124)..(124): n is a, c, g, or t
  misc_feature (126)..(126): n is a, c, g, or t
  misc_feature (177)..(177): n is a, c, g, or t
  misc_feature (251)..(251): n is a, c, g, or t
  misc_feature (374)..(374): n is a, c, g, or t
  Coding DNA Sequence Number=SeqID_2392
taactaataagtgacgcgctctcgcctaccctatgcagcctcctcgcgagngcgacctctctcttctcgttgtcgccgtccttcttcttaccactacgcttctcattgattctctatccaatgnanctacgggcgtgttcatctatgatacaacacccgcgttgtatctaggtcgantctcgcgctcgtctctctacacgctctctaacacacgagacaagcgatcgacactgatgcatgaacgaggcgcnacccacagggactcgatatacactctccccttgaccacagagacgagacgaggctcctcattcacaatatcatagagcgcttctataaacctattctctcgcgccgcgcgcgcacaccgacanactcttacgctactctggcactcgccgcccgcgctctatctttatattaacttcaaccgttcacgcggacacacgtcaacaatagaggactatcgcctctctgcatctcacaacgtgctatatctcattctactcttaccaaatacttattcatctatgaggcctcat

SEQ ID NO: 12172 - DNA, 529 bp, Glycine max
  misc_feature (134)..(134): n is a, c, g, or t
  Coding DNA Sequence Number=SeqID_2393
atgttagtactcctatctcaacgcgctgggaggcgggaagtatctaatatataatattatctacacttcacttctgtcacgcgctggcttgcttgtcgcgtattactactcgagcgcaatcagcgtaaccgggnatacacaacaaattacactccaatatacgtggggcgcgcgctgatatataatttcccaatcgctttctcatattgtatattacattgcgacgcgcgagcgtcgctaaagttataatacatggaggtagattatcatcagtaagaatcatagaagagcggccggcactgatcctcataatatcctgcgcgtcgcttacatgttgcagacggccctctaaaaataaggtggcgcggctatataccatgcagctgtcattgttatttcgttctttacactgcgccccccttctcacttcgtatacatattgtcattcttcctcgctggcccatcacgccttcatggccggaaaaaatcctctttctttctgggctcgcgggcgcctttaatatacaag

SEQ ID NO: 12173 - DNA, 315 bp, Glycine max
  Coding DNA Sequence Number=SeqID_2394
aatcagagcagcaaccgccaacaagaccacagaggcaccagcaaaagtaaaagctacaccggtcaggttcaccccaccagaacttaacccaaacaccccttccccaatcttcaaaggcaacaccaacaaactcctacacaaagcacaagtagaagaattttatatcattacgtaaaactcacccaaaaaacagatctttaaaatacccactgacaacaccactatcataaaagaagatcctaaccttctcaagttaaccaggaaagaacagtacttaactcttagaactagactcagatccaattacaaaatcaa

SEQ ID NO: 12174 - DNA, 492 bp, Glycine max
  Coding DNA Sequence Number=SeqID_2395
ataaatatcgctcaacgagccccatcaaatcaaaatgaaaaagaagatgattggtactacaaacagaccctctctgtaccatatcacccaagtcccatagctaaaaaaaaaagaccaagaaacgaacaacggaggtatcaaggacgagctcttggctgccctgtactatagtcaaaagatagaggattaaggccaggagttagcaggaaagagcccctatgacccgaagaaacgagtcagagaaaggataaaaatctggttgctggaaatgttctcggactgatgtttcaatttgttttgctgacacgtagacaggaaaaggtttaaatactaataaaaaaaacggcttgagaacagttcttggyyggycagatatagctgagtacctcctacaaaaacctcargattaaataaagaaaaaaaggcgaaaagaagacagccgaagaccaaaaaaaaagacaagggaagatgacaggtttttcgagagtgcaa

SEQ ID NO: 12175 - DNA, 566 bp, Glycine max
  misc_feature (532)..(532): n is a, c, g, or t
  Coding DNA Sequence Number=SeqID_2396
ttagcttctcttcttgtcgggattgtgttacttaatgtatatccattgtggtgtgaatctcaaatacgggatggtattaatgtacgttcgtacatattgatggagtgttggtcaattagctctcttctcttactttattgtgccgtcggtgcctcttatcgtttttccgatgtttacaatcactcattctgctgctgtggatattagtactatccatatcggaacgcgtctctgcacgtgatgccgggcgatatggtagtccatctaggaatgtctccttatacgtgagttcgtaaatcgcactcatccgaccgaggactctatgagaggctgcctacataatgtgtaggaaaatggggcgggacagggggaggtagacgtcctcactacgacgtacgcgatgatagcttagtgtagatggtacttcgtagctcacttacccgacacgcccggggggatgcgcctctagtatttatgatccagtctccctctcccggcgttgagtaggtcgaggtttggaggtttgtgggtntgggggtggggtgtctctctacctcattattact

SEQ ID NO: 12176 - DNA, 233 bp, Glycine max
  misc_feature (91)..(91): n is a, c, g, or t
  misc_feature (99)..(99): n is a, c, g, or t
  misc_feature (101)..(101): n is a, c, g, or t
  misc_feature (103)..(103): n is a, c, g, or t
  misc_feature (107)..(109): n is a, c, g, or t
  misc_feature (113)..(113): n is a, c, g, or t
  misc_feature (122)..(122): n is a, c, g, or t
  misc_feature (127)..(127): n is a, c, g, or t
  misc_feature (134)..(134): n is a, c, g, or t
  misc_feature (148)..(149): n is a, c, g, or t
  Coding DNA Sequence Number=SeqID_2397
ccagtctacaggtatgcaattcaaacatgtcataataagctgtttttctaggagatataaggttagtggtgggagaagagaggggagcggncgtgggtntnancccnnntttnacatttctnccttntttttcncgctttcattcgcnngttatacaagacggaggtcctcttattgaccagattctcatcatatactaggtgaattgcatcactacaacatgcaggcatcct

SEQ ID NO: 12177 - DNA, 566 bp, Glycine max
  Coding DNA Sequence Number=SeqID_2398
ggcatttattggcatacctaactagaaaaaagcagggagagaatatagcaattcctatttgaacaggtatttttagatgaatgaggctcagatgccctggatgaaaccattaatctttccccatttaaactagctgaaaaattgttaaattggaaggggatttgtaaattgtagctactctattcagattcccagagcttacaatatatgatattatctgttaacactttaaaaaaaaaaaaaaaaactcgagttttttttttttttttttttttttttttttttttgggcaaaaggtaaaaaaacagagtcaaatatggggtcactttgaatgaacccttatcatttagtctcaatggctacaatggtggcccctttgcaccaggtaaatgttctaaatacgtggccaattgtagggctggggattcatccactgaacccttatttgggggacacttcttattacttgctcatgaatttggtgccactttatccagaaaaaatattagggctcgcaaaggggacaaatgggatcactatcccacacactacttttgggcaaaatc

SEQ ID NO: 12178 - DNA, 556 bp, Glycine max
  misc_feature (312)..(312): n is a, c, g, or t
  misc_feature (322)..(322): n is a, c, g, or t
  misc_feature (357)..(357): n is a, c, g, or t
  misc_feature (399)..(399): n is a, c, g, or t
  misc_feature (523)..(524): n is a, c, g, or t
  Coding DNA Sequence Number=SeqID_2399
cacatattgaccctgccgcataatccccctcttacttcaaagtaatcaataacctcctctacacctaatcggcccacacaatatatggctcgcctctctccattctctcatgcgcacatataacgctagtagtcccctcttataatcacacaagcgatgattatcgtggatactcgccctaccgcggttgatcacagtgaatccgttattatatctcccgcactcacatatctgagggacaacacatctgtttaccctcactccacctctgctaaccaccaagtcagacaccccataaatctcaacagcgtntctttatcgngtcgaccgctagagtatgtgctccgatcatacatnctctccctaatatctcgcccagcttttataatacaggggttntttccaccacgaatctacaacaaatctcgcgcacacacagagacaaatcacctctccctctcaacactgtgatcatctcatcaatgtaacggtaccacactccacaccctcattctatgtccannctatgacactacgtcgctccatagtcatataa

SEQ ID NO: 12179 - DNA, 526 bp, Glycine max
  Coding DNA Sequence Number=SeqID_2400
agcagctgtcacacaccggtgtaagcgccgccggcggcaggaacaccccgatctcgacgatagatcgagaaagcgatggcgcttaccaacttcatcgtgacggtggccgttgtcggcgcgggtgtgctcctcttcaccaccgacatgcgcaggtccggcgccctcttccgccgcaatgcgcgccagctccagcagtggctccaggaggacacggcctccgccgcgtccaagtccacgaaagaagcagctccgaagaaacttgactcaactgtctccaaggagaggccaaaggaaggcagtcactgattcgagttgtttatatgattgctcttgcaccacccactggtttctctgcgccctgttgaatcggaagcggtcaattataaagcagaccttgaatgaagcgaagcgtgcctttgaatgcaacctgtcgcgaagtgctgctctacaaccccatagcgagtgaaagcttggagcttgttagtagaaccgaaccgttgagcgatttgcattgctgtttacagaa

SEQ ID NO: 12180 - DNA, 255 bp, Glycine max
  misc_feature (43)..(43): n is a, c, g, or t
  misc_feature (59)..(59): n is a, c, g, or t
  Coding DNA Sequence Number=SeqID_2401
acgccactatcatcgaccaagacagaagcatttaggctcaaancaccaacttccctcanttcaaacctaaagaaataactaccatcaataataactttaataagcctaaatcacttactccaactaaattatatatcaataacaccaaatacataatcatccaggataagcctaatactatcattcgaagaaaaaaaggtcctaataatattactataaaaaagaccggtacgaccttgatcattagcatttatg

SEQ ID NO: 12181 - DNA, 176 bp, Glycine max
  Coding DNA Sequence Number=SeqID_2402
gctgttgatttctcactggcaaatagtgatgaggatacctggtggaaggccaatattagagagacaaaggaagaactggcagctagagggctgaagttcctgaactggtatgagttgggtatcatcagaaacttctaaaggtttattttacgagtttggtatgtcagcaatactac

SEQ ID NO: 12182 - DNA, 514 bp, Glycine max
  misc_feature (329)..(329): n is a, c, g, or t
  misc_feature (488)..(488): n is a, c, g, or t
  Coding DNA Sequence Number=SeqID_2403
tgaggacaggatgcagggttataaagagtggtggtgatggcgcaacgataagagacgatgacgtgtgcttcgaatgagcgtagtctatatatcagaacctatgaattatgtggcgtactaatagacatgattagtgatgtgtataggtgttatttgtttcaggatggtatggttcgtgagtgggtgaggagaaaagagaagacatgcgacaagagatatgtggaaccgtagggatgacccggtgaagatgaggaggcaacagcgataaacaaagtagtagagaataggtaagataataaattaatagttgttatgtgtgcttcagtganctgataggtacataaagactactcgtaatagattgaaatggagagtagaagattagtggggaggaggtggcgtatgtgcgtcaggacacacacagacaaaggctctccttgcgatcttgttggtgttatcggctgcgggtggatatgtcgtggtgtagnaggtaacaactcttaggttcatctgt

SEQ ID NO: 12183 - DNA, 481 bp, Glycine max
  Coding DNA Sequence Number=SeqID_2404
gaaggtgaccagagaatcaacaatttaatccatcaaagacatgctgaattaatggatcttttgcgtagagagtcatctgtaagagaagaaaaccttaatttattaagtggaactcttgaatctgacctccccaaactcagcgaatccctcaaaaacttaaatgatgatagacaagaagtcgacgaagcaatcaccaaaaagttccagacagaattagtcaatttaagagaactcgttgatcaagaaagagctgaaagagaagagtctgaaaagataattcaagaaatgctcaagagtgtctttactaaagtcagagaagatatcgaacttgaaagacacaacagagaagaaactgaagaaactttgatgattttattaaatgaaacttgccaaaaaattaatgatgcaggcgatatctaaaacactgttgagaatatttttatgaatacatcacaattgttagttgctcactatgtcattc

SEQ ID NO: 12184 - DNA, 599 bp, Glycine max
  misc_feature (103)..(103): n is a, c, g, or t
  misc_feature (374)..(374): n is a, c, g, or t
  misc_feature (453)..(453): n is a, c, g, or t
  misc_feature (501)..(501): n is a, c, g, or t
  misc_feature (520)..(520): n is a, c, g, or t
  Coding DNA Sequence Number=SeqID_2405
tggcatgatccaccgtctagtttttactcatgcactcgacatgtgactatcctcacgcgtcgaccctgcctggtatctatctcatattcgaacgctatgcttncacacgtgcacctactcatcccagtatgtagttatattctatcactgacgatgtattatgtctgtattcggctctcactccagcagaggcctacgtctatgagagtattaatgagtcagtatatgtacatcttagttagcctcacgcgcggtcgagtatctacgtcctctagacccgctccacccatcaccgcacatcgatatcttctcacaactcgtagtcaatctccgcgtctcccgcttgtcgtactatcctccgctcagcctgctcnacagccttcgcgtggacctaccacctcaacatctgactctatacatacgctctttctacggtccatagccatcgatcancatatctgataatcagacgcattatactgtactacacactctcgcgcnccgtaagtgcatacacatnaccatatatgtcgaggtgtgtcaactgtatcgaacgacacaacacacaccaaccactcaccgcactcacgtgatgtgaa

SEQ ID NO: 12185 - DNA, 571 bp, Glycine max
  misc_feature (526)..(526): n is a, c, g, or t
  misc_feature (544)..(544): n is a, c, g, or t
  Coding DNA Sequence Number=SeqID_2406
gtgtcgcgcgtacatgactgcattggcgcgagaggctataatgtagatcgtgagtgttgttagaatagcatatcgtcggctcgagagcagagaatactacacagtgtctacgctccccacgtgtagcaatcacgcgtaagctacttgacgactacatcatgtgtgtctgttttatgattgcatagatcactctacatgactgcctgaatcatcaggctagcgcagtttgatgaaatgaccatcaacataccaatcaaattagtgactatatatacatcatccgggatgtctcgctagtactataggagctgggcgtacgaggacgtgtgaggtataagtgcatacctccggcgattacttctgagttatcacatggagttagtgaggagcacggtgagccccacgcgagctgctgccactataatgaccagataagaatacatgagaataatataagaagttactctcatcctccacaaagaagagagtgccccagacaacatataggagtcgatggcgctgaggncaggagtatgtggtatanaataatgaagagacaaccgcaccaccc

SEQ ID NO: 12186 - DNA, 178 bp, Glycine max
  Coding DNA Sequence Number=SeqID_2407
tcgactcgtgtacccctgcagtatgcttttcttccctggattacagtcaacagtagaccttcacaagagcttgtggcataggatcttcatggcttggaatggaggtttcgacctctatatatgggccaacctctgaggcacctgctcacaactgggaggagcgcatttgtcaacaaaa

SEQ ID NO: 12187 - DNA, 588 bp, Glycine max
  Coding DNA Sequence Number=SeqID_2408
atataatcccgcttatggacaacaaggttatgatatgatggctgcaaatcctcaaaatgcgaatcctagcgcatcagccactgcttcaactaaaggaagtgaagcaacctcagccaatcccaaccaaatggctgctaatccctatgcacaaggcgctcctagtggatacggaggtgaaggacaatataatccaactgcttatggctacaatcctatgccacaaggagattatgctaactctgcttattatggtcaaccaggtatgcaacaaggtcaaggaggtcaaccaaaatatggaggaggtggccaagtacaatcaccttctcaaatgagcggtggtagttatcaaagacaaggtcaaccagatgttggacctattaaaggaagtgccaagaaaggaggatctgagccaagacattatcaaccatattgatagatgtattatttaggatttgtgtacttttgaataaaacataaaagaaaatttgattttgattttaatctcttttttcaaagaaagatgagattctgaattttagtatgaatataaataaaaattgtatggtgcgtatcatcatttctacaaca

SEQ ID NO: 12188 - DNA, 568 bp, Glycine max
  Coding DNA Sequence Number=SeqID_2409
gtctgcttcattcgtctcgacatcccccgcgtctccggcgatggcccttccacgcatgatccccgccatcccccgcccggtgccgtcgtcggcgatgcacatgccgcagtgcgcgccgatgaatgtgccarcggcgcggatgcggcgaccgacggtcgaggcgttygcaacttcgcgagtgaagcagatgaggacgactacgacgtggagatgttgtcsccgcacgaratggtggcgcgctcgccggcgtgggagtcgcccatgacgaccttytgggtgttggagggcgctggacacacgctcccatgacgaccttytgggtgctggagggcgctggacacacgctcaaggggaggcacctccgccaggtacgcaatgccgtgtggtggaagacctgcctgctcgattgatccattgcgtttgcatttggtagctgcctacagctattgaatttgtgtgtttgaattattttgaacattacacctgtaaaatttgtgttgtattactcaccattccggcattactyttatttatgaactatctatttgagctctcaggagacattgaa

SEQ ID NO: 12189 - DNA, 433 bp, Glycine max
  misc_feature (211)..(211): n is a, c, g, or t
  misc_feature (214)..(214): n is a, c, g, or t
  misc_feature (270)..(270): n is a, c, g, or t
  misc_feature (279)..(279): n is a, c, g, or t
  misc_feature (319)..(319): n is a, c, g, or t
  misc_feature (331)..(331): n is a, c, g, or t
  misc_feature (341)..(341): n is a, c, g, or t
  misc_feature (362)..(362): n is a, c, g, or t
  Coding DNA Sequence Number=SeqID_2410
ccccgccaatgtgttttagggctgagatttattttatcctaccgtattgggtctgaacctatgatggaagattgactctcggaccttggaaacgagtaatgcaggacatgctggggccaatttggtaccacttgtggcttcaaataggataggaaaggagattattgagactgagcatggaaaaagtgagataacattttatggaaactgnttnataggaggacctactggagaaattgtttgaattgctgatgataaagaggaagctgntcttattgntgaatttgatttggacaatatgaaatgcatgaggcattgntggggtgtattncgtgataggngtactgatgtatataaggggnttttaacattagatgggaagaatgtggtggaatgatagataaacatgttacgttgtaactggtatagaatt

SEQ ID NO: 12190 - DNA, 558 bp, Glycine max
  misc_feature (165)..(165): n is a, c, g, or t
  misc_feature (391)..(391): n is a, c, g, or t
  misc_feature (517)..(517): n is a, c, g, or t
  Coding DNA Sequence Number=SeqID_2411
ctacgcgggtgagcactcgtaattaaagaatcaggatattgtgggtcattcagataggtagacgaccggaacacatagtataagacgcctcctgaaccgtcctcacccacgcacaattatagacctaaatgagtgcgaggtgggtagagacgggaccgggaggcnacatccatgattcccgattccataaaacgggtgtacggtcttcaaggcacctacacccacaagcagttttttattactcacctctcctgagaacgacctaagataaggttgtggataaagattagaaacatgaacgttattagttcgactgtacgaaatatttgcttcaacgtaaatataacaatattgacgactgtttccacgataacactgtcgcgctggtgtngggccccctcaaagacggtaactacagcgcgtagatcatatgattatcccttctatgagtcggattgtctccctgataagtttccctccactcaacttcttcgtgggtgccgtctcgccgtcggtnggtatagggagtcctccagtccttccgtatggacaaaggga

SEQ ID NO: 12191 - DNA, 240 bp, Glycine max
  Coding DNA Sequence Number=SeqID_2412
agctggagtttctgcggcggctacagcagctttgacagctgtgatgagcagcccggctatggctttggtggacgacaggatgtcaactgagggaaccggcttgccctttggacttagcaacaacctcttgggatggattcttttgggagtgtttggtttgatctggactttctactttacctacacttcatctctcgacgaggatgaagaatctggtctttcactctaaacatgaactat

SEQ ID NO: 12192 - DNA, 117 bp, Glycine max
  Coding DNA Sequence Number=SeqID_2413
gtaatacagatagtggaagaccctttgttgaaagataagacccattctaccctagtggtgcgttaagattctctagtctggtcgatgactctgttgcattcgttgagttgaatgtct

SEQ ID NO: 12193 - DNA, 485 bp, Glycine max
  Coding DNA Sequence Number=SeqID_2414
ttcagtcgtttcgttttggcgaacacaaaagagaagaagaaaactttaccgctgccgatctccctccgtggtgggccgtgctcgtcaccgccgctatgtgagggaggatctcctccgcctctttagtttaatctaagttttatttggtttcttgtctttttgggtgagggtttccttctcagtccggtgagtgctagtttggctctgtctcaagtagtctgtgcttgtcccttggtggcttgtcttccttggtgcgtcgcttgacatagtacggtggttggttcagttcttggtccagatctaccggatcttgggttgataaatttgtagggtcttggagtcttttgtggctgtttcggtgcttggatccctttagtatctgtcggtttggtgcggaggggtatgtttctttgaggctttttttttgcaacagtgaagcgtcccgaggatactttggttgctactggcttctctccggtgaaaag

SEQ ID NO: 12194 - DNA, 332 bp, Glycine max
  Coding DNA Sequence Number=SeqID_2415
caacggcggctactacgcggagatacactccggcgatcttcggctcggcctcggcacgtacgggacggcgcgcgaggccggctgcgcgtacgacgcggcggtgtggcgcctaggccggccgcgcggccagatgaactttcaggatgtctacatgctccaacaagcgctcgaccgtgccccgccaccgcgtctgaacacggcataagaccgtgcggagcacaacgagcggcagcgccgcctcctcgttgcccaggaggacgagcgggtcatgacggagtggcgccaccgccacccggaggacgtcgcctacgagcaggcctactgggcaaggc

SEQ ID NO: 12195 - DNA, 486 bp, Glycine max
  misc_feature (227)..(227): n is a, c, g, or t
  Coding DNA Sequence Number=SeqID_2416
gaataccaaagtgtatacaagccacaaattttaacttcaatgtcaccaatatcattgtatgcagagggactcggtcgtggagtatcgatcagcatcccgattaggaaactttgattttcatgtcaatagaaagagaatcaaggcattgcgactagagttggaaaagaaaggatgggcatctcaagactcaatttaggacatcctaaccctaacccttaataacaggncgtaatatatttagtataaagtggaagtttaaaaaagttaatattaaagatgaacacacttgaccatctcaaaactttttctacttaagaggattagttatttcccctcaatttttgaggatcacaataaaaactatattgacatttgcaagaaaaattaattgctattgtatttaatattggagtcatagttgtacatttttcatacttaagatctgagatgatgaatgtaaggtgactttagtggtgacggaattaa

SEQ ID NO: 12196 - DNA, 405 bp, Glycine max
  Coding DNA Sequence Number=SeqID_2417
actactaaaaccaaggctcctgctgccgtcgctgaccccaagagagaaaaacttctcgccatccaagaaagagaacaactcaagggtctcttgttaccaaattcgtcgagaaatacggcaaggatcaaaagggcgataaagactttgttaataaacaagtcgttgaattcatgaagaacgaaaagcttactgaagaaaacctcaagaagcttgaaaacaaaatcaaggttggtgttactgctcaacctgctgatgctgcctctgttaaatctgctgccaagagcgagaaacaaagccatcaagttggtcaacaccaatatgctcatgatcatcaaggtgttcatcatcatcaccaccatgatgatgataatgtgtccaccacttcatcccagaaacccaagtcag

SEQ ID NO: 12197 - DNA, 260 bp, Glycine max
  Coding DNA Sequence Number=SeqID_2418
tcctctctttgtgcagggacacagtgtatggatcctttgagatattttgggcttgacatacctggcatgcatctgggtgtggttggtcttggtggactaagccatctggctgccaaatatgcaaaagaccttgccattgaaagacactgacaacataacctgtcctaaaaataaacataaatccatacaacatcttggagctgatttttttgtggtcagcagagaccaagatcaaatgcaggtgcctattactaattaat

SEQ ID NO: 12198 - DNA, 310 bp, Glycine max
  misc_feature (35)..(35): n is a, c, g, or t
  Coding DNA Sequence Number=SeqID_2419
gatggcattgactaaccgcgaatggggacgggcgntatagcagctgctggcgtggtcacataaagcagaagtttatttgctgccatgggtgcataaaccagatggttatatgccgccatgatcgcctaaacccaaagttttattggcaaaacttagcggaaaccagagtcatccgatgaccccgagaactggggtttgcccaaaaaactgaggaggcaaccaatgggaaatgaagaactgaaaaaggggttggtggaaacgaaaaagggggggggttccggatttcctgagacccctcttcggtgttggg

SEQ ID NO: 12199 - DNA, 540 bp, Glycine max
  misc_feature (156)..(156): n is a, c, g, or t
  misc_feature (159)..(159): n is a, c, g, or t
  misc_feature (176)..(176): n is a, c, g, or t
  misc_feature (392)..(392): n is a, c, g, or t
  misc_feature (498)..(498): n is a, c, g, or t
  Coding DNA Sequence Number=SeqID_2420
gtatactatattgcaggctgcggcctgtccttataccacccaccgccccgccgttgatgctgtggcgactggtgcggcggaatacacttaacactcggcggccgcgctggcgtctatctcatttatgtacaacgtatagtggcgtgcggctcgtcngcntcggcaggtcacacaantacgcaccagccgcgcgttatctgctccggtcgcgcggcgctggttatttaactttatgggtgcgcccccgccgctgcgtatactttgttttgatcgtaccctcgctcggtgtttataagacggtggtgtggtgtcgtataatctgcgttcgtaggcggagcggcggcggcgcgcacgaagcgcgccgcgcgcgccccgactcggtgcggtgaagnccacccgccactacaccgtctggtgtttcctttctcttgtctacacttgcgccgcgctctcctccagtattactatcaaccacctctctctgcggtgtgctggcgngtctgcgccgtggcgggacaatcacctgtcggcggcgtgcgt

SEQ ID NO: 12200 - DNA, 520 bp, Glycine max
  misc_feature (113)..(113): n is a, c, g, or t
  misc_feature (120)..(120): n is a, c, g, or t
  misc_feature (148)..(148): n is a, c, g, or t
  misc_feature (370)..(371): n is a, c, g, or t
  misc_feature (375)..(375): n is a, c, g, or t
  Coding DNA Sequence Number=SeqID_2421
gccagcccaacatgataacgcagcgttcaccaagtggtagaggttgtggtttattgtatgtgagtcacgtagagagtcgtgcgttagttgcactacttgtcatcttcgctcantgtattntaaactccgtgagctagatttaagaganctcagcaggagagagtacgagttgtactcgccgttatttcgatgtctttctctatgttattgagtctgcttgtctccctcgtaattctttctccagctgcccgatgcgtctcaccctctatccctccgccctttctccgccgtccctctcccccttcctactccttgtcccgcgtagagttattagaccgtaataaatgtggagatatatgcggtcgggggnntatncccaccctccccgccgtggcgagcgccgagcgagcccaagggggaggggcctggcacctctccgtcagtgcctctctccactcgccacactccccgctcacacaccctgccttcctcgcctacccgaatggtagtgcgactcgcc

SEQ ID NO: 12201 - DNA, 576 bp, Glycine max
  misc_feature (96)..(96): n is a, c, g, or t
  misc_feature (228)..(228): n is a, c, g, or t
  misc_feature (370)..(370): n is a, c, g, or t
  misc_feature (400)..(400): n is a, c, g, or t
  misc_feature (402)..(402): n is a, c, g, or t
  misc_feature (435)..(435): n is a, c, g, or t
  misc_feature (457)..(457): n is a, c, g, or t
  misc_feature (490)..(490): n is a, c, g, or t
  misc_feature (518)..(518): n is a, c, g, or t
  misc_feature (549)..(549): n is a, c, g, or t
  Coding DNA Sequence Number=SeqID_2422
gagcgtgtcacttatagcttcggtcttgggtgtatactatgtagctgtgtgcgtatgctgtactgagacaactatgatgcgtatagtcttctacantatgttatgtcgtcgtcgatgtgtgtgatcgctatatgtctgctcacgctcgcgacgttgcagcaactggtatcctctacttcgtgttgcatattctacacttttatcggacttatgagttatgtctatgtngtgcgcggtgacttataactatatctcggtgatatcgcgctcatggtcttgtctgctcgcttcatgcattcctactctgctaccttcgcgccacgcacatacaatcctcgtcgggccagcgcatatcagctcgcattatatncatcagaatcacactacatcactacgatantncagcaagacgactcgtatgtctatatacagctncggtgttgtcgctgtgtcgctnatgactgtatcgtactcatctgtatgtgctcgntcagtcgctcatgatatgtatcattatntgctatcaacatgatattacatgactatttnggattgactggacggatgtgacacttc

SEQ ID NO: 12202 - DNA, 412 bp, Glycine max
  Coding DNA Sequence Number=SeqID_2423
atttattgggatggcatagacgcacagggaactgacggttcggtgctgggtgtcatcactgaagctgcgaatgctgcattgattcatgctggtcggatacaatgggccaacgtagaacacgggaacgcaagagtgacagtgcgctgcctgcggtagtgaaagggagtagttgagtttgtcttcacttcgattggtctgttaatggtaccttgctgcatgctgggttgagagcgagggagagccccgccgacgagtccggcggagctcccgcggccgagatcacctccatccgggccgaaatcatcaactaaagcttcctttatcatattggccaacagcttattcaggagcaaaagtagaggcagtttaaagatgggttacttatgagatttttgcggagaccagtgtccct

SEQ ID NO: 12203 - DNA, 520 bp, Glycine max
  misc_feature (359)..(359): n is a, c, g, or t
  misc_feature (415)..(415): n is a, c, g, or t
  Coding DNA Sequence Number=SeqID_2424
gagagcgttcatactgacagcaggcacagacactacactgctgcgacgacggtgtcaagtgtacactcctcgttattatttactcggtgtgatgcacgaacacaacattcaacctacacaccacacgcctatcttccatctcgagtagacggcgatcggacgaacataaacgagtggagcgacagcgagctataaatagatagataaaattaataacgcagcgcacacagtcacgtggctcacggccgtggtcgtcgtgtataatattacgaatagatacaagcagcgctgtgtggtgagcgcagggcggcgtgatattacaagtgcatacgagctactatcatatttatcgtaaccgnctgcgcgccggagaaactcagaatgccctccagcatgacgatccaagacctcaccnatgtgtttcccgcgctgtgggcgcatactgccttcgaatgtcatatcaggagaagatagaggggagacctatggtcgcgaagcatatcgctcagggaaggtgtta

SEQ ID NO: 12204 - DNA, 439 bp, Glycine max
  Coding DNA Sequence Number=SeqID_2425
tcaccttccgacagccgagcgtgggcagcggagagatccagtgagtcagtcggcgccgttcccgtcccagaggtcgtccctctcctgccgcaaggcagcctccgcctcatggtacgttcttgcgccgaagatcgggtcttggggttgcctgtgatggggacggagatggtggagctcggggcggggataatggaggtggtgatagtggaggtcgtggccgcggcggcggcggcggcggaggccgcggcgagcgacgagggtgtcccccttctagcggctattccaggcttgtggcgccgtcttcggtgccggtggcaccattcccgtgcctgccgaggatgaggccagaagacggttcagtgaagtgaacaaattactcctttcatcgatgcatgcaaagtcatatttttgggttgatagttcatactgatctgcgtga

SEQ ID NO: 12205 - DNA, 512 bp, Glycine max
  misc_feature (125)..(125): n is a, c, g, or t
  misc_feature (132)..(132): n is a, c, g, or t
  misc_feature (162)..(162): n is a, c, g, or t
  misc_feature (214)..(214): n is a, c, g, or t
  misc_feature (313)..(313): n is a, c, g, or t
  misc_feature (322)..(322): n is a, c, g, or t
  misc_feature (350)..(350): n is a, c, g, or t
  misc_feature (357)..(357): n is a, c, g, or t
  misc_feature (394)..(394): n is a, c, g, or t
  misc_feature (407)..(407): n is a, c, g, or t
  misc_feature (411)..(411): n is a, c, g, or t
  misc_feature (461)..(461): n is a, c, g, or t
  Coding DNA Sequence Number=SeqID_2426
tacttagcgcatacgatcattcgatatctcgagcgcgccgccatcctggacgtacgattgtattcattgtcttgatctctgcgcgacggctgtcactctctatctgtaagcgatgtactctgtanctgctgnactgcctggcatgcgtactctacatcgcgntactaatatagtaagatatctaatatcacatataaacgatcactctcacacnaatacacgcgtctacactctacccactgctctttaatctcactctctatcaagtgctgctatggataaatgacacatcatacctaccacgtcgtaatcnacaaccagngactatattactaccacatctgcacgcngaatgtnacatagcagaaagacgagatgcagcatacatataacngtatgaactagtnatancagcacatcgcgcaccacatatagagtctgtgactccaacgtcaccgcanatactgaatcatggatggatagttgatatacacgacgtgaccactatcagc

SEQ ID NO: 12206 - DNA, 138 bp, Glycine max
  Coding DNA Sequence Number=SeqID_2427
agtacattacaattccactccactccggtttatatcttgcttcccacttccacttatctacagtaagcctcaatggtgaagcaccatccggaagaccaggttcaagttccatcgagaataaggcagtttattttggac

SEQ ID NO: 12207 - DNA, 533 bp, Glycine max
  Coding DNA Sequence Number=SeqID_2428
gaccactgagataaacccaagccttggggggccactttcagtttcagaaacctaaagttcctagacttctctggatttgtccagaactacacgttttgcaatgtcatcagcaataccaatggttggcgtgctaattgtgcccagaataaattaaaactgcgaaaagaagaggaaaaaaaccagcgattcagttaaagaaagttatgggcaactgatggtgcttgcttagtggaaagaaccatgacacggccttttgaccctgttggaggtggaatatccctgcacccctcttcaagaatatactaacgaattcctataatgtcccactgaattcctttagttaaaaaaacaccttccaccttctaccctccacccccctaaaaatcacattaatgaaaaaggagcttggcgtgacctagaaatactatgactctgagtgtggccaagaccctaccacttgtttgttgtataaaacttgtttactttttttttttctaacagttttgtatagcgtgtttggttctgtgtcaaaa

SEQ ID NO: 12208 - DNA, 380 bp, Glycine max
  Coding DNA Sequence Number=SeqID_2429
aacttcagtcgagatcagcttggcaatattgcttggtcatatgctgttcttgggcaactggaccgacaattcttctcccatatctggaacactctgagccaacacgaagagcagagagtctctgatcagtacagggaagacataatgtttgcatcacaggtatatcttgcaaatcagtctctgaagcttgaatacccacatctcaatatgggcttaagagatgatctggaagagaaaataacaaaagcggtgaagagcaaacggttcaatcagaagacgacctccttgtttcagaaggatgttggacgtcttttatatagtaccggacatgaatgggttagagaatacacggtggatggttacactgtcgatgcggtgtt

SEQ ID NO: 12209 - DNA, 317 bp, Glycine max
  Coding DNA Sequence Number=SeqID_2430
ccatgaactcggaaacgctcacttgagatcgaaccaatacggacccggtttgagacaattcaaattcattgaaaaacacttccaagatttctacgaagatcaatttgatttccacacctattgtcttagaaagtacgatcttagagcttatgttgctctcctcagaaaagaagatgatatctacaacaataaaatggtatatcaagtccgctattagcatgatcaagggacttcaagcctatgataaatatcttcctgagcttcaaagacaagaggaagaagaaaagaaaatgttggaaggaatggacgctcatgaa

SEQ ID NO: 12210 - DNA, 479 bp, Glycine max
  Coding DNA Sequence Number=SeqID_2431
gtttcacttttattctccccgctcatttttgtttgggaatttttaagggaaaccatttttccccaggaaagcctttgtcccctttttttcccaagctttttaacccccccctaaatgaaaaaaggttacccctcagggccccggttccgaatatttttccgggggcccaaccccacaaaaggggggcccccccccaatttttttttttttattttattttttttttttttttttttttttttttttttccacccttttttttttttttttttttttttttttttttttttttttttttttttttttttttttttttttttttatatttaaacacactcattgcacatagaagcttaaagggctgtacttaagggcgtaaagaatgaaattctgagttctaacgccactaaccctatgctgacgcgacttcttgagaactgtaagagtcccaaacatccggttacaaagacgccccacag

SEQ ID NO: 12211 - DNA, 583 bp, Glycine max
  Coding DNA Sequence Number=SeqID_2432
aatccaatctcataagtcgaagcaaactgactacgaaaatagaataaattatctccaagctgatctcgctaaactgcaagatagaaatcttgagttatctagacaactcgaagaatggaaactcaagtacagccaacttgaaagaggcaatgaaagcctcaaatattccctcgaaaatgatytcagattaaaatgggaaagagaaaagagtgatttgaattcgagatgggcacaagatagagctcaatatgaagctgatctcgcacgatgcaaaragagaatttcggaaatcgaaacaaaggctatccttttaggcacagaaaatgaacacctcaacattgttattagagacaaagactctgaaatcgaagttcttcgaaacagattgttagaagctggmcaagaacaaagaaagcaactcgatcagcttagagaacaacttgaaatcaccttcaatcaaagactsgaaatcgaaattagatccagagcaagtcaattggaagctgcaagagattcacttgaaagtgaactcagaaacgctcaaaatagaatcaattatcttgaagatcaattgacctcatta

SEQ ID NO: 12212 - DNA, 588 bp, Glycine max
  misc_feature (140)..(140): n is a, c, g, or t
  misc_feature (195)..(195): n is a, c, g, or t
  misc_feature (210)..(210): n is a, c, g, or t
  misc_feature (283)..(283): n is a, c, g, or t
  misc_feature (322)..(322): n is a, c, g, or t
  misc_feature (354)..(354): n is a, c, g, or t
  misc_feature (357)..(357): n is a, c, g, or t
  misc_feature (363)..(363): n is a, c, g, or t
  misc_feature (382)..(382): n is a, c, g, or t
  misc_feature (395)..(395): n is a, c, g, or t
  misc_feature (417)..(417): n is a, c, g, or t
  misc_feature (447)..(447): n is a, c, g, or t
  misc_feature (463)..(463): n is a, c, g, or t
  misc_feature (544)..(544): n is a, c, g, or t
  misc_feature (550)..(550): n is a, c, g, or t
  Coding DNA Sequence Number=SeqID_2433
gacagcacaagcagatcagagtactgctgctatcacatgcaaatactatcaccgtccatgcacatctcactacatcaccgccatccaacatctgatacgctattcgtcagcgctcaatcgactaacatccatatagtacncgcacgacacgtacatacgtacacgactgacgcgctcgcgcatacactcgacatnatattatatactatnacttatacactgatgcactaatatagactcaagaactacatagaatacacacgtctctatcgacccatgctcnatcagcaccgccgcactcaccgccagtcgcactatccancagcaagtcatataacacaaacaagcgacaancanatgcgnagagatatgctaaaacaangatagtgtctgtnaatattatatatcatagagctngtagcagcgatatgcacaaggaaccatctnatacatatacgacgcnttgcggtcctctccatctgacacctatcgtctcgccgagatttgtatctgcgtaattgtattgagtgtgctcgctcactcnatgccngctgttgttacgcgactatcagactaacaacatcccac

SEQ ID NO: 12213 - DNA, 460 bp, Glycine max
  Coding DNA Sequence Number=SeqID_2434
gaagatccaatataaacccgtccaaaaagtcgaacaacttgttgaccaacaagtctttgataagtattgtactggtgttagaggaatttgcttcatcgctttcttacctcatatctatgactcatctgtcgaagaaagaaacaactacattcaaattttacaagagctagcaaaatctaacagagctaaccccgttacatttatttgggcccaaggaggtgactactacccaattgaagagtctttgggcttagcctctggttacccatctctggtcgcaatcagtgtcaacaagatgaagtatgctcaattggctggttcatttgagaagaagaatgttgactactttgttaagtcattgattgcaggcaaacaaggatcgtttgaattaagagaagtaccmaaaatatcaaaagttaccaagtgggacggaaaggacagccagcctactcaatatgag

SEQ ID NO: 12214 - DNA, 487 bp, Glycine max
  misc_feature (86)..(86): n is a, c, g, or t
  misc_feature (228)..(228): n is a, c, g, or t
  misc_feature (314)..(314): n is a, c, g, or t
  misc_feature (407)..(407): n is a, c, g, or t
  Coding DNA Sequence Number=SeqID_2435
tatactctatatacgcactctacaaatcagcaaggtagagatatacaatcaagctaacaataaacataaagatgaaattataccanagagtcggtataattcatcaaaatttctattatatatttaaaatttttctcaaacttataataatatattaacactgaataataaacgatgaaaagtaaaatatcatttaataatgtaaggataggtcaaaatttcaacagnggcgcagcattcaaaaagtcaaaatttgaattaagcaacagagtttcttctcttttttcttttattcaactgattttccaaatcantctttctttcttggaggatcctattttggatcttttcccattttaattcgatttccatctcacttggcaaatcatgagctaaaagctcttganccgatggtctttcaaatggattcttgctcaacatttttctgatgagcatctttaatcgttgagacacaccaggaatcgct

SEQ ID NO: 12215 - DNA, 466 bp, Glycine max
  misc_feature (34)..(34): n is a, c, g, or t
  misc_feature (151)..(151): n is a, c, g, or t
  misc_feature (186)..(186): n is a, c, g, or t
  misc_feature (305)..(305): n is a, c, g, or t
  misc_feature (321)..(321): n is a, c, g, or t
  misc_feature (350)..(350): n is a, c, g, or t
  misc_feature (397)..(397): n is a, c, g, or t
  misc_feature (408)..(408): n is a, c, g, or t
  misc_feature (413)..(413): n is a, c, g, or t
  misc_feature (421)..(421): n is a, c, g, or t
  misc_feature (440)..(440): n is a, c, g, or t
  Coding DNA Sequence Number=SeqID_2436
gagcaaacgcactgcaaatgttaatgtactcganacagacgacgcacttcatacagaggtctaatgagctgccacacaaaataagcgatgggggtgtacagcacacatacacacaccgcattgtaagcatatacaaaaggaactgcatgcncatgatgcttgcggattgttgtctcctcggcaagnggggttttaattctgttccctttccgacccacttaatttccttccttttctgtcatcatggctcgcccgaacttcactacacacgaagtccaaacggactgcagctgcacgcaaaaaanactgcgagtgccctancactgaaccggatcatgtgtgcgcacganctgtgcacgccgggctggagccctgcaggatctgcatgaccactcancgcggcagtanaaggnggggaggnggcaaacttcaccgatggnctccatcgacagccaaaactgggtga

SEQ ID NO: 12216 - DNA, 520 bp, Glycine max
  misc_feature (65)..(65): n is a, c, g, or t
  misc_feature (493)..(493): n is a, c, g, or t
  Coding DNA Sequence Number=SeqID_2437
tgcgcagctgtgaatatgaggtactgaagtcatagcattcgtgcttgtgcggtacagtatcatgngcgcattcttctgagtatcatagtctacagtcactcacgatgcaacgcctccgggcagtccatatattcactaggttgacatgtgtgcgagacagacgcagatcaagatagcgctgcagcgatcgatcgtgcggtccaggtgtgaagatatactagtaattatatgcagcgttgtaaagtattatatagtagctgacacatctagatgcgtgtagagcgctagatataattacataatttagctccctatattagggtgtggggcacatactgaattagtcagatctcatgatattctgtcgcgctggcacatccgtacttattagcattatggtgtatcgcctgcttacatcatatgttatagcctgctatgggtgagggtgaggtagtagtataattagtatggtaagtgctgcgcgaacaatctntcgtagtgctctccatacatccctgaa

SEQ ID NO: 12217 - DNA, 526 bp, Glycine max
  misc_feature (48)..(48): n is a, c, g, or t
  misc_feature (55)..(55): n is a, c, g, or t
  misc_feature (59)..(59): n is a, c, g, or t
  misc_feature (83)..(83): n is a, c, g, or t
  misc_feature (92)..(92): n is a, c, g, or t
  misc_feature (121)..(121): n is a, c, g, or t
  misc_feature (165)..(165): n is a, c, g, or t
  misc_feature (223)..(223): n is a, c, g, or t
  misc_feature (296)..(296): n is a, c, g, or t
  misc_feature (341)..(341): n is a, c, g, or t
  misc_feature (348)..(348): n is a, c, g, or t
  misc_feature (362)..(362): n is a, c, g, or t
  misc_feature (385)..(385): n is a, c, g, or t
  misc_feature (498)..(498): n is a, c, g, or t
  misc_feature (500)..(500): n is a, c, g, or t
  Coding DNA Sequence Number=SeqID_2438
ctctatgtgcgcacgctgatgtgtacttatgcgctctctactcactantgtgttngtancgtgctcgatatacgaatgtcgangagctgcgntacatgtctcgagtctgcagtgactgacntacactaatgtgtagatgtgcagtggatgagtgactcgttacangtcaggagagaacctgtgcatcgctgatcaatctcgactggcgtacatacgaaagtgnacgaactatcactgcataactcgactggctcgtcagtgtacagattctcgtcgcacgcgtatactatcacgcnagtcgatcgtgacatatgcattaatcgtgacatatcgtcgtgttngagatangagagcagcggtgntgtcgactatgcgtgacgattcngagggtctgacgctctacacgacacgcacgagctctcgatacagctactaccagatgattatgatagcggactcatgacaacttagtgagactgtatcgtcgctcgtgatcancntgctatgaacgatatcgtacgcatct

SEQ ID NO: 12218 - DNA, 437 bp, Glycine max
  Coding DNA Sequence Number=SeqID_2439
ttgtggcagcacttgagcctctaaacgtggctttgatcttaggctatggctcagtccattggtggaagatattcaccccagacacagtgcaatgacatacacagttatgtgtcagttttagcagtacccttccattccatttcatatcatcccacaacccttacaccatgaacttcaggttattagagtcggactcacttcaaaagtttgtgatattggtcgcacttttcatatgcatcactatatctataagtggggtagcatatgatatggtccatcagtctattatgcgactctccactatgcatcagtcattattcagaggggtcctccttcagaaaccatgataagtggagaattcaaccacgccctcataatccaagtaggcgtatggcatggtgtcatatggatccctcatttgttgttccctagttaag

SEQ ID NO: 12219 - DNA, 553 bp, Glycine max
  Coding DNA Sequence Number=SeqID_2440
gtagcgccgtacgtaagccgatatccattcggtggagcgaggcggcgtgtgggtgatagcgtaagtaaagagcgcctccccacggcacgacataagcacaccgcacgcacggcgcaataacgctacacagcgacccgacgcgtgtatgacgaatatctaatatccgacaatacaacacatggtgcacgtatggtacgcgtatcgatatgcgaagactgcctatgcgccgagtatatgcgactatcgtaagcgccgagccaacaatatatccgcgactggcgcacgatgcgaccactaccatagctattattgcgcgctatttgaggtcccggtacgtaaaacaaagagggagtctataacgagctggttcattggtatgatcatatatattaagcgccgcacggtagcatggcgtcgggcgcggcatcatatacgcatcacctcgcgtcggcgcgcggcgcgcaagggagcgccgttcatcgatacttacatacgttatatatcgtataaataacttctcgtcctctccgcgctcgacgctgacgatattagt

SEQ ID NO: 12220 - DNA, 515 bp, Glycine max
  Coding DNA Sequence Number=SeqID_2441
aaatattccgcaaaagagcttcgaaaacttttgaggatttcttaaaagtattttttttccgttgtattaaaattaagaacattaaggtaatattaaatatgttacaaatgtaatttttttttccgagcattttaaaaagaaatccattgtttgtttgttgtttctatcatcaattagttaattttgtagtatagttgtttttaaaacacgttttgttcatagagaagagaaggcatcactcatttcaaacaaatcgaccgattgcttgtatgcttagaattttactcgtttctttcaatggctcaattatcattattttttgtttcattctctctttttagcgttttattttgagaactcatataaatatcgctcaatatttcttttgaaaaactgcaaatatttcagccgatggtcatgtgaatccgatgttctaaaaatagtgaattggttttcgaattggattttagaggacgtgtggcgacgaaagagcgcatttagttttcctcggatat

SEQ ID NO: 12221 - DNA, 598 bp, Glycine max
  misc_feature (39)..(39): n is a, c, g, or t
  misc_feature (49)..(49): n is a, c, g, or t
  misc_feature (167)..(167): n is a, c, g, or t
  misc_feature (202)..(202): n is a, c, g, or t
  misc_feature (223)..(223): n is a, c, g, or t
  misc_feature (252)..(252): n is a, c, g, or t
  misc_feature (258)..(259): n is a, c, g, or t
  misc_feature (306)..(306): n is a, c, g, or t
  misc_feature (339)..(339): n is a, c, g, or t
  misc_feature (405)..(405): n is a, c, g, or t
  misc_feature (407)..(408): n is a, c, g, or t
  misc_feature (410)..(410): n is a, c, g, or t
  misc_feature (445)..(445): n is a, c, g, or t
  misc_feature (474)..(474): n is a, c, g, or t
  misc_feature (501)..(502): n is a, c, g, or t
  misc_feature (507)..(507): n is a, c, g, or t
  misc_feature (539)..(540): n is a, c, g, or t
  misc_feature (542)..(542): n is a, c, g, or t
  Coding DNA Sequence Number=SeqID_2442
ctattacactcatattatctagatgagactatacaactnctacctcacntctgatcatcgcgaccatatactatatactctactttactcaactatatcttcgtataacctcgatcatctcagctagtcatctattactattgactaaacacgactacttgtatatntcaccaaacacacacaccacacggccgcacatatnacacactattgaatgacacantgtatacgatgtacatgttctactgcttntgggannttacacactctatctctcatcgtgatatatctatactcacaacaaanatcgatcacacattcatacaatacactataccnatcacataatacacaacacatacaactaatcttcaggcacacatcagacacacttcaacatatatntnntntcacactagtatacatatatactatcagctgttantgctatgtccgtccacactcacgcactcnctgcaccgcatctacttactacgggtnnactcnactcccgattcctcactcctcacgcacacatnncnagatagacgcgtcatcacacacacaatatacgaatactatacacgtgagtaccacg

SEQ ID NO: 12222 - DNA, 566 bp, Glycine max
  Coding DNA Sequence Number=SeqID_2443
ctgtttgttgtttcccttcgtctattttttcttccccccctttgccgtttctttttttggttgtgtgctctttcttctcgctcgtcgcttggtgatctctctctgctaccctgtccgccgagattgagagagagacccacttttacttgctccagcttgccgagcaggccgagagatactaggacttggttgagtgtatgcagactgtatgacaactggatcttgatctagctgtgtaagaaaggaacctcctctcagtgtgatacaaaactgtacttggtgcacgacggtcctcttgacgcatcatgtcctcttttgagccgaaggaatagtctaagggaaatgagcacagtgttacactgatcaagcagtactgccctatagttgaggaggcactctccgaaattttgtggggacttcctgcctattagtagaccggcctttgatttccttctttccccctcagcaaaaagcttttggtttcctacttatcggaatgaaaggtggattatttttccccgtatccttgcctgccctccatttactggcccttggaaattggaaag

SEQ ID NO: 12223 - DNA, 573 bp, Glycine max
  misc_feature (35)..(35): n is a, c, g, or t
  misc_feature (249)..(249): n is a, c, g, or t
  misc_feature (377)..(377): n is a, c, g, or t
  misc_feature (442)..(442): n is a, c, g, or t
  misc_feature (522)..(522): n is a, c, g, or t
  Coding DNA Sequence Number=SeqID_2444
tacacaatcgtggtctcaactactctcccagacancacacctctcgtcacactcacctacactctctctcgtcctgcacctccatatatctgctccactacgcccgacaacacacaccataccgatcacaacgactcatcaactacaccacaacacacgctactccgactaacgctcactcccaccactaccatcatcctcatctcaacatcctacatcatatcctctcgcggtcatcatcacacacanctcttaccatctatcgaatcctcacaacacacacacacaccaagatacactatatactcaacacatactgaatagacatttcttatgagtgtcgctgtagtcgcagaccctacttatcgacctacacncacatacagcatcatgacaataagataaccaaaaactcaatatacatctctctcacccctcttcntccgcactctgactctccctctgtcactcttccactcgagttctcaactctcttactctacacgtcctacactctcctcncgatcaaattcgtaaatacacaccacatacatacacctctgtcactacatt

SEQ ID NO: 12224 - DNA, 590 bp, Glycine max
  misc_feature (44)..(44): n is a, c, g, or t
  misc_feature (81)..(81): n is a, c, g, or t
  misc_feature (143)..(143): n is a, c, g, or t
  misc_feature (292)..(292): n is a, c, g, or t
  misc_feature (388)..(388): n is a, c, g, or t
  misc_feature (447)..(447): n is a, c, g, or t
  misc_feature (452)..(452): n is a, c, g, or t
  misc_feature (483)..(483): n is a, c, g, or t
  misc_feature (510)..(510): n is a, c, g, or t
  misc_feature (553)..(553): n is a, c, g, or t
  misc_feature (565)..(565): n is a, c, g, or t
  Coding DNA Sequence Number=SeqID_2445
aggctctgctcgtgacgtcagataatattatatagacactctcnagattgcgttcggcgtctcggtccgcctcttgtatgnatgtgcttctcgacgaatacgtacagtacattcgcacgacatacgcattcacttctcattgngagttcacgtgagatctctatatgagccatcggacaacaactgcacaccagcacgctgtcgtgtatcaggctctcaaagccataatatcagacgcaagtcagctagagcgtggaagagtgacgccagcccatgcgatgccgcgatccanacaatatatgctcattgctcagcacactactcgtatcgtatcatgaatatatatatccgcgcggcggcgccgtcctgtccaccacaccttcgcgtntgtcctgtgcatttgagtaatataaatatgcgcggtccgacgccctcactgtcctctcntctcntcttggttagagaaaaaacatcgtcctctcnctcgcgtcgcgccctgccggccgcacntcgaggcgctgcgcgctgccgcgtacgctctacatgtgtgtanatttgtactgtnactatacttctgtgtcgcgatgtgg

SEQ ID NO: 12225 - DNA, 536 bp, Glycine max
  misc_feature (184)..(184): n is a, c, g, or t
  misc_feature (420)..(420): n is a, c, g, or t
  misc_feature (430)..(430): n is a, c, g, or t
  misc_feature (445)..(445): n is a, c, g, or t
  Coding DNA Sequence Number=SeqID_2446
aatgcaattctcgatgatttgtgtttataacacgtatcagccgccagaacatactatttcaatcatacccattaattgttaggagtgaagcacgataaatgtgagaagtcatagataggtgtttgagagacagcgggagccgtagcgcacgaaagcctcacattataacgaccttcatctgcgnctttctcaccccactttatttgtgcacaaagacacgcccaccggcgcggagatatttcaagcacacaccccccacttggtattatttcacaccccgccccggccccccacgcggataagatagacgcagtatttgatatcagaatataatttcactacccccgctatcacaccgaaaagagccacccaatatgtttattgcgcgcaaccgcgcgctgggtggggtgggaaaggcgntagggttggntgtggaattgagagnaaagaagtaatgaagggagaagaaggacaggagggtctgtctcaccccccggtgttgatgttgtggcaaggaccaagaggcgcacgcgaga

SEQ ID NO: 12226 - DNA, 302 bp, Glycine max
  Coding DNA Sequence Number=SeqID_2447
taatgcatccaaacaataactctacttccatcttttttaatacaacaaatcatatacttaccattaactaactatttttcacagtcccttctaaattctaatccttctcacgcatgcattattccattctttgtcacttcttaatagctattctctatacataatgtgagacaaaggggtcccctaactttgaactcaaccaaataagattcttttattttggaaaacctattttgaaaaaaaacatttcttccaaataaaaaaaggggcgattgaaaatcttggaaaattcccctgaaatg

SEQ ID NO: 12227 - DNA, 485 bp, Glycine max
  Coding DNA Sequence Number=SeqID_2448
aaggcacccacaaaccacaatgaatatacaaatcgacgatgctgaaagagatgagattttccaaagattgagagctactcctgaaaataataaatgttttgattgtgataagaagaatccaaaatggtcttcagtgagtcttggtctttatctttgtttggactgtgctggtaaacatagagaatatggccctcaagtttcttttgttcgttctttgaacttggatacttggaataaaaaatatattacctcaatggaacttggtggcaatgttaaagctcttgattatttcaagaagcaaggtctcaagactccctatgattataaaggcgctcaaatccagaaatataaacaagatctcgccaagaaggttgatgctgctcttgctggttccaagacagaagctgaagccaataaaccagtttttactaaaccagctgaagaagaaaaaactcaacctgaacaaagccatcatttgagtggaa

SEQ ID NO: 12228 - DNA, 564 bp, Glycine max
  misc_feature (30)..(30): n is a, c, g, or t
  misc_feature (152)..(152): n is a, c, g, or t
  misc_feature (234)..(234): n is a, c, g, or t
  misc_feature (466)..(468): n is a, c, g, or t
  misc_feature (471)..(471): n is a, c, g, or t
  misc_feature (473)..(474): n is a, c, g, or t
  misc_feature (476)..(477): n is a, c, g, or t
  misc_feature (479)..(479): n is a, c, g, or t
  misc_feature (483)..(493): n is a, c, g, or t
  misc_feature (495)..(499): n is a, c, g, or t
  Coding DNA Sequence Number=SeqID_2449
ttacataacatgtcctccgttgtgccgtanatggtctgtttctgagagatgccagagggcgcagcaacactaccgatagctatagcacataataaggtacaccacacgtctaacgcgcactgagactctcaagtctagagagacactaggtncccagtctggtgtgtatctctgaagaaattgataggaggggcgccctagtggcgcacgtgggtgtggggcgagtgatatcgnacttgagaggtgcctgtgtcactgtctactagcaccctagtatattatcttccttatccttgagggaatcttctagctaatctacctatagtgatgaactgggtgtagcataactccttcccataacacaccccaccacgggacggaacagcatatatatgtcttagtcgataataagaagagcagcgacacagccgcgcccgcggaagaggtgaagagcgccaccacagcnnntanannannanacannnnnnnnnnntnnnnnggggaggtggagtgagagtgcgcgaagtatcgattattgggggtatttgtgttccaacattatca

SEQ ID NO: 12229 - DNA, 584 bp, Glycine max
  misc_feature (45)..(45): n is a, c, g, or t
  misc_feature (224)..(224): n is a, c, g, or t
  misc_feature (248)..(248): n is a, c, g, or t
  misc_feature (363)..(363): n is a, c, g, or t
  misc_feature (558)..(558): n is a, c, g, or t
  Coding DNA Sequence Number=SeqID_2450
atgtcagtcgtctagtgaggtcgccgcacctcctgctatccgtcnacagtcactgctctgaagcttgatattcgtctgcatgaatatcgtgcgatgcactcgctagatcatcactggcgcgctactcacatcgacgctctcgtactgtatgaggagttgtgtgtatgacacgtataccatctcacacagagtacgatactcgttgagtcatcgcacgcttcccntgacacgatctaatatattacatncacatgtagacacgcataccgttcactgactgccgtcagtgtgcgcatgtcacatgtcacctcagcacacagtctcgtctcatatcgttactcgcctgcgcgctcactgctctcncgccgtgtctcctgatccgacacttctcgcctctctacttctgcgcactcgctctactctgacactggtccagaatcatctactcatctcccgcagactgcgtgcgtcgcgatcccacattgcagatagcgaggtgtgcgtgcgacgcacgtcacgaggctcgatataactatagcgcgacgactgtcgtgagtnacgagagtgctgtcagacctcgagct

SEQ ID NO: 12230 - DNA, 349 bp, Glycine max
  Coding DNA Sequence Number=SeqID_2451
aggaaggcgcgggaggcgagccggtggtggggaatggccggcgcgtcctcgccgcccccgacgcccaagtcgcccaagctgcagccgccgctcctggagcgcgccaagggcccctctggcctcgacaagatcgtgctccgcgacccccgcgggttcaccgccgaggtacgcggccgcctctcccctcccgctcccggcagattcggggcgcattcaccgcggatccgctgcggtgttcaccgacgcgcgcgcgttcagggcgccggtttcagaatcacaaggattcggggcgcgcgattttcgggcggatttcgtggttcggctggcccgtcaaatcgaggcgcattat

SEQ ID NO: 12231 - DNA, 415 bp, Glycine max
  misc_feature (374)..(374): n is a, c, g, or t
  Coding DNA Sequence Number=SeqID_2452
ttatatgatatccttcttcctgtccccaggcggaggttatccattatctcttatatactactactatataaccccccctacagtatacatatatctaccccttaaaatacctaccctataccccattaaaaataccttgctatagtgccttgtgcagaatagacagaattgctgagttattgattttaaaagagaaaaacagtctgcacgtgcagaccattctgcaaatatttttattgctgttcattttttgatcaatttccggtgcctttctggcataaaaaaagaccccctcaggggtctttgtaagtgttacattataacattcgttttcgtattttcttgccttccatctcaatgacacccttcatggntaaatttattattgcgttattgaacgcatcctgaccacttt

SEQ ID NO: 12232 - DNA, 350 bp, Glycine max
  misc_feature (38)..(38): n is a, c, g, or t
  misc_feature (75)..(75): n is a, c, g, or t
  misc_feature (80)..(80): n is a, c, g, or t
  misc_feature (94)..(94): n is a, c, g, or t
  misc_feature (164)..(164): n is a, c, g, or t
  misc_feature (227)..(227): n is a, c, g, or t
  misc_feature (293)..(293): n is a, c, g, or t
  misc_feature (301)..(301): n is a, c, g, or t
  Coding DNA Sequence Number=SeqID_2453
aggccgtcatcatcatcgacgtcctccgccgctccggngccgatgtcaccgtcgtttcctcctccgccaactcgncgtcnaagctctccacggngtcaagatcatcgccgacgcctccgtctccgacgtcgccgccaccgcttttgactcgtcgctctccccgnagttttacaggtgatgagaatctgagagactgtaaagttcttgaaggtttgtaaagaacatgntgaggaccgacggctttatgcgggcgtgtgtgctgctcctgcggaaggcttgggccctttgggttnctgaatgnaaaaaagcgacttgtatcctgcattggatgaaaaatgggccgttacgta

SEQ ID NO: 12233 - DNA, 540 bp, Glycine max
  misc_feature (62)..(62): n is a, c, g, or t
  misc_feature (87)..(87): n is a, c, g, or t
  misc_feature (107)..(107): n is a, c, g, or t
  misc_feature (199)..(199): n is a, c, g, or t
  misc_feature (203)..(203): n is a, c, g, or t
  misc_feature (205)..(205): n is a, c, g, or t
  misc_feature (246)..(246): n is a, c, g, or t
  misc_feature (308)..(308): n is a, c, g, or t
  misc_feature (351)..(351): n is a, c, g, or t
  misc_feature (372)..(372): n is a, c, g, or t
  misc_feature (419)..(419): n is a, c, g, or t
  misc_feature (437)..(437): n is a, c, g, or t
  misc_feature (489)..(489): n is a, c, g, or t
  misc_feature (494)..(494): n is a, c, g, or t
  misc_feature (506)..(506): n is a, c, g, or t
  Coding DNA Sequence Number=SeqID_2454
attgtgtagtgcgatctgtcagctaatgcactcatctctctgtcgcgtgatcacttcatatncacatctagtcgcgtcttcttaccnagtaatcactcctctacgcnctgctgcactctactctgtactactgtccgcatctcactgtacactagctctactgcatatgcatacgcattcatcaatcactcactctctntccncntcgcgtggatgtgtaatataagacaatagatatctaataanaaagagtacagataataaatatatatgatactatatatcatcacgcgtgctgcggcactcantatgctagcagcttcttcatatacatcgactcgctgcgacgantgacattgactactgtcatanttacgtcttctgatgtgtgacagcggagagcgcgcgccgactccggncaagagatgtatatatgncgtgatcactcgggtgtgtgatcaataggtgcgatgtgacgacacatacgcntccancgcctatcaaanaaacacaccgcaccacacgatactcggttatctc

SEQ ID NO: 12234 - DNA, 371 bp, Glycine max
  Coding DNA Sequence Number=SeqID_2455
tttggtgttcatatctccatcctagcgaccgctttatccatggcgtttttatcgcatccacccaggttagtatgaaacgagaatgcacatctatgttgtatttgctgccgtatgttgtttgcatcaaaaacgttctttgcatggtgaacacggcagcaattcattccttcgaagaagtgaagcgatgtaaaaaatgtgcatcggcggccgccgagtgatcacccgtcatttttcatagtcctcttagttatgtactagcacagatgttgcgtacgaaagtaggagcaatcaagttgttgtttctctgacatggaggcaagctggccttgttgtgctatgctcatctcaaattttatgctacgtctacttat

SEQ ID NO: 12235 - DNA, 336 bp, Glycine max
  misc_feature (147)..(147): n is a, c, g, or t
  Coding DNA Sequence Number=SeqID_2456
gggcgaaatcctgaaccggccaactctagccagaaggtttattccagctgaaagaaccccagagtatgatgagattggtgaagaatcctcaaagggttaattgtgaaccattacacccaagtttgggaaccttattggtctttcagnggtagagatattggcaaggcgtgcttctgatgagatataccttggagagagggagacttcaaattggactactgataagaaagcgttataagctttcaaaagggttggaagccaactgtctgggattgaaagagaaatcaatgcgcaggacatgatcccagtcttgaaacccggctcggccagttacct

SEQ ID NO: 12236 - DNA, 331 bp, Glycine max
  Coding DNA Sequence Number=SeqID_2457
caccacaacacaccgagagtattaacaccctattccccatacatccaatcgcatccgtacgaccataccagatcatctacatggagatggagtgcgtacatgtacatctcagtagccttgtatgttagcccgagctacgccgctgaccactactctcgctctactctctgagcttgctgtgctcgaagacgctagtgaagcgtacactcactggtgtagctcacacactcgctctactctctgagcttgctgtgctcgaagacgctagtgaagcgtacactcactggtgtagctcacacacacacacacacacgagtatctagtagtagta

SEQ ID NO: 12237 - DNA, 444 bp, Glycine max
  misc_feature (113)..(113): n is a, c, g, or t
  misc_feature (400)..(401): n is a, c, g, or t
  Coding DNA Sequence Number=SeqID_2458
cgcagcgcggtgtgttgggtcaggaggtgaagggggtgtcgcacgggcgccggtcgtcgggggtgaacacacacaagggggcggctggagccaaccagtggtaggagagtgcncaggcggggcgccagggtgccgcgtggttgcgccacaccaccctgtggtggagtgggtgccaggcggccccgtagggcagtggcggattacgcagccgcggtgttagtatgatcccatgtgtgaacagtgtggacaatttcccaccattggacacaatgtgtgtcggccgccgtttgtaccccaattgccgccgttttccgtttcgcgcccgccagggtggccgccccagcagtggtcatttttaccatattttagttgtcactattttttgttcacggccgttggnnggcccggcgaagggtaaatctcaggcgggcgaagcggtaaaaa

SEQ ID NO: 12238 - DNA, 551 bp, Glycine max
  misc_feature (26)..(26): n is a, c, g, or t
  misc_feature (60)..(60): n is a, c, g, or t
  misc_feature (105)..(105): n is a, c, g, or t
  misc_feature (108)..(108): n is a, c, g, or t
  misc_feature (116)..(116): n is a, c, g, or t
  misc_feature (203)..(203): n is a, c, g, or t
  misc_feature (212)..(212): n is a, c, g, or t
  misc_feature (214)..(214): n is a, c, g, or t
  misc_feature (265)..(265): n is a, c, g, or t
  misc_feature (273)..(273): n is a, c, g, or t
  misc_feature (282)..(282): n is a, c, g, or t
  misc_feature (307)..(307): n is a, c, g, or t
  misc_feature (323)..(323): n is a, c, g, or t
  misc_feature (337)..(337): n is a, c, g, or t
  misc_feature (426)..(426): n is a, c, g, or t
  misc_feature (458)..(460): n is a, c, g, or t
  misc_feature (464)..(464): n is a, c, g, or t
  misc_feature (479)..(479): n is a, c, g, or t
  misc_feature (484)..(484): n is a, c, g, or t
  misc_feature (523)..(523): n is a, c, g, or t
  Coding DNA Sequence Number=SeqID_2459
gggcggcgccgagcgcgtctgcgggngtcgcgtgcgcgcgcacccgacggtgccgcgcgnactgctcgacggctagcgcacgctcgacgcactgcctcgcgctcntcncatcgtcngcgcgcgtgcgcggtcgtctgcgacgaggcgtcggccggcccggacgtaccgcgcgcgccgcgcccgtcgtcgtgcgcgcgagtgcncgcgacgancngcagcgcgacacgcgcgccggacgcgggtcgcgcgcgacatgcgcactcancgcgcccntcatcgtantcatatatcctacaggcacgcgctnccgcacgctctatcgncccgcgctgcctcncgtcacgtcgcgatcatcctcgcgccgctcgggccgcgcgccatgcgcatgatgctcacgcacagccggctgcggcgcactcacctcgncacgacgacccggcggcacgcgcgacgatccnnnctgntcgccatccctgcancgccntggcgattcgtgccacgcgcgcccggataggacgcaccntgacaaaccctacacacgtaccggactg

SEQ ID NO: 12239 - DNA, 522 bp, Glycine max
  misc_feature (74)..(74): n is a, c, g, or t
  misc_feature (146)..(146): n is a, c, g, or t
  misc_feature (154)..(154): n is a, c, g, or t
  misc_feature (160)..(160): n is a, c, g, or t
  misc_feature (213)..(214): n is a, c, g, or t
  misc_feature (241)..(241): n is a, c, g, or t
  misc_feature (247)..(248): n is a, c, g, or t
  misc_feature (252)..(252): n is a, c, g, or t
  misc_feature (266)..(266): n is a, c, g, or t
  misc_feature (279)..(281): n is a, c, g, or t
  misc_feature (307)..(308): n is a, c, g, or t
  misc_feature (324)..(324): n is a, c, g, or t
  misc_feature (403)..(403): n is a, c, g, or t
  misc_feature (489)..(489): n is a, c, g, or t
  Coding DNA Sequence Number=SeqID_2460
gtctgatatgtgtattggtgtagtttgtatgtgatactgtagttatatattgtagctgcggcgctagacaatantcgagacgtcgaggtggggccgcgcgatgcgagaagacgacacacgagtgagcgaatggggggtcagtacanacatctgncatgcntgagcaacggctcggagacagtggtacagttatgtattttgtagtactatccnnttgacgtgagttgtagagttgtagatngaattnnatantattggccggctgntcctcgctgttgnnnggagtggggtgaggagggcggcgttnnggtaggagaaattagntgtggttagttgggtgcgcgtagtgagccgcgccctcgcgtcccacacccaccaggacaatgcgaggtctctccattancgatgtgtgttgtgttgcgcggtgggaacaagtacacatctctgtcatgtagtgttttgtatttcctcctatctgatgtgcggcgnccgtgcctctcagtgttatatttggtagtgggt

SEQ ID NO: 12240 - DNA, 440 bp, Glycine max
  Coding DNA Sequence Number=SeqID_2461
ttaacatttgttgccttccaatctacctctgaaattttctttctcactctcaaaatgaagctttcgatgcgtttgatctcagctgttctcctcttgttcatgatattcgttgctacagggatgggtccagtatcagtggaggcacgcacatgtgagtcacagagccataggttcaagggtccatgcgtgagcgacaataactgcgcaaacgtgtgccacaacgaaggttttggcggaggcaaatgccgtggacttcgtcgtcggtgcttctgcaccagacattgctgattcattgaacctcataaatcatcaaaatcatcgatccattgtcttgtgttttcttctttcttatctaaatcttcagtaaagtaccatgtcgtacggtacgcgtgtgtttgtctttaggttgttctcgaataagtcttttgtgtctttacagt

SEQ ID NO: 12241 - DNA, 442 bp, Glycine max
  Coding DNA Sequence Number=SeqID_2462
taccttcttgtttgggaaaagagagaaaaaagaaattaaagcaaaagttgttttgttggtacggtgagaaaaatggggcctcttgtgatttcttcaagttttctttggtatcttagctttgttctaagtgctgcagttagagtagtccacgtccaagctaattacggttggcttaacgctcatgcaacgttctatggggccaatcaaaatcccaccacccttggtaagtcatttttaatgtgtaagaataatatatataacttgtacgtataactttcttgcatagatccacatgttaattagtctgaaatataacatgtatataaccaatatgattacgttaaacattatgttcaccctcattattcttgataggaaattaaacttactcaaaaatattgcacttgagcgtaaaatgttcttccctcttcataatattttc

SEQ ID NO: 12242 - DNA, 519 bp, Glycine max
  misc_feature (43)..(43): n is a, c, g, or t
  misc_feature (52)..(52): n is a, c, g, or t
  misc_feature (321)..(321): n is a, c, g, or t
  misc_feature (346)..(346): n is a, c, g, or t
  misc_feature (362)..(362): n is a, c, g, or t
  misc_feature (369)..(369): n is a, c, g, or t
  misc_feature (373)..(373): n is a, c, g, or t
  Coding DNA Sequence Number=SeqID_2463
tcctgctcgctcttatttactataagactgttcatttctcctnctgtggcgnaacaaccaagactaacaccgggcacacaacaataccatgcgctcgccactatcaatcactcctcgcgctacacctggcgctctcactacatcactcttcactacaccgcacaatcacatgctccagcctacgtcgtactggcggtgacctgcacggcttctctgcgaaacctcatatgttatgtatgtattgtgggatcacacagcgcgcgtgtggttgtatacatcacgtgtgcggtggcgaatgatacaacattttcgtcgtcgggntgcaacgagtgtgctggcgacaaanacacgagggaatgatngatcctnatcnctgcacttcgccgcacagctatctaccacacaaaagggaggtggataatacataatatttgtatgtattggtggtgtgtgatgatacatatttgtatctggtgtagaagattagagggtataactgttctctctgtgcctaaagac

SEQ ID NO: 12243 - DNA, 571 bp, Glycine max
  misc_feature (29)..(29): n is a, c, g, or t
  misc_feature (32)..(32): n is a, c, g, or t
  misc_feature (387)..(387): n is a, c, g, or t
  Coding DNA Sequence Number=SeqID_2464
gaccagagtatgatgcacgcgtgcgacgntanagagatgcgtatacaacatatacgctcgacgatgcactcactagcgcgccagcgtatgagcgagtacagtgtgcgtgagtacagcataagtagcgcatatacaccacgagaatgctagacaagtgcagatatacagtcatcagcaggagtccgaattaggctagtgatgagcgcgatgctcctatgatcggaggatcgagccatccggacgctacgggtgtgcgctacgtgtatgtgagttcgtagaactatcagcagtatgatgtagtgatgcagcatgcacgactcacgtcggtgtatcgagtggtgtcagcacatgctttcacgtagcgcgggcgtgttgtggcgtgagtgnacagtgcatagatacatagaagatgcgatggaggctagagagtcttggtgtgtgtcgaacacaagagaagagagaagaaagagagatggctttagtccgagtagacacgtacgatcacttcgtaggggagggaggccatcgctcacactcagattgcggaagcgatgacgctcatgaggatact

SEQ ID NO: 12244 - DNA, 552 bp, Glycine max
  misc_feature (77)..(77): n is a, c, g, or t
  misc_feature (127)..(127): n is a, c, g, or t
  misc_feature (236)..(236): n is a, c, g, or t
  misc_feature (303)..(303): n is a, c, g, or t
  misc_feature (436)..(436): n is a, c, g, or t
  misc_feature (444)..(444): n is a, c, g, or t
  misc_feature (472)..(472): n is a, c, g, or t
  misc_feature (479)..(479): n is a, c, g, or t
  Coding DNA Sequence Number=SeqID_2465
agatatgcttctgtgcttgactcgtgtctgatgtcgtattagagtgatgagttcgtgggaagagtagtcgagtatangcatgcatgaggcaatagccacgatcgcgactacatgtcagatattagtntatgatactccctctccactcacaaccgcattcctagaccacttgattacatagtaattagatacgtgtgtgatcgaggccgccactcgcgactcatgatgaggaacantacgagcgtggctagacgggtatatagtagtgacagtattagtgtatttgtgcatcatcacttactngcctcggcgatgcgtagcgactgtcgtacgtcgctgtctgtatgagtatatgtgtgagcgctattgagttgatctgcgagctgggcatgagtgagagagtagtggtgtgcgtggtgtgcgtgagggatgatcngcacccanaacaatagtacagagcagtcgcgatgtngtgcgcncgtccgcgtctgtgagagagcgccgcgtgatcactatcgcatcgcgccgcgacacacctctgtggatcatgaa

SEQ ID NO: 12245 - DNA, 590 bp, Glycine max
  misc_feature (33)..(33): n is a, c, g, or t
  misc_feature (73)..(73): n is a, c, g, or t
  misc_feature (266)..(266): n is a, c, g, or t
  misc_feature (417)..(417): n is a, c, g, or t
  misc_feature (550)..(550): n is a, c, g, or t
  Coding DNA Sequence Number=SeqID_2466
atacttctgatgagtgcgattacgcacagctcnttcgtgctagtaggtatatagtctattatcacatatcgcngtctgtgatctgatgtcgtatctattcttatcttctctctcgtgtgtccgcgtaccagtccgctacgctgtctcataattattgtgtcgcagctccgcacgaaccctcgagctctctacgccgtcctcgcacatcatgactcgctacgagcttgcgcgatagaacagctacctatagtacccgtcatattcantacgacacgacagtcacactatcacgacgtgacagcacgcctccatatgacgatagacagagtgcagtggatggcgatactgctggctctcgtaagatcacttcgacacgtccgcgcggaggacaccgataccgcctgcacagaaacaagntcgaatagcagagcacgacataccgaccggcaccacgacagcgctcgccacgtacccgccaccgcgtccggctcacccactccacgcccacacacgcgacactgagtgcgtcgctgtatcgggtaggcgatgnattagagtgatcatgtaagtgtgactggatgtgactgcgt

SEQ ID NO: 12246 - DNA, 508 bp, Glycine max
  misc_feature (191)..(191): n is a, c, g, or t
  misc_feature (193)..(193): n is a, c, g, or t
  misc_feature (196)..(196): n is a, c, g, or t
  misc_feature (436)..(436): n is a, c, g, or t
  Coding DNA Sequence Number=SeqID_2467
gcgtcgcacggctagaagatagttagtgggtgctagagtgatacgttggcgtcgtgtggtcatgttaatattcatcgccactctcacggagtggagcggtctagaacatgtgagggcacgcacacgaacttaactagaacagtcgtacatgattttagtgtgtgttatccatcaatcccgcctacgattantntgncgggacgagctataatacgccgtgtagataagaaaccagagtgtcgtgcgttccgctggaagaatatccagtcaatacgagacgcgcgatccacacgtgcgacgctcgtcaatctggcgtaaagaatatcgtatgcggtgcatcagcggccacactctcttgaagagcgctacggaatgaagtgtaggagtgtggatatgatcgatatatctgtacgcgggagtagacaagagagagaancagtacctaaggagttatctctcgctagtcccctgagagtggatctcacgctagttgcggtcgtgagactcc

SEQ ID NO: 12247 - DNA, 470 bp, Glycine max
  misc_feature (54)..(54): n is a, c, g, or t
  misc_feature (56)..(56): n is a, c, g, or t
  misc_feature (213)..(213): n is a, c, g, or t
  misc_feature (262)..(262): n is a, c, g, or t
  misc_feature (269)..(269): n is a, c, g, or t
  misc_feature (298)..(298): n is a, c, g, or t
  misc_feature (407)..(407): n is a, c, g, or t
  Coding DNA Sequence Number=SeqID_2468
gatatctgccgctttagcgcggaggcgtgcgagtgtataggcaagtatgtatcntnccgccgcgcaccgcggaccattcacgtatattctatagatcacgcccaccacgagagcactgcacactcaccacctctccgcagcgtgcttccgcaccacatactctgcgttagaatcggagcactccacaggtcctcgcgcgccgatcgccgagcnccacagacgacaatacaggttaacagtgtaattgtgagaagaccactcncacgcgnccacgcagcagtcacatcgccctctctcnccgcgctcgcaccgcgcacgtcgtcttctacgctcgctgtgtacactacgatgagcagagaggagatcatgacgcgaacagcgatgagagacatgagaatagaggtaanagtatagatcacaacagcagacgaggcagtaggagtacacataacacgatacaagacaccaga

SEQ ID NO: 12248 - DNA, 431 bp, Glycine max
  Coding DNA Sequence Number=SeqID_2469
tgtgatcgtgttcatttctctaatcaactacaattattatttacgtcgtaaggtggaaatatgaatatacggagcttctgtgtaggattatagcaatagtgccgcagactaggaggctttttgtttcgctttttgtttgtcttattttatctttttctctatatgtttgggtgggttttttttagttttgttatatgtaaaaatcgaagacagctgggattctagaatttaatatattttaattaggtactagctgatattagaataaatagtttctacaatgattatatatattacttttgtctacttatttattctatctgaactttaacgcgtgtgtgtgcgtagagtttgaggacgattaggaatgaagaagaaaagggatatcgttggtggtaattttttggttgttgaggagtgatgttgtctta

SEQ ID NO: 12249 - DNA, 531 bp, Glycine max
  misc_feature (60)..(60): n is a, c, g, or t
  misc_feature (76)..(76): n is a, c, g, or t
  misc_feature (359)..(360): n is a, c, g, or t
  misc_feature (443)..(443): n is a, c, g, or t
  Coding DNA Sequence Number=SeqID_2470
acggcaccaacatgacgcgacagaggcgccacatgcataacaaacagaagaagttctctnaccctcttaccgccanctacgtaaacacacaagagtgagagtacaacgcaccagcaagtatgaaacatgcgcacatccatctcgggcatatagtctgcgcaatttatgataccgaccctgcgtcattccgcagtgtctactcatactactccctctatctccgctactctacatgtaccagagatcgagctgtagtgtgataacactatcccgtacacagacactaaagtgagaaatcagcttatagtcgggcgagagcgccacatgtccgagccgccgaagtaggactaagaggaggnngaggcgcgctcatcgcgaggttgagctatcccgtgtctccttcgtgtttgagcctatgagcccaactagtaagaacgtagagntctgacgccctgtgaggttcgtgttgcggttcttgcgattaagggtttgtgttcatagaacacatccactacaacatagacctcttac

SEQ ID NO: 12250 - DNA, 304 bp, Glycine max
  Coding DNA Sequence Number=SeqID_2471
cattaagaaactcgtttctcgttcttctaaagctgggcttcactttgctgttggacgaattcaccgtcttttgaagataagggtgagtgccaatgtaagagttggtgacacagctgatgtggattctgctgatatactgaaatatctagctgcagaggcgttggaggtgactggtaatgcaaataaggatctgaaggtgaagcgtattacccctatacatttacttcttgctatacgtggagatgaagagcttgactccctcattaaaggaacaattgccggaggcggcgttattcctcatatc

SEQ ID NO: 12251 - DNA, 423 bp, Glycine max
  misc_feature (37)..(37): n is a, c, g, or t
  misc_feature (42)..(42): n is a, c, g, or t
  misc_feature (70)..(70): n is a, c, g, or t
  misc_feature (81)..(81): n is a, c, g, or t
  misc_feature (86)..(86): n is a, c, g, or t
  misc_feature (92)..(92): n is a, c, g, or t
  misc_feature (157)..(157): n is a, c, g, or t
  misc_feature (189)..(189): n is a, c, g, or t
  misc_feature (196)..(196): n is a, c, g, or t
  misc_feature (207)..(207): n is a, c, g, or t
  misc_feature (218)..(218): n is a, c, g, or t
  misc_feature (223)..(223): n is a, c, g, or t
  misc_feature (237)..(237): n is a, c, g, or t
  misc_feature (243)..(243): n is a, c, g, or t
  misc_feature (253)..(253): n is a, c, g, or t
  misc_feature (255)..(255): n is a, c, g, or t
  misc_feature (263)..(263): n is a, c, g, or t
  misc_feature (269)..(269): n is a, c, g, or t
  misc_feature (277)..(277): n is a, c, g, or t
  misc_feature (293)..(293): n is a, c, g, or t
  misc_feature (295)..(295): n is a, c, g, or t
  misc_feature (300)..(300): n is a, c, g, or t
  misc_feature (347)..(347): n is a, c, g, or t
  misc_feature (374)..(374): n is a, c, g, or t
  misc_feature (396)..(396): n is a, c, g, or t
  Coding DNA Sequence Number=SeqID_2472
agacgtgagctatgcagcgtgcttcacgcatacgcgngacgntgtcatgacggtcgcacgtatatcacgntaatgttccgntaatngacgcntcgatccagacggtacatgaggctacactccagctacgtcactgctgtttacgctgcagtgctcncgtaaacggcgcatcgctagagatctgaacgnactgctncagcagtcgantagatgtcatngagtnatgcgctgtatgcngaacangttgcgcgtngncatcgatncacgtnatgtgctntttgaccgatgtcgantngatgngtgctactgcgtgacacgcatgcgaacgtcgatcgttcgcgtatctntcatcagcgtcgagacatgcagacgtntgtgctgtgctctggatagggncgacgctgctgctgacgtgtcggtgtt

SEQ ID NO: 12252 - DNA, 566 bp, Glycine max
  misc_feature (35)..(35): n is a, c, g, or t
  misc_feature (69)..(69): n is a, c, g, or t
  misc_feature (137)..(137): n is a, c, g, or t
  misc_feature (239)..(239): n is a, c, g, or t
  misc_feature (413)..(413): n is a, c, g, or t
  misc_feature (497)..(497): n is a, c, g, or t
  misc_feature (501)..(501): n is a, c, g, or t
  Coding DNA Sequence Number=SeqID_2473
tcacacacacacttacatcatatcgcgtgatcganaccacgacgcgtgagtgtcgccgtgatgaagaanacacaacaatccgcgagtggacagacacgtcgtacataccatgcgacgaaagagcaccggagatacgnagagtcgctatgagtagagatagtgaatcgcacggagagcgataatatacgtcagaattcgtagtcgcctccgactcactcacacttgctttggtgattatnaccccaccaccccgcgcacccgacctcacgcgagtcctatagtcgcatgctttcacccgctcccaccatctcgcgcgtcactatactacatcatcatatatgagtacatacacagcaagcagacagcgactgctagtatctgagcagctgacacagcacgcagcaatctgacanagtgcggcagtgttgatgcaccacgacggcgccgcacgcctcgactcacaccacggtgtgacgtcatcgtcgcgtgtctgcgtngtgnatgtgtatcttgtggatgactggcgtcacaccacctatcgtcgatgtgacgccattacagcaatg

SEQ ID NO: 12253 - DNA, 467 bp, Glycine max
  misc_feature (210)..(210): n is a, c, g, or t
  misc_feature (336)..(336): n is a, c, g, or t
  misc_feature (376)..(377): n is a, c, g, or t
  Coding DNA Sequence Number=SeqID_2474
gtgtgaactgtctaacccaattaaacatcgaagtaacagatattgtgcccgattgtcgatagagcctccggttgcgaatttgatggcatgtcgtggtacgtattagttccttatatctcccacggattgcgatcaatgatcacacgagagcgtccctagacgacaacacgggcagggtagtacatttagcgagaactctactcatgctgnccggatcgtggcgggccggagcggtatcataacaccgtgtggattgcgcatctatggcgagtatacccttatctattttaaacctgtatccggttatagtatagacagaacatctatagtactatncacgtaagatatgcgcatttgtaacatcaacaccatccannacagcacagcaagattgtgacgtgtaatatgtgcacgtgcgcaggatggtcgctcgcgacggacggagggtgctgcttttggttcataag

SEQ ID NO: 12254 - DNA, 569 bp, Glycine max
  misc_feature (91)..(91): n is a, c, g, or t
  misc_feature (112)..(112): n is a, c, g, or t
  misc_feature (174)..(174): n is a, c, g, or t
  misc_feature (187)..(187): n is a, c, g, or t
  misc_feature (213)..(213): n is a, c, g, or t
  misc_feature (270)..(270): n is a, c, g, or t
  misc_feature (351)..(351): n is a, c, g, or t
  misc_feature (357)..(357): n is a, c, g, or t
  misc_feature (367)..(367): n is a, c, g, or t
  misc_feature (376)..(376): n is a, c, g, or t
  misc_feature (479)..(479): n is a, c, g, or t
  misc_feature (487)..(487): n is a, c, g, or t
  misc_feature (508)..(508): n is a, c, g, or t
  misc_feature (513)..(514): n is a, c, g, or t
  misc_feature (517)..(517): n is a, c, g, or t
  misc_feature (524)..(524): n is a, c, g, or t
  Coding DNA Sequence Number=SeqID_2475
gcacaagataggagctagaggttctagattgtggtgtgcttacattaagacacatcattactatccaccacgtatatctctctattcatanaaaatgtattgtgtattattntgagtgtgtatatgtgtgttgtagcgtataatatgttatgagagtgagatgtgagtaatatncagtcattagtcnccgacacctcacgttgcagactcagntcagagcggagagcggacccgcgcggagcgcgcacgctcgcacgccggggtgacacnggagagaatgagagtgcgcgcagaaggagtatattctaatatatataatactggccgggcggccccgcctcgccgtacatnttttanatgggatcgnaagcggggngaccatcccaagtatatcttgtttttgcccgcgcgtatattagtacatgtatagtctatgtggttgtagcgcacactcgcgactctgtagtaatatgataganaagcaaanagcgcaggaagtaacacgatncctcnnccnttagtanttggggggagtagtgtttacgatacaccaatacgcaaccaacaac

SEQ ID NO: 12255 - DNA, 522 bp, Glycine max
  Coding DNA Sequence Number=SeqID_2476
gcatttaatacacgttggattccacacacttccaggaactttcaagtacagacaacttttggtatatgccaaccctaacttctcaacatacactcttcctcaagatcttcctgacaacaccccattgtattatggtcaacaagatggaaaatataaggaatattctttgagagatatcactgaagttgccgaaaaattcagaggtgaaaataaggttggacaagaagaaactatcattgttgccggaaatccttattctcctggaacattcgccactggtgcttatcaatctttggcttatggcaactacgttgtgctatatggaaacgaaccattcaagagtcttgtagacaaaataaaggtccaacaacctagttacttagttatagatcaagccttcgaaaaagccgatttgacagcagtgaataatgatcaagacagtttggaatacttgaagagagtattggtatctggcaaagacgcaagctcatatcaaaatctctttggaggaagatccgtttt

SEQ ID NO: 12256 - DNA, 496 bp, Glycine max
  Coding DNA Sequence Number=SeqID_2477
aatgctaacggtaccagtgatggaaaggagtcgcgtaagttcatgataactgttactcactctggtggacatgcaggccagagttatgaggtgtccaggtccatggcagcttgtcagggtgagcttctggaagtagatcctgttcagggagtccaagcacaaaaggtagctaccctagcctcagcctttgagtttaactaagcaattgatcctgtcataagcaagattgaacagctaattgctgatcctgatgggggtatagcccaagtaggatcaatgtttgatcttgaccccagtgatgtgcctgcttacatctgctaaaacgggagagggtttgcagcaaatcccttcagcagtcatagagggaaaacctgcccatcctggcagtagtgatcctccttgacgcatgattctgctttaataagactacgatgaatacataggggtaatatgtcaggtcgatgctgtcgacggtgtcacgcgcataggagaataa

SEQ ID NO: 12257 - DNA, 540 bp, Glycine max
  misc_feature (253)..(253): n is a, c, g, or t
  misc_feature (276)..(276): n is a, c, g, or t
  misc_feature (309)..(309): n is a, c, g, or t
  misc_feature (327)..(327): n is a, c, g, or t
  Coding DNA Sequence Number=SeqID_2478
cagactgccagatgatatattcgtatctcacacacacactacgtggactcgtaacggcgcgcaagatgtacaggacagtagagcatctctatctcatgacatacagcataccgcgtgcacctgagcagagcgtctgacacattagtcgatttgtgctaatttgtgtgtgctagtagtcgatcggtcgagccgtgtagtgtgagtgctagcgtgacagagtatatagtaatagatcagacttatggcaagtcgngatcgcacagtcgtgtccgtgtngggcgacgtcgaatgatagaggcgtggcagcgncaacgacatgcgtcgtgntggtcgtcaactcattatgtaactacatattatagtgagagatgaaagcatgcgtatgtcgtcacgcgatcgcggcgccctctccaatgaatcgagagtaggagacatcactatattacagtatgtctgtatgagtatcggccacatggagggaggacacgccgcgcaagcccgagatagggacgcgcctggcgccgacgatgtcgtatttat

SEQ ID NO: 12258 - DNA, 341 bp, Glycine max
  Coding DNA Sequence Number=SeqID_2479
cccttgaccatatagatcgcacacaaaacaggggcaggctgcacccccaacgggcatcattcgcagggcaatcgcccttgattctatatttacagagaccacttcgtccagatctgctcactaatcgctggccaactgggtaccaatatatatgcatgagagaaagaggggcttgtcgaaaactatgccatcatctccttgattgatggagttgtaataatggagacatatgtacctggcaggaaaaaggtgagtgtttaccctcgagaagtacagcctgaaaaccccaacagctatagagcaacgaagagagagtacttcacggtgaggcgtgatcgcag

SEQ ID NO: 12259 - DNA, 256 bp, Glycine max
  Coding DNA Sequence Number=SeqID_2480
aaaaaatcatcctcacttgtaagactaaaacacatataccagcacttactgctgcttcaccaaacctccagagataaactcccttctcttttgatcccaccataaagtgaccccctcatcaatacctgtgacatagtccaaacttgataataatctctttagccaaaattgccattggaaccctagagatagtctagtagttccttttggagtttttatttactcattcatacaatcattgctctttgtttccatg

SEQ ID NO: 12260 - DNA, 592 bp, Glycine max
  misc_feature (138)..(138): n is a, c, g, or t
  misc_feature (204)..(204): n is a, c, g, or t
  misc_feature (249)..(249): n is a, c, g, or t
  misc_feature (306)..(306): n is a, c, g, or t
  misc_feature (481)..(481): n is a, c, g, or t
  misc_feature (491)..(491): n is a, c, g, or t
  misc_feature (549)..(549): n is a, c, g, or t
  misc_feature (553)..(553): n is a, c, g, or t
  Coding DNA Sequence Number=SeqID_2481
atagcgtcacagagagcatggtcgtaggtatatgatgaagcagatcggctgcgtccgcacgcaaacgcatcctccgcatcgctcgcacccgtctataacagtagcgatatcctacctctcacatcagagcacttacanactcccatgttctctcggtcctctcatctcgccggatgcgcgcgactgctagtctattcgtcgcantgtgagactcgctgcatactatatagatcacgcgcggcgacccancacaccatccacctcactcactcgcgcatattcacggcattcgtgtagagagcggantacatgatcttctatgagtttgtataagttgtaatataaatataatgcgagaggacaaatcacactacagctctgagctgatgtttcgatgagcgcgacgaatgtttctgacttcgagacgatgactcgagacttatcacactcatgcgcagtgcgctacgtgagaggtgcagcncaatcagtangtaactgattagtgccacggcatgtcgacgccaggtgagctatgcgacgaacataggnaagngctgagagatcgacgaagcgatactatgccgctgtacta

SEQ ID NO: 12261 - DNA, 360 bp, Glycine max
  misc_feature (325)..(325): n is a, c, g, or t
  Coding DNA Sequence Number=SeqID_2482
tagggctcgctacaccttcgtttgttctagccagggccgcgccgactttcgcagcaacctccggcggctctcccccgatggatccggaggtggtcggcgtcggcggcgacggcaggggtggatcgaggcggcgtctttcctgcctcctcgcccgaagatgacaggccgtgcaatgaagttgcttagaatacaatgctgctgccgtccaggcatcatcagcctgtgtaatccaaattagttggtagtacaagtgatacacgacaagtggagaacaaaaattagaaaaagaacaaatccagtttcagtgtttcagtcaaaggagaanaggtcttattgcgaccttgaacgaacagcaaaatc

SEQ ID NO: 12262 - DNA, 591 bp, Glycine max
  Coding DNA Sequence Number=SeqID_2483
gtgctgcaaagtcctaagtggataaaatgaatggaagggcagtgctccaactcaacttgtaatcgcgttcaaaaccttgagaggaggatttcaatcaagaaagtggtaccaccaaagtcaatttgtccaccatcaccaccactttgaaggaagacctcattgacacccccggtttctccaaagttaaagtcccctaggcttcctgccacaaagagaggcaatgacaacaatggacttaactcgagctatgagaagattgtgattcctagaagctccacaaaaactcccactttggagagaaagaagtacaagagcttcaaggaagggtcatgtgtgtttgtttccattgaggcttagttgagttactcgtcttctttgatcactgacttcccatgttacattagctgctgtgaggagggaagaatatggcactgcaactagcacaaaggaaaatgcagattggccattatgggaaaacaaaggtttgaaaagcttgaaagagttgttcctcttgaatccctcaaacactaacacttggtttaaagtaaactggaggaggaaaaaaagatgtagttttattcaaccccagtt

SEQ ID NO: 12263 - DNA, 578 bp, Glycine max
  misc_feature (500)..(500): n is a, c, g, or t
  misc_feature (527)..(527): n is a, c, g, or t
  Coding DNA Sequence Number=SeqID_2484
gtatgttgtcatagctacactgaacaaatcaactcagtgctacatgtataattatatcgtcgatacattagtgtgatctgcagtaacatgtcactcagcgcgcgctctgctatgtctacatctattatatcgtattgtgagagctgctcgttctggacggtgcgagatgtgtctcgcggcggcactgcgctcaatgcacttaggaagtgatatctactgaagtgcgatggaagctcaccgtgcgcggaaggatgtggagtgcgtgatgcttcgtgagatgactgatggatagcagcatggccgcgcgagcactacgattctctgtacacatccgacgtcgcctaccgcatatcatacctcgccgcgctcactgctccgctacctgcatatctgctctcttgcctgctctatatacagcaacccgcgcacgccactcgcactctcatcgcgactatgctcccaagcacctcgctatctagcttcactatcctagaataccncacgtctcagcgcctctctctcgcttnctcctgtacttccgtcgtgagtcgcgtgcgcggctcgactctacctagtta

SEQ ID NO: 12264 - DNA, 470 bp, Glycine max
  misc_feature (445)..(445): n is a, c, g, or t
  Coding DNA Sequence Number=SeqID_2485
agcatcaagaggttgtgttgcaccaattttaaaagtaagttgagggtggcggatttaggatgtgcttcgggaccaaatgcacttatggtcatggtacaagaaaggcgagatggagtaggtgcatgcgttgtcaatgcaacaccagggagcttttacggaagactctttccgaataattacattcacttctttcaatcttcctatagcctccattggctctcacaaacccctgaagagttgatcaagggagcaaaaccactaaacaagggaaacatttatataacaactacaagctctccaatagtctttaaagcatacttagagcaattccaaagagatttcagtttttttctaaaatcacgttcagatgaactaaaagttggtggcattatggtactaactttccaaggcagagaaaaagctcatgaaattactcatcctttantggtgattgggatgctgctcaaaga

SEQ ID NO: 12265 - DNA, 577 bp, Glycine max
  misc_feature (268)..(268): n is a, c, g, or t
  misc_feature (383)..(383): n is a, c, g, or t
  misc_feature (546)..(546): n is a, c, g, or t
  misc_feature (548)..(548): n is a, c, g, or t
  misc_feature (552)..(552): n is a, c, g, or t
  Coding DNA Sequence Number=SeqID_2486
tatctaatattgtgtgtggccgtaaaaatatacgaccgactcgccagatacatatcaacatgccggcgcggctgtacattatgtgtgctgtggtgcgcaccacactcaccactctcggctcccacttgtgataaatatatacatcactctcatatgcggtgcctcgcctctcacatatatctcacaacacaactatccatatacctatatctacctatcgcgcttcccacctactatctactatcacatgatctgcacttctctctcntactttcataacacctctttatactcttcctctactttctttctatactgactgtgtgctgcggacacaatactctgcggactcatcggatccgtccacacccacatacatgtanctatatactgatctcatgcgctctctgaaataaaatactctcgtacatacgctcctctctattcatcatctctgctacctatctcctctctgcatacacccacatcacctctcaaacatataccccctccgtctcgcgtccgcgcggcgcttgctctgcggtnanatantatcatgtcgtgtgcgtgtgtgtct

SEQ ID NO: 12266 - DNA, 578 bp, Glycine max
  misc_feature (37)..(37): n is a, c, g, or t
  misc_feature (87)..(87): n is a, c, g, or t
  misc_feature (89)..(89): n is a, c, g, or t
  misc_feature (93)..(93): n is a, c, g, or t
  misc_feature (133)..(133): n is a, c, g, or t
  misc_feature (135)..(135): n is a, c, g, or t
  misc_feature (221)..(221): n is a, c, g, or t
  misc_feature (234)..(234): n is a, c, g, or t
  misc_feature (240)..(240): n is a, c, g, or t
  misc_feature (244)..(244): n is a, c, g, or t
  misc_feature (246)..(246): n is a, c, g, or t
  misc_feature (251)..(251): n is a, c, g, or t
  misc_feature (293)..(293): n is a, c, g, or t
  misc_feature (297)..(297): n is a, c, g, or t
  misc_feature (299)..(299): n is a, c, g, or t
  misc_feature (360)..(360): n is a, c, g, or t
  misc_feature (365)..(365): n is a, c, g, or t
  misc_feature (380)..(380): n is a, c, g, or t
  misc_feature (384)..(384): n is a, c, g, or t
  misc_feature (386)..(386): n is a, c, g, or t
  misc_feature (433)..(433): n is a, c, g, or t
  misc_feature (482)..(482): n is a, c, g, or t
  misc_feature (497)..(497): n is a, c, g, or t
  misc_feature (551)..(551): n is a, c, g, or t
  Coding DNA Sequence Number=SeqID_2487
aactcggcgagtacgacgtagtacaagatatgagtanagtacgcaggcactattgtcttacgtactatgctagccatctgatcgacnantacntgtaatacatagctcatagcgatatcagatacatagtgcnangtctgatagtatagatccgctaacgctacagctatgatactgtctcgcaaatactcgccagcgaaacgatgtcatacaaggacgcngcgcagcagcagnaggaanaagngngatgnagagatcgagtgacgagagtagatgtgctcagtgatcgtcangtgnantatgcgaagagtaagaagcaccataataacgatcagacgcacggagactcgacgcagagancatgntgcaggcgtgagaanacangngaatactagtctgttcttatcgcataagcctagcgacaggagtgtgntctagtcattacactatagctaggtcgagagaggagtcgtgtcgcagcncccgcgcgccgcgcnggaggtgagtgtgtcggcctgtcatatcagagaaagtatgaatcggtaagcgtntatagctatgtggtctagtgtatatac

SEQ ID NO: 12267 - DNA, 349 bp, Glycine max
  Coding DNA Sequence Number=SeqID_2488
gccaagttcccggaccaagaaggcatcctctcggaccagcagcgcctcatttttgccggaaagcagttggaggacggccgcacccttgtcgatttcaacatccaaaaggagtccaccctccaccttgtcctccgtttccgcggtggggccaaaaagggcaaaaaaaagacctacccccagccccagaagatccaaccccagcccaagaaggtccaggttggcattttccagttttacaaggttgacgattttggaaaagtgcaaaggctccgcaaggagtgccccaacgccgagtgtggtgccgggactttcaaggcccatccctttgaccgccactaattcggcaagt

SEQ ID NO: 12268 - DNA, 585 bp, Glycine max
  misc_feature (93)..(93): n is a, c, g, or t
  misc_feature (403)..(403): n is a, c, g, or t
  Coding DNA Sequence Number=SeqID_2489
acgtcagatgaggtgaacgccccgtccacatatatatgtcatatagacaagaaagtgaatagattgtctgtccgtcaacacgcgcgtcgttcnctccatagtccgtctactctatgggtgcgtagacatgagtgacattacgacatcatacctgcacggtcgtccacggtctgtgtgactatgtcatgctatttatatgctatgcactccctctttacaccctctctgcaaacgctataatatctcttcgtgaatcttgctctgctgtcacccacacttgtctgtgatctgtcatggacgagtagggagacggtcgcactccatactagcataattgttgaatagtaagtgatgtgtcgtgtgggtggtgagaaggataggccgctctccggctacgcagccngagtcatgctgctcgcgtcacctcagatattatatacatactcgcgctgcggtcgctgagatgactggatatgtaatactgagagtagtgtagtatttcaactaattgatctatgctacgataggaggcgaatagatgatacgcagggcagcgcgtcgctgtgtgctctcatgtcatgacga

SEQ ID NO: 12269 - DNA, 539 bp, Glycine max
  misc_feature (266)..(266): n is a, c, g, or t
  misc_feature (456)..(456): n is a, c, g, or t
  Coding DNA Sequence Number=SeqID_2490
atcatcctcacacccatatgcaaagacgtggtgacgtatagtatagcgtaaatatatatcaggcgcggtcgcacgcatcgccacccttcgctgttgcgcaatatacttaccgccgcgcatatactattacatgctcgtccacacccggatcagtgacgcgaggatatgggctactatcggcagtcgatgagggttgtattattatgttcgcgtatctagcgtcttgtttcgatgtatatattacaactactattcttattcgcgtnagcgcacaacctcgttattccatcccggctcatcgcgcgcgagcgtcactctattatataagagatatatacgcgcgcgcatctatgttgtatcggctctgcattacgagagatgtagtgatgtattagcaaggaatcagcgtcacaaagtggtggttatattagacgggatgaaatatacacccaccanccctctccttccatcagccgctcagtgtacagaagcgttgtattattgtattgtgagcttccccgcgcgtagagtcaaattat

SEQ ID NO: 12270 - DNA, 368 bp, Glycine max
  misc_feature (103)..(103): n is a, c, g, or t
  Coding DNA Sequence Number=SeqID_2491
tttggttccaagacttggctcaaaaacaattcgtcaggctgtgggtgttgtgggttgtgtcattatgcctcacaatgtattcctgcattctgctttggttcantcaaagaaagttgatcctaaaaagaataagtcaatacaagaagctctcaactactattcaattaagtcatcaactacacttacaatctccttcataatcaatctttttatcaccacagtttttaccaaagattgttataaaaccaagcgaacagataacataaaattaatcaatacaaaacagtatcttaaagagaagtataagaaaaaagtcttccctatgctgtgtatattaaaaattgggttattacacagctagcaatggg

SEQ ID NO: 12271 - DNA, 444 bp, Glycine max
  Coding DNA Sequence Number=SeqID_2492
agtcatcttgaggtggattccccgaggtccaaaaggaacctggaagatgaggatcaatctgaacagattttacaacgttccaagtatgacagtcctattgctgccgaatcaccatgcgaatcatctgccctgatagatgccttgagaagcgtaatgcgacgagggaaagacttgcatctgaagaggcgtgatgctacgcttgagaacgcggagcttcggatgtagaaccgtgaggcttgtctgtcgaatcgtgaggctaggatgtaaaagcgcgagcgtctcttgaatcgctatgagaatcatacacatcacagttggagcatgggcacgcggattttgataagaactgtaaggttgatcataattggtagctttataaagctgccctagaggacgccccctctgctatcagagtggtagtcactttctaactttgtctcttca

SEQ ID NO: 12272 - DNA, 455 bp, Glycine max
  misc_feature (85)..(85): n is a, c, g, or t
  misc_feature (121)..(121): n is a, c, g, or t
  misc_feature (125)..(125): n is a, c, g, or t
  misc_feature (144)..(144): n is a, c, g, or t
  misc_feature (258)..(258): n is a, c, g, or t
  misc_feature (403)..(403): n is a, c, g, or t
  Coding DNA Sequence Number=SeqID_2493
tacggacggcgcgagagggagctaggcgctgagatgagggaagaagatggtgatgacgggtagtgagagcacagagggaggaatnaagagttgttatacattactatacgtatattgatanaganagagttgctgagccaatangatgaagatgatgagagagagctgtggcaggagaggagcggttatcgatgctgtgtaggcagagaaggagcgtccgcaacctataccactatacactcatgtatcaaagttagngccgtgtggcgacatgagattaagaaatgaaggagactccaccgcctcgcacaagaagacagtagaagtggctaaggaagaaaagagataatatcaataattgtcacgtcctctgctctggccacgcgcgggtgtgttcctctcntattatgttggtatgcagcccgacccgacacagccggaggagcgatgctacc

SEQ ID NO: 12273 - DNA, 549 bp, Glycine max
  Coding DNA Sequence Number=SeqID_2494
ttatgtaccctgatcttacttcattcttgatcaacttccctgaatctgttgatcccgctagaagctcctttgttcttagagaatgggaagctgttaaggaaggacatctcctcagaagacccagagcctgtaccattattgctaccactggtaacagtcttttgattgtcgaaaagaagcacaaagaacaagagctcggaaaggttgaaactcccctccaaatgagatacaccaaggttgaaaatattgcagaaggaattgatggaacaacattgaaggttgttgaaagaactccaggaaccttgttcacccatactcacaaggctagactcaagttcgaaacccaagaagacgctcaatcatttgtcaatttcttgagcaatcaaaccagtcaaatgattggagatgtttaatggtttagtacatatatcaattataatatgaaagaagatcttagaatgaagaattttgctgaaggtttatggatatagaaattggagtatatgtatataagaaagtttctttaaactccattcattttccgtatta

SEQ ID NO: 12274 - DNA, 255 bp, Glycine max
  Coding DNA Sequence Number=SeqID_2495
gaaaggatgattcgcatgttcgactggaaccgattattcccttttcaaaagcagttctcaaaagaagccttaaagaattcagatcctaaagacgttgagcagtatgtcaatcaagtcatggaaagtgtattcggctccaattatcctgctcagttcccatttcaggaccccctttctcaaaatcaaaaaacgagagaaactgatgtcgaaaaagaaaaagagccagaagtcaaagtgttcgagacgactgatcat

SEQ ID NO: 12275 - DNA, 439 bp, Glycine max
  misc_feature (232)..(232): n is a, c, g, or t
  misc_feature (242)..(242): n is a, c, g, or t
  misc_feature (403)..(405): n is a, c, g, or t
  Coding DNA Sequence Number=SeqID_2496
tggaatggcccgcttacaagccccaagattaagagcgagtgtacgctacatgataagggcgtggaaataaacaaaagcgaaagactaagaaagaaagaagagaaacataagaaaagagagaacgaggaaaagaaagaaagaaagacagaaataaacgcatatgggattatagaataacacgaagaggggaggtgagaggcaaaggcggagcccgcccggggagaagcgcacnaaaaccgganccccttttatctatttttgtatctcgcgtgttgaaactataatgtgtgattagacaaatctctcggtgggccagaaaagctctatgtggcaccggattgtcacgtaggataatgcgtgagtttagagcgctctgtcgacggcggtatcagaaagtagtagnnnagatagtaacaaacagcaaaggaggagccaggaa

SEQ ID NO: 12276 - DNA, 558 bp, Glycine max
  misc_feature (57)..(57): n is a, c, g, or t
  misc_feature (75)..(75): n is a, c, g, or t
  misc_feature (89)..(89): n is a, c, g, or t
  misc_feature (138)..(138): n is a, c, g, or t
  misc_feature (142)..(142): n is a, c, g, or t
  misc_feature (179)..(179): n is a, c, g, or t
  misc_feature (388)..(388): n is a, c, g, or t
  misc_feature (397)..(397): n is a, c, g, or t
  misc_feature (420)..(420): n is a, c, g, or t
  misc_feature (447)..(447): n is a, c, g, or t
  misc_feature (465)..(465): n is a, c, g, or t
  misc_feature (502)..(502): n is a, c, g, or t
  Coding DNA Sequence Number=SeqID_2497
tgagcacactacagactcagcgcgtgaacaatgtaagtgggtgatgcgcacagcgtnaggcgtagaagagtcgancgacgtgcgctcgngtgcacacatgcacgcacactgacacgcaagaacggcgatcgtcgaacncgantacagacaaatggcaacacacacacatgtactagtgngtattgctcgagacgacacagaccgatagcgcgccgccctcaccgcacgtcatgttgcgtcgcaagcgaccatctcaaacactaacctgctacacacacgcgtcgaccagcactgatgtcggcgacacacgcgcgtggtgcacactgacgcgacgcgaacaagactgagtacactggtagcgaacgcgagtcgacgtgatgcgaatgtnatgtgacantcatgagagaggcactatgacgnctctagcgaagcatcacacacgagcangcactatatgtatattgnagagctacatccgcactcacgcgacacagagataagngtcatacgtgacaccgctcagactgcgactagcatcgtagcgatacctacactgta

SEQ ID NO: 12277 - DNA, 238 bp, Glycine max
  Coding DNA Sequence Number=SeqID_2498
ttatttctcgggaagaagtatacactggttgcgtggacctagataaggagccttacagggataattaaaagggcaaaaatggaccagcggttgtggaacaagaaaattgaaagatatttaaacccaggggggttagggccctgggaaacttcccccgccctgaaaaactttggggaaaattaaaatttcccctggaaagaaaaccccttttgatgaggccaaaaaggcttattccttc

SEQ ID NO: 12278 - DNA, 435 bp, Glycine max
  Coding DNA Sequence Number=SeqID_2499
gtgattgtactatacacaccagtcttagcagctgcggccattgcagatgccgaaggatgacatttatgtccaccctttgtgatatggaccgcacctaagacgtgaatacccaataagccaaaaaggcagccatcaagttcgaataaagctcttgctcttcacttataatgaaaacaaatgaaaactataaacctataaatttattttacaataaatacttatcagttcgtatactattcagattttgactgagtgaagtcaagaagaacaagggccttcatagtaactatgaagatcacgaaaagagctaagatagcctatgaaggtttaccgagataatacataaaactacggagtatttttacttcggaaaagtgcgtgaagatcttgccagagatctaagggcccagcttaaagacccttctcaagctctaa

SEQ ID NO: 12279 - DNA, 450 bp, Glycine max
  Coding DNA Sequence Number=SeqID_2500
agtacctgaaggtaatgctcacatctcagaccctttcatttatatgcatagaaatgtgacgaaaagaaaaaaacttgatctgtttcatgagttgagttaatacccactttgcctatgtttacttcaaactcttgttctgcattgtccactcttactctgatttgcctgctgcaatggttctttaggttgctttctcttacaatttttgtgggtaaactttagatctgtccattatgttgagatttagcttctttgagtaaaaagtaaaagcacattaccaaagttaatgagatgttttacctaattcaaatgagaagtgaatatactatctcattttacatatatgggatctgattatgtgcacttaataaaactgattctgaagtagttttttttctttttcttgtgtgttttgtttgtaatttttaactgcgcagcttaccttcaaaa

SEQ ID NO: 12280 - DNA, 442 bp, Glycine max
  misc_feature (165)..(165): n is a, c, g, or t
  misc_feature (224)..(224): n is a, c, g, or t
  misc_feature (250)..(250): n is a, c, g, or t
  misc_feature (275)..(275): n is a, c, g, or t
  misc_feature (328)..(328): n is a, c, g, or t
  misc_feature (344)..(344): n is a, c, g, or t
  misc_feature (346)..(346): n is a, c, g, or t
  misc_feature (365)..(365): n is a, c, g, or t
  misc_feature (372)..(372): n is a, c, g, or t
  Coding DNA Sequence Number=SeqID_2501
gtgatgctcaccgagtggaacagagggagcgccgcggctcgtctcgcgtccgagtacagaaagggagtgatgtcgtggcgaagacgctccgctcggtgtgtcgctcgctgcctcgtgtgcatggagagtgtacgccactctcgctcctgactgacacggtaggtngtgggatgcgatggtgtgcggacggccacgttatctcctctcgagtgggaggtgatggntctgctatgttgtgcgtaccgcgcgntgtgttcgttcgtgtagtgttatgntccgacagctacaggcacgggaggtggtagagtgcggcggccgcgagtggcgncggtaggtgaggtggngntgactgatgtgagaggtgncggaggngcgagctctatgagatacgtagtgggagagagcagatgcgtgcgatacatcgcgctgcacacgagacgag

SEQ ID NO: 12281 - DNA, 460 bp, Glycine max
  Coding DNA Sequence Number=SeqID_2502
atttctcgtgcctacttgcaaagacccaaagataatcctaatatgttcaagtacttggcttgacatggtatgcataattgtgcaaataaactggttactgcaaaatcaaaccaaaaggatcatgcttaaccttctcaaaaaaaaagagaggagtttttcctaaacaatccttgaagaagcatctgtcagtgcttgtatattttccctccatgtagatgcgtcatcatgtcggaaggtttcaatctaatttccataatcctctggtcatgttcagtgtccaactcttttgtcttcttcttcttcttcgctttctatgtgttcaattttttctcctagtttctgtacgtcgcctcatgtgtttgttcgttcgagctttgcgagggttgatgatgattatttggtgattctgttcctccccgtaatgcaccgtacgtatatgaccttgaacagggtttgccac

SEQ ID NO: 12282 - DNA, 463 bp, Glycine max
  misc_feature (172)..(172): n is a, c, g, or t
  Coding DNA Sequence Number=SeqID_2503
tggaacacctatgcttagtactagaaacatagaactagtatataggtaagacttgatcgttgaaaaagcagcggaggaaagaaagcgggagactccagttgcggactacagatacacacatttggagacttacgccaagagctcggagtggagaatgaccaagagcctctgnccaagagatggctataaagaatgacagcaagtgatccagtgcaaatagagtcgttcacccagctgaaggatgcagagatgaactctgccaagctggacaagcaggcgagtcttcagcataacacgggggccagacatgccgtcaccactgatgtgcacatgcgacatggccaccacaccagcggaaccgggactggaaccgcctcgtattgcaccagcggtgaatatggtcagcccatgggggcccaccagacgtcggtaatgccaggacatggaaccgtgcagcccacag

SEQ ID NO: 12283 - DNA, 482 bp, Glycine max
  Coding DNA Sequence Number=SeqID_2504
gaaccaacgaattcgggttgccgaggatgcagccggaggaaggggacgcccgaatgcccacggcggtcgccggcacccttgggagtcagggcccggagtaagtgcaacaaaacgcaccaagaccggaggccagagggaagggagtaccagcaaccgggcagcaaaaagcgggttgtacacagagatgctgcgggtacaaacgaccacccgaatggagggaaccgggggaagctagcagatttggggtagtcaaggatgagctcagaagaggacgacccgcaaaagcccacagcggagggaggccccccaggatacaaagggcagagggtagactgcatgcaggggggaagggggatcaaggggattgaggattgcagggagcagggggaattcgacatgcgacgagggccgaaggccctggacagggcagaggcgcgagcagcacccacaaccggccaacggcgacccatgacgcaagtgga

SEQ ID NO: 12284 - DNA, 486 bp, Glycine max
  Coding DNA Sequence Number=SeqID_2505
cccccaagtcttctctgattcttgaatctgatctgattcttggaagcttgatcctgaatctgattctgattctgaattcaactttcctcttgaatcttgaagtgttcttcaactttcctcttgagtcttgaagtgttcttgattctatcttgaacatcttgaacttattctttgattgacctttgaactttttgtcatcacctttgtcatcatttttgttattatcaaaacatctttgaatcaatcttgattcatcatgaagctttgcttctacaaatatgtaaaaatttaattttctccacacacacacatatacatatatatgaggagggatcaagttactctaagagcaactctaaaagagttactcttcatcctcactattcattttcttggaatctaacagttaagattttagagttgctcttagagtaacttaacccccctccccccttctccctctcaagtgtcctatattttggacat

SEQ ID NO: 12285 - DNA, 170 bp, Glycine max
  Coding DNA Sequence Number=SeqID_2506
gcattcgtgttaaaattttcttgtagggttatttatttcaagtagcataaagcatcgagtggggaacaaggttggttggtagttatgtctataggttattgattgaagaataattaagagatttgatcgaaaaacgaagaatgtgcacaaaccgtgtgcattgagagcgc

SEQ ID NO: 12286 - DNA, 536 bp, Glycine max
  misc_feature (142)..(142): n is a, c, g, or t
  misc_feature (288)..(288): n is a, c, g, or t
  misc_feature (443)..(443): n is a, c, g, or t
  misc_feature (453)..(453): n is a, c, g, or t
  misc_feature (506)..(506): n is a, c, g, or t
  Coding DNA Sequence Number=SeqID_2507
gagaaatcccgtaactccttgggtgtctgaggtgcttcatggggcgaaacattgacacgacccttattctcaatggcagacaccccctcccctctcgtcctcaccgaggcagtaccagcccactctgtcctgcacctccccncttctttcccgcctgcccacgtacttaacccacgcgcgcgtctacaccatttgacaaatagtttccaatagtctctccacccaacccaatcccgtccctacgctgcgtcgtctttccacaccatctatctcacacgacgccatccntcacacccatcctacaccaccgccatactttcgcaacgaaaccgcgagacacgcagcaggcaaccaccacgcttttcacacacgcgatgcacgccagaaatgcagcgtcgctcaccgcttctccacaccgaaacacgattctgtgcacggcggcncgctacacancacggcacctactcacccactactcgctcacgctctgtcaccaacgcaccgangtcacttatatcacaatacgcgcgctcgat

SEQ ID NO: 12287 - DNA, 551 bp, Glycine max
  misc_feature (73)..(73): n is a, c, g, or t
  misc_feature (203)..(203): n is a, c, g, or t
  Coding DNA Sequence Number=SeqID_2508
gacgcggcgacgtgatatgctcaatgtgtgtagttaggatttacgactagacacattattcgtcctcttctcnactctgctccagcttgtgcgcagcggagagcgacgatagagaagaacagcggactgttagtgtgaaagggacggcgaggatatcatgtacaggccccggattggagactcctacgtcgtgttgactcatntccttgtggaccatccgtccgtacgctatgctcgggagattatacagagctacagcagacggatatcgttccttgagccaagatcactagacagaggcgtcattacgtctatccatcgtcgcgccggcgagcaacattgttagttagattccatcgcgtgcccatgtaatatagttatacatatcactaacaatatcgactcgcctacgtgaacacactactaaagacatataggatatatcacaagtactgttactacgatctgagcccttggatagtcgagtgcgtgacagcggcgcggcgcccacgccgacccatcgcagacagaggccgtgtcgtgaagacgaa

SEQ ID NO: 12288 - DNA, 265 bp, Glycine max
  misc_feature (240)..(240): n is a, c, g, or t
  Coding DNA Sequence Number=SeqID_2509
gttcgatcaaattcattttttgtggttggctttctgagtgatcgccggcgaatgaatggggctgtgacacggtccacaagccaatgctgtcttgtctgtgacacagagacagccagtggtgacggatttctaaagcgattgattgagtctttcgaggagcatggcgaatctctgagtgcgtctgagtgccagagtgagtgggccaggttcacaaggctaagatttcttttgttgcactcncctgggatcaacttagttgttttgc

SEQ ID NO: 12289 - DNA, 538 bp, Glycine max
  Coding DNA Sequence Number=SeqID_2510
gaaccaaccggtcgaaagaagctctaagattccagtttcgcgtttggaaaaggttgtcgactccaaaaaatctaagggaagagatcctagatttaactccctatcgggctccctcaatcctgagctttttaagaaatcatatgagttccttggggagaagaaaaaaaaagagattgaaattctgagtaaagagatgaagaagaaaaagtatactcctgagcagaagcaaaagcttcaggacgctattgcgcaaaacaagagtgatctcggtcgcgccagagagctcgacttagctaatcagactcgcaaggaaatcaaagcaaagacgaaaggacagtttttcttgaagaagggcgagttcaagaagaaggtcctggagaagaagtttgataatcttgattcgagaaagaaacttgaggccaagctgaatgagaagagagctagagtaacgaagaggatgcatagggatatgcaagtgcttgaagctcgtaaagagaggagagataacctctagaagaggccttgatattttgtgtac

SEQ ID NO: 12290 - DNA, 276 bp, Glycine max
  Coding DNA Sequence Number=SeqID_2511
gtttgcggacatgagcaaagtggacgagcggaagctgcagcccccaagacttaagagggggatagagttaaccccctagtcctggcaatggaagtgattcaccattttcatttccacctgatccctgagattttatatgtcaagttttctggccttcgcaccttgtctctaggggctactggggacagcattttctttggttgtttgacattagagcagttctaatgtagggtatatcaggggggatgaccgcaataaacaggcaaatagctgata

SEQ ID NO: 12291 - DNA, 460 bp, Glycine max
  misc_feature (64)..(64): n is a, c, g, or t
  misc_feature (76)..(76): n is a, c, g, or t
  misc_feature (89)..(89): n is a, c, g, or t
  misc_feature (102)..(102): n is a, c, g, or t
  misc_feature (183)..(183): n is a, c, g, or t
  misc_feature (191)..(191): n is a, c, g, or t
  misc_feature (193)..(193): n is a, c, g, or t
  misc_feature (224)..(224): n is a, c, g, or t
  misc_feature (299)..(299): n is a, c, g, or t
  misc_feature (301)..(301): n is a, c, g, or t
  misc_feature (318)..(318): n is a, c, g, or t
  misc_feature (321)..(321): n is a, c, g, or t
  misc_feature (325)..(325): n is a, c, g, or t
  misc_feature (382)..(382): n is a, c, g, or t
  misc_feature (415)..(415): n is a, c, g, or t
  misc_feature (427)..(427): n is a, c, g, or t
  misc_feature (429)..(429): n is a, c, g, or t
  Coding DNA Sequence Number=SeqID_2512
gtatagagtcgagcactctctgtagtagttcgtcgtcagattcatatatagtataaatgttctntagaacacactntgatactactatncacaatgattgtnctccaccaccggctatatgctgcgctctgtgtgttgatgtgatgacgtgctgctatagacgccaagtcacacgcgctctcnacttaccncncgccacggcacactgcatctttctagagggntagtgagcgacgcgtatggtgtgatccttatgctgcattagtaccaactgctcctcataattagtcttatacagncntccgtcgagagcagacnggncggngcgagacgatagagcagtagatagtatcaccgcacgatagaacgagagagtagactntgagaatactcaatctctacatcacatatcctnattattatatgntnatatattattcacactacacgtgtacaccac

SEQ ID NO: 12292 - DNA, 210 bp, Glycine max
  misc_feature (137)..(137): n is a, c, g, or t
  misc_feature (146)..(146): n is a, c, g, or t
  misc_feature (174)..(175): n is a, c, g, or t
  Coding DNA Sequence Number=SeqID_2513
aactgagccagaacgacacctgcgccgccttaaacgacaccgttcctctccccgttgggaagagcaccgctcctctcattcaaccacgccaactctcgtggagggatggcagtgggaccatgatggaacgcaaaggnaaaccactnacccaagaaatcactgaatcccggaagnncgccccaccgacgtaatccgactgcaggggctagg

SEQ ID NO: 12293 - DNA, 581 bp, Glycine max
  misc_feature (180)..(180): n is a, c, g, or t
  misc_feature (225)..(225): n is a, c, g, or t
  misc_feature (519)..(519): n is a, c, g, or t
  Coding DNA Sequence Number=SeqID_2514
acccacgcgcacgagatggtaatgagggagagagtatcatgagctgcgatgctctcgtcttatacttctcactatatctccggcgctctgtgtccgtcgctgcctctgtactacactctaggctcgcctcgagacagatgccagtgggtgcatgcacgctcatctctctactctcgcatncatattctcaggatggctatgtgctaccattacctattctatcgnacgctactatcgatgctgatcgctaacgctgagtcggctctccgaactcaccctatctcgcgtctctgcctcacgcgctatcctctccacgccacgaaccatcgatgaagcacagcgcacgcacacttactcactcagtagcttctcgcacgcgttactcgctacacactcgcacgcagcttattaagcatagacatagtaatctacttatgaaagagaagacctctactatatctgtggagaacgcataatacaactcacacacactcgcacagctgtcctctatctatgtcngctgcgctatatatataacactacgcgcgcgctgtcctacgacacgtggcacgctgtagtgc

SEQ ID NO: 12294 - DNA, 520 bp, Glycine max
  misc_feature (36)..(36): n is a, c, g, or t
  misc_feature (41)..(41): n is a, c, g, or t
  misc_feature (53)..(53): n is a, c, g, or t
  misc_feature (67)..(67): n is a, c, g, or t
  misc_feature (75)..(76): n is a, c, g, or t
  misc_feature (101)..(101): n is a, c, g, or t
  misc_feature (104)..(104): n is a, c, g, or t
  misc_feature (115)..(115): n is a, c, g, or t
  misc_feature (147)..(147): n is a, c, g, or t
  misc_feature (163)..(163): n is a, c, g, or t
  misc_feature (198)..(198): n is a, c, g, or t
  misc_feature (238)..(238): n is a, c, g, or t
  misc_feature (272)..(272): n is a, c, g, or t
  misc_feature (275)..(275): n is a, c, g, or t
  misc_feature (284)..(284): n is a, c, g, or t
  misc_feature (297)..(297): n is a, c, g, or t
  misc_feature (366)..(366): n is a, c, g, or t
  misc_feature (375)..(375): n is a, c, g, or t
  misc_feature (427)..(427): n is a, c, g, or t
  misc_feature (461)..(461): n is a, c, g, or t
  Coding DNA Sequence Number=SeqID_2515
attcacactttatctagctgcgctttcatcggcagntccgngatggtcgcgtngcgtcgtccgtgcngacgtganngactgaactagacatgatactatanatncttatcatgtncacgctgctccgatattctgcactaacgaccnacacgatactatactnacatacagtactacggcatgtatgacgagacacancatccctcgctctcgtatcgctcgcctacctagagaatgngattatactgatcgatcgatatatagtcgacganacncgactatcngagctacatatgntacgacgatatgacacatctcgacatatatatctgtctcatatactacgcgtctcgtgcgttatgtcanctcatgtangacgatattgtcagagctgctacagaagctatagtatatacagcacggcgcngcgatcaccgcgcacgatcaatatctatacaaancgtcacatccgactatactatatcatctttacatgaactatactaattacactctatcg

SEQ ID NO: 12295 - DNA, 536 bp, Glycine max
  Coding DNA Sequence Number=SeqID_2516
gaacatggcaatggctgccgataaattgaaacagaaatctgaacaacggtacgttggcgagggaatagaaaagatcgacatgaaagggaaagtggtaatgagcatggaggctggcattggagtgatgggcaccaagttgggtatgatgagctatttcgtatccggcggagaggttgttcctgtcactgtcgtgggggtcaaacgaaggcaacatcgtcgcccagatcaaaactgaggccaccgatggtttcgacgctcgtccaggttggttaccggatggtcagagatcgcaaattgaccgaacccgtcatcggtcatctccagagagtcggcgccattcccatgcgccatcttcaggagttccgtcttcaagccatcgatggactggacctgaaccagcgccttgtttttgatgaaattttcaaggagggtgatcttgttgatgtctctgggaccaccatgtgcaaggagtgccaatgtgaaatgcatgcatcataacttcaaaaggcgttcatggacccatgttgcgagactca

SEQ ID NO: 12296 - DNA, 496 bp, Glycine max
  misc_feature (229)..(230): n is a, c, g, or t
  misc_feature (344)..(344): n is a, c, g, or t
  Coding DNA Sequence Number=SeqID_2517
gcatgcgacgcatatggtctatgatatgttgatgctcgctgtagtgtgagtatctagctatgagatgagttgtggtgtcgtgatgctctctctgatatgttcgaatttcgtcaccaagatcgatcgcgggcatggctgaggacatatagactctcgcagtagtcaccttggtagtgcgggctcagacgatatctatcggacaatacgagacagcgatggctggtgtagnntcagtgtgagcgagatagacgataccagcatgggcgctttgtgcgtgtcactgtatgacacactgatcgccatccttgcctgccgcgcgcgccgcacgacccggcgagacatantctgcgggacacggtacacgatgagaagatccaatagataacgagtgagtacgcacgtgaatagaactgcataacatgtgatatacgagtatggtgacgtgacttctacgatatatcagctgcaataatcgcacggtacgatgcgcagtaca

SEQ ID NO: 12297 - DNA, 212 bp, Glycine max
  misc_feature (40)..(40): n is a, c, g, or t
  Coding DNA Sequence Number=SeqID_2518
tccagcatcttctctaatgcacaaacttaagtttttttanaacaatgacgatttggcattagtccaggcaagtttgacatttgtgaacaaggattggaatttgcttacgagatgtcgcggttactaaacactaattcatctttccactttgaggttgaacagcaggtcaatggtgaattcgttaacttcagttttaatggtgtctagagaat

SEQ ID NO: 12298 - DNA, 482 bp, Glycine max
  Coding DNA Sequence Number=SeqID_2519
gcaaatgggttctttaatgtcaggatgggactctccaacaaaggatcccaactcagtgagaaggtgcaagtcactgacaagagaagaaatcgacgctttctggaaaacaaagaagaagaccgaagagaaacatgttcaagccgtttccaacttggtagctcaggaagttgcggaaagtcaggggatagaggatcgttatgaaaaccaaagcaagacgactggatggtggaaaagaagcaactgggcgttcttgaatgagccgagggaggaagagggtcgacccaacaattacgttccgcagttccaagtagctcacatcgccaaaatcgccagtaacagcgctggagtcaccggctaatcacaagtcatctcggtgaattgtgattttagttttcttttgtgatgatttaattactgggaagtcacatgttatgtatgatatggtggttactttaatgtgttggccgtattagtatccgaat

SEQ ID NO: 12299 - DNA, 180 bp, Glycine max
  Coding DNA Sequence Number=SeqID_2520
gctggtaagcgttcgcgttcgctcgtcacgttccccgtcacttccttctcgggttcggccttttaaccatatgggttatggaattttgggtcaagggaatattaagactcagcatgttgagggcctggagattcttttttaaaggcctatgtgggtttcaaagaaaacgattgaggatcc

SEQ ID NO: 12300 - DNA, 218 bp, Glycine max
  Coding DNA Sequence Number=SeqID_2521
tcgccgactaccacatccagaatgttttttttattcaccgcgacctccgcctccgcggaggtgtcaacccccgcaacaagaagacctagaccaagcccaagaagatcaagcacgagcacaagaaaggcaaggtcgccctcctccaggtgtacaaggaacgaggactccggcaaggggccggaggctccgcaaggaatgccccaaagccgaagggcgga

SEQ ID NO: 12301 - DNA, 397 bp, Glycine max
  misc_feature (47)..(47): n is a, c, g, or t
  misc_feature (54)..(54): n is a, c, g, or t
  misc_feature (74)..(74): n is a, c, g, or t
  misc_feature (113)..(113): n is a, c, g, or t
  misc_feature (209)..(209): n is a, c, g, or t
  misc_feature (223)..(223): n is a, c, g, or t
  misc_feature (245)..(245): n is a, c, g, or t
  misc_feature (273)..(274): n is a, c, g, or t
  misc_feature (303)..(303): n is a, c, g, or t
  misc_feature (336)..(336): n is a, c, g, or t
  misc_feature (352)..(352): n is a, c, g, or t
  Coding DNA Sequence Number=SeqID_2522
accggcccaccagagagatgtatgtgaaaagaagagaacgggtagangaagaanaattatgtcgtatagcagangcagtgtattacgacgtattagttgacggcgatagtttntattagtgtgatgtggtatgctacgcatcaccatcaaccatacccaccatcaacatacacaacagcacacaccgccgcagcgacatgatggcaggnacgaggcgcgtcgngacgcccagggagcgttgtacngcctttgctatgcatcttgtgagccctnnaatcgcgcagaaccagtcacaagattacnacgttatacatatcacagtaagtgtttacaatncataccacacacacancatgttaacgacactatataggaacaaacataacacacgatgtgg

SEQ ID NO: 12302 - DNA, 349 bp, Glycine max
  Coding DNA Sequence Number=SeqID_2523
ttgttccacattgaagagacacactcggtgcttataagaaacacaaaaagagatcgagatctaaagaagtgtagcttccctacaaagcaaaaacaagtaacccattgtttctgaaccagattcacacataacacttatttggagaaagagtaatgagatgcctatgaatctgcaacaagtcatttgtaccatacttagagagagcttttgacttccacctagggttgttaagaaggaacatatggtggtcaggagcgcacattataaactgaacaaagcattttgtatttataagagaagcaggtgggaatatttgaaagtccataatctcttatctgtgaattggaag

SEQ ID NO: 12303 - DNA, 381 bp, Glycine max
  misc_feature (89)..(89): n is a, c, g, or t
  misc_feature (109)..(109): n is a, c, g, or t
  misc_feature (200)..(200): n is a, c, g, or t
  misc_feature (218)..(219): n is a, c, g, or t
  misc_feature (266)..(266): n is a, c, g, or t
  Coding DNA Sequence Number=SeqID_2524
agtgcgactaacgatggaataccatcgtgatatcgatcacatatccgtcagtcactactccatacagcgcgaggagactacgtggaggnaagtagcagcgcacgaccgncggtcgacgggccgcgcgcgggcacgaccggtgtgcgcgccaccccgccacacacgactcaatgataaaggcagaacagagtgcagcaccntcggcgcgaattatgttnnctaatgttatccacagcgtggcggtccgcctcagtggtactcagacnatgtatctcgatgcgatgtatgtgatcggctagcgccacagccgcatgttcaagtgcgctcatcggctgcgcagctcacgcgaatgacagcgtcaatagagagcgccggtgtcac

SEQ ID NO: 12304 - DNA, 330 bp, Glycine max
  Coding DNA Sequence Number=SeqID_2525
ggcaaccgctttttcccactaggatcatataacatattggcatcatcttggggcgctgccggaggtggattgaaactaggcctggcaggaatctgtgcctgtgaaattactgttatgctccattactgcattgtcctccgtggtacaccagtcaaattcagcatacctgggatcagccctgaaatcatctacacaggtgctccacttgatatccattgcgcagagaaaccttattgtgctgaatcctccaaatgggtggcgtttgtggacaatgaaatccaaaaggcatgtgtgggtattgggtgtcctgagggtcattcgtgtgcacaa

SEQ ID NO: 12305 - DNA, 272 bp, Glycine max
  misc_feature (43)..(43): n is a, c, g, or t
  misc_feature (192)..(192): n is a, c, g, or t
  Coding DNA Sequence Number=SeqID_2526
aaccctagcagtcaaaaactccgcagagtaaaaaaaaaaagangaaggtgatcgctgctttcctcctcgcgaagctcgccggaaacgagaagccgaccaaggatgatctgaagagcatcttcgattccgttggcgctgagttcgacgaggccaagacagatctgttcttttctctcgtgaaggatcacgacntggccgagctgatcgctgttgggagggagaagatgggggctctatcttccggcggtgcaggtgtcgctatggtggctgga

SEQ ID NO: 12306 - DNA, 545 bp, Glycine max
  Coding DNA Sequence Number=SeqID_2527
aagcctattgctatcgacgatgaaaagaagctttctgccttctacggtagaagaatgggacaagaagtcgacggtgaacaccttggtgatgaattcaagggatacgtcttcaaaattactggtggtaacgataaggatggtttctccatgaagcaaggtgtccttgtccaaggtagagtcagactcctcatgaaggctggccacaagtgctacagacccagaagagctggtgaaagaaagagaaagtccgtcagaggttgcatcgtcggacccgatctttccgtcattgccctcgccatcgtcaagattggtgaacaacccattgctggtctcactgacaccaagcaacccaagagactcggacccaagagagccaccagaatcagaaagcttttcgctttgaccaaggatgatgatgtcagaagattcgtcatcagaagaaagatcgaaaaggaaggcaagcccgtcagatataaggcccccaagatccaaagattggtcactgatgctagactcagaagaaagagagtctacaaggcccacaa

SEQ ID NO: 12307 - DNA, 467 bp, Glycine max
  Coding DNA Sequence Number=SeqID_2528
tttctcctttgctcatcacatatcaatttaaattataaaggcccaagaaagttttaagtccaaaaaagaagggaaaaaggataaaatctatctaaggatatatcgggtctgtaaaagggggggccctggaacataaccaatgcgaagaatgggatgactataatcaatatcccttgcccagaacaattttaacttcagcattaaattagggcaagtttttatcccctataacaataaataaaaaaacaggccgcactattttgaacagattgttgaatactcgttgaaacattctccaaagcccaatagcccaaaacgatcaaagttgaagtaatggcaataaaacatcagcagttgatgaatatggcacagggatgaacttcacccacccgtatcaaacttcaaaaaaaaaagctttttttaaagaccgatatgaaaaaaattttcatttttattgcctccaatct

SEQ ID NO: 12308 - DNA, 588 bp, Glycine max
  misc_feature (169)..(169): n is a, c, g, or t
  misc_feature (259)..(259): n is a, c, g, or t
  Coding DNA Sequence Number=SeqID_2529
agcacggaaggaacgctcgcatggcgatgggaacggctgtgcggtaggcggcggcggacggcgtcgtgaccttcctctgggtgctctgcgtatccacgctcggcgcctccacggccgccgtcaccacctacctccgcctgcacgaggggatccagtacgccctcctcgncaccgtctccatcctcgccctcctcctcttcgccttcaacctcctctgcgacgccctcggcggcgccagcttcaaccccaccggggtcgncgccttctacgccgcgggcctcccccagcccctcgctattcctccatcgcgctccgcctaccagcgcaggccgccggagccgcgggcggagctctggccatctccgacctgatgccggagcagtactagcacatgctcgggggaccctcggtcaaggtggaatccccacaccggggcccgcccgctggaggggggctcacctttcgtcatcaccgtttgccgcgcctctgcagtcatcggtcaagggaacccccgcaacccccctcgttcaagaacggcgagggctcctcaggcctcccccgaggaagcctgcgacacttaaacgaggg

SEQ ID NO: 12309 - DNA, 584 bp, Glycine max
  misc_feature (192)..(192): n is a, c, g, or t
  misc_feature (255)..(255): n is a, c, g, or t
  misc_feature (432)..(432): n is a, c, g, or t
  Coding DNA Sequence Number=SeqID_2530
tatatctttttgatctattctaatatattattttatatattctattatttatttatatgtatatatatttttatattatcaagtctataaaaaatagttgttatcattcatactctacacacacctatatacaagaagtatacataatttttatttctttcttctttatttttatttcagtgttattattgnttattgttttttgaattaggtaattttttatattttattatgaactacatacagtaatctacntattattttttttattcgttttattttatagattaataaatataatatacagtgtatatgaaagtcaccactatatttataatattattaatataataaatacaatatgcttttataacaacaatatagtataattatatataaattaaaccataaaaaatataatatataaatatnataattaaatataatattaaaataataattacatataatatttcttcttccttttttgatgtgtggtgggtattcttaaataaaatacactcttttaatattatatattttatattatcttttttttatgttgttctgtattcttattataa

SEQ ID NO: 12310 - DNA, 418 bp, Glycine max
  Coding DNA Sequence Number=SeqID_2531
ggccataggcgctgacctcagagttcattttaagaacactaaggagactgcctttgccatcacgaagttgccccttgttaaagctaaacgatacttagaggatgttttggcccacaaacaggctattcctttccgacacttttgtggtggtgttgggaggacagcccattctaagaacatacactccaatgggcaatgacactggcccgtcaaatcatctaatttcattctatatttgcttaaaaatgcttagagtaatacttagacgaaaggtgtgaatatcaatactcttaacattgctcatatccaaattaatcaagctcataaccatagacaccgcacctacatagctcatagaaaaatcagcccgtacctatcatctgctttccacattgatctgatattctctgacaaacaa

SEQ ID NO: 12311 - DNA, 168 bp, Glycine max
  Coding DNA Sequence Number=SeqID_2532
gtagatgaaggcaggtcgattcgatgcggtgcttggcaccacttacttttgctttgcccccgtctacagaaggaaaccagaggtagaaactatagaaagcaaacagttgagcggtctcagctgcatgcagtacatcatgtgttttttacatgccttattcatgaagtg

SEQ ID NO: 12312 - DNA, 557 bp, Glycine max
  misc_feature (71)..(71): n is a, c, g, or t
  misc_feature (202)..(202): n is a, c, g, or t
  misc_feature (212)..(212): n is a, c, g, or t
  misc_feature (223)..(223): n is a, c, g, or t
  misc_feature (267)..(267): n is a, c, g, or t
  misc_feature (287)..(287): n is a, c, g, or t
  misc_feature (322)..(322): n is a, c, g, or t
  misc_feature (355)..(355): n is a, c, g, or t
  misc_feature (364)..(364): n is a, c, g, or t
  misc_feature (396)..(396): n is a, c, g, or t
  misc_feature (401)..(401): n is a, c, g, or t
  misc_feature (462)..(462): n is a, c, g, or t
  misc_feature (513)..(513): n is a, c, g, or t
  misc_feature (526)..(526): n is a, c, g, or t
  misc_feature (532)..(532): n is a, c, g, or t
  Coding DNA Sequence Number=SeqID_2533
tagcacgctctagacacatacatgtatcgtgttcgcctgcggtgcggaatagtgcgtggaagaagtagtgntgtactctacactcacgttctacagcacgtgctcagcagtatttatatccgcactactcgtatagcagttatgttgtgtcttgtgcaaaagctactatgtgcatacagattacaagacgtgcgagcgtgcngcgaaacctntcgtgagcatnattatagacagcaaatagttatatagttcgctcacggtactacncatgtatctgaggcgacgcngcgcgagctatgtcgcatgtgaaaaacgtacaganaacagactgtggcatgagtaatggagatgtatntgagatgcntgtgtgactacgtagacagtgaaccgcatagntcatnatagtgtctgatcaacatagcgtgtcgagcattgatacgtcgcagtatatgaacaacagantgcgtgagcgcgctatgttacgtgagtgatataacacactagagtagaacngagacgatagtgntcgaantgaagtatacaacacgacacacaag

SEQ ID NO: 12313 - DNA, 499 bp, Glycine max
  Coding DNA Sequence Number=SeqID_2534
tatcattaggcgatgcagtcggaacgctttatatttcccaatagtatcttcagtggaattatgagccgataatatttttacaccgtacacagttatggtcatgagtatgccgatgacgccattgttcgtctttatagggggcaaaagctggagttaccaatcggtgtcggatgatctagagctatatgaatttatcgggatacaggaattgccttgagcccgagtgattattatatggtaatggaacatccttttagaacacttgctcaatatcaattagtttcactctctgggcacgtcccaaatcagttttttcttcagttattctcttctcaaagagtattggtatcgttttttgttattatcaggggtgggtttgaccagaagacgacggataggaccaaggagatcaaggtctttatcaagaaaggggtatagatagtgcgagcttcatccaataaggggtggatcaaagacaaacacatcgatgcgcagacta

SEQ ID NO: 12314 - DNA, 390 bp, Glycine max
  misc_feature (62)..(63): n is a, c, g, or t
  misc_feature (78)..(79): n is a, c, g, or t
  misc_feature (136)..(137): n is a, c, g, or t
  misc_feature (256)..(257): n is a, c, g, or t
  Coding DNA Sequence Number=SeqID_2535
tatgaccgcaccttgtgagccttgctacagctcttggcacttgtgtccttcaaagattgtanngcgttcagttatcgnnaatcatataattgttattagtattctgtttagtccccgcttgtttgagactttacgnnttgttctagtaatttttaagctcttgtgtggtcgataacaatttccttcatgattcagctgttaccataatcacgcctaaggccacaatttaccctcattaaagggatccaaagttggnngtgcagcacttttccgtccgttctaaacattgtggatacttcgggctccaggctcgagtgaatcatatttattttttttttttttttcataacctgaacaaatcagagtttggattctagtgaaactgacgga

SEQ ID NO: 12315 - DNA, 402 bp, Glycine max
  misc_feature (78)..(78): n is a, c, g, or t
  misc_feature (118)..(118): n is a, c, g, or t
  misc_feature (220)..(220): n is a, c, g, or t
  Coding DNA Sequence Number=SeqID_2536
atataaccaacgaacacactctcacataactctctctctctctctctctctgagtccttcttcttcttcgtccagccnacatgagctcaatcgttcagggtttctcccagtcactggncatgaccattctctctgagatcggtgacaaaacgttttttgcagctgcgatactggctatgcgacaccctagacgcctagtcttattcaggtgcttatcggnctttggatgggatgaccattctctctggtcctggtggctgggcagctcccatctgatctctcggacatggactctcacattacaccatttttatacttggaatttgactttgggcccttgaaaaaggcataattggacaaggggatggcgaaaaaattgctgtaaattgaacctaattggga

SEQ ID NO: 12316 - DNA, 482 bp, Glycine max
  misc_feature (140)..(140): n is a, c, g, or t
  misc_feature (335)..(335): n is a, c, g, or t
  misc_feature (394)..(394): n is a, c, g, or t
  misc_feature (401)..(401): n is a, c, g, or t
  Coding DNA Sequence Number=SeqID_2537
aacacagtacacgagcagcggcatacttatgtaataagctactaacacatcacccagcacatccgcagagagacgcatctgtcatcaacgcgctcacgtcaggccaaggttgggtgcgtattagttgttagcacgacagnggtggtggtgtgttccattctcctgtgagtgataggagttcagccgcacaaacacacgcacattagatgccgcgagtgaaggaattccacacccgcatatagtgaatatagaagtgcgtcatgagagcatgtagatcacgattcattgaatagaattacagacagtgacgcgaacatggcattcatcttgcctgntcggtgatcccacacgactcgatcacgtactgcgcacgttctagagtttgggtgtagtngatacgnctgcggaacctcgtattgaacctaatcgcactctatagcacgagtcaacgacacaataacagacatgatatcgagcgaact

SEQ ID NO: 12317 - DNA, 526 bp, Glycine max
  Coding DNA Sequence Number=SeqID_2538
tcctctagctagtcgattgattgatccagaaatcaaggccggtccatggggaactttttgcccggacgtgcgtccatgaaggacgccctggacgaaaccatgcacctcgtcgacaccaagatggtctggcatcacgtcgccaacggcgggtgcctccaagagttcgtgatcgccatggacgtgtgcaaccccgattacatgaagcagcggcacccccagttttacaagaagcagcaacgcaaggccacccccgtcgacaaggacgcgtgcgtcaaggccacggcggcactgcgcgagtgcttcgccggcaaccccgtcatgttcaagcacgagtatctccaccgcatggacgagggcctcgaccaggaccgcaacccctccccggcccagatcaagaaggagtgggccagcgaatataggtggtggaccggcatgaggagaagctagtaaattttgtgcagatgcagtacgtgatgatcaatggcgctagatagatatatagatagatcggttcatcttatgatgc

SEQ ID NO: 12318 - DNA, 190 bp, Glycine max
  Coding DNA Sequence Number=SeqID_2539
acttgaccctgatggaaactgtcagatgctgcctgtgtctgctgctctggacatttgcacgttgttcttgttatgctctttcttttcctgtttaatgttgtcaccatttacacttgtgttaagaaatgccataactttagttgcaatcatcattacaaatttctagtaattccatactagtgtaaagcta

SEQ ID NO: 12319 - DNA, 199 bp, Glycine max
  misc_feature (74)..(75): n is a, c, g, or t
  misc_feature (77)..(77): n is a, c, g, or t
  misc_feature (80)..(80): n is a, c, g, or t
  misc_feature (93)..(93): n is a, c, g, or t
  misc_feature (137)..(137): n is a, c, g, or t
  misc_feature (140)..(141): n is a, c, g, or t
  misc_feature (157)..(157): n is a, c, g, or t
  Coding DNA Sequence Number=SeqID_2540
tatatgagtagggatgagagtcttcattgagtatcatagtgtttttgtaagtgggatgattgttgctcttacgnntntgnttgtcttctcgtntgtcggacgacatgcgatatgtgcagttcgtgtagttatatatnttnntcgttgctcgcggctnggatgacacacaagcacgctgtgctcgttgtggaggtaataa

SEQ ID NO: 12320 - DNA, 409 bp, Glycine max
  Coding DNA Sequence Number=SeqID_2541
attctctcctccaatctagctagctcctacgcccactctgtaatccaacaacaacaaccagcaaagcttcgatctgatctgataagatggcgagcatcagcaacgagccggagcgcgagcacagagacgaagaagagtccggagccaacgaggacgaagacaccggcgctcaggtcgctcccatcatcaaactcgaagaagtcgccgtcactaccggcgaagaaaacgaagacgcaatcctcgatctgaaatcgaagctgtataggttcgataaagatgggagtcagtggaaggagagaggcgctggtacggtcaagttcttgaagcataaggagtctgggaagatccgtctcgttatgaggcagtccaaaactctcaagatctgtgctaatcatctcgttacgtcggg

SEQ ID NO: 12321 - DNA, 564 bp, Glycine max
  misc_feature (116)..(116): n is a, c, g, or t
  misc_feature (200)..(200): n is a, c, g, or t
  misc_feature (310)..(310): n is a, c, g, or t
  misc_feature (431)..(431): n is a, c, g, or t
  Coding DNA Sequence Number=SeqID_2542
atccctagtatagacgctgcacgtccctgtaatatgaagtactgtccgtgtacggcccatattctagtctgatgaaccactctactcgatattgtgctgcgcggcgcttccgcatnacgagcgtcgtattatataatatactgacttctggataagaacacgcacaacataagttgctcttagacatatcgtgatatctnctatcatcatacgcacactctcacataccccgtgtctacatcgaatattatttatatacgcacgcgtcgtgtaatcactctgcatcacgtccctgtcgctcgaggtatgncccacgccagcggctctctctgacgtatgaccgtctcagtctatactgtgcaacggcgaagaacgtcttctgcgtccgactcgcgacgctacgtacgtatcgcgagtgatgatacgcagtncgctctccactactgtacatgtaccctagtctcagctcactccactatcatatattattcgctctcttcatcgacacaccactatgctccgcgctgacacaccactcgctcacgccgctagtactgatcagta

SEQ ID NO: 12322 - DNA, 589 bp, Glycine max
  Coding DNA Sequence Number=SeqID_2543
atttgagtgtttggatgatcgtgttttgttcatttagaaatgttgacatggatagtttgttgcgtggctttgggttactgttacatgacttgttttttgagatatcactttagccacaataaggaagattagattgttcttgcatatgattgtcagaggaaccacttacattgaaggatgagttgaattaatgaagttgtatgaatttgtaacaactatttggcttgctctgtggtgtagttgaattagtgatgctcactctagcactcaattctggacagatatggcttctaggaagaattatatccttctctatttttttttcttaaaaataaaaaataaagaatctagtttaaaaccattactcaaggttaacatagccgcggcgtatggtatcttcaaccgcagggttaagaatgccgacgccgctgttagcaatggggcttagcccttcatgttggcagttttatgtataaagtagatgtcaagagcacacctggttattccagaaaagttttataaaaaaggtaggtgcacaatttccaatgtatgccttaatttaggtatttttttcccctgtctgtatgaa

SEQ ID NO: 12323 - DNA, 594 bp, Glycine max
  misc_feature (102)..(102): n is a, c, g, or t
  misc_feature (105)..(105): n is a, c, g, or t
  misc_feature (145)..(145): n is a, c, g, or t
  misc_feature (211)..(211): n is a, c, g, or t
  misc_feature (331)..(331): n is a, c, g, or t
  Coding DNA Sequence Number=SeqID_2544
catgtatatatgtgtcgcgcgcgcccgggcctttgagctgcagctgagcgtagctacactgtatactgcgagtgtcgtagacgcgacatcgatactgcgtcncangtgatatcagtgctgcgcgtctaacattataatcgcgccngtcacgcgacgcatactcacagcatgacgacaacaatgtatgtgtactctttgcttatcacacacntacggcagcgatacctcacgatgcgcgcagtcgtcgagctcttcatctgccagacactacgtctccaacgatctcagacctggtgtgattggcacgaaatctcacactacatctactcgnctgatacatctcacgactctactcgcgaacaatacacatcaacgagagcactcagaataaagatgcgaggcagacgacagtacctggcgctctatacaactactgactctgtgagatgatcgtactctgtcgaccgatgtgcgagctgaatagtcactatatcctgcgagagagtgattgtctacataccacgggacgtgacgagagacgtgctctctctactgtgcgcgtcgcactcattcgtgtcaccgtatgagagcact

SEQ ID NO: 12324 - DNA, 447 bp, Glycine max
  misc_feature (127)..(127): n is a, c, g, or t
  misc_feature (138)..(138): n is a, c, g, or t
  misc_feature (146)..(146): n is a, c, g, or t
  misc_feature (216)..(217): n is a, c, g, or t
  misc_feature (253)..(253): n is a, c, g, or t
  misc_feature (258)..(258): n is a, c, g, or t
  misc_feature (335)..(335): n is a, c, g, or t
  misc_feature (338)..(338): n is a, c, g, or t
  misc_feature (343)..(343): n is a, c, g, or t
  misc_feature (347)..(347): n is a, c, g, or t
  misc_feature (357)..(357): n is a, c, g, or t
  misc_feature (366)..(366): n is a, c, g, or t
  misc_feature (374)..(374): n is a, c, g, or t
  misc_feature (388)..(388): n is a, c, g, or t
  misc_feature (390)..(390): n is a, c, g, or t
  misc_feature (398)..(398): n is a, c, g, or t
  misc_feature (415)..(415): n is a, c, g, or t
  Coding DNA Sequence Number=SeqID_2545
ttataagccacgacgacaactaattatcaattgtagcaccaaacacacagacgcggcgaccgtgatagacatacactatgatcatgatacgcagacattcgccgcccacacacagtcgtcaccatangcagtgtgtgngatggtgnccccgcagcacaccgacacgcgctatcattatataacatcaatacgtaagacataacatagatgacacgnngagacctcacctccatgaatacgatgaatgacagcnttcanacacatcacactcagctagcacatcgcgcgcagagttctgaccaatcaacatatcacatatgaccacacattgtgtncgnggcgncagncgtcctccangccgcgggnggtaggtngagatatgaataananagacaccnacaccacacatccgagncgccgccgctcccacgcagcttgcgattttgt

SEQ ID NO: 12325 - DNA, 563 bp, Glycine max
  Coding DNA Sequence Number=SeqID_2546
tacccttcgctatctatacctcagaaaaccctcctaaatacgtcgatgtcaacacctctggcaacaagatccttaagggcatgattgacaaagacttggttgatggagctgtcacttttgacaaaatccaaatcaaagaagttacttctcactttagaaacggctgggtcttctttgttgtccaacctaaaagttccggaaacgtcttgaacaatctaattgacatgcaaaatggagtcatgatcaatcctcaaaacgttaagccacttatcatcgaaaagatggttgtcaaagctaaaagagcaaagggaaagaaaaccgaccaagacttggagatcgaagaagaaaaagatcttgaaattgaacaagatcaagaacaagaacaacaagaacaagattttatatatactcatgctaatgaagaggaagtctttgtgtaaacttccaatccttcaaaaaagttgagtacatcagttgtttaattaactttattcatctcttcttctttgtgtgtttctcttgtatttattattatcattaaatcaatcaaccaagtctttctc

SEQ ID NO: 12326 - DNA, 130 bp, Glycine max
  Coding DNA Sequence Number=SeqID_2547
atcatccaatgcctatcagaaagttgaacatgagaaagctaaacaagacgatgcactcgaagatctaagtggcatcttaggtgatttgaagggtatggcaattggcatgggatctgaacttgacaagtaa

SEQ ID NO: 12327 - DNA, 235 bp, Glycine max
  Coding DNA Sequence Number=SeqID_2548
actcaccgcagaaccctatacacagcctgcgccattctctgctccatctccgatgccattaaggagtatcctggttcggtgagaaaacatacccgatagaacacccgctcctacgatacctgctccatccccttgtgcaccaccgtcttcaccgactgatcgagccgctacattccgatggacaccaacagacctgtgcacatatcgacttacttcaccgatcatcgcgagcaga

SEQ ID NO: 12328 - DNA, 377 bp, Glycine max
  misc_feature (28)..(28): n is a, c, g, or t
  misc_feature (50)..(50): n is a, c, g, or t
  misc_feature (99)..(99): n is a, c, g, or t
  misc_feature (131)..(131): n is a, c, g, or t
  misc_feature (156)..(156): n is a, c, g, or t
  misc_feature (158)..(158): n is a, c, g, or t
  misc_feature (162)..(163): n is a, c, g, or t
  misc_feature (174)..(174): n is a, c, g, or t
  misc_feature (184)..(184): n is a, c, g, or t
  misc_feature (188)..(188): n is a, c, g, or t
  misc_feature (192)..(192): n is a, c, g, or t
  misc_feature (256)..(256): n is a, c, g, or t
  misc_feature (275)..(275): n is a, c, g, or t
  misc_feature (299)..(299): n is a, c, g, or t
  misc_feature (301)..(303): n is a, c, g, or t
  misc_feature (306)..(306): n is a, c, g, or t
  misc_feature (311)..(311): n is a, c, g, or t
  misc_feature (316)..(317): n is a, c, g, or t
  misc_feature (320)..(321): n is a, c, g, or t
  misc_feature (325)..(327): n is a, c, g, or t
  misc_feature (340)..(340): n is a, c, g, or t
  Coding DNA Sequence Number=SeqID_2549
atcacatcgcataactcctatatgatantcatatatcatcagcgctgcgncgtggcatcgtcgtcgagtctcactactatctacgtacatatcactatnactcagtcacgagtgtgtcgaagatatgcacnatacgctgcgttagtttatagtctnancatnnacaccacactnctcggctganattncatnacatatcactctcctactgcatatgtcagcagctactggctgagtcgatgtctgtggtcgttcncaccagtgctatcaggtantcgtctgatcacatactacttacntnnnctntcccnacatnnttnnaatnnntgccagaaagatnatcagcagacaactctcatcatcgtaagcaacacact

SEQ ID NO: 12329 - DNA, 396 bp, Glycine max
  Coding DNA Sequence Number=SeqID_2550
gcggaacaagcctatagcacttcaggaaagtacaatgcttttggtccagcacttctcacatatgaaattaaatacctgccatctgctcctcaaattccttagacggcactggttaagctgtctatcttaccattggagggaactgcgttatgaagatgggagcaggggaacataagtgcgtgtcaccgacttagatctaggagactcgctgaccaggtcatgtgagctattgagttggccagttgagtgagaaaagttgtaggttctctctagtgttatgtatctggaagactgcctgtgtacttggggtcgaaggtgatttaaactgtgtgttagatggtaccttggtaacttgtcctgttgtatgttgtgtctagaagtcattgcacagctgtg

SEQ ID NO: 12330 - DNA, 423 bp, Glycine max
  misc_feature (58)..(58): n is a, c, g, or t
  misc_feature (144)..(144): n is a, c, g, or t
  misc_feature (198)..(198): n is a, c, g, or t
  misc_feature (200)..(200): n is a, c, g, or t
  misc_feature (240)..(240): n is a, c, g, or t
  misc_feature (253)..(253): n is a, c, g, or t
  misc_feature (298)..(298): n is a, c, g, or t
  misc_feature (334)..(334): n is a, c, g, or t
  Coding DNA Sequence Number=SeqID_2551
tctctttcgcgccttcgcttgttatccttcatctcacacgacgcgccggacttcatgnaccggtagtccggcgctccgacctcatcgaccgccactctcgtcgcggcggacgtgagcgagacactcacctctccagccgctgtnttctagctctcgctgctgtggggtgaggcgcgcagcgtccaacagcgcacactnanccaagcggccgacacacgcgcgccgccagaataaggcagnacacatcaaccanccacgatgagcgtgcggagtgtagcgctcgtgacagtgggcgagntcgcgataggcgccgagttttgtggcgattggtgcnggctatccctctccggctgacctagggcaagcgcacgagagcgaggggggtggcgggtgctgtctatcctttatgtccttctccttatg

SEQ ID NO: 12331 - DNA, 549 bp, Glycine max
  misc_feature (120)..(120): n is a, c, g, or t
  misc_feature (162)..(162): n is a, c, g, or t
  misc_feature (272)..(272): n is a, c, g, or t
  misc_feature (350)..(350): n is a, c, g, or t
  misc_feature (523)..(523): n is a, c, g, or t
  Coding DNA Sequence Number=SeqID_2552
gtagaactacactaggcggtgacaatagtgcataggaatatacggtgcaggcacttacgagtcttctgcgatgtggtgttgtagcacacacacaccgcgcagcggatcccctcatcattncgcgagctgatcacgatgataagatagtaactagccgcgcancgtctgactctacctagcgcatgagctacatcgcaggatggacacgcgcagagctgactcaccactaggatgtactccccaccgttggcagtgcacgcactacacagcancagagctggttactggacgtccataaatgtacagtgtacttgtcgaggcggtcgtgcgtggctctctcggcacgtgtngagcaggcgaggcgcgagcgccagtgcgtgtgagaactatgacggaagcgactagagagatcgagatccggtcgagatgaatgcacacggagtaggttccgctcacgtggagtgtcgggtgcacggactcagcggcactggtgactatcggctctcgacagcacagctgcganctgtgagcccctttgcgagcgctgag

SEQ ID NO: 12332 - DNA, 459 bp, Glycine max
  misc_feature (315)..(315): n is a, c, g, or t
  misc_feature (326)..(326): n is a, c, g, or t
  misc_feature (419)..(419): n is a, c, g, or t
  Coding DNA Sequence Number=SeqID_2553
gaagaagtcatggacgtcgtctttaggtaattcagcatattagatgaaataatctgctgaattacctaatgattgcttttatatctttgtaaacttgctaccactaattgttaaatgcttttatctttgaaggtcactgaagatggattaggcattggagcaacagtgcttgttgcgtttgtattcattcaataatgtgaatatagtaccattgttaaaattatacattctgcattttcgtataatcatataaattagaaaggaaaattttcctgcattttaatctctggataaagaaaattacattcagtgtgnacttaggatcntgaatgacattagggaatcaagtatcctccctccattttttccgtggggctgttctataacacattccaaaagggattttaagcatctagaangggggcctccttggctgcctttccggaggtggcttcctct

SEQ ID NO: 12333 - DNA, 450 bp, Glycine max
  misc_feature (211)..(211): n is a, c, g, or t
  Coding DNA Sequence Number=SeqID_2554
tagtcaacgagagtgcagtttgccagtctgtataaaacataaaacacaaaaagttcgtcgtaatttggcagccgcccgaaaatttgttttgccttaaaaaaaaaaaaaaaaaaaaaaaaaaaaaaaaaaaaaaaaaaaaaaaaaaggaagaaaaatgggaagcccaacaagttggttggaatgggccaaaccgggaaccgggaagaacagngaccattatcattttggtgaactaaccaatttgggggggtaagaaaaatgggtcaagccccaaagccaagaatattaaagccacaatggcaaaacgtgttgtagggccaaggaatcaattggaagttgtccttccaagcctaaagtgccttggaaaaccggtgaaaactgtggctatcaaaaaaaggttcttcaagataagaagtacaagaacccgggagctgcaaaaatgccccttct

SEQ ID NO: 12334 - DNA, 528 bp, Glycine max
  Coding DNA Sequence Number=SeqID_2555
caaaaaccacgctttttgctggcgtaaaagtacccgggctccgcgcggccagtgccgcgcctccctgtcaaaaaatcgacgttacacataacgtcgcgcacaattctcacgtgtctgcattattgcgttagccatatcgcagcgtccgctcgctgcgacatgcgtgtgaaccagtacctccatagtttctgcccacaacgtactctcactctcaatcatttagggagcgcgtatgagcagttcagacaggggcagaagtgacataccgggcctgcgtccggatctcactccctctgccaaatctccaggtcccgcggatgccgccgacccgtatgcaaattggctcgatcggatgcagaaggcgcgtgcgcgccatgccgccatcaccaagaatttgtacacgtggtccaactacaagaattgggcggaccgcatgaaagactcgtttgaggaggagccggccgccaagccggaacccggccacggcgcctccagggcgcccggattcaagcgctgagctgacaccgg

SEQ ID NO: 12335 - DNA, 553 bp, Glycine max
  misc_feature (31)..(31): n is a, c, g, or t
  Coding DNA Sequence Number=SeqID_2556
atagtgagccgatatacgccgaacgaggtcnacggtatcgataagcttttttttttttttttttatggaatgatatatatgctcatacaacaaatggtgaaaaatactacatgcgaatgctacttaacgcccgcaaaggatgcatgtctttcaaaaggaaccgtaaatggagttgtccacacttcatacaaatctgcttgcgaagcactatgatatcaacgacagagtggattgagtgcataaatggggcatcagactgggtgattggctaccagctaaaacaactgttcacaactcttatgccattgaagtcacaagcccaaaaatattgtgggggacatgctcaaaagttctaagcgaacacatggagtataggcagagaaggctcttgaactatcctacactttgactaacagatacacagaagcaaggatacgccttggtgaaagtagataagctcatgagacaagctggaaagacatttaaggaataccccggaatacaacattcggattcttcacagataaagtaacttggaaacagactactcaat

SEQ ID NO: 12336 - DNA, 511 bp, Glycine max
  Coding DNA Sequence Number=SeqID_2557
attggcttcacaatcaagcgaccagatttgggggacggccaagcgtcgggctatttcttattaccgaggcgcataaaagggcattactcaaagagcttagtagggtacatcagggtttgccagtcgtcggaatgaagatatcgcgcaagaggtctgatagactcggcttagcgaggattatggtcacagcatccagcgtgacgatgttgagtatgccgatgagccccatgatagggattcaatgagtcctagaagcgatatttaactttacagtgtatcctatcgcattgatatacattgatgagagctagggcaatgcccttgagcgattgatcttagtcatgactatatacaatgcgtcgattgtcagccatctgaatctgtcaggtacaggtcatgctgtagatcagtatcagtgtctgtgagccaaatgtatcgaattgttggagccataaacagctagtgacagttagttatctttgggtggagggatccgatgcttatcatgaga

SEQ ID NO: 12337 - DNA, 572 bp, Glycine max
  Coding DNA Sequence Number=SeqID_2558
tgctcatcttccctgacggtcagagcagaagccaacgggtcctccacttcaagaattgcggtcaagaagcacagcaaagaagagctcatagagttcttcggggccatccaggccgccattgccagggactctcccaagccgcccgggaggacgaggaagccgtcgtcgccggctggcacgttcgaagaagccggcacgaagatgaaaccacacgagggactggggcaagatgggcagccaaatttcgagggcatgacggtgcccgagctgagggacttggcgagggtgagggggatgagaggttactccaagctgaagaaaggggagctgattgatcgtctgaggggtgcttgatcgtctgataattaacaaggcttcctctccgaaacaggaacaggcagacgccagtgctgcctgtttgaccgaattgatgcggcttataatcgacttttcgtctgttgtttcctttgttaggaatcttcgaaagaggaagaagctctgcagttcgattgaagttatgtaggagtataatgttggttaatcagcggatgttgtctttggaggccgagctc

SEQ ID NO: 12338 - DNA, 364 bp, Glycine max
  Coding DNA Sequence Number=SeqID_2559
gagggttgaggcacaaatagtagctaaagtttatttggctttggagaacaacctgaaaattatccttggtattgatgatatttgatattgggttatggagagggttgaagagcccaaggttaaagggacaagacgtttgaagtgttcatgggatttcagtaagactaggaaataaatatttgtagtcactagatgttatgacacatatgtccaccaccaaagaagtggctagttatcaaatgcacaccaaaagtttcagggattcttggggcataacaacgacaaatttattttgttttttcattttcttttagatgtagccattgacatttgtaatttttttctttcaaatgtaagcctatta

SEQ ID NO: 12339 - DNA, 239 bp, Glycine max
  Coding DNA Sequence Number=SeqID_2560
ctcgctcctaaaattccagtcacgagtcacaagctcactggacacaagcgctggtgtggcgagagcacgaagcagaggcatggttgcccgcgccacggcaacgttcctccccgtcctctccctgctcctgctccgtgccggcgcggacgacgactcggcgtttgtgtacgccgggtgctcgcaggggcgctacgacgccgggacgcagtacgagtcgggcgtggactccgtgctcacat

SEQ ID NO: 12340 - DNA, 556 bp, Glycine max
  Coding DNA Sequence Number=SeqID_2561
tgccacctttaaccagcccaagtggtggccatgggtttgcaaactggggttttgcctccccccccggtggtggtggagcacgtcctactttgcctcaaagtcgccctgagaggagttggagcaacgcccccatctgatgatgatccccctaaaagtgctgagaaagtggaagatgcacctgctcaaaaaaagcaagtggaagatgaacccgttgaggaaaattgaagagctgtcaatttacttttggcccccgcagattgctcgataagagagttggacacgcaccctgcacctcgaaaccttattttttgtttcccattgaagttttgcccgtctttctctttttcatgttttattgtgagtgattaatactgaaacagttgagacccatttttggtagcagtgttggtagcttagttagtcgtttttatgaacatgtttgtctgctaaatagttgccgtaatcccccccaccccccaccacatcatttcaaaatctatataagtataatttccgtgatggaatttcgtttcaaagagatgttcattgttcaaac

SEQ ID NO: 12341 - DNA, 555 bp, Glycine max
  misc_feature (40)..(40): n is a, c, g, or t
  misc_feature (73)..(73): n is a, c, g, or t
  misc_feature (121)..(121): n is a, c, g, or t
  misc_feature (143)..(143): n is a, c, g, or t
  misc_feature (148)..(149): n is a, c, g, or t
  misc_feature (182)..(182): n is a, c, g, or t
  misc_feature (184)..(184): n is a, c, g, or t
  misc_feature (186)..(186): n is a, c, g, or t
  misc_feature (211)..(211): n is a, c, g, or t
  misc_feature (219)..(219): n is a, c, g, or t
  misc_feature (282)..(283): n is a, c, g, or t
  misc_feature (307)..(307): n is a, c, g, or t
  misc_feature (313)..(313): n is a, c, g, or t
  misc_feature (353)..(353): n is a, c, g, or t
  misc_feature (357)..(357): n is a, c, g, or t
  misc_feature (363)..(363): n is a, c, g, or t
  misc_feature (441)..(441): n is a, c, g, or t
  misc_feature (444)..(444): n is a, c, g, or t
  misc_feature (451)..(451): n is a, c, g, or t
  misc_feature (524)..(524): n is a, c, g, or t
  Coding DNA Sequence Number=SeqID_2562
attgcacctacgcaacgatgacacgcgcgctcatcagcgngccgccacacacaatcgcgatcaggcatcctgnacacaccatacgcacgatcacgacgtgtgtcgtagctgagggatcaantatcacgtcagctactacaacngacgnngtgagagagacgtatacacgccgcgcacggcgncncnatctctacttctctcgacgagcgcngcgagcgncacatcgcggctcgctgcgcagacagtgtcttaccagacgcagatgacgcgcgcgggcggganncttacgctgcgtcgcagcgtcagntggcantacgtgcacacgcgctcatgccgagcttgatgcagaatanacangctacngcatggatcctcacgtagtcgtcagtcgtacgcgatcatactcacagacgatcgctactaacgacatcacgactcgcnatntacgganactatcacgcacagcgcacggtagctgacatgacgggcgcacacgaccgacaactctgctcacgcagcgactncactgctgcatgcaccacacatcgggacggt

SEQ ID NO: 12342 - DNA, 550 bp, Glycine max
  misc_feature (335)..(335): n is a, c, g, or t
  misc_feature (337)..(337): n is a, c, g, or t
  misc_feature (504)..(504): n is a, c, g, or t
  Coding DNA Sequence Number=SeqID_2563
gctacggctcagtgacgtacgttatagactcactctcatccttctctgttacttcgattgatcttgacgtcacccacatgtcataccatcattctcctacgacctagagtgtgtgtgggcgccgtgcgcgcgcgagcgtattctgtagcacgcgcgcgacacgcttatttctctttatgtatctgtcactctcattgttttccgccgccgacgagtggtatcgggtgacgttaatgcgatacatgagagcatacgcaacatagagtgtgcgggacagcgcatagagcaccctacctgacttgtatattaatacacagtgttgacagcaccgcgcnangccacacgccaccatagcacacccacgtcctctatgctctcacctccatcgcgcctctttagtgacaccgcacagcacgagcgagaagagactagattatgagattactcggattgactcgcagcgttagttcgcacgaccaacgcatagagtatagtacgcaatangaagcaatacaatataattctgtatgtctacgtccagcactactat

SEQ ID NO: 12343 - DNA, 271 bp, Glycine max
  Coding DNA Sequence Number=SeqID_2564
gacctgcaggtcaacttccagcatgcaaggtaaagagagctactaaatgactgattgattgtgcgcgccctcgttataaccatgatgtcgcaggcgtatataccactaccttggacgaaatcctaaacacaaaagatgggtgaacagtgatggccactgttggagcagcaaatgatgtcacgcaaaagcttgacctgacgtctgccgacgaccttcacagggagacttggtattacaccgaaaatatggccctgaccaagcgaatcttgat

SEQ ID NO: 12344 - DNA, 592 bp, Glycine max
  Coding DNA Sequence Number=SeqID_2565
tttaaaccaaagatcccctgtccagggtttaaaatttttgaaaaaccacaccggccttcccccttttgggagaatttcaggggccctcataaccctccgccagtaattttttttttccccgggagccccaccccgaaattgcaaggcccttttgggaggggttaggtcggagggatccaaccttgaaaccaccgttctttgttaatttttgtataaagggcccgggcgcgttgaccatgggtgccgggggggaacaccgagcttccatgtaaaagcttttagcgagcgaaccattcttcatgtttttatcgagccacaggcagtgtctgcccgcgcccctcccgtcgagtcccacaccggcaatctcggggacatacctgtgggtgatgtcgaggattcgcccctcctccgtacactcctcgccgcggagggaccagaacaccgtcgcggacgccgacgccgcggagggagcactcaccggtttccgtgccggggatggaaggatacgcggcggaggtgtcggcaacggcgacggagtgcgcgcaaattgcgcagaggaaggcgaagagtgatcgagagttcatggttgact

SEQ ID NO: 12345 - DNA, 151 bp, Glycine max
  Coding DNA Sequence Number=SeqID_2566
gtaactgtcgttacggaaactcctgcaggtgcggcaactgctgcggaggctgcacaatgtacccagacttgagctacactaaaacaaccagcaccgaggatctatgtaaatgtgaggggcaccctgttaaagctcaattcgaaggtgctga

SEQ ID NO: 12346 - DNA, 565 bp, Glycine max
  misc_feature (95)..(95): n is a, c, g, or t
  misc_feature (98)..(98): n is a, c, g, or t
  misc_feature (127)..(127): n is a, c, g, or t
  misc_feature (193)..(193): n is a, c, g, or t
  misc_feature (230)..(230): n is a, c, g, or t
  misc_feature (278)..(278): n is a, c, g, or t
  misc_feature (307)..(307): n is a, c, g, or t
  misc_feature (316)..(317): n is a, c, g, or t
  misc_feature (320)..(320): n is a, c, g, or t
  misc_feature (346)..(346): n is a, c, g, or t
  misc_feature (350)..(350): n is a, c, g, or t
  misc_feature (369)..(369): n is a, c, g, or t
  misc_feature (374)..(374): n is a, c, g, or t
  misc_feature (430)..(431): n is a, c, g, or t
  misc_feature (458)..(458): n is a, c, g, or t
  misc_feature (463)..(463): n is a, c, g, or t
  misc_feature (468)..(468): n is a, c, g, or t
  misc_feature (485)..(485): n is a, c, g, or t
  misc_feature (498)..(498): n is a, c, g, or t
  misc_feature (505)..(505): n is a, c, g, or t
  misc_feature (532)..(532): n is a, c, g, or t
  misc_feature (535)..(535): n is a, c, g, or t
  Coding DNA Sequence Number=SeqID_2567
gcatgcacatctagtgctactgcattcactcatgacatgtctagcactactgcacgcagacgtgatgtgtaatgcagaagacgacggtcgagcgnatnctactaaagtatacggtgaacataaggancgacgagtctcgatcacatgtatccgactgatgatcacgcacgactgctcgcattcgcttcatcanaaagatcgactagtcgacgacatgtagttagatgcgncatcagtacgcactgctagttgctctactactatgtttgactacactntgacacatggtcaattgatcactgcacanggagtttanntanctgagcatgagagcggcatatgatgntggnatgatatagcatgctcgcnagatncgtcgaaaatactctaattcatgatgtcgcatacgacgtagatcgctatagtgatnncgtacatacatggtcacgtcattattnacgtnacatngtactgatcgatgatgncgtgagtcatgantacgatntgtgacgcgatactgactgttgtaagnacntatgcgatcgatctcgtcatattgctcagt

SEQ ID NO: 12347 - DNA, 551 bp, Glycine max
  Coding DNA Sequence Number=SeqID_2568
acagccgccgccatgtggaagcaaacgacaaatgtcttgtgatcttttattgtgaatacttttgcattctaagcactcctcatacgtcattcaatggcattggatccttgtgtagctctctatttmatcctacacatttaaatatcccgccgagtcaatacagaatgcaattcagagaaaaacccacatcaacgagcttattacacttttgtttgcacccaaaacttctaaaaaatatggtagcacgtcttctccaaaattaagccttttgttactcattttgtcatttgcatgtaatttgttaaatcacacttctaaatttgcatggcatgaacattgttagatggcacttctaaatgtaagattgtctacaacaagaaacgttatgaatgggtagaggatatttttaagtgggaacatacaattcggagtggtcttccaattgacttaaaagggtattttctccgtaccacgtaccttctcagcaatataacatagttagccaaacattattgkatagggktaataccaactacctcgttctataagat

SEQ ID NO: 12348 - DNA, 555 bp, Glycine max
  misc_feature (67)..(67): n is a, c, g, or t
  misc_feature (95)..(95): n is a, c, g, or t
  misc_feature (159)..(159): n is a, c, g, or t
  misc_feature (172)..(172): n is a, c, g, or t
  misc_feature (375)..(375): n is a, c, g, or t
  misc_feature (390)..(390): n is a, c, g, or t
  misc_feature (469)..(469): n is a, c, g, or t
  misc_feature (488)..(488): n is a, c, g, or t
  misc_feature (501)..(501): n is a, c, g, or t
  Coding DNA Sequence Number=SeqID_2569
gctatattgtattgtatcgctcactcgctatatgtacgccatgctacttcatacaaagcagcgacangtaccacgacgtagatatacgaacgcgncgactatattgcgagatgatcattgtaagtgcgcgctagatatgtgcatgatgtagatatcganagtacgcgcctgntgcggagagctgtccgtcgcgacgctctcgtattcgtggcgagacgacggctagtgtgtgcgatcagtacgcgctgagtagagtcgctcaagcgcgatagtcgcgtagatctgtctcggacggaggagtgtagctgtagatatcgctatgagggtcacgaaacgatcgaacgtatcgtgtagtattatacgttaatcagtctntcgcttcaggcgagntactgatatgcgatcgtgtgtcacgctgctaccggcgctgcgcgcgctgtcgtggtcggtgcaacaccagcagcgaganactatcgcgcactcatcgntgagatacgatanagtatcgatcgatctgtagatagacgtcagagccgacgaacgagatacactagt

SEQ ID NO: 12349 - DNA, 573 bp, Glycine max
  Coding DNA Sequence Number=SeqID_2570
agttcgactgcgacgactggatttggggaaggttggtaacgaggcatatcatggattcatgtggcaatactactatatactagtatagttaaacgtttacctcaaaaacaaaatctatacatttacgtgcatcgtgtgtgtgtataactaagactgtagtaagaattttaaacaaaatagcttgtatatagctagattcgatcaccagtggaccgtctgaattctgatgatacctgtgaaacgctacgggtggctctcacacgttgacgtgcgcgaggattgcgcgtcatccaagtgtctccagcaaaatgaaagaactccatggacgagaaacggacgtgacaagaatggaggtgcgcggttgtgcaaggttacctacgtatacggtcacagaattttatggttcgccaactcaagacccaaggggcagggttcaccacacgtcaactatataaataataagaaaaaaaagaatgaaagagatgatcgtcgtttactgttatgtcgggagagatttctgatttcatgtggcagtcaatgcaactaatgttagtcatgatttgccacctctag

SEQ ID NO: 12350 - DNA, 350 bp, Glycine max
  Coding DNA Sequence Number=SeqID_2571
tggtccaaccaatgtgataaaaaattggggctaccctccctttgtgggcgctatccataatgggcaaggcaaattttggcctcccaaggtacgtccaaaggattattttttttaagcaattgcaaaagcttttggcccccaaaaaaattccctatgttttataaaagtttttgtccccaaggatgccccccccaaaaaattgctggaatggggatctcgtgttgctgctgctaacagtggtccccctaatccccaaaaaaaaatcatttcctaattattggcctgttttgtgtattttgttgaaaaaagttccccccctggatttttccaagagaaaaccgcccaaaatg

SEQ ID NO: 12351 - DNA, 246 bp, Glycine max
  misc_feature (163)..(163): n is a, c, g, or t
  misc_feature (171)..(171): n is a, c, g, or t
  misc_feature (184)..(184): n is a, c, g, or t
  Coding DNA Sequence Number=SeqID_2572
atgcctgttggaggtaagcattaccatttccttgaactctgatttgatggatgtctctccccaccccaccccatctctcttttcatttgggctgggtggtcagattcagttactttggggctcaaaatatgattgagtacagctttccgatgataatattganagaatganatttttctgcatnctggaatagaaatatctcagatagaaaaacaaaaaaaaacaattcttgatccgggggctcct

SEQ ID NO: 12352 - DNA, 594 bp, Glycine max
  misc_feature (59)..(59): n is a, c, g, or t
  misc_feature (265)..(265): n is a, c, g, or t
  misc_feature (337)..(337): n is a, c, g, or t
  misc_feature (415)..(415): n is a, c, g, or t
  misc_feature (433)..(433): n is a, c, g, or t
  misc_feature (457)..(457): n is a, c, g, or t
  misc_feature (466)..(466): n is a, c, g, or t
  misc_feature (489)..(489): n is a, c, g, or t
  Coding DNA Sequence Number=SeqID_2573
tgcgagccacatactcactatcataccccatatattattaccatcgccgtgttgcaacnaccgtggcgcagccgacatacgatcatcgcgatgtagtgcgatatatgtagtacatatacactgacgcacaatactgtatagaggcaggatcacggcgacataatatacacgtgtgcgttctaccgaacgcgtgccgtagcatcactcgccgctgcttattccgtcgcatcactcatgtctgtgatgtgttaggatcatagagacncacccagcgtcttgttatcacatgtctcgcccatcttcgcttagcctctatatctaacatcatgcggcgagngtgcgagcgtgttgcggtgcgcgagcgcatgcggttaaatatacagacgattatagtacgcgctaggcgcacgcgagngacgaatgagtgtgtatncgcgttatgcgcctattacggcancccagcgtngagatacacagaatataacacgnctacacggcctgcgctatgttgtctcgctcggcggcgcgacattggtctggaggcgtggcgcgtgcgccacaccccgcgctaatgctctctcgattgtctgtgcg

SEQ ID NO: 12353 - DNA, 351 bp, Glycine max
  Coding DNA Sequence Number=SeqID_2574
ccgacgataccggaacacggcaaagaagcgcagcaagcagcgccccacccccaaccagctccacaaccgccccatcaccacctgcagccccatccggaaccacaacaacagccggcgcaacgcgcacggcatgcactggcgccacgccgaggatgacgtccatggccgccgccgcgggccgcggcgtgggggcctagggtttctagcgttttgttctttttgttttctagacattgtagcgtgtgttacggagttaaggatgtgatttcactatttgtgtctgttattattattgtctagttatgggggtattgcttgtactccattttactctggttaccaaactgtgta

SEQ ID NO: 12354 - DNA, 328 bp, Glycine max
  Coding DNA Sequence Number=SeqID_2575
ggcgccgtgtccctaaaattgaatatgagaaagaggttcgacaagagatgagatggatcaaagcaaaccaccataggggagtcaagggaacttggagataaacggattggtatagcaactgaatcttcacatactaggaatagaggagcacaaaactgaacaatgcattatgccccccctgccacagacagcaaacggtgcgccccaatgggatcccctcgaaacccctaggtaatatctggaattatgaaaccaggtgccggtttccagtcccaaaaaaccccccccaattggaccccccaaaggccccaaaatgttaagtgaagtg

SEQ ID NO: 12355 - DNA, 587 bp, Glycine max
  misc_feature (110)..(110): n is a, c, g, or t
  misc_feature (194)..(194): n is a, c, g, or t
  Coding DNA Sequence Number=SeqID_2576
gcaccgatatttctataatgcgccatataattaaagcggggcgcctcaaaaagaatagttacgtattgtgcggttcattacattttttataggctgtgattattatatanaattcatgcgggcggcggtatgatcagggacgaaagatatcctcgagcgcggctgttaattcacatcttcgtgtttttctatgngcgccgcgggggagccaccccgtcccggtttttataaccggcggcatacacaaataaaaaaataaacgcgcggcgggatatatatgtattgagggcgtgggtatgtaaattttaaataaacagcgggatattaaggagcaacgtcggtgaatatataaaaatatagtgtggatataaaagtgttggggcggatgcatctggtgataacaatgaggtgggggggatggaggtatgtggcgtggtggcgagctcgtcgtaccgctttttttatactcactatgacgttccccggagctaatggttactactatggataatatttcgcccgtagtgttatgcacaacgaccgcaaaactccgacgggggagtacgcgccgagcatatcccgcagta

SEQ ID NO: 12356 - DNA, 297 bp, Glycine max
  misc_feature (124)..(128): n is a, c, g, or t
  misc_feature (250)..(254): n is a, c, g, or t
  misc_feature (268)..(272): n is a, c, g, or t
  Coding DNA Sequence Number=SeqID_2577
ctgcagaacaactaagtaaatccttgttggatggttcagatgagaatcacggcatagaaaatagatcattttggaacttcttttggtatccatccaagcttggaaaagatcttctcacaacagnnnnntttggtcttgttcaatatgtaaagcagatgatcctgaagactgtttgtgcattgttagcatttatattggaattggctggtgtttatggtgatggggaattcaagtggtactacgggtatgnnnnncatacaaagtgcannnnncttttctgtgaaattgtacacactg

SEQ ID NO: 12357 - DNA, 593 bp, Glycine max
  misc_feature (189)..(189): n is a, c, g, or t
  misc_feature (263)..(263): n is a, c, g, or t
  misc_feature (420)..(420): n is a, c, g, or t
  Coding DNA Sequence Number=SeqID_2578
cacatatcaatcacgcctcgcatagcacgtcgcgtgccctaccagcacgagtctagttaacacgagttctgagatatttgtcgttggcgacacaaaacagacgaatactacaattatctcattgatgtgtgtattcaatcggaggtcgagcgctcgcgcttgctgtccagccgcacgtcgctttacaantccaactgcacgagacacaacacatgattgtattaagtctgatgataagaacagagttcacgtatcactcaatnatagtacattgtctctaacagtcgcgctagctgacggctcctcgtcggggctgtataagtcttgaggagagaccttattcatgacgctgtgttattatgcggccagactatcgcgctgtgttgggggttgagaattgatatgtgcttgaatccagtnagagtactctccctctctgcagcgtcgcttgtgcgagtcataatcaatatccgtcgtcgtaggtatacttatactcgtctccgcacggccgagctgaggcagacgcatgtgtctttgataaataagtggaggaaactacgtgcggtttagatgtcgcgtgcatgtttagtgat

SEQ ID NO: 12358 - DNA, 452 bp, Glycine max
  Coding DNA Sequence Number=SeqID_2579
tggtatttacccacatgctgaaaacaacactctcgaaggaatcgaccttgttgacttgatgtacaatgataatgctgagttttggcgtaagcactgcgaaatccaagagaaaagtgagtctttctatgataaaagcttcagagacctgtttaatgctatggttaaattcaatcctgaagatagaatgaccatcaaggaagtcaaacagagtaaatggtacaatggacctgtttacaccccccttgaaatgcagaaaaagatgaagaagctcctcaagtgctaagtcttctctcttggtgaaatcaaattctctcaacttccttcgcataattacaaatttctttatcctttcctttcacttgtgaaaaacacacaagatttctttgtctataactcctttatctatgttctcaaactttactcttatattctctatctactcttctttatta

SEQ ID NO: 12359 - DNA, 513 bp, Glycine max
  misc_feature (246)..(246): n is a, c, g, or t
  misc_feature (430)..(430): n is a, c, g, or t
  Coding DNA Sequence Number=SeqID_2580
gtgcaattaaacaacccaagtaatattatatttattataaaatggataggagaagacgttcaagcttggtcattgacaatggatctggaatgtgcaaggccggatttgctggagatgatgctccccgtgccgtgttcccctcaattgtcggacgcccccgtcacactggtgtgatggttggtatgggacaaaaggattcctatgttggtgatgaggctcaatccaagagaggtatcctcactctcntgtaccccattgagcacggaatcgtgaccaactgggatgatatggagaagatctggcatcacaccttctacaacgagctccgcgttgcccccgaggagcaccccgtcttgctcactgaggcccccttgaaccccaaggccaacagagagaagatgactcaaatcatgttcgagaccttcaacanccccgccatgtatgtggccatccaggctgtgttgtctctctatgcttccggacgtaccactggtattgtcatggattctggag

SEQ ID NO: 12360 - DNA, 506 bp, Glycine max
  Coding DNA Sequence Number=SeqID_2581
ttagatcatctattggtgacagaattggaaaggccaagaaacaccttaaccgagaacttaatgaaattaccactgaaatgaaacctgaaactgaaatgatcagcaagatgctcacaaaagttacccgaactcgacgagctaccattacaccaattaaaagacgtaatgttgatcttagttccgagatgacctacgaatggagaagctacgatcttgagaatggtagcatcgaagtgatcttccgaaatgttgaggctgaaaaggttcctctattcctctacaaattacttcttaaaaattcaatgattggattaatttaaattaggacttgaattatatatagcaacaaaacaaaaaaaactcaaccaaatttctcgaatttttctcttttaatttgctccaaatctttatctcgcgcccctttttccttaaaaaaatatccatatttttgttgattgtaacaaaagtggaactcatgtctaaaaaatgattgttatcctatcgaa

SEQ ID NO: 12361 - DNA, 525 bp, Glycine max
  misc_feature (85)..(85): n is a, c, g, or t
  misc_feature (372)..(372): n is a, c, g, or t
  misc_feature (414)..(414): n is a, c, g, or t
  misc_feature (423)..(423): n is a, c, g, or t
  misc_feature (433)..(433): n is a, c, g, or t
  misc_feature (438)..(438): n is a, c, g, or t
  Coding DNA Sequence Number=SeqID_2582
tcgacatagcacacgagagcaccaccacctctgctcagagcgacagcgagtgaggcgggatgcgcgtgctaagcgagcggcaatngaagatatgatcgagctcgcgtcgcttctacgtccggcgctcatactagaggtgcttcgcctgcatgatctaatgcggcgacgtgcgtctcgcacgtgcgcgatgtcggtctgctcgctctgctcatctgagtcttgtacagatacgtgtgtatgacgtgagagcgtctatatatattcacgacgcgaggatccccctcgctcctcgtaccactcacctccttctctctactaatacatctacctatacgtccatccacacctccactctacactcgagtttttagntactactagtgttgagtgtgtgtacagcgcagcgccgatgcncatataccnatcttctccnttatntatctgcctgctccctgagcgtcgcggacagggcggcacgcgcggcccaaccgcttcttctcttctctacctctcgcaacactaaat

SEQ ID NO: 12362 - DNA, 383 bp, Glycine max
  Coding DNA Sequence Number=SeqID_2583
aatgtttgacaatcctattcgagtattcaagtatctttgaaggttttagttattggagataactaagatggctttcatgcaatattttgttttgttacttatcatttcagttgtttcagtcacaagtgaaatggttgcacaaaaaatatgtataaatgtggcgcaaccgagcaactgcggctttgacgtatgtaaactgctttgcaaagagttattcaaagacacattggtctccgccgaatgcattattaaaaatattcatggtccaaggggaactaaccaatgtacttgtttctatcgttgttaacctataattatattagtcttgtacacaaaattgtcagttaaattatataaataagatgcacttggttttttaacaa

SEQ ID NO: 12363 - DNA, 558 bp, Glycine max
  misc_feature (250)..(250): n is a, c, g, or t
  misc_feature (277)..(277): n is a, c, g, or t
  misc_feature (452)..(452): n is a, c, g, or t
  Coding DNA Sequence Number=SeqID_2584
gaaatcacacaccaaaccagtcagtcccttgagctgagcgcccaggcggagcagagcgcgatccgcgaccaatctgtgacacgacacgcagaggacgcgacggtgaggagagtgcgcgacgtcatagcagtgactcggctagacacagagatatgacggtctcttgacttataaaggactcttactctacgttgtgagaaaccgcgccagagcgtgtgtctgatacgtcgcctactcacctgccgtgtcnctgactgcgacacaggatgtggactgntatctagcagtggaaggggcgcgggtgaggtggtgttgtcagtagcgtatgaacttggtgatgtcgtgagcgatgtgacgtagagtgagtaatatgaattatacagtcgacatatgcctgggtcacctctccacgtgctgtgtgttcttgtacttcggtagagtgtgtatgtatnccacggtcaagtaaggtgtgtccagtgacaggtcacagtcggatgagtgctcagcgactagcgcgctgtgtactgaggtgtgtgatgcttgactgactattgacta

SEQ ID NO: 12364 - DNA, 526 bp, Glycine max
  misc_feature (124)..(124): n is a, c, g, or t
  misc_feature (368)..(368): n is a, c, g, or t
  misc_feature (371)..(372): n is a, c, g, or t
  misc_feature (377)..(377): n is a, c, g, or t
  misc_feature (484)..(484): n is a, c, g, or t
  misc_feature (487)..(487): n is a, c, g, or t
  misc_feature (489)..(489): n is a, c, g, or t
  misc_feature (501)..(501): n is a, c, g, or t
  Coding DNA Sequence Number=SeqID_2585
cattcccagaatccgatgaccaagttgaagaccttagggtccctgacaattggttagacccaaccatcgccttccaggaatcagagtggcttagggttactttacataaatggttggatgatgnagtactgtcctgaagaaaccaatgtggaaataagcagagttgctgcaactcattctacaattctctgctacagaagcaaacagacttgggtgagattctgttgaagatggcccgtgaattggagtctattaattataaagagagtttccatggggcattctcatcagcaaatgctgctattgacctcattgctcaacggatagaacagctctgccagtcaatttgaatttgattgctctaattngtnngtttnggttatagtacacaatcttgtttcacacttgacttcttcttagctttaatccccggaatattgtattgtaggccattctatggtttttttttttttttttttttaanggntngagtacttgggnggtccatttctcagcttcctgaaaa

SEQ ID NO: 12365 - DNA, 314 bp, Glycine max
  Coding DNA Sequence Number=SeqID_2586
tcggaaggcctggagaaggttcttaccccgacccctttaaaggcgggggtgggctgagttcatctccacctgatctttctggtcggcgggtcaaggtgcgggatcggcttcacaagctcaccgacaacggcgccgccactcccgccgggcttattttcggtttcattggccatgcttttggcctctttgtgggcgggtttccgggggccaacatattcggggggcgcaggaacacccccgggaactttggcggctttttgggggggagaatatacattatttcgcgggatagtgtacgtaatctgccagctcct

SEQ ID NO: 12366 - DNA, 372 bp, Glycine max
  misc_feature (64)..(64): n is a, c, g, or t
  misc_feature (224)..(224): n is a, c, g, or t
  Coding DNA Sequence Number=SeqID_2587
cgcgcggatgtgtttgtagtgttttgctttgtattttagcatgattgtacatgttcatggtacntctccgtgagtgtcgtggagttggactgtgcgcttctaccgtgtattgttgtcacagcgatctgtgtcacgcattctacagatatattaccaattaccgcatttgatatctcacagcaagtagcggacgtgtatagcctatcgtcacacatgcaccgctngcgttaatccaaattctgggtctttcagttgtttctgttctcatactcttatatcatcttatttacgatcttgtgtgtgtttttctatcttcgcccttaatcatatatttctatatatcattttaattagcgagggtgcgttattggc

SEQ ID NO: 12367 - DNA, 506 bp, Glycine max
  misc_feature (90)..(90): n is a, c, g, or t
  misc_feature (93)..(93): n is a, c, g, or t
  misc_feature (155)..(155): n is a, c, g, or t
  misc_feature (162)..(162): n is a, c, g, or t
  misc_feature (202)..(202): n is a, c, g, or t
  misc_feature (410)..(410): n is a, c, g, or t
  misc_feature (439)..(439): n is a, c, g, or t
  Coding DNA Sequence Number=SeqID_2588
gatcactctcgacgcatatgctatacacacatgtctacatcagcctatcagtacgcgtacgccgttctctgcgactgccatacgtcaaangangtgtgacttcaactatcaatagtatatatacactcactacctcacctactatcacatcatanatactangtgatatagacatgtaagacgtgactacgtgtgctataancactcactcatctcactgcacctgatagatgatctatagatggtcatacgatacatgtgctatactgtcactctaagtactactctgtatacgtatatgtatgtccgcaccactctcgacactctcgtagataatatctatgagcactcacgtcacacagactctgcagcgctcggtagtcctgtctactctgctcttatacatccancgatcgcgccgaaacagacacgcgacacnacttgaatgctcgattacgatgatcgacacacgtactctcacctcgatcgcagcacggagttctgtg

SEQ ID NO: 12368 - DNA, 360 bp, Glycine max
  Coding DNA Sequence Number=SeqID_2589
aaatcccttaacatgctgattgctgaagttatgtgaacactctaataattaaaccttgggggggggggacggccagcacaatagcgagaggctgctcccaagagtcgattgaggaaaaaggcatacgtgcagcagatagaatcagtggcgcttgaagctcttgcagttagagcaagagggagatcttgtcttgcaacagggattgtacattggcaacggattggggtctaagaatttgggttgggctggggctgtaaattcaggaggaaccctttcccagagggagtagggcaaaggggtgggaggaccaaaataaacaaattttggaactgaggagcggccttaggtctccgaacggtg

SEQ ID NO: 12369 - DNA, 317 bp, Glycine max
  Coding DNA Sequence Number=SeqID_2590
ctttttagttttgtgttctgaagagatcgtcactgcttgaagacgtcttgctgctttcgcgtatctcatctctgcaaatcacaatgtctttggtcgcaaatgaggagtttcagcatattctccgtgtgctgaacacaaatgttgatggtaagcagaagataatgttcgctcttacctctatcaaaggtattgggaggcgattggctaacatcgtctgcaagaaggctgatgtcgacatgaacaaaagggctggtgagttatcggcagctgaaatcgacaacctgatgacaattgtcgcaaatccaaaacagtacaag

SEQ ID NO: 12370 - DNA, 368 bp, Glycine max
  misc_feature (67)..(67): n is a, c, g, or t
  misc_feature (136)..(136): n is a, c, g, or t
  Coding DNA Sequence Number=SeqID_2591
tccgatctccggactcttctcgagatcccttagcttcctccaccgcacttcccccctaacctccgcngctcgccacctatgcgccgtcacttcccccgaagctagaacgaagaacctcgagcgaatcgccgacganttgctcaacctcaacagaatcgagctctacgactactcaatcctcttcagccacaaactcggcctcaaccgctacggatccgccgtgtcctcccccgccggagacctccccgacgcgtccgcctccgccgagaccaaaaccgctgagaaaacggctttcgatgtgaagcttgagaagttcgattccgcttcgaagatcaaagtcatcaaggagataagagcgtttacggagc

SEQ ID NO: 12371 - DNA, 470 bp, Glycine max
  Coding DNA Sequence Number=SeqID_2592
agattgccacgtctcttttaagatggccatggcaggagactctgaaactgcatcttggagaagtgatctctcaaaggttgacgtttggtatgcatcttttggatccaacatgtggaaaccgaggttcctttgctatattcaagggggacaagcggcaggaatgaagaaggcatgtgttggtgcaatggataaaactccaccaaaggaaacaacgtggggaacgtttccaaacaggctattctttggccgtgaatctacagttacttggggtgaaggaggatctgctttcctcaaccctctgactaatctcagtgatcaaactcacatgtgtttctacagaatcacgcttgagcagttcaacgatgttctgtttcaggaaaatggcatgaaagtagattctgatactcctctctttgatctagcggctatgcagttagtacagaacaatggatccattccacttgctaaag

SEQ ID NO: 12372 - DNA, 498 bp, Glycine max
  Coding DNA Sequence Number=SeqID_2593
tctcacttttctcaatggagggaaaaaaatccaaaaaaaattcgaacagggaagaatatatcttcttcttcttcttccaccagtgaacaaatctagggttttagtctcttccttcagcttatttacttgttgagttctggatattcctcgaaaagatttgcttcttagtcattactaaggtatctccatttggcgaggatctagccttttagttattactagggtatctgattccgattggcagggatctttgaaaagctgttcctggatgcactgtgttagtggacatgcaaactaagaaaaaaagcctccaggcgaaatgccagtcaagagcgtggcagtcctaaagtttcaagagcacagaggaaggtctctggaaatggtcgagctgctgaaaagaaagtcacagacttaattaatgttcagttttttaagttaatttgtatcaattgtttcaaaatgtatgattcataacctagttgctccttcataatttga

SEQ ID NO: 12373 - DNA, 318 bp, Glycine max
  Coding DNA Sequence Number=SeqID_2594
ttattatagcgcatgtgtctacaaaaatcgttaaaaaaagaatattaaattatgtaaaaaaatttaaataaaaattctaggccttttgattaaattatgtaaaaattctaaaaatttcaagtggcggggctggtccgggttcggggtcggggcagatgtagtaatctcatatccgtacccgtatccgacttttgattattgggaaaaacctgaacccaaactcaatatgggttttcttgtcatgtcttgtttttagtttctaaacctctttaaaaagttatggtctatttttatgatttattgcagattgaggctgtg

SEQ ID NO: 12374 - DNA, 504 bp, Glycine max
  Coding DNA Sequence Number=SeqID_2595
gaaatggtctccttattcggatggaacgacgccaacgatcactggcacgctgacaattctgatccttttgcttacatgagaactaagcccttgttctcattctcaagaatgtacttccctgacccataccacggcagtgacgacttcgagccccttatgaacgagccacatggttacctgaccggtgatgatcctttggacaccagaaacagtattgagagagctgttcctgaatacttcatgtacttcttggttggattgaccttcaccttgatgttcggatacaacttcatgaactttgtccacccttcagtgaccctattcaacctgaaccaaactgcacacttgttggaggatgacattagaaagagacgtgaagagaatagcaaattggagagcagaagagatgaacttcgtcgccaactatctggagacagcgaatagttaagatgggtagctgtgtgtattgcaagtattatagctatatgacctacttccgttgtt

SEQ ID NO: 12375 - DNA, 254 bp, Glycine max
  Coding DNA Sequence Number=SeqID_2596
cgatgattctacggcgatccatggggcctctccctccgacttccaagcttccgacctcagcaagctcatcgtccctgctcaccgtaagggaaagaacatgtggtttcaacttgattctcctcctttcccctccttccaattccgtatggctggtgctactcacattaaaggagctgctcgcacccactattatacgccccctgtaacaaactaccatgactcggcccgcaaatattcacacacttgtccaaccc

SEQ ID NO: 12376 - DNA, 536 bp, Glycine max
  misc_feature (52)..(53): n is a, c, g, or t
  misc_feature (76)..(76): n is a, c, g, or t
  misc_feature (78)..(78): n is a, c, g, or t
  misc_feature (132)..(132): n is a, c, g, or t
  misc_feature (154)..(154): n is a, c, g, or t
  misc_feature (159)..(159): n is a, c, g, or t
  misc_feature (211)..(211): n is a, c, g, or t
  misc_feature (230)..(230): n is a, c, g, or t
  misc_feature (243)..(243): n is a, c, g, or t
  misc_feature (293)..(294): n is a, c, g, or t
  misc_feature (311)..(311): n is a, c, g, or t
  misc_feature (318)..(318): n is a, c, g, or t
  misc_feature (321)..(321): n is a, c, g, or t
  misc_feature (330)..(330): n is a, c, g, or t
  misc_feature (344)..(344): n is a, c, g, or t
  misc_feature (351)..(351): n is a, c, g, or t
  misc_feature (355)..(355): n is a, c, g, or t
  misc_feature (375)..(375): n is a, c, g, or t
  misc_feature (379)..(379): n is a, c, g, or t
  misc_feature (382)..(382): n is a, c, g, or t
  misc_feature (384)..(384): n is a, c, g, or t
  misc_feature (395)..(395): n is a, c, g, or t
  misc_feature (407)..(407): n is a, c, g, or t
  misc_feature (440)..(440): n is a, c, g, or t
  misc_feature (443)..(443): n is a, c, g, or t
  misc_feature (447)..(447): n is a, c, g, or t
  Coding DNA Sequence Number=SeqID_2597
atcatcgtacgtttatcgtcggtggtttacgcgtctgtgagtcgtgcgacanntgatactgactgtatgaagactncnataaatagcaatactggtatggcggtagatgggcgagagactatgctagatgtncgcgtctgatacgtcgtagtgnattangcttcgagctgtgtacgtgctgtcaggtatatgggctcgactgtcgtgttgnagctgacgtcgcgcgtccnacgatgatgtgancacggatgtgatgcgatcgtatgaacagatggagtctcgactctatgtgnnatgtcgatctgttgggnatctacnagngcactgctnagtgagacgcaggngattagnagcnacccatgcatggacgttcgntgangangnaccgacttacnaacgaagtgacnttgagcatgctgcgtgagctggtactactgtgntanctancgtaggatcggtcatgccaggagtatgagtaaggtgtggtcagttgagcactgcacggtcgtgtgcagcgattacgtcagcggatgatt

SEQ ID NO: 12377 - DNA, 578 bp, Glycine max
  misc_feature (46)..(46): n is a, c, g, or t
  misc_feature (416)..(416): n is a, c, g, or t
  Coding DNA Sequence Number=SeqID_2598
cgcttcgctcttatcacttagttgatgtgtgagcacgtgtgcggcnagtgattggtgacacacgagaataagtcagagccgaatgggtgcgggtgggagaatgtcatcctctcctcctccctccagaccgcaatgtttgtgttttgtgtgattcatctaatacacgctgtctcgcgactatatacattactgcatctcctactcctccacgcgctatgcttagtcttcacaagcacctatcgcatatttatattataatagaggttgaagcgtaccaacaacatgacatcgacgcgtgatgagcctgtttattatacctagtacgtattctctcctcccacgcaatcttgtggcacccgctctgcgcgttcttgttatcacaggacaccttcgatttcaccgctctaccgcgcgtngatgtgctacatcacgattatcatctctgactctctcgtcgcacatgtcagaagcacgccatggtgtctggccgattattagatcgagtgacaataacatcaactcccacatcttctaactccaataacgtagctacaactccaagcgtaacgtcctgatca

SEQ ID NO: 12378 - DNA, 388 bp, Glycine max
  Coding DNA Sequence Number=SeqID_2599
ctcttggcattgaggagggttcgtcctgtacccggagacccaaggcgccccagggctgactctcggtggcaaaccgaaactgccggcttcatgataactccactaccaggcgcttggccccagaaacctggttctgcaactctcccttcctttggagttcagccagtcattgtggatgagaaaggtgttgaactcgaaggcgagtgcaatggatatttgagtgtgaagaaatcacggcccggggcattcagaactctgtatggggatcatgaaagatatgacacaacatatgtcaagccattccccggatactatttcagcggtgatggctgcagcagggataaagatggataccactggctcactggaagagctgccgaagccatca

SEQ ID NO: 12379 - DNA, 325 bp, Glycine max
  misc_feature (201)..(201): n is a, c, g, or t
  Coding DNA Sequence Number=SeqID_2600
taagctccgtcgacaaaccaacaaagaatccaaaaagaatcagacgcccaggccaccatggcgaacccatccacgagctcgaggccgccatgcgcggctcccagtggcaccaagctcacctgcctatgctcgccgacgaaccacccgggctccttccgctgcacccgccaccgcaacccacggggccgaccgcagacgtcntcgccgccgtcgtccagccgggcggctttgggcgccagcgcaacggtgcgcgtcgaggggatcaccaggagcggtgacgtcgctgcgggaggcaggacaggcaagggccggtccgtcctgcgcg

SEQ ID NO: 12380 - DNA, 580 bp, Glycine max
  misc_feature (209)..(209): n is a, c, g, or t
  misc_feature (225)..(225): n is a, c, g, or t
  misc_feature (234)..(234): n is a, c, g, or t
  misc_feature (259)..(259): n is a, c, g, or t
  misc_feature (273)..(273): n is a, c, g, or t
  misc_feature (278)..(278): n is a, c, g, or t
  misc_feature (282)..(282): n is a, c, g, or t
  misc_feature (312)..(312): n is a, c, g, or t
  misc_feature (342)..(342): n is a, c, g, or t
  misc_feature (377)..(377): n is a, c, g, or t
  misc_feature (454)..(454): n is a, c, g, or t
  misc_feature (463)..(463): n is a, c, g, or t
  misc_feature (479)..(479): n is a, c, g, or t
  misc_feature (501)..(501): n is a, c, g, or t
  Coding DNA Sequence Number=SeqID_2601
atgcggctgcgcgtgtatgctcatcattcgtgtcgcgacttcgctacgaggtgatagatctatagtgtgagctgagcgtgcagatgctggcggtacgctctctgcgagtgaatacgcgtaacgcggtgtggatatgacgtatcgtgccgatccctgatggcggagagcatgcactgatcgtcgcatgacgagacgagtggcgcgatgtnctgtggagtgctgaantctgtctcntgcgcttcgtgactgcgtctgtatntaggatgcacgggnatatnatgnatctactctaatactctatctacgatactnccatcactatatgacggctgatctcgccancatatctcgacacgtgacatacgtgactgcgaccncgctcgctcagtatcatacacggagatgatgtaggactcatgttgcgtgagtggtgtacctagcatgtagacggcgngcagcgtangatgactgcggatcanagatgcgtcgacgcgcaccganggctggagtatgaggtgatggactgttgtcattgagcgttgactcgcgtggtggtcaactgtctgtagtctgtgatgca

SEQ ID NO: 12381 - DNA, 193 bp, Glycine max
  Coding DNA Sequence Number=SeqID_2602
gcggtaaccggactgcttccggtatcggccacgatgtttgccttcctcttcggttttggcatgcgcgatataaggagcaacaaatttgtctagatataaaaatataaaatcagtgaaataaagagtaacaaatttgtttagatgcctgcaagaatattaataaatttatagattcctgtaatataaatatgtc

SEQ ID NO: 12382 - DNA, 172 bp, Glycine max
  Coding DNA Sequence Number=SeqID_2603
ctcgcgtggcgaggcggattctaaaccgaatggtttaattcacccccctgtccccgcttggcacaaaatatgtcatattattgagacggacactccgcgcaagctcacaacccgccttcggagtggtacgtcttagaggggagggcacacatgcgaccttcttttacagcaa

SEQ ID NO: 12383 - DNA, 552 bp, Glycine max
  misc_feature (130)..(130): n is a, c, g, or t
  misc_feature (142)..(142): n is a, c, g, or t
  misc_feature (158)..(158): n is a, c, g, or t
  misc_feature (167)..(167): n is a, c, g, or t
  misc_feature (170)..(170): n is a, c, g, or t
  misc_feature (205)..(205): n is a, c, g, or t
  misc_feature (208)..(208): n is a, c, g, or t
  misc_feature (237)..(237): n is a, c, g, or t
  misc_feature (273)..(273): n is a, c, g, or t
  misc_feature (341)..(341): n is a, c, g, or t
  misc_feature (396)..(396): n is a, c, g, or t
  misc_feature (419)..(419): n is a, c, g, or t
  misc_feature (464)..(464): n is a, c, g, or t
  misc_feature (486)..(486): n is a, c, g, or t
  misc_feature (491)..(491): n is a, c, g, or t
  misc_feature (496)..(496): n is a, c, g, or t
  misc_feature (511)..(511): n is a, c, g, or t
  misc_feature (514)..(514): n is a, c, g, or t
  misc_feature (520)..(520): n is a, c, g, or t
  Coding DNA Sequence Number=SeqID_2604
agacgtcaatctatcgcagcacatcacgtacatcatccacatacacacgaaactctgtcgcgctgcaagagctccagcaccgcgcccgactgctactgcgctgcgtgcgtatacactaccacgcgacgantagttgagatgnacgcgcgtctgacgtngttagtatngtntgacgatagcgctagcagcacgagacggatacagnctntgcgtttgcgtcgctgcgccatcgtgctntgtactgtacgactcgtatgtggtagggttaatttntcgtattatatggggcagcacgctcatacgtagtatactcgcagagtgagatgtactggtagtagtgnagcgtagcgcatcgacgctacgattacaacgaatagctcatgacacactacaaancgctggcattaatacctagattnctatcgaaatgatatacatcatatattattgaggcgtatagtttnatgatagtagtgagtgatggancggancgtantcatctactcttgantantaatcncaacgaagatcacactatcaactacgacacta

SEQ ID NO: 12384 - DNA, 535 bp, Glycine max
  misc_feature (92)..(92): n is a, c, g, or t
  misc_feature (140)..(140): n is a, c, g, or t
  misc_feature (142)..(142): n is a, c, g, or t
  misc_feature (182)..(182): n is a, c, g, or t
  misc_feature (292)..(292): n is a, c, g, or t
  misc_feature (307)..(308): n is a, c, g, or t
  misc_feature (310)..(310): n is a, c, g, or t
  misc_feature (427)..(427): n is a, c, g, or t
  misc_feature (461)..(461): n is a, c, g, or t
  Coding DNA Sequence Number=SeqID_2605
tcgatagtcgacctgtagtgcacatcggactcgcaccgcaataagtaatagcgcccacccgcagacgcacagctattatacatattaacatngccgcgcattattccatacgtacgcgtgctgtatggtgctacgcgccncnccgcgacagcagggagcgtggttgaaagcacgagtgtgtntcctcctcgcggctatcgcggcgaggtatcacagtatgatgcgtacgttcttcggtggataatacccggccgcaggcatcgcgtgtctgtgattgggtgatagagcgcgngatgtataacgacanntncctctcgtgcatcgctcgagctcgcggctatattatatgatgacaagacccgcagccagcgcgagagcagaataacacataggcgtcatctatgtcagtgtaacacgcgactgcggncgcccgcatctgcagtatatatatacagtttctntacgctgtgatagtctcgctgtagatcgtattgcatgacgacgataatagtatgtatagatgacgccttctcta

SEQ ID NO: 12385 - DNA, 530 bp, Glycine max
  misc_feature (68)..(68): n is a, c, g, or t
  misc_feature (344)..(344): n is a, c, g, or t
  misc_feature (353)..(353): n is a, c, g, or t
  misc_feature (394)..(394): n is a, c, g, or t
  misc_feature (413)..(413): n is a, c, g, or t
  misc_feature (417)..(418): n is a, c, g, or t
  misc_feature (474)..(474): n is a, c, g, or t
  misc_feature (484)..(485): n is a, c, g, or t
  Coding DNA Sequence Number=SeqID_2606
ataaatacatacttttgcgtgcgtgtgtggtggatagttgttgaggcggtgggcgtgtttgggtggtntggtgggggggggttctctccgtcccctgaccctgtaagttttctgcagggggacagcggcgggcggagcaacggagtcgccgaaagtcatagacatacacactcggaaaatgatagacattttcctattaaaactctcaaatttctcttttttctccttctaaccataatctcgtctcgccgcgggccgcgcagtagccacacagtcgacgaatgcctcccgtatgacgtctgctctgaggcggttctggcatccgcatttcaacccacctcacncccgtcccngcggtatcggcggccgatgtcatattgctgaactaacacantcacttttccagtaggttntttnnttggttttattatcactttcaaccggttgcaaaattaaatccttcccttcgcccanccaccgcccnnaacgctcacaaacgactctcatctccccgcgccttggtagtgaac

SEQ ID NO: 12386 - DNA, 94 bp, Glycine max
  Coding DNA Sequence Number=SeqID_2607
tgaataagtggtggcttacgtagccacacattacattatgactggtggctggtattattacatcatcaactagcttgtatgagtattgattttt

SEQ ID NO: 12387 - DNA, 346 bp, Glycine max
  misc_feature (271)..(271): n is a, c, g, or t
  Coding DNA Sequence Number=SeqID_2608
agatcatgctcgtcgcttgtatctcatggctaagcatcgttacatgatttagcgcgctcgcgtactgaaggatgtccgtaatacagcatctctgaggctatcgattatcgtcacgcccacatctaggctgtacgtctatgaaatttcacgcagcacgacgtctgttgccgaagaacatgcgaaaggagcctgttgactcaggatactcattcagactggtcgatgaggactccactacactatttgacgacatcttgtcgatgagccacancgctgtaagaatgatcaagaatcagtggctctgcatctagacataagacagggcactgcgtgactaactctggag

SEQ ID NO: 12388 - DNA, 533 bp, Glycine max
  misc_feature (352)..(352): n is a, c, g, or t
  Coding DNA Sequence Number=SeqID_2609
agtagatcccggtcgttgttcacatccacgcttgtcgttctatctgtaccctccccgttgaactccctatctctagtctagtgatcgatcgtcttatgagcgacgcctgccaacacacatgggcaggagagtcaacacgagaggatccacttcatacctgataagctcttagcccattattccctcccttctgcatgtctaccatgagagtgtgctacctgtcgctacaacctggtatgatcgtgactctgctctcttgtatcattgattattcttggccgcgtctatatctgggtggtagcgttcccagtttcctagtgtcgatgacctcctcatctgtcttacactctcntcatcactgacgatccgtgtctagctaccctcccttcctcataatggatgcggtatcctcgttccatgggtacactttcgcgatggtcgtcacgacacacgccacacatgctatacactatactcatcctttcctgtgtgggatggtctgcctcacttgtaatacactcacacgcaaccat

SEQ ID NO: 12389 - DNA, 102 bp, Glycine max
  Coding DNA Sequence Number=SeqID_2610
tattctggtaaagataaaccaactggtttcattttgtatatattgggatgagcgagtactttcgggcctccaaccgtaagttacgctctttcaagcaagatc

SEQ ID NO: 12390 - DNA, 406 bp, Glycine max
  Coding DNA Sequence Number=SeqID_2611
tgccagtgttgttttccaacctgaggacttcaaagaaggtttggagtgtgcagtttgcctctctgagattgtccaaggtgaaaagttgaggcttttgcccaaatgcaatcatgggtttcatgtggattgcattgacatgtggttccattcacactccacttgtcctctttgtaggaaccctgttgcttttgaatcctctaaatgtgaagagagtaatgtctcagggaatagtgattcatcatcatcatcatatgaagagaactcaggtggtgtgagtggtttggaaccttcaaattttcccacaaatgtgttggtttgggggaaccagacacaagttagttccattggggtttcattggaagaaaaagaagaagaagaagaagaaggtacttctcagtcccagcaa

SEQ ID NO: 12391 - DNA, 578 bp, Glycine max
  misc_feature (27)..(27): n is a, c, g, or t
  misc_feature (199)..(199): n is a, c, g, or t
  misc_feature (231)..(231): n is a, c, g, or t
  misc_feature (262)..(262): n is a, c, g, or t
  misc_feature (279)..(279): n is a, c, g, or t
  misc_feature (307)..(307): n is a, c, g, or t
  misc_feature (318)..(318): n is a, c, g, or t
  misc_feature (420)..(420): n is a, c, g, or t
  misc_feature (477)..(477): n is a, c, g, or t
  misc_feature (497)..(497): n is a, c, g, or t
  misc_feature (507)..(507): n is a, c, g, or t
  misc_feature (526)..(526): n is a, c, g, or t
  Coding DNA Sequence Number=SeqID_2612
gcagccacgacacgcgcagagtatctncgacgacttgcatagcacgcgtcatctccctggtcggacagcacaaacttataacaaggacccgagctgacacgaagtaaccgaagaagctccaagctcacacactcgtgacatctacacacaatctctgagctaccagtctacgacgtcgcacgtcgctcaggcggcgagntgctgccgccgaataccagagcgtcacgtccntgcgaaccatatagcggacacgacaccatcnagcgtgagaggtgatgntgcgtgctctcagcgatgagtggacgtntactaagtgcnactcgtctctatagtctcgcgtcgacacccacgcacgctcacgacatacatgacgtgtggtataacgaccagcttgtgacctgactcgatgaccatcacctncgcatcagctctactggccctcgctcgtcactgacacatactgttatggagtattgntacagtctagatagagtganccatatgaancacgacgtgacacaatagnagatgatgttgagtcctaccggccagcagctgctacaccgtgcgtggacgag

SEQ ID NO: 12392 - DNA, 333 bp, Glycine max
  Coding DNA Sequence Number=SeqID_2613
agagtcttgctccttctcctgactgtagagcatccatcacgtacgttcacggacaaacatgtctccggtgaaggtgttcggccatccgatgttgacaacgtcgcacgggtgatgctcttcctggaggaggtcgacaccgagtacgagctcgtggccatcgacttcgtcgacgtggagcacaagatgtcccaacacgtccagctaaacccgttcgcgaagatgcctgaggtccaagatggcgatctcatcctgttcgagtcgcgcgccatcgccaaataaattcctccgcaaagaccggtggaacggccgggcatggaacttcctccgaagaaa

SEQ ID NO: 12393 - DNA, 583 bp, Glycine max
  misc_feature (60)..(60): n is a, c, g, or t
  misc_feature (228)..(228): n is a, c, g, or t
  misc_feature (509)..(509): n is a, c, g, or t
  misc_feature (530)..(530): n is a, c, g, or t
  misc_feature (535)..(535): n is a, c, g, or t
  misc_feature (538)..(538): n is a, c, g, or t
  Coding DNA Sequence Number=SeqID_2614
tatacaccaccacactgactactatacgcactacacaagaacagtgagcacgctcgtgcnagctctcccctgctgtcataccctcctctgcgtcctctctctcacactacacacaatactcatatacaccgatacaatcaacataccgatacgatatacgctataacataatatcacctacacacaaatagattgaattatctatccgtatattatctataagctgtntgtcgtagactctgcacgagccataccccataatcttcctctcttgcattctatctcctccacatatactctcattatgcatctgtacatctctcatatttaatcatcaaatctaatatatatgagtaaaatcaatctataatcacgcatcccaattagtacacataatccaatatcttatatataaggatacagagaataatcacatattaaaaacacaacccacctctacttccactctcagtctcccatgtatctcatactgttgtcggtatacagtnaacacttaactcgactcccanggtcnccngaaccgcaccggtgccgagcgggtgagtcctattactcataacca

SEQ ID NO: 12394 - DNA, 359 bp, Glycine max
  Coding DNA Sequence Number=SeqID_2615
ttccggtcagtgtagccatgggtatatcccgagatcactggcataaacggcgagcaactggtggtaaaaggaagcccatcaggaagaagaggaagtttgagttaggaagaccagctgccaataccaagcttggtgcccgtagaatccatgctgtgaggacaagaggaggaaacaagaagtacagggcgttacgtcttgaccatggaaacttctcgtggggttctgagtgttgcactcgcaagacacgtgtgattgatgtagtatacaatgcatctaacaatgaactggtcagaactaagacactagtaaagaacgctattgttgtaattgatgcgactcccttcagacagtggtatgaa

SEQ ID NO: 12395 - DNA, 275 bp, Glycine max
  Coding DNA Sequence Number=SeqID_2616
gatgatgcaaatcaagggccctttctttgggttccttggccaaaacgggttttccaatggaagatgggcaatgtttggttttgctgttggattgctaacagagtatgcaccggggtcagattttgttggtcaagtaaagatccttttttcgaattttggaatagtaggtttgggatgaatcccctaagattatatcctggccatagtttcagggaactactccaaaaaaaaaaaacgttttttttttttatatagcaaccaagcggggatttttg

SEQ ID NO: 12396 - DNA, 553 bp, Glycine max
  misc_feature (186)..(186): n is a, c, g, or t
  misc_feature (315)..(315): n is a, c, g, or t
  misc_feature (342)..(342): n is a, c, g, or t
  misc_feature (362)..(362): n is a, c, g, or t
  misc_feature (390)..(390): n is a, c, g, or t
  misc_feature (511)..(512): n is a, c, g, or t
  Coding DNA Sequence Number=SeqID_2617
cgatacagtaagtcgcacacgcgcacgcagagcggcgagagagacgagtcagtcgaaggcgagagtgggggagagtcatagagagagactactagagaggggcgtagcgagcgcgtgaagggatgtgagagaaacaccagaggaactacagcaacagacaatcgttagacaagttaagtctaagantaggagtggtacaagcgatggcatgcctggataatgtaatatacatatacactatggttattcttgatatatattataaataagttagttagagtgaacgaaagcgccgcgggtcacagaaggcgttgngggagtacagcgagatccagcgtcctncacgagagatgtgagtgggntggatgtaggagagtgacgcagctagtnttgacactcgaaaccgaggcagagcaccgtgacgtattatatatgttgtgagaagatacactatctattatacaatatcatggtggagagggagagtcctctgcggcgcggtggtgcgggnngtggtatagagaggagtagtcgtcacagctctgttgtggtg

SEQ ID NO: 12397 - DNA, 480 bp, Glycine max
  misc_feature (38)..(38): n is a, c, g, or t
  misc_feature (78)..(78): n is a, c, g, or t
  misc_feature (227)..(227): n is a, c, g, or t
  misc_feature (248)..(248): n is a, c, g, or t
  misc_feature (280)..(280): n is a, c, g, or t
  misc_feature (292)..(292): n is a, c, g, or t
  misc_feature (299)..(299): n is a, c, g, or t
  misc_feature (303)..(304): n is a, c, g, or t
  misc_feature (309)..(309): n is a, c, g, or t
  misc_feature (411)..(411): n is a, c, g, or t
  misc_feature (421)..(421): n is a, c, g, or t
  misc_feature (437)..(437): n is a, c, g, or t
  misc_feature (439)..(439): n is a, c, g, or t
  misc_feature (451)..(451): n is a, c, g, or t
  Coding DNA Sequence Number=SeqID_2618
acgccagcacgctacatgggtgatgagatagtatgtgnaattctcatgcacacgcactgccatgtcgttctagcgcancagttctatgatgtcacagagtgagcagatgatgagagacgaatagatatcacacagacccaacaagctgtgcacgtagacgttacgccatacatatctatgtaaaagtagacagtctagcacacgagtgacgagacgggtgtcatctnatgtatagtctggacggtcantccgatatgacacacacctcatcatcacacantgatgagagtgnggttgtncatnnttatnattcaccacacaacctacctgagtacctataataaacaaaacagcaaacataatataagaatagattatattttctataacactcctaatatcatattccanccaattacangaagtttgtggtgctngngtcgtatagatnaaagtgtaacacacaacacaccgaggcag

SEQ ID NO: 12398 - DNA, 574 bp, Glycine max
  misc_feature (451)..(451): n is a, c, g, or t
  Coding DNA Sequence Number=SeqID_2619
ttcaacattcgtcttttcaacacccgccaccaaccctaccctttttatgcccacaaatgctcgttatgagaccaaaagaatttgaaaattcacgatatcgaccactatgtttgcgcatttgctaaaacactaagtgctttttatacaggcaacgaacatctccccacaattttgacctatatgacattgtttaactaacaatcaaaggaagcagacatgcaccatttacgccaccgaatttttatgtgctaattgtacacaacattatattataatatgattatgccgtccaccagcacccagcgccagtctgccgcgcactccctccgtcaactatcgcagaattaaagccaacacacccaaacactctccctcattacttgttctcacacccccccgcgcccacccccctctgttcttgagtatagtttgttgaaatacggaccgtgtnatacacacaaccgcgtgagcaatgacccactcaaaacaattgtgcaggtctgttttcgtccacaagacaatatgtttgattttttccgtgcatatggatcgtaaggctaagacgtcgcggaat

SEQ ID NO: 12399 - DNA, 510 bp, Glycine max
  misc_feature (349)..(349): n is a, c, g, or t
  misc_feature (385)..(385): n is a, c, g, or t
  misc_feature (424)..(424): n is a, c, g, or t
  misc_feature (475)..(477): n is a, c, g, or t
  misc_feature (479)..(481): n is a, c, g, or t
  Coding DNA Sequence Number=SeqID_2620
gttcattatgtctgtattcttctctatatcggcttctgtacgctagactaatatatagagtgagaaatatgcgagatacagcgactgtgtgttattgattgagattattatgcatgaatatactccaccgtattgtgcctggtgaacactatagtattgagctgcctggtaacagatctctcgctcttactctatgatctctgtcaccatcagtcacgaccgatccgctccgcgcgcgcgagtcggatcagcgcacggcgcacgacgcagagggcgtgcataaccaaggcagctccatcaagagacagagagaagtagtagccaaacagacacgagacgccctactgcngtacctcgcacacaaacaagctcactcaggacttcngatcctaggcctgcctataatatctgtgcatacaatccnctttgtatttgtcaagtatgaggtcagtagataagcacgctgatgagtagnnnannncctctctctccctcttatcttattataca

SEQ ID NO: 12400 - DNA, 522 bp, Glycine max
  misc_feature (330)..(330): n is a, c, g, or t
  misc_feature (357)..(357): n is a, c, g, or t
  misc_feature (377)..(377): n is a, c, g, or t
  Coding DNA Sequence Number=SeqID_2621
gggccattacctaactagagttatcatgagtgaatgtgttcaagtcttgattagcgaggtcgagtttattatctcctctcaccgcgtgcgcgcatgtcttacctaagatagactccaactagtatatttaataacacaccatcatagttcagcacactatcaaacatacaccacacaaacaacacacaagagggcaaacacaaaatacgcccaaaagaacaatacaaatacacacaccgaccaccacagacaacaccggaacgtcatccatgtactgagctatcaaattctggctcgcagttcgcgtccctccgtgatttgtttggtgtntcagctcaaaatgcacaagtacgttcntcctgtattttgtctcttcncaatctggctgcgaatgttgtgctggcacagagtgtccggtgacatgagggaggaatacaaagaaactcctttagcgcttttaaatctacgccctctatctcactattcactatcccataatttacatacattctctcaattcta

SEQ ID NO: 12401 - DNA, 506 bp, Glycine max
  Coding DNA Sequence Number=SeqID_2622
aaatggttgacctcatcagcagctcaagatcatatgaagcaaacgtgactgctctaaatgcgaacaaaagcatgctgatgaaagctttagaaataggaaagtaaggtgaaaacaattggttaatgcaatatctcctttccagcttcaaactgctcagcaagcaagtgaattgacgaatgcatcgtccgttcaggcggctgcacctaaaagtcaaacgaatttctctgatgtgctgaagaattccattgaggcattgaatcaatcacagctgaaatcagaccagtatacaaatgcgcttgcacaaggaaaagatgtcaatcttgatgaagtcatgattgcttcacaaaaagcgagtgtcacactcacagctgcaacagagtttcgaaataaagcagtcgaagcgtaccaagagattatgagaatgcagatgtaggaggtgctggtggacaaaaaaagactgaatggaatgaccgggggttaagatgaatcgtactttaatgcaatta

SEQ ID NO: 12402 - DNA, 551 bp, Glycine max
  misc_feature (439)..(439): n is a, c, g, or t
  misc_feature (451)..(451): n is a, c, g, or t
  Coding DNA Sequence Number=SeqID_2623
atattatcagaagcggctggcaggaattgattaaacaggtgttcttacctatggagaaagtgtataaagtgcagaacggtaaaaaagtgatgcgcgagaaaaactatttccccgggtatgtaatgatggaagtattagaaggtaagttgaatgatgatatgattcaacatatcagcaatatcagcaatgttatgcactttcttacggatggtaaaggttcaaagggaaatattatcagtttacgtaaggccgaagtaaataagatgcttggcaaggtagatgaaatgaatgatcagggagttaccatgagtgagcctttcattgttggtgaaacaatcaaaatcatcgagggccgtttaatgactttaatggtgttatcgaagaggtaaatgatgagaagaagaaactcaaggtaccgtaagatctttggtagatctanccggttgactanctattccagtagaaaaattctaaatctaattatcatagtaacctttgtccggacaatgcttttattactttacttaatctaaggctttcaactaactaat

SEQ ID NO: 12403 - DNA, 127 bp, Glycine max
  Coding DNA Sequence Number=SeqID_2624
gtggcgaggtgggttcattttccaacttctgccaaatcaagccctccccttctcttgaatggaagctctggttcgtcttttctcgggaatcttttgtttgggcactttgggctgaaaaccaccttgg

SEQ ID NO: 12404 - DNA, 115 bp, Glycine max
  Coding DNA Sequence Number=SeqID_2625
tgttagacgcttcttgctagtagtgcaccctcgttgccttgcgtgcgccggttgcgcatccccctatcgtgcgcatcccccccaatcacctttccgaatctactaacaccagtct

SEQ ID NO: 12405 - DNA, 558 bp, Glycine max
  misc_feature (92)..(92): n is a, c, g, or t
  misc_feature (316)..(316): n is a, c, g, or t
  misc_feature (499)..(499): n is a, c, g, or t
  Coding DNA Sequence Number=SeqID_2626
gggaccacaccctacagaatatcaacatattagcgcaatcattatagacgtggtaggcagaccatatatcaattcgtatgggctgagatagnaactaccacaacacagtacataatgcgcgcatcattatgcacaccctctaccaataaccccaacactcacaactacgcgtcgccccataccgtgacgacctgtccacacatagaccggaagcgtcagcgagaggacgtggacagtatcttgctggcgtcgattagagtaatctgcatgagcgccatatcacgccaatcaccagtcttcgccctcaccacacacnccatcaatcccgacacgccgaagacactcctacaactgacaccatacacacagcagaggacgagtcatccactgatcacatctttctcctactagtcgctgcgcgtacacagcgagtatttagtggagtgtagaaccactcacgccattattgagatgaatgaggcgggcggagagcgattgntttataactaacatcaacaaaccacagtgatcctaaaatgctcgcaggatctaaacaaa

SEQ ID NO: 12406 - DNA, 590 bp, Glycine max
  misc_feature (33)..(35): n is a, c, g, or t
  misc_feature (407)..(407): n is a, c, g, or t
  misc_feature (430)..(431): n is a, c, g, or t
  misc_feature (474)..(474): n is a, c, g, or t
  misc_feature (526)..(526): n is a, c, g, or t
  misc_feature (563)..(563): n is a, c, g, or t
  Coding DNA Sequence Number=SeqID_2627
atcctatatgtgctagtgacgtactagatattnnnattgtctctctcgtgctcgtccgtcgtgctgtgattgtatatacgacccagttcatatcatgactcgaaatcacgtatatacaatactcagctatacagacgacagtatgtggcagtgtctacgaatctgctgttcgtacgtatgacctacgagcggagcgtgtccgttctccacgcgtgtgtgtaacgagaccgatgcgggctgaggctacacatgtcgatcgcggacccctaatactactcgccagaacagcgtgagagcagtgcaggagtcggacgtgggtgagagtgggaaggggtgagtagggtatagatagaatatagtgatcatgtctcggatgtggcatacgggcctcatgtacaaattacagntacatcaagatagtcgttgcggnntcgcgtatatgtcgacatgtctctctcattatatagcatggtnccatcttctcgcggtcctgaataatattcgtgtacctcctattctctttagntggtctgcttccgttttttctcttctgatatatatcnagatcatatatactatcttcgtgcgca

SEQ ID NO: 12407 - DNA, 600 bp, Glycine max
  misc_feature (375)..(375): n is a, c, g, or t
  misc_feature (460)..(460): n is a, c, g, or t
  misc_feature (490)..(490): n is a, c, g, or t
  misc_feature (528)..(528): n is a, c, g, or t
  misc_feature (547)..(547): n is a, c, g, or t
  misc_feature (557)..(558): n is a, c, g, or t
  Coding DNA Sequence Number=SeqID_2628
taggctcacagtgtggcgcactcaactactgcgtacgtcgcgcaatcgatatgcgcacacccgcatgaatgtcaattgcgatgtgtctttcttaatacatcaacactgtactagatatcaggtgtaggctggctaaacaagaacagccgcgcgcgacgcgctagcagcgcgtccaccgccggcgttgcgtgcgataaaaaagagatagacttaatcagagtgatgagtaataatagagagagatagagaatatgtgatggggctgtgctacatgcggtctatctctatggcttagtggtctatcggataacttatacttagtatacacattgatcatttcatctcatctacactgtcgtgaaagaatgatgagangtgaagagtacatgtggattcggcgtatgcaccgcgtggcgctgcgggtgtgatgaagaagcgtgggcagaggataaggagatgnagcagaattgtcgattcaatcactcgcagntagattgacttactaatttacatttatcatatataatntaataaagaatctcgcggnaggcgataanntactctctccctctccctccgctgcgtgcctgttacgtatgc

SEQ ID NO: 12408 - DNA, 366 bp, Glycine max
  Coding DNA Sequence Number=SeqID_2629
atacacccaggaagtgtcggatcctaatcggaaggaacttcccttgatcggaatccaatcgacgacctcctccaaatacagcttggacgtgcctcgccttctacatccagagccctcgccatcaacacctatgaccgctcctcctcttcccgcttatccgtctacaaggactctggctacgactgcgtcacctgatctatctccaagaattccgacgcttccaacaaagaatctgatacagacatctaggagtctgatgtcagtggctactacagagatgacacatcgtggatctcgtggatctgcactttgctacgaaatgacttcttctgcacaggtgatgacgattacatccatcaccacttc

SEQ ID NO: 12409 - DNA, 507 bp, Glycine max
  misc_feature (467)..(468): n is a, c, g, or t
  Coding DNA Sequence Number=SeqID_2630
taatccaattccaagggaagccgggacgagattcccgagtttcactccgaatttcaattagggccagaattagacccctattccgtcacagagcctaacttattctatgacgaaaagtaaaaaaaagaagaaataaaagacgaaataaagaagaggagattaattacatattaatcacacacagttaagacccaattggatctataatcttcctcacccccttccgtgtcaataactagaatgaaaaaaaagggaatatcaatgcatctggaaaaaaaacgattgatctccatcaagagacccgccaaagccccgaaccatagagtacttactccgggtgccacggaaagatatgtttttagatctcgcatttcccatcctccttggtaatgcgttttcaatataaaatttatttgaagggtaatattcctttcggattaatctaaagaatattagctacatttcgnnagaatcctttttttgccggatcatatcctatttccaaaa

SEQ ID NO: 12410 - DNA, 530 bp, Glycine max
  Coding DNA Sequence Number=SeqID_2631
gattctttgctgatcttttcactggaagaagcaagactatccttaacagattggacttaagcatccactttggactttaccactggtttgtggcttactatttgtcacaagaccttttgttggctacaggtggattcatcggtgtggcttctttgggctttattttaacctatgtgaaacaaaaagccggattggttacagcaatgattttacatgttggtgttgacttggctgctgctattgtcattgtcgacatgcaaaacagattcattcccttctattaataaatatttcagaaagcaagattttataaaaaaaactcaagaacttgatcgttttattttttttctttaatcgtaatttgtaactaaagggaaataaaagctttcagagcttttttggctgtaatttcatgtgcatgcagttttctgtcttttgttcgggctttttgcaacttatgcaatcaaaatccaaaataaatgattgtgtatacaccttttatttagtttagttcgacttctgtctctttt

SEQ ID NO: 12411 - DNA, 522 bp, Glycine max
  Coding DNA Sequence Number=SeqID_2632
agagttcgacgaatctgagatcattttctccgacagcttcttcccaattcgccgccgcgaggacgtgatcgagaaagagaatcgtccggttaatttccgagaaaactccgaaagcagaatgagaaacacatcgaggctgagtaaaacgacgccgttgccttcaccggcggttttctcatcgtcgcttccagtgaatattccgggaaggaggtattctgaggatgaggaatattcggaagacggaggaaggagaatggttccgccgcatctgatcgttggacggaggatcgaaagcggtcaaatggcgttttccgtttgtacaggtcagggaaggactcttaaaggccgagatctgagccgggttcgtaattcggttctcaggttaaccggttttttggaggcttaaatatggaccggtttttgatttattaaaaaaattcgtcttccaatttttttttttatttagcggaagaaatcagttgtctgatattgttgttagtttagtcacttgaacgaatgtca

SEQ ID NO: 12412 - DNA, 370 bp, Glycine max
  Coding DNA Sequence Number=SeqID_2633
gggccatactttatgattctgaggctaatgggcaaaccatgatctttgacacggacgcttaagcgaatcgtgtggaatacagtggcattattcagaaaggattggggcttgaagctcaatgatgctctatgggcctatatgacaacgctcaagaccctatatggggttatcaccgatgcagccagagtgtgggaagacatgccatttaccagtggagctggagcataaagcatattgcgctctgcgattgcttaactttgacaataatgcatgcggcgaaaagaggaaagagcactttcaggagttagacgagatgagactgaatgcctatgaatcgtgcagaatttacaaggaaacaacgatagcatat

SEQ ID NO: 12413 - DNA, 569 bp, Glycine max
  misc_feature (27)..(27): n is a, c, g, or t
  misc_feature (63)..(63): n is a, c, g, or t
  misc_feature (78)..(78): n is a, c, g, or t
  misc_feature (80)..(80): n is a, c, g, or t
  misc_feature (92)..(92): n is a, c, g, or t
  misc_feature (117)..(117): n is a, c, g, or t
  misc_feature (148)..(148): n is a, c, g, or t
  misc_feature (179)..(179): n is a, c, g, or t
  misc_feature (194)..(194): n is a, c, g, or t
  misc_feature (203)..(203): n is a, c, g, or t
  misc_feature (235)..(235): n is a, c, g, or t
  misc_feature (240)..(240): n is a, c, g, or t
  misc_feature (242)..(242): n is a, c, g, or t
  misc_feature (257)..(257): n is a, c, g, or t
  misc_feature (267)..(267): n is a, c, g, or t
  misc_feature (371)..(371): n is a, c, g, or t
  misc_feature (418)..(419): n is a, c, g, or t
  misc_feature (477)..(477): n is a, c, g, or t
  misc_feature (528)..(528): n is a, c, g, or t
  Coding DNA Sequence Number=SeqID_2634
gtctcctacatggatatcacaacgtanatcttacatgatgctgtattgacagtgtccaatgantcacatcactcgcgnantactgtgtacanagagtacactaccacattatgtcgncgtctcactatcgactctctgcatgcatgtnctgctcctgcgtctcttgcactgatcattantatacatgctttgantaccgtagncctactactgattgtgtagtgacgtccatctntgtcncntatatgattctatantcacacatgntagcgatcatgctctacatctatgcgacactgtgtctgacccactgcatgtgtgtatgtatctgcccagttgcatgaacgtagaagactctgcgtccactacgncgtggcactcgactatgcgacacgtcctgccgtgtgtgctagtcagnnatgctctcacgcagcagatagatcgcaggtgagcctggtcccgcgcatgctgtgatgngccacgcatgagagcggtgacgagactgatcatctgaatccagactagtcngatcgacgtgtgaagcagtgatagctactctgcacagctgc

SEQ ID NO: 12414 - DNA, 534 bp, Glycine max
  misc_feature (40)..(40): n is a, c, g, or t
  misc_feature (73)..(73): n is a, c, g, or t
  misc_feature (380)..(380): n is a, c, g, or t
  Coding DNA Sequence Number=SeqID_2635
caagctgtacgtagccagcgagcgagcgactagacgttcntgtgctccggtgcatgtggttgttgtttgaagnattaatcccgaccactaccgagtcgcatctgatcgaatgcagtgagagtatctttgctgcgttactactccacaactagcgacagtagggctggtcgcggccacttggcggtgaggagagctagagattaatatctgagtgaactccgagcgaatatattcatacttcgtgatatttactactcttacccttgatcagaatgatgcactacatctatcacaatagatactcctgtttgataccagatatcatgtctctcctgttaaatgtggataacctgtgcgctgcgacagaggacggacgatanacatctagatagtatctatgctccagtatcatgtactgtatgctgttacgctctatgtgatctcgtaatgcactacctaccctactaacagacacgtacacatgtgagtgtgtcgcgcgatgcgcgacgagcgtgccgagcgaaggtacccaag

SEQ ID NO: 12415 - DNA, 270 bp, Glycine max
  Coding DNA Sequence Number=SeqID_2636
ccaatgccttcttatctaaaccagattttccaaggatgagggaaacagaagggcatgaaaggatcctcccatgttttacttttttttttcctttcctattcaccttgaattcgtttcaatccctgaattaaagttggtttcccccattttgctttaaaatttcaaaaaaaaaaatggggggggcgatattttttaacactttgaaaaacacagatttggccccccccacctttgggggggttaaaaagagtgtgctccttctagaaaaaa

SEQ ID NO: 12416 - DNA, 544 bp, Glycine max
  Coding DNA Sequence Number=SeqID_2637
accggcgacggcgagtaacctcaagggcgcggcgctggctcttctccgtctcctcgctgccacggacgtccacgacctcctccccctcatacccacccacccctcccaactccaatggcagcatgcccgccagctgctcgacgaaacgaaacggccgaccaactgaccagcatccatgcccaatctactccatgtgaatgtaagatttctgcctatgagagtactggtactgagggaggcagatgctggacctctcagcggggagcaaagttttctgaggatgacccttttgcaccagttgaaatcctctaatgtagatggcgctcgcaactgaggtcttcaacagtcaacacacacgcgcggcgcatgaatgcaggcaggcacacgtttttggagagctaacctgaatatctctgatggttctgtagtgagtgctgtaatgtttacctcaagttgctactctgtgtttgcatgaggatgaggtgtgcttgatgtgagtgtggcttgttccaaccgtggatgtacctagttgctctgtgacgag

SEQ ID NO: 12417 - DNA, 496 bp, Glycine max
  misc_feature (59)..(59): n is a, c, g, or t
  misc_feature (198)..(198): n is a, c, g, or t
  misc_feature (288)..(288): n is a, c, g, or t
  misc_feature (435)..(435): n is a, c, g, or t
  misc_feature (453)..(453): n is a, c, g, or t
  Coding DNA Sequence Number=SeqID_2638
tgtgaaagcgacagcacacctcactactcgcaccgatgccagtatactaaagtgcaaangtgcactacatacagtacgtaacgcctctctctctatacacttctcgtctagtgtgttggcatgcgagtgcatactagtaccactctctgcatcttctgttatgtcagagacacgagagctacgtactctactatctcntctccatctgacacactctcatcacactagttattacacactaggcgcgacacctacatcctgtaagcgtgcgacgcagtctgcataatnctataatctctcgatctatatggagtgagacgcatagagtgtagtggcacgggcaccacactcgagccatatcatgcggtggattgtgtacagtacgaccgctcagatgacagctgcgtgcggtgacacgcctgttcgtctcgcccngcacgtgtgacgtgcgtnagacaaggtacagtgtgcacgtgactcacattcgctatatcgc

SEQ ID NO: 12418 - DNA, 475 bp, Glycine max
  misc_feature (71)..(71): n is a, c, g, or t
  misc_feature (74)..(74): n is a, c, g, or t
  misc_feature (138)..(138): n is a, c, g, or t
  misc_feature (307)..(307): n is a, c, g, or t
  misc_feature (392)..(392): n is a, c, g, or t
  Coding DNA Sequence Number=SeqID_2639
gtacaccgctaacggcgagacgagaagcgaggagagaaggacagcaagactcacagatgcagaatagtaancgnagcgacacctactatgttatagacgccagcgtgtgtctatcgatctcgtatttattgcttcatntatattatatattgtttacactactttatattacgactacagattgtatatgtgtagtatgacatcaccagtgttacacgtgttacagatcgagtactctcgacatcgatcttaccaccccgcgccagtgattgttagagtgtcttgttgctgccccctcccgcccgcngaagcagactgatgtaagagagtagtgcagtgtgagtaacatttgttagtatgtaagaacccccactaatatactctgtgtgtgngaagcgactgctgatctgtgacacttacatatgaaggatctgcccacgcacccatttctgtgtggtggtgtatttatcccagc

SEQ ID NO: 12419 - DNA, 495 bp, Glycine max
  misc_feature (26)..(26): n is a, c, g, or t
  misc_feature (38)..(38): n is a, c, g, or t
  misc_feature (45)..(45): n is a, c, g, or t
  misc_feature (56)..(56): n is a, c, g, or t
  misc_feature (64)..(64): n is a, c, g, or t
  misc_feature (81)..(81): n is a, c, g, or t
  misc_feature (93)..(93): n is a, c, g, or t
  misc_feature (131)..(131): n is a, c, g, or t
  misc_feature (181)..(181): n is a, c, g, or t
  misc_feature (202)..(202): n is a, c, g, or t
  misc_feature (236)..(236): n is a, c, g, or t
  misc_feature (275)..(275): n is a, c, g, or t
  misc_feature (292)..(292): n is a, c, g, or t
  misc_feature (295)..(295): n is a, c, g, or t
  misc_feature (297)..(297): n is a, c, g, or t
  misc_feature (302)..(302): n is a, c, g, or t
  misc_feature (328)..(328): n is a, c, g, or t
  misc_feature (349)..(349): n is a, c, g, or t
  misc_feature (357)..(357): n is a, c, g, or t
  misc_feature (372)..(372): n is a, c, g, or t
  misc_feature (406)..(406): n is a, c, g, or t
  misc_feature (469)..(469): n is a, c, g, or t
  Coding DNA Sequence Number=SeqID_2640
tatctctctacgcacgtgacgataancgatgcgactanttgcttnctagtgcgatngactatanctactcgagagagggtngtcctctactgntatgactgtactcaagtgtttctatactcgactctgtntctgggataagatagccttcatgcaacttgtgatagacgcacgtgctgancatacgtgtcatactctcatncatgcgccatcctctaatgcccagtcgtactctntaactaaacgtatttccactacatgaatgctaagtgtanacagattactggtgggncgngntcaancgtagcgacgagtacatctgcgactnatatcgacgactacacaacanctatgggnctgctgtttactgtngtctcactgacctcgtcgcgggttgatcgcaccntgcctagtactatttccggctgcgtgacgagatctctgctagcggtcgcgctgaattatcttntgctattagagtctgtgctgtactag

SEQ ID NO: 12420 - DNA, 390 bp, Glycine max
  Coding DNA Sequence Number=SeqID_2641
acatctcctccggatttagagtctacccggttcaattagccctggttgatcagaatctgaattttgagggtgaaaaggatggaaaggaatgcggtaaagggaggagcaatccaacttctgcgggtgctctgcaacaacatgcaggcaattacaatgccatcgatgcgtgacgtggctcccaggggtgccgtgaagcgtatcaacggtttgatctacgacgagactcgcggtgttctcaagatcttcttggacaatgtcatccgtgacgccgttacttacccggagcacgctaggaggaagactcgttacggctatggacgttgtttatgcgctgaacaggcagggaaaggaccctctacggatttggccggttagggttcctgcttgatt

SEQ ID NO: 12421 - DNA, 410 bp, Glycine max
  Coding DNA Sequence Number=SeqID_2642
agatccatggcgacaatagtacagtgtctttcttcctgtgcgaccctcaattccaaattcaaatccctttctcttaacggagcttcttcatcatcatcatcatctccaacttcttccttctccattcgtcgtggtgtctgctcctcccttagcttcgctcagagcgtttctcaatgtgtcgccttctcctccgggactatgtgggtacagaagaagacagtgaggcattcgattgtgtgcgaggctgctcccacgaagaaagctgattcagctgccaagagagctcgccaagccgagaagaggcgcgtttacaacaagtctaaaaaatctgaagcccgcacacgtatgaagaaggtcttggaagcactcgatgggctcaagaagaaagcagatgcggtacctgacgagat

SEQ ID NO: 12422 - DNA, 472 bp, Glycine max
  misc_feature (37)..(37): n is a, c, g, or t
  misc_feature (190)..(190): n is a, c, g, or t
  misc_feature (225)..(225): n is a, c, g, or t
  misc_feature (426)..(426): n is a, c, g, or t
  Coding DNA Sequence Number=SeqID_2643
atcacacatgcgctcgagtggaacgaaatatgggtgngtggtgatcgatgcagctctcgaacactacactatataggagacaaatgagaaggtatagtgatgatgggtggtggtaacacgtgacacaacaactgctcatctagttcttgaggagatatggtaaggagcaaataacacctcatccatcacnacacatcgcactgactagccgccgcgcgcgcgcgngaccgttagacttatctcacatatgtttgtcatctatctatatacatatgacacgtgagctctaatatacacgcgcagcgcgagagacacagacgtcgtgttgggtgtactgttcaacttgtctgcgcgctgtctcggcattcgtactcctcctcatcgtgagtcagtcgtcttctcgtgtgtgtctctcacactcgacgncgtacttatagacatagacacgacgatacgacacatacgacggaga

SEQ ID NO: 12423 - DNA, 334 bp, Glycine max
  misc_feature (248)..(248): n is a, c, g, or t
  misc_feature (292)..(292): n is a, c, g, or t
  Coding DNA Sequence Number=SeqID_2644
cccctccggtataacattagaatgccacatcccggaaaggaatctgactgttgaaggctgttcggataaatttgtgggaactccactatttcactttaaaatccccccccatcatataggtctcgccggcccaaagagtgttacctccctctagaaagatgttcttttctcgcgaacccggctgaaaaaccatcggccggggtctccgcgagatctggacctctttctggaggaggagtctcccctgnctggagccgtgcccatgggatcggcgcgcttagggttttcgcgncggcgggggcggaggaataattcgcgccttcggtggcggtga

SEQ ID NO: 12424 - DNA, 381 bp, Glycine max
  Coding DNA Sequence Number=SeqID_2645
atgagctccgccacggttctcgacggcgataattatgctgctgaagaggtttgtattcgtaatgaatctttgatgagcagtgcacagaggagaaaactagcggatattagcaatttggagggtcaagcaaagcaaacgaacagagaagagacgcaccagcagcaagatatactcttctcttgtaaagaatatgctgagaagcttgaaaaggcatttccttttgcacttttattttggtgccttttgtggtggctgactgttattttgttgattctcggttgcaagtaaccatcttcatctttagaatgtgttggtttctgagcgttacttttggtggtgatgcttgttttttttttgttttggtggttcagtagcttactt

SEQ ID NO: 12425 - DNA, 581 bp, Glycine max
  misc_feature (56)..(56): n is a, c, g, or t
  misc_feature (327)..(327): n is a, c, g, or t
  misc_feature (424)..(424): n is a, c, g, or t
  misc_feature (511)..(511): n is a, c, g, or t
  misc_feature (551)..(551): n is a, c, g, or t
  Coding DNA Sequence Number=SeqID_2646
tgtgaagacgcatcatacaccacgcgcaccgtgcacgcataatgtgtaatctccantagtcgtataggactcttcgtcggagaatatgctcgcactacgatacacacgctattacatatagtgtctacgcgataagacgagaacactgtctattattctcacgccgcaccgctgagagtgctgtccagtgtagttatctcgactctatccaccacgcacacatgatgctgtcaacaactatgatcacattgcatatactattcttctatctcgccggcgactgctgtgtctctgctatatattgctaatacctcatcaacgcgttanctgcggatcgctctcgcgcgtatgccgcaccgcgcgagctgataaatgtatattgatgcagccgccgagcgcagctctgcgatagacacataacacnatctacgttgatctatcgtatcgtatacacacacactcccgatcggcgacatagacggatatatatatatacgttaccttcacgccntgcagtcacgacgcgcgtgcgtcatattctgtcacatcanaactatatgatacactctgtatcgcgccgc

SEQ ID NO: 12426 - DNA, 514 bp, Glycine max
  misc_feature (164)..(164): n is a, c, g, or t
  misc_feature (178)..(178): n is a, c, g, or t
  misc_feature (316)..(316): n is a, c, g, or t
  misc_feature (445)..(445): n is a, c, g, or t
  misc_feature (481)..(481): n is a, c, g, or t
  Coding DNA Sequence Number=SeqID_2647
agtctattattaccccatcatactctgtcgttatatgaatgatatgtagttatgagcagacctctcctactactttgtgtcttgtatactacaaagtgctataccctgccttgcgctcaattgccgatctcccttgcatacacacttatatttctcttactatnatcatcctccttancgcgccgaccgctttctcacagcttcgtatgactcgccctctactttctgtatgtactaatcaacatcgttttcgcctatctctcgccattcatctttcgcgtctggtgagcatctagtacatctacgctctacgtcntactcactctcacctattactacatctctatcacacctccattttctctatgcttctttctatgtgtgctctcaccataacacactcttgtgtatatcaaacaacagctcgctaacaacataatgtttncgccaacattaacacaatatacgttcatcttcacancacacctcttcgctctacaagacctctgtacaa

SEQ ID NO: 12427 - DNA, 518 bp, Glycine max
  misc_feature (77)..(77): n is a, c, g, or t
  misc_feature (437)..(437): n is a, c, g, or t
  Coding DNA Sequence Number=SeqID_2648
gaagctactatagttcacgtccgccgtatcgtactagaattgcacatgcgtatgttcgctagctacatcttagtatnaccacgttcttccctcaccgctgtcgtataattcgacattcggcagttacagtagcgcgactagtgctagtagcaatatatagagcatattgttaaatatgccgtgcactcaagattctacgatggctcttaatcgcgtatagctgtcttctcgttgtcatgtgcgtcgcgcatgcgctaggtgctgacctttataacaaagcagaatacgatcttcacagaagcgggaggtgaagaaataccacttccgtgtgtttatactattatgtccgtccttcccgtagtgttcccactctctatcttctcagtctatattctgaggatatcgctgtcatccctccttgtgctcgtgggtttctntcttttctctatttctgtcatctgctgcctctcggtttcttgtgtgctctcatcctgatctctcatagtcttggcgtgcca

SEQ ID NO: 12428 - DNA, 356 bp, Glycine max
  Coding DNA Sequence Number=SeqID_2649
tttcatcctcgaagaagttcactctacgaagatgagagccaagtggagaaagaagcgcgttcgccgtctcaagcgtaagagaagaaagatgagggctagaagcaaataaaccactcgcccaatccatctcagcttcttatgctaagctcgatgttgaacgctaaacacgacaagagaaaatgacgacgtcacgatgatgattccctgttatgatcgtttcgtggttcgcttcctccaatgaggacctatctggtcgagaacaactgctctttatacctatctttttcgatctcggaatccgctgttcgactggaacttccatcactgaaaggttgtggaattccatccaacctcca

SEQ ID NO: 12429 - DNA, 333 bp, Glycine max
  Coding DNA Sequence Number=SeqID_2650
aaggtcacaatttagttctcaacgaaaaatctcgattcgatctgatcatcgtttcccagctcaccgatcatcttcctggaagcagcgagtacagttcaagatggcttcaaaaagaatcaacaaggagcttagggacctccaaagggatcctccagtctcatgcagtgccggtcctgtgggtgatgatatgttccactggcaagcgactatcatgggtccaactgatagcccattctccggaggtgtgtttcttgtttccattcacttcccaccagattaccccttcaagccaccaaaggtttctttccgcaccaaggtttaccacccgaatat

SEQ ID NO: 12430 - DNA, 594 bp, Glycine max
  Coding DNA Sequence Number=SeqID_2651
gcgatagtccgattattctcctgtaccccgtctgttgtcgagttgtatactggttggtggtgtagataatctgtatcctgatcaagctattgcataaccgtcgtgagtaggccgtcgcgacgcgtctgacgcgtgtgtagtagtcggtggggtgggtgcgagggccgcgcgccggcgcgcgctgcggcatccacggactgagaaccgacgctgcggccgctcacttacgccagggtgcgctcgctccactcagcccgctatttatgtgctgcctatcaacccgcagccgccctgcgagcccgagacacacgagggacgcgacggcgcgcggagggacgccagacggcggagcttagccgtcgcagagtgcgctacttatcagcggctatctatatcgttattcgttgtttcatcctgtagcaacaactaaataaggctgatgagtcgtgcatgtccggatagagtgtctgagccagccgcggccgtcctccaccacggttcccgcccctcgcaattggcgtggtgatcacctgctcatcccttcacgcttcgccgccgtacacaatcccatactcttagggtgcggcgagcagc

SEQ ID NO: 12431 - DNA, 381 bp, Glycine max
  Coding DNA Sequence Number=SeqID_2652
tgtgcacagttccttcgttccgattacggtcagatttagttaaaattggttagaataatggcctctgtacctaatagagttgaagaggaagttaacggagattcggatgaattgcagcaagattctgacaagtcacagaaaaaatccgccaaacatgactcgggagcgtcagatctggagaaagtcacggactttatggaagagaaggaaattaaacatagcgaattccttgaaggggcattatcaatacttggtgctcagagagaaagagatttagctgctaaacgagagcgtgaggttgagctttctaaagtgtctatcaaaaaggatgatgttgaattaatagttagagaaatggaaatttcacgcactttagctgag

SEQ ID NO: 12432 - DNA, 570 bp, Glycine max
  Coding DNA Sequence Number=SeqID_2653
atgataggtgcccacacgctagttcaacaagtgcatggaattggggaataacgacacagcagtcatatgtcgcgtcatctcggggtccggcagcccgccaacacagcacgccccacacttaaacctcataagtattagaatgtataacgtaacactagatttgggacgaggcggattaaacatgattgtgtgcatacgcaacggggctattcgcgtatcatagaacgaacgcggataggtattgacccgatgccatatcccacgtccctctcgttccacccgctcccctgaccgttatctgctccttctcaactatcatattgaggtccggcggggggcggttcgttacatggtatatagatacggcagagaaatttcttcccccaatacgacctgcccggactacatcatattacttgtgttggggggcgcataataagcgatgcgacaaatttaaggtgcaacaattatgatagggcggtggcgtatgtagagaaaaacatcatgcgtgtcgccatccaagctcttggaaaaccgccgcgcccgactgcctcgtatcgccgataactc

SEQ ID NO: 12433 - DNA, 475 bp, Glycine max
  misc_feature (31)..(32): n is a, c, g, or t
  misc_feature (354)..(357): n is a, c, g, or t
  misc_feature (385)..(386): n is a, c, g, or t
  misc_feature (428)..(429): n is a, c, g, or t
  misc_feature (431)..(432): n is a, c, g, or t
  misc_feature (442)..(442): n is a, c, g, or t
  Coding DNA Sequence Number=SeqID_2654
gatgaggcaagtttgttctccacgagacatnnaaagagaagcaaccaacccgagcatagcatagcataggattacagaagaaatcggaaaaattggggcccaacttcttagcttcaacaattctttagaggctgctgtggatggtatctggaaagtgtgtcctcgggctggtggacccattctgttccctggctttaatggcgaattaatctgccctgcatatcatgagctctgtaactcagaaccagtggtcgcgtctgggcaatgtcccagcgcatgtaatttcaacggagactgtgttgatggaaggtgccactgctttcttggatttcatggtcacgattgcagtagatnnnnctgccccagcaattgcactggcaatggnncgtgcctctccagcggaatacgtgaatgtaaaactggctatnntnncattgactgntctaccgccgtctgcgatgagcaatgcagcctt

SEQ ID NO: 12434 - DNA, 521 bp, Glycine max
  misc_feature (88)..(88): n is a, c, g, or t
  misc_feature (220)..(220): n is a, c, g, or t
  misc_feature (303)..(303): n is a, c, g, or t
  misc_feature (370)..(370): n is a, c, g, or t
  misc_feature (421)..(421): n is a, c, g, or t
  misc_feature (470)..(470): n is a, c, g, or t
  Coding DNA Sequence Number=SeqID_2655
tgtagttaagtagcaccacaccccacccttcctcttgcgtgtgctgtgctggtggttgtcgcgcccaccctctcagtgatatctagangacgatactgattccgcgctgcctccgtagcttcgttcaggctctctctggtttgtcgcgctcgctgctcagcgtcgctcggtcgcggagttgtgctagtgacggcgttggctggtcgggcgcctgcgtcgnctatgacgagtgagtcgcgagtgattgtacgacggaccgtcggtcgcagtacggccgtgatgtctgaactctatctcagtgantatatgatatgagagacgatatgcgtcagtcgtagctgcgtgcatacttgtgagtaccacggcgcgncacactgattgtgtgtgactcgtgagcatcctacgcaccgtggcgtcgctngctatcacacatgacggatacactgacacgcgtatgatgcgcgatgcanctcgcccactgcggtgtgctacgctcgtatgccgagcgtctgcgtgcacta

SEQ ID NO: 12435 - DNA, 447 bp, Glycine max
  Coding DNA Sequence Number=SeqID_2656
actgctacgtatttttaatccgctgtgagctaccacactgacacaccacagaaaacacctatgctgttcatgagattacaccgatggcaatcaatcccaggttaacgagatgttgtctcactataacaatgcaacgtataagcacgcctgctacaatcagctgttttagatcgtggccagcatgagactggcgcgtgggctacctcattactgcgctggatgcgtgaggtatacacgcagagggtcctctcatacggccagatgactgatccacattcctattccatgtttaatctagcttaggctgcacaagtaccatctgttgcccttgaggaacatacaccttggatgatactaggttcacgaggaatagagcaatacttattgaaacactcgggagagaagcgcagtgaggtgacaccagatgggttgctttctgctgaagaa

SEQ ID NO: 12436 - DNA, 539 bp, Glycine max
  Coding DNA Sequence Number=SeqID_2657
tcccaggttttggttccaagtacattttcaaatcccccccccccccggtttatttttttggttcccccccccccccttttttcaagtaagctcaaattgggaaagcccccttccggggggaccctgtttttgttttcctcgggggataaaggccagcttttttttgggcccaggggaaccttttttttcccgtttaagttttttgaaaaaaagttggaaggggtcctttttttgctccaaagtttttggttccgatccgggtggttttttttttttgggggcccttttccccgccccgatttttttgggttcaaggggggggcaaatcccacccgggaaggggggtttgaaatgtaaatccccagtaaatgggaaaagtcccgcccctttttaggggtctctttaatttttttgttcaaagaataaaagggggggggagggttgctttttttttttttggggcctttttgggttgtcccccgttgttgggtttcccaaaattttttgtaataaagccgccaattccatttgggttcccg

SEQ ID NO: 12437 - DNA, 135 bp, Glycine max
  Coding DNA Sequence Number=SeqID_2658
agggatcccccataagatgccttttcctccaaaaattagtcaccagctagcagttccaaagccgacccgtcatgcagccgggggttatgctttggaaaggggtcttaattaccaggcatagggttgggttccaag

SEQ ID NO: 12438 - DNA, 316 bp, Glycine max
  Coding DNA Sequence Number=SeqID_2659
tcaaacctgaacgtctggacccttattctcgttttccgaaccctaaatactccgtacatgagacctttaaagcgtgggggtctaccacttgctaaatccattgctgctgaatgtgaataccaccaaactgattgcataaggcccttcacaatgcctcttatgagacttgcttgcactgccttagaaatagttccactcacaacgagcaaagttattgataatttgattaataaatttaattaatatttattattttgtcgtgcacctaatgactatgagctgtcaagctatgttcatgctcctcaggtttagaaaa

SEQ ID NO: 12439 - DNA, 552 bp, Glycine max
  misc_feature (46)..(46): n is a, c, g, or t
  misc_feature (53)..(53): n is a, c, g, or t
  misc_feature (218)..(218): n is a, c, g, or t
  misc_feature (317)..(317): n is a, c, g, or t
  misc_feature (340)..(340): n is a, c, g, or t
  misc_feature (357)..(357): n is a, c, g, or t
  misc_feature (365)..(365): n is a, c, g, or t
  misc_feature (475)..(475): n is a, c, g, or t
  Coding DNA Sequence Number=SeqID_2660
gttcatatactcttcgttctacaaaaattaactcgatttattcaanataatanatgcacgcgatgtcatagcgcacgagtgtgtatgacagacgacttgtcgagtgtatgttgttgctgttacttgttatgtatacatgtgatgtgtgtcgtaattcggtaagtcttgtgctctttgctgtgtgtgtctatattccctaatccgattttagatagtcncctatcattcagtctatagcatcacgtcaattattatctcagccatctgcgtcatcgcttgtagctcatcaatccctacgtatcctattctcttctgtntccgctgcatatcttcattcatngcttctattcttctctncgtgtgcnattaaatcccagcagaatattgtttccgtgtgcacactgtgtacatcacatagtgtttgttgatttatcctctcctctctcgttacactctttattcttatcatattatntgtgttcttcctttccctttcctttattgttacgtccttcttagctgttattcttatatgtcttggttgtgttcgca

SEQ ID NO: 12440 - DNA, 551 bp, Glycine max
  misc_feature (156)..(156): n is a, c, g, or t
  misc_feature (238)..(238): n is a, c, g, or t
  misc_feature (249)..(249): n is a, c, g, or t
  misc_feature (436)..(436): n is a, c, g, or t
  misc_feature (456)..(456): n is a, c, g, or t
  misc_feature (467)..(467): n is a, c, g, or t
  misc_feature (477)..(477): n is a, c, g, or t
  misc_feature (490)..(490): n is a, c, g, or t
  Coding DNA Sequence Number=SeqID_2661
atactctatatcagcactaccgtcgtccgctcctatcactaatactattcatccgcctagtacatatctctgtctcacacatacctctatcacgacgtacgacgacacgtacgatctcgtcgacatcgcgtcgcagcatcttaatatcgtcataantaacacatacatctcgttcgacatcataccccacgatactattctgtaccacgcacacgctcacctcatgggaccacacctngctcgtgcttncacctgcgaggcgagacatcctgtactctgtactaccgatcatatctatcatatctccccgctacgcgcaaccagtcacacgcacgcgtactaagactcgtgtgatgcgactcgtagctatctcgtcgtcgcgtgtgtaagtatgactcgcgtcgcgtctataccacgtagtcatgctactagtaanatgacggctgcttactcttnctctatatcanctatcgacantatcatcacaagnacctaccaatctctccattcgtacatcagtaactcgtcttcacgtaccgatatgtcacatg

SEQ ID NO: 12441 - DNA, 176 bp, Glycine max
  Coding DNA Sequence Number=SeqID_2662
tcagtaggcaagatacctggaactatctgcgctccactttgatgccaaggtccttttaatgaagctttaagtgactagggtccttgatgaagcgcaaggccttgcctgaattaatagacctcaacatgggaaatacaggaaaggttctgaatgatcacacctctgccattatggct

SEQ ID NO: 12442 - DNA, 573 bp, Glycine max
  misc_feature (170)..(170): n is a, c, g, or t
  Coding DNA Sequence Number=SeqID_2663
tcagagaccccatcattactggagggcgcggctataatcacttgtgttggagggaatgatcaagaagaagcagaacgatcaatggacataatgtggcgagtgattaatcccaaattaggttctaatgtagttgctgtcaaacctcctgcttcattaattgccaatgtggngtctgcatggtcttttctcctctctactgtgagcaatttgaagctaaattcaaaaaactggcagaattcatatatcctatttatctagtcttctagacaaggaagataggtctgtacgaattgctgctggtgaagcacttgctctaatttttgaaaggggagttatagataaatcttctgccgagtcagacagtgcacgtgatacaacgcaagaagggtgttaaccacttgaatgctacatatttttacaaggattgaaaggaaaggtgatatatcatatgctaattctctctataaaggctgggagaatatgttctgcctactaagatcttactcgtcagaggaacttcgtttagaggttgtcggatcatttgtagatttgctacaagcctgatttcatttc

SEQ ID NO: 12443 - DNA, 591 bp, Glycine max
  Coding DNA Sequence Number=SeqID_2664
tgaggttatcaagcttcccatcaacgaacccgccaagggcaagaagaagagtcaaattcaagaatactgcgatttttacgtcggagctggtgtccaacatcttgctctcaagaccgaaaatatcattgagtctgttgccgctttaagaaaaagaggtgttgagtttctctccattcccaagtcttactacgacaacttcagaaaggctctccccaacctcagtatcgaagtcaaggaagatatcgacaccattgaaaagttgggcttgttgatcgattacgatgacaatggctatttgttgcaactcttcactaagcctctcgaagacagacctaccgtcttcattgaaatcatccaaagaagaaacttctggggcttcggtgccggtaacttcaagagcttgttcaaggccttggaagacgaacaagagaagagaggaaacttgactgatatgtaaaacaatactgaatataataataactcatttgattatttaaacaactcataagagtatgattcataattattattatttgatatataagggtgagtccatgaacttttaataagcttaccttactcatcataaaa

SEQ ID NO: 12444 - DNA, 513 bp, Glycine max
  misc_feature (67)..(67): n is a, c, g, or t
  misc_feature (78)..(78): n is a, c, g, or t
  misc_feature (87)..(87): n is a, c, g, or t
  misc_feature (148)..(149): n is a, c, g, or t
  misc_feature (156)..(157): n is a, c, g, or t
  misc_feature (176)..(176): n is a, c, g, or t
  misc_feature (184)..(184): n is a, c, g, or t
  misc_feature (186)..(186): n is a, c, g, or t
  misc_feature (195)..(195): n is a, c, g, or t
  misc_feature (210)..(210): n is a, c, g, or t
  misc_feature (214)..(214): n is a, c, g, or t
  misc_feature (255)..(256): n is a, c, g, or t
  misc_feature (312)..(312): n is a, c, g, or t
  misc_feature (323)..(323): n is a, c, g, or t
  misc_feature (330)..(330): n is a, c, g, or t
  misc_feature (373)..(373): n is a, c, g, or t
  misc_feature (401)..(401): n is a, c, g, or t
  misc_feature (432)..(432): n is a, c, g, or t
  misc_feature (442)..(442): n is a, c, g, or t
  misc_feature (448)..(448): n is a, c, g, or t
  misc_feature (482)..(482): n is a, c, g, or t
  Coding DNA Sequence Number=SeqID_2665
gttcgagaatactgagcagcgagaaacgtagaggagtcagagtcgactatacgtagaggtgtcggcnagggtcacacngttgagagngtagcgatcagatcgcggtgttcgatgtgatggttatctgcatgagatgactagagatganngtgtggnngcaagagagaaacagcctncacaaganantcacgcatncaacactagatcttnccgnggcagacaggaaatacccataggcgagcgcagacaccaccnncggcggaccggcgcccgcgcgcaggcgcatgcagatacgtgccagtagtcgcggcngcgtatgcagnaatgacnatcttatattatacgcaagctcattatctatttatgcaggtantggtatctcttgcctgtgacaggcgccncccgtgcccgccactctctcgcccgacacgnattgcggcgncagatnccctccaggcagaccgtagtcacaattcacagcncaacctgaatgttgacgactcctgttatctt

SEQ ID NO: 12445 - DNA, 426 bp, Glycine max
  Coding DNA Sequence Number=SeqID_2666
gtacagttggtattgaagcatctcaaggaagtagaaatcaaatgtcataaggaagacgaggtggtttgccagattgtgaagatcttgagtacctttggagtactttctgatcaaattgacatccaagttatccaaaaggcatatgtttctggaagtttcagcttcgagcagactgagatcctggattgatgatggatcttcagtctcctgatcgcttgggcacctgtctactacagctatgagtttgtggccttctgatctggatgttctagcagtcttgctttatctgaaccttgcgttctgagtgagtaccaggacgtccatgttagctcaggatcactatgctggttaaaattggtctcaagttcgtttgcatttcgtgtgggtgtccgttatgcaatggttgcccttggaaacatggttgat

SEQ ID NO: 12446 - DNA, 594 bp, Glycine max
  misc_feature (166)..(166): n is a, c, g, or t
  misc_feature (288)..(288): n is a, c, g, or t
  misc_feature (313)..(313): n is a, c, g, or t
  misc_feature (322)..(322): n is a, c, g, or t
  misc_feature (328)..(328): n is a, c, g, or t
  misc_feature (339)..(339): n is a, c, g, or t
  misc_feature (394)..(394): n is a, c, g, or t
  misc_feature (535)..(535): n is a, c, g, or t
  Coding DNA Sequence Number=SeqID_2667
tggagcgagcgcagcctatacgtagctctccgtctattcgagtcacgagctgcgcgcagcatacgataatctctctctacacacgtgtgatgtcatcgggcgatgagctcgagtcacgctatgcctctgcacggccgcggagcggcacggtgttgagtctttgtcntccttcacatgagcaattagtcgttgcgactcgctcgccgatgtagcgacgtagtggacatctctcccacacgttatgaccaagtaggacggagcggtcactgtatcaagcacctgcctccntctttcgcactctccatctccgatntcggtgtcntactgncacgcgtcccngcatattcgccatatcagcagctgtctcgagtgtgttatgacatcagtatgactncactcaacgcgatatcgttacgcgagtcacacagaggtcgttgatctcacgaccacactataccggtctacatcacagcggcgagcgggtccatatactctctcgaggatcgtctactcatatcagaatcgttttctgcgncgactaatacatcgacatacgtacgatctattctaaatgcgtcgacatcacggtggtac

SEQ ID NO: 12447 - DNA, 594 bp, Glycine max
  misc_feature (135)..(135): n is a, c, g, or t
  misc_feature (230)..(230): n is a, c, g, or t
  misc_feature (418)..(418): n is a, c, g, or t
  misc_feature (490)..(490): n is a, c, g, or t
  misc_feature (499)..(499): n is a, c, g, or t
  Coding DNA Sequence Number=SeqID_2668
tactctcactatgtctcactgtctatcccgcgcaatctccaccaccttcaaacgctccttcccacccacgctatatgacctcactcgccccccaaccctatctgttacgcacctcgcgactcccacatcatagtnatctcgggcgtgaaccgcgcgaagtacacataacatacaatcattgttctgcaatgtctcacacccacatctatatacacctcttgtgctcctgnatgtaagccactatcaccgcttggacatcactcttctaactcccgtcatcttattccatctcgcggctagcactctcttcgcgcgatctgaatcgggccgcgcgctaccctccgtcgttcgcatagtctcgctacggcgcgccaccctcccaccccctcgccgattcacgagagtgctcctcccgcgnctcacctgtgtccgcgtatgcgttacacaccactatcagcgcccctctccctacaaccactctctccccatnaatatgtanattgtaacaccaaactaaacttctagagatatattatgtagtctgctccccacactccctagctcactaaatgcatgatcggcttattctcctca

SEQ ID NO: 12448 - DNA, 574 bp, Glycine max
  misc_feature (27)..(27): n is a, c, g, or t
  misc_feature (520)..(520): n is a, c, g, or t
  Coding DNA Sequence Number=SeqID_2669
atagcacatcgtagagagcgttattcngtccaccgcgcgacagagagggcggcgcacgtagcgcttgtgtgggggcgttgcgtacgctataaaggagggagagggcggccctggtcgaacagagcggaggagggtaatgattgaagacctatattagataacaatggcgctcctgaaggtgtgagggatgtggtggtggagggggtggaggcgtatgtgggcacatgagccaacatacgtgaggatgatcacgatcgctgggctgcgccccccgtgctccatactgggcgtgtagtgtgggataaaaatatgtgtgttataagctaaggtgggtacctgacctcgttcatctatattactgtggtgtgattatctactaaagtgtataagtatggatatgagaaatcatatatgaaaaacctaggagcggacttgtttggttgtgtgtagagacctcaattacattttttttttggcatctggttgttctgggggttggagggatttggttggagggacnaggtctccacaccccctcctcctcttaggtcacgtcatcgttgttgtttgttgt

SEQ ID NO: 12449 - DNA, 470 bp, Glycine max
  misc_feature (58)..(58): n is a, c, g, or t
  misc_feature (70)..(70): n is a, c, g, or t
  misc_feature (128)..(128): n is a, c, g, or t
  misc_feature (198)..(198): n is a, c, g, or t
  misc_feature (264)..(264): n is a, c, g, or t
  misc_feature (292)..(292): n is a, c, g, or t
  misc_feature (411)..(411): n is a, c, g, or t
  Coding DNA Sequence Number=SeqID_2670
gtgcagaagtacaatcgagcgtcgtctgctagagcagagatcgcgcactacgtttctnctaagtgtactnacacgaactgacacaagatatggtagaaagtaagtcatgtagttagtttagtagatgnagcaccatcatgaagagagtgcgacggagcgacggtgagagagtagctctcgaggcggcgacgtgagtgngctgtcagatctcatcgtagatgtgccttaatatatgtgctatgtttgcgaatatagaggatgatnaaagctggtgagaaggagagatgcgacngcgccatgcgctctatgaacacatgagatgatgcagtagaggtaatacagagacgaagcggacgtatactatatgtatctccttgtatatctacgtgcctctactctagtgtgtgatanaaagagaggggatgacggcgtggagtgcggatgctacatgcagccctatgccatagaga

SEQ ID NO: 12450 - DNA, 345 bp, Glycine max
  Coding DNA Sequence Number=SeqID_2671
cccctgacatggctagacacattcattgatctcgtgaatagggaacttttgcttatcatgctccacaatatgcaatgactgggcagttgactcaaaaaagtcttttctataatcttggagagcgccttcttcatcttcttacaagaagaaaacctgctgaccataccatgcctagaggacagcagaatcttgccacatggtctatcttcagattaagtgaatataaagtgaaacaccgccttgacctcaaactgattggagaatacccacccaaacgcgttgctaagcttggacctactgcagcactgtgcgtgccgtatgaagacgactttatgcacaatatga

SEQ ID NO: 12451 - DNA, 599 bp, Glycine max
  misc_feature (99)..(99): n is a, c, g, or t
  misc_feature (140)..(140): n is a, c, g, or t
  misc_feature (147)..(147): n is a, c, g, or t
  misc_feature (149)..(149): n is a, c, g, or t
  misc_feature (163)..(163): n is a, c, g, or t
  misc_feature (267)..(267): n is a, c, g, or t
  misc_feature (274)..(274): n is a, c, g, or t
  misc_feature (278)..(278): n is a, c, g, or t
  misc_feature (350)..(350): n is a, c, g, or t
  misc_feature (389)..(389): n is a, c, g, or t
  misc_feature (396)..(396): n is a, c, g, or t
  misc_feature (493)..(493): n is a, c, g, or t
  misc_feature (510)..(510): n is a, c, g, or t
  misc_feature (523)..(523): n is a, c, g, or t
  misc_feature (530)..(530): n is a, c, g, or t
  misc_feature (556)..(556): n is a, c, g, or t
  Coding DNA Sequence Number=SeqID_2672
ctacgttgtcatggtgtattgagctataacagatctgcttagaggaagatgcaagctgcgtatatacttacatcatttaggtgatctgcgtgtggcctntgcccagagcgcgatgcagattcggcgtccgtgcgcgacgncgcaccncnaggcgaatgaaagnagatagttgcatagtttcttctgggtgatattagtacgcgtagttgcgagaatacggaaacattcagctgtagacatgacatatagatgcatatgtacacacancgcaagntacnagtgggaatatatatatattacactatatacgcggaggacgcgtgtggtttgtgtagtgggcgtgtgctagnatactgtatatctcagataaagttcctctgtcactccgncgtctanctcactactaatacatgaggtttgtgtctttctctgtgtatatactctatctatgcggccgttgatgtattctatatactgcgtaggaggtgcgtgnttgagtagaagaggtcnagcgttttattcnactagtncgtactcgcgcgatcccatatacgtntgttattctaaaacatattaactttcgcgagcgccgccagaga

SEQ ID NO: 12452 - DNA, 573 bp, Glycine max
  misc_feature (442)..(442): n is a, c, g, or t
  Coding DNA Sequence Number=SeqID_2673
ggatcaatatgcccaagtcctttttgagtccccaaaaccagcagaagcaagtgagcagaattcttccaagcctgctcctgctcagggtgggatcctttgatttctttcttaatcccaaagtttttcatcttttcaagtcctcattttgttccaaaagtggacccaaagtttcaggtttcagagaagacccaatcagcctttgcagctgcaaaacagacaatgagtaatgctggttctgccaaaaagaaaaatcgctatgtgcttaccggggcattctgggtaacaggtgcttttagtaaggtttttaaggcggctggtgaagttggtcttatttgaaaaaaaaagtggagggtgccgaagaacccccaaaaccaaaagtggggggggggggggccccagtcctttttgggtcccccaaagccgccgaagcaagtgagcaaantattccaagcctgttcctgcccaggggttgatcccttgatttgcttcttggattgataaaaaaacttcctcgggccgcccttttttttttcccgatcgaaagtgaatgtagggctgattttctgttgggaa

SEQ ID NO: 12453 - DNA, 586 bp, Glycine max
  misc_feature (92)..(93): n is a, c, g, or t
  misc_feature (103)..(103): n is a, c, g, or t
  misc_feature (385)..(385): n is a, c, g, or t
  Coding DNA Sequence Number=SeqID_2674
gccgcgctatgttctatgcgattgcaaatgattctctcccctacgttccacttcgaatataacatattttctttgtttgttgtttttggggnngccggcggcngtgtgcgctagcacccggcaccgtttcttctataacgcgggcgcgcgatagtgacacaagacgatctcatcaccacggcgatggcggaattatagaaatagtaggcggcgtcgggagtagacggattatctgtcatctattagtcaggccgattatatatccgcggatgcgatgcggcgcactaacaaattacagataataagagccgtgtagtaataaactattgagtggcgcgaatatagtgtgttatgataagattggtgtggtgttcgataagactcnacactatgcttgtgtggtggctgccgcctcgtctacataaatatagtttaccattcatatattttgcgacgctacgtgagtagatgggcatattctacaatgtattataatgtacgggggtaacgtgtgatgcgaaacacaacagagcaacatcgcgcgcgcgcggcatctcggcgggcgacaatcgctaccggcacgata

SEQ ID NO: 12454 - DNA, 187 bp, Glycine max
  Coding DNA Sequence Number=SeqID_2675
agagcgccgaggacgcacccgcgtactgccaaaacaagccgcggtgcacccgtgccgccgttcgtccgctcccgtcgtccgcacacgcgcacgctcgggtcgataatcctcaccgggcgagcgcgcagctcacgatctatcatcccgatgtccgccggggagggataccggactccaacctattgcc

SEQ ID NO: 12455 - DNA, 439 bp, Glycine max
  Coding DNA Sequence Number=SeqID_2676
tgataagggttagctctcctcctctcctgaaatccctctcctctctccaatccttcctctctggttgttcccttttgtaatcagacttggatcctcagtgaatcaattgagaggccagcacttccttttttctgattgagaattggctaggtttgtaataattggtattcagagctttgatcctctcagcaattcgcttctggttgagtttccctgttcagtcgcttaatctgtaattcctgggtgacggatgtgagatccacttggtgatttcgcccaaagttcttcggaacaccctaactgggttggatcgtggctatgcagcctcgacgcacacttgctgtttgagaaaatggctcaaggggattccatgaaaacgatgatggacatgctcgcccaaatctaggcggatttggcggccaacacaaccaagcttaat

SEQ ID NO: 12456 - DNA, 553 bp, Glycine max
  misc_feature (389)..(389): n is a, c, g, or t
  misc_feature (393)..(393): n is a, c, g, or t
  Coding DNA Sequence Number=SeqID_2677
agagcgaacacgacacgctaccaatcgcgaccgaaacacatagctagacgtgatgtaccaactgtgagcatacacaaattcaacatccgcaatatgctcgtaatattacatatccagaatacataatcaatataacacatatctaaacataacgtcaaattgatacagtataagtgcataacaaaacacataatgtgtattctttatataaaataataactatatattagttataaccacacccacgactccgccgtgcctagaccacgctcgcgcgacgcccacccgtaacgcagcatgtagacgtacgctcccgggtgcatctgtattatagatcatagtgatcaatacgaaaagtgggtatcggaaataagacacaataacgaatnatancgaatacgcttgaacctctatctatacgatatctacatagaaaaatctcagtgatgagatggtggcctgtgtatgtttatcggctatatatgtatgtatagtcctgcgttttgtatatatagtatgttgtgatgtgtatgtattctaataccaccgatcc

SEQ ID NO: 12457 - DNA, 372 bp, Glycine max
  misc_feature (225)..(225): n is a, c, g, or t
  misc_feature (240)..(240): n is a, c, g, or t
  misc_feature (274)..(274): n is a, c, g, or t
  misc_feature (319)..(319): n is a, c, g, or t
  Coding DNA Sequence Number=SeqID_2678
gatgcgcacgtctcacacaccatgtcactgacttcttgtacatacctgactcactacaacacaccccgcaccgcagtcacctaccgactccgccggccgactcgtgcgcgtgacaccctctcgcgtaccgtcacacctccatacgtgcattccgtcactctaccgtcgatctacgccgtgcatacgacacacctgctctctcagcccatccgatactacaacgcncctcacacgcgctancgcccactatgcatagtacggagctgcgctgcgncacagataccggcgcacgagcgagacgtcgcgcgtcagagcatanataatgacatcgctcaatcctctcctactcatccgcttacgacagtcggctat

SEQ ID NO: 12458 - DNA, 528 bp, Glycine max
  misc_feature (54)..(54): n is a, c, g, or t
  misc_feature (142)..(142): n is a, c, g, or t
  misc_feature (302)..(302): n is a, c, g, or t
  misc_feature (503)..(503): n is a, c, g, or t
  Coding DNA Sequence Number=SeqID_2679
tatatttcatgtctctctacgcttgatattatctgttattgtatacgctcgtantgatatagtgtattctgactagctgcctacacttgtctcttccgatccatacttacatcctgttcggcgttctccactctcgcggcgntcccttgtgtgttgctcgccgcccgccgcgccgcggtgcggcgctcgcggcgcggcagctctcttcactctattcaatacaactattgagtgacggagaaatatatataataatggataatacaattgatcaaattacacactcgataccgctatattantatctatcttatagtgaattatgggtgtttgagagcgagtggtgtgtagataaaataccgcggacctcgtctgtcgactagccgccaagtggctacgcgcatagcagagagcgcaaataatgaggacatatccctctctacgtcccagcaacacagcatcacatcctatactacatttagatcgtcgtgcctccgcgctcnctcgcatgcgcacaacagaagaagt

SEQ ID NO: 12459 - DNA, 554 bp, Glycine max
  misc_feature (178)..(178): n is a, c, g, or t
  misc_feature (186)..(186): n is a, c, g, or t
  misc_feature (237)..(237): n is a, c, g, or t
  misc_feature (250)..(250): n is a, c, g, or t
  misc_feature (363)..(363): n is a, c, g, or t
  misc_feature (423)..(423): n is a, c, g, or t
  misc_feature (426)..(426): n is a, c, g, or t
  misc_feature (440)..(440): n is a, c, g, or t
  Coding DNA Sequence Number=SeqID_2680
caactctctgcgtgtactgcacttcctgacgtcgtgcaccgctcgtctcgtatttatcgagaccgtgtctgcgcttccctctcactgtctgcacactgtcggcgcctgctccacgcgtcatgatgatgagtctgattatatgtcatctattacgaagatgccacaaggctgtatattngtcgttgntagtgagcgtagcagcgagattcgcgagtcgctgtagcgctcccggtctantgatgtcgcgtgnacaactcgtgtcggcgatagtaagatgatgtctgtgctcgctcgcgctcgagacgcaccgctctcgctgcgccgaccctgatgcgcgcttcgcggccacacgtcgcatgtcgnccgcgatcatctaagagccgcgcctctctgtcgaccgtgcgcgcgcgcgcatgtcgcagnacngaagcgatctcctncgcatcgtcctcttcgtattctctcatactcatggtactctacgcgacgcaattgcgcgatatatgtagtacggcaatttatatcgatactatactatactctcgctcgactct

SEQ ID NO: 12460 - DNA, 538 bp, Glycine max
  misc_feature (129)..(129): n is a, c, g, or t
  Coding DNA Sequence Number=SeqID_2681
taccaccactaaatttttacaagcggggggtgaggtgtttatacatgtggacgggccaataattataggcgcgtggaataaataagattagcatggatttgcggttacatggtattcatttccaaattnctaataatttaatgtggagcggcgccggattggtgggggtgaatgtatacaaccgggaagtcgtattacatttattttttttttttgttttcgcgggtcccgccaacgccgcgcgattctatagcgggggagaagaaaaacgagatgcgtgagcggtgcggaaataaagaaaagggggcgggaaggggatatagttaaaaagtgggggatattaaagcgatagcgcgtgtctacacataaaaatataaagggcaagtatagtaggtggcgggaggagtcggtgtgtataatgggtggggagaaaaatgtcggtggcgttgaggcgcggcgacctaccgagtaactccacataaacatgctgcgcgcgccatgaaacacgaaaaactagcgctaacggaacggcgaaagt

SEQ ID NO: 12461 - DNA, 559 bp, Glycine max
  misc_feature (441)..(441): n is a, c, g, or t
  misc_feature (508)..(508): n is a, c, g, or t
  Coding DNA Sequence Number=SeqID_2682
taaatatcagtacacgccgatgcctgttatctttgatttgtctagatggtgccagaagagaagaacagagtagatacattcataatactgtttcacaaggcttagtggctgctaatgccgattctagtatatacctataattgaatatttctgcgcgttatgtactagctgcgcgcatttccctatatttgtaccccggctctactatactagaataagctctaaactcatattacgtaagaatagaaatagatatcgacttctcactcgtcgagcgcggtgcaagaggagtagctaggtgtataattagtcacgtgaacagagagtatgctaatcgcgcagttggatacagacatacacagttagatatggctattgcgtctgtcatgtgactgcatacataaccggggcttacatattgctcgatcgtggtctgcaacntaatctggacgtctcacactaatcaactagatattgtgagtataatatggacgttaatatgtcaatngctatcaatgcatgcgagtgtagtacggtatatgcgccgacatctacataa

SEQ ID NO: 12462 - DNA, 598 bp, Glycine max
  misc_feature (53)..(53): n is a, c, g, or t
  misc_feature (211)..(211): n is a, c, g, or t
  misc_feature (244)..(244): n is a, c, g, or t
  misc_feature (283)..(283): n is a, c, g, or t
  misc_feature (300)..(300): n is a, c, g, or t
  misc_feature (317)..(317): n is a, c, g, or t
  misc_feature (322)..(322): n is a, c, g, or t
  misc_feature (362)..(362): n is a, c, g, or t
  misc_feature (367)..(367): n is a, c, g, or t
  misc_feature (369)..(369): n is a, c, g, or t
  misc_feature (377)..(377): n is a, c, g, or t
  misc_feature (379)..(379): n is a, c, g, or t
  misc_feature (406)..(406): n is a, c, g, or t
  misc_feature (410)..(410): n is a, c, g, or t
  misc_feature (454)..(454): n is a, c, g, or t
  misc_feature (497)..(497): n is a, c, g, or t
  misc_feature (500)..(500): n is a, c, g, or t
  misc_feature (509)..(509): n is a, c, g, or t
  misc_feature (535)..(535): n is a, c, g, or t
  misc_feature (573)..(573): n is a, c, g, or t
  Coding DNA Sequence Number=SeqID_2683
cgagtcacaacgtcgacgcgtagatcaacaatacacaatcatcacatcctgtncatgctcccgcgagactcctccattacatatgccgcactatatcagtcacatgatagtatatgagagtagtatatagtacgctactatacaccactcgtctacccaccgcctgaccccgccacacgtgtccgacgccactcaatgcagactccaacgngctctatcacagatatgaaacatcggagatatncatagctctaccatctagcatcgtcatctgcgacatatntgtctgtactcatcccntgcaccgcactgcattnatcantggttccagctaacccctgacccgtcctgttctgcgactngtgtncnactctcancngtactcgtgcacatctcagtgctgtgngtgnatggtagtacagcgcgtcacgagagcacagagcgtgagtcgcgncgtgacagcgcacttccgatcgtgcatcgacacgactgcagtngcntcgctgacnagctatcgtatatactatgactgctngatcactgtatcaccagcactccgtgcgatacacggangtacaccgtcacactcagctcaaat

SEQ ID NO: 12463 - DNA, 587 bp, Glycine max
  misc_feature (35)..(35): n is a, c, g, or t
  misc_feature (182)..(182): n is a, c, g, or t
  misc_feature (193)..(193): n is a, c, g, or t
  misc_feature (244)..(244): n is a, c, g, or t
  misc_feature (383)..(383): n is a, c, g, or t
  misc_feature (424)..(424): n is a, c, g, or t
  misc_feature (473)..(473): n is a, c, g, or t
  misc_feature (475)..(475): n is a, c, g, or t
  misc_feature (526)..(526): n is a, c, g, or t
  misc_feature (531)..(531): n is a, c, g, or t
  Coding DNA Sequence Number=SeqID_2684
tatactcgcagacatcaccatacacctaattccgncgacgctcacgcgatattatataatgataataagcacgcgcgcgctggtcgatgccgagatatcttgtatatatattcaccagagcggcgtagtcgtatgatatgacggatatacgtagacggtgtgactatatatatgtcaggatnttattcagcgngtagcgctagtcactacatcttcgtgagcacgcgcgagaagactatatcgnttgtataatcaaccaccgattggtagtggtgttgtcacaaatcagtgttaacatcatctgtctctgtttatggaagcgcagccgcacatcaccctcacacagcacacttctgctctctacacactacactcactttctntagctcgccgcaacgccgacgcataatgtggtgttaagcanatacactcatggagctacaagacagactccgcgacggagtaacactgtntnaatgcgatatacaaacgatacgacgcacaatataacacgcacagaacgctncggtnttgtagtcggtccgctcgtacacatattcgcgtcgcgcgcgacacggataatatat

SEQ ID NO: 12464 - DNA, 547 bp, Glycine max
  Coding DNA Sequence Number=SeqID_2685
agtaatgtaacttcgtcgctgctccttatctacaatcattcacccgagaggactggggcaaggtggtgtgtgtaggattgagatagttaaagagatgcgataactacattgtaattcagataaataaatgtcagttgtcttattacgtgcactcgattggacactcgtgttacaactctctgactcaactcactttctccttgccccatgtattgcactctcgccttgctatcccatcatatttataaactaagtgtgtagtttgctatggcgtgaagatatatgaagaaactagtccggggcgtgggacacgagtagttacttaccaaatcgcggatgatgaggtctttacccgcaaggagggcgcactaatcacaaacatacaagagcgagcgcgccgagggcggctgtggcgggcgctatattatatccggtacatagtcaagccggatatgtctttcttctgtctcgttgggtgaggcggtgtgtaatctattatagcgaggtgacactactcacaccgcgttgcgcgacgtaatgccatata

SEQ ID NO: 12465 - DNA, 404 bp, Glycine max
  misc_feature (52)..(57): n is a, c, g, or t
  misc_feature (162)..(163): n is a, c, g, or t
  misc_feature (231)..(232): n is a, c, g, or t
  misc_feature (237)..(240): n is a, c, g, or t
  Coding DNA Sequence Number=SeqID_2686
gagattaagttagtagtagctataggttatttgctataatgccccgtgatannnnnnacctcaaaaggcaactttctccgtgcagtttcacccgtcacaactcaatcgagctttttgctgtaaaaggccggtgctggaattgtgttcccttctctgttcctnnttaatagcgtttgtctatataggaagaatccaatataagtgaaaaaaaggttgagaaagtagaggtcnnaatannnncatgtgatctgtgagatagtgtgagagaaaaaggatggtgcatcagaataagcacatgttcctttcaaccaaagtacaggaagatgaggaacattataggtctgccatctcaatttaattttggtcatagatgttgttggggtaaatgttatcttcaataagag

SEQ ID NO: 12466 - DNA, 579 bp, Glycine max
  Coding DNA Sequence Number=SeqID_2687
tccagcctggcaccgtgatgaaggtgcccatcggtggcggaatggtcagcacactggcgcccaagcaggcccacccaaccaacgtcgcagtggacgcgacgtccgtgtactggacggaggacaacgcagtgatgaaacaggacttcggcggtcccgcgatcgtcattgcgaagacgacgactccgatcggcctcgcgctcgatgcgaactacgtttattggagcggcggcgcgatctacagagtcgcgaaaaaatgagccgctcctcgcttgcgatattgatgagcgtcagctgcgcgctcgtcgcgtgcgttggcgacgtgcctagcggagtgggtgacgcatcattcgaagcagggcccgaagctgggccgaccacctgcttcatcggcggaaaggtgctggaagcaggcacgatcaacgcggcgtccgtctgccagtcttgccgacccgacgtatcgcccatggcctggagcagcgcgcccgaaggcacctcgtgcagctcaccggggatctgtcactcgggggcgtgcgtgaacgggtgcatcatcgggagtgtgtattatgcagccaacgcgcc

SEQ ID NO: 12467 - DNA, 171 bp, Glycine max
  Coding DNA Sequence Number=SeqID_2688
ggagtgaatatcgtgccgaagtacatcggcgacgacatggttcttcttctaggccttacagaaggccaggctcgacaactgatggagagcaacaagtcgccgttctactcagtggagagatggaataggcagaaaattctggctgccataggtgacgttgtggaagtagat

SEQ ID NO: 12468 - DNA, 599 bp, Glycine max
  misc_feature (82)..(82): n is a, c, g, or t
  misc_feature (97)..(97): n is a, c, g, or t
  misc_feature (119)..(119): n is a, c, g, or t
  misc_feature (189)..(189): n is a, c, g, or t
  misc_feature (210)..(210): n is a, c, g, or t
  misc_feature (223)..(223): n is a, c, g, or t
  misc_feature (265)..(265): n is a, c, g, or t
  misc_feature (339)..(339): n is a, c, g, or t
  misc_feature (362)..(362): n is a, c, g, or t
  misc_feature (393)..(393): n is a, c, g, or t
  misc_feature (442)..(442): n is a, c, g, or t
  misc_feature (445)..(445): n is a, c, g, or t
  misc_feature (472)..(472): n is a, c, g, or t
  misc_feature (483)..(483): n is a, c, g, or t
  misc_feature (550)..(550): n is a, c, g, or t
  Coding DNA Sequence Number=SeqID_2689
ggcattaacttgtgtccgcgactctcgtcttctctccttctgtgtattgtgttgtataacgtatcgccatgacccgctacgnacctcatagatttgncctactctacttttactatccntctcacagcatactcaagtgcaccagctacccattcacgcacacgatgcctcctcggcgtcttcttcttntccacacacaccgtcgcacgntcctcgtcgtctnctatgcacactcccaactgcgacgcgcaccgcacatcgcganagtgggagaccacatcataccgtcgtgtcatcgactcgtatcgcgtaacatcctcgccgtcactcgctatggantccacctcatcatgcgtaggctngtcactgtacaaagcgccgagcggcggcacnacggccgacgacggacgtgatcggtgacatgtatctacactgctcaccncgncatcacgctatggcacaaatccaactntaccatctacntcctatgtctcggtgatagcctcgttcgtgtcactacctaattctatacaactatatgacataaaanaagaactataataacatactctcatagagacgtgttgctctgtcacatc

SEQ ID NO: 12469 - DNA, 572 bp, Glycine max
  misc_feature (65)..(65): n is a, c, g, or t
  misc_feature (202)..(202): n is a, c, g, or t
  misc_feature (231)..(232): n is a, c, g, or t
  misc_feature (401)..(401): n is a, c, g, or t
  misc_feature (508)..(510): n is a, c, g, or t
  Coding DNA Sequence Number=SeqID_2690
atagtaattcacacagcgcgcctatctccagttattttcatcatagagcgccaatttctaacacncgacaccacccaataatcaacacacaacacataacaccttagaacacgacacccaccacaaaccattccccttgatagccagcgcggaccccgcctcgtgcgcagggtgctgggtggtgcctgtgtggggtggttgngtggcagtcatcgagtcgcccctacgatnntttacccagcattttcccacacagtggtgtttttttctctctcacccccttatattatgcccgtcgtctttagttcttccatttccttgttacaataccaccgtatgtttgtatattctccatcttatattattcacaaggacagctgataggccgctacctcagagantcattcaccaactaacaaagtgtacctagacattaagtaaaaactattaaggaagagtcaggagtagagtgagggtggagtaaaaactactctagagtatttgtgtnnnttcttttttcctgataatatagttcaacctcgcgtgagattctctatggttcagtatagcac

SEQ ID NO: 12470 - DNA, 271 bp, Glycine max
  misc_feature (132)..(132): n is a, c, g, or t
  Coding DNA Sequence Number=SeqID_2691
gacgaagttgtggtagtgttgcttttgataatggaaatgaaagtaaagtagaaaagagtatttagggtaaataatgtataactctagatttctgattttctatattatacttattagcgagacgaggctttntgttcttgaaatttagggtttaaagaaaagttgtactgtttttagattattactagttaatttaattatatatttttagctttatttttgtgggtaatggttatgttgttatttgttggctttttataatcaatggata

SEQ ID NO: 12471 - DNA, 600 bp, Glycine max
  misc_feature (43)..(43): n is a, c, g, or t
  misc_feature (59)..(59): n is a, c, g, or t
  misc_feature (98)..(98): n is a, c, g, or t
  misc_feature (213)..(213): n is a, c, g, or t
  misc_feature (306)..(306): n is a, c, g, or t
  misc_feature (425)..(425): n is a, c, g, or t
  Coding DNA Sequence Number=SeqID_2692
ctctggtgactgctagtactattctgatattcgagaatctganctcacgcccaaccatngatagcagatacgtatagtactacgattgctccagtcgntaggcgatgtagctggatcacgagcctgaagatcgttgatgagagtttcttacgcttgtcagctgtacagactgagcagataactctacacgaccgggtctatcactgcatatgngctatcgtcaccggtatcaccaacgcgacgcgtcgcttccgcgttcagccctctaacggagcacacgccggctattcaatagcttcgcgaganacatgtactgtctgagaagtgcgtcatataatcgtgagtcaacctaatccagatagctagtatacgactgctctaatatcgtgtgaacatgtcgataattatatcgtcgcagagatagnatgagtgagtgtgaccgtgaggatttgcactcacggaagtgtggcaggtgcggcaggcgagaggtgagacgtagagtaggtgacgtagagcatgaagcagcacgcaggcgtattacaccatgtcgccgacagctcctgctgatcgcgtgctatgaattgtcgagcggagcactgc

SEQ ID NO: 12472 - DNA, 577 bp, Glycine max
  misc_feature (35)..(35): n is a, c, g, or t
  misc_feature (40)..(40): n is a, c, g, or t
  misc_feature (80)..(80): n is a, c, g, or t
  misc_feature (161)..(161): n is a, c, g, or t
  misc_feature (432)..(432): n is a, c, g, or t
  misc_feature (442)..(442): n is a, c, g, or t
  misc_feature (512)..(512): n is a, c, g, or t
  Coding DNA Sequence Number=SeqID_2693
gcagcggtcggatatcgtcagtgaagatcgtacanacganagatatggagtgacagatcatagagcgtagaggtgtgttngcgcgcttagtaggaggagtgcagagatactgtatagtacgagcgaacagtagtagcgtctcgtgtaggtagacgtaatgnctctgacagagtactagctaacgtaggcgtgggggctagtcagcgagtgctgagaggtaactgacgtatctcatatcttgttatcgtatctattccgatcgcgtgaatcatatcagaatacatattatcagtgtatgtcagtgtgagtctcagtcggccatgagttgcgcatgcaagtaatgttcgttgctcgagtgcttgctcgttgtgtagcctgatctagtggatgaggtgagagtcaaacgtcgacggcgctgtgacggcgtggggngcgcgcgtgngtgcgccttcatcagcagataacgcattgtatctttcggatgggtggtggtgccgctcgctgtatactcnctctatattgtggtggattatattagatattctagtttagtctatctcactacctcaccatagta

SEQ ID NO: 12473 - DNA, 431 bp, Glycine max
  Coding DNA Sequence Number=SeqID_2694
gaactgctagcatcaacaaccttgactcaaacatatcatttgactcctgaaaaagaagctattctattgtccaatattgccttaaatcaaaatggcgataaacaaagagctcttggtttcactcataatggagaaaaagctcatttaatctttggacacggtatccgtcaaaatgattttgagaaaagagaacttgccagcacatataacctttcatatggkgctcaaatcaagcctaaggaatttattttctctaagtttgattcaactgctgttcctcccgtcatcaatcctgaagacaaggtatacattaagagtcatatgaagggaattgctgctattggtgacagccagaactttgagaataagaamcaatacaagcattatgatgagtttactaagacttttgactctgtccaatctaagattgc

SEQ ID NO: 12474 - DNA, 274 bp, Glycine max
  misc_feature (126)..(126): n is a, c, g, or t
  misc_feature (129)..(129): n is a, c, g, or t
  misc_feature (145)..(145): n is a, c, g, or t
  misc_feature (166)..(166): n is a, c, g, or t
  misc_feature (192)..(192): n is a, c, g, or t
  misc_feature (209)..(209): n is a, c, g, or t
  misc_feature (211)..(211): n is a, c, g, or t
  misc_feature (223)..(224): n is a, c, g, or t
  misc_feature (231)..(232): n is a, c, g, or t
  misc_feature (234)..(234): n is a, c, g, or t
  misc_feature (243)..(244): n is a, c, g, or t
  misc_feature (247)..(247): n is a, c, g, or t
  Coding DNA Sequence Number=SeqID_2695
ttggacctatcttggaaatgtcattatatttggatcaagtatcaacagagaagtcactgggcacttgtaaggaggagattctccctggtatggatatgttactccagatgatgtacctttattgtntcnccagcatatcattcanggggagatttttgactcactntgggaggggtcaaattggtttatccnaagatgatcagaagatnangcacgaacaatnngctttanntnatggtggannatntttacgatgcatggtgctggctgcttg

SEQ ID NO: 12475 - DNA, 564 bp, Glycine max
  misc_feature (37)..(37): n is a, c, g, or t
  misc_feature (147)..(147): n is a, c, g, or t
  misc_feature (163)..(163): n is a, c, g, or t
  misc_feature (175)..(175): n is a, c, g, or t
  misc_feature (213)..(213): n is a, c, g, or t
  misc_feature (227)..(227): n is a, c, g, or t
  misc_feature (240)..(240): n is a, c, g, or t
  misc_feature (393)..(393): n is a, c, g, or t
  misc_feature (423)..(423): n is a, c, g, or t
  misc_feature (508)..(508): n is a, c, g, or t
  misc_feature (520)..(520): n is a, c, g, or t
  Coding DNA Sequence Number=SeqID_2696
agcactcgtgctggaggagcatgaagaactaatatangctgcgcctttaagtattgtgcgcgcacgcgcaggatatgatacttactattatatcatactgacacgctagcgcgcgcgtgagacactgcgtacactagccattacatnatggtcgatatagctnactgacctgtantttgtagatgatgtatatagtcgactagatctcgttancgtgctcgttggtncgcctgatcgcgncgccagccgatgagagtgcatcacataatcatactactcatagtgcgatgggctgactcgcacggagctgctgccttgtacttagcttgctcatagtacgacgtatcttcattagttatgatgtgcgcacgataataccgacacgacgtggtnaatagagaggcggcgcgacttgctctatcntttgcgatgatgcttatatatagtgtagcgagtgtgaggtgcgcgcgctgcgctcactcccctgtcctagtggagtagtgtatanaatgacgtattnatataagtagctagcgtacagactgtactctgtgtgtgatgtat

SEQ ID NO: 12476 - DNA, 175 bp, Glycine max
  Coding DNA Sequence Number=SeqID_2697
atgatgactattccccttgctaagtgaatgcctgtgatggacatatactctctgctaatctatggaagttcagtttaggtgtcttggatattctttaggttttcatgctttatagtgaaatgtgtcagagactggtatagtaacatgtttctacttggccttgatgactcatttt

SEQ ID NO: 12477 - DNA, 488 bp, Glycine max
  misc_feature (43)..(43): n is a, c, g, or t
  misc_feature (49)..(49): n is a, c, g, or t
  misc_feature (56)..(56): n is a, c, g, or t
  misc_feature (96)..(96): n is a, c, g, or t
  misc_feature (172)..(172): n is a, c, g, or t
  misc_feature (183)..(183): n is a, c, g, or t
  misc_feature (202)..(202): n is a, c, g, or t
  misc_feature (214)..(214): n is a, c, g, or t
  misc_feature (217)..(217): n is a, c, g, or t
  misc_feature (233)..(233): n is a, c, g, or t
  misc_feature (235)..(235): n is a, c, g, or t
  misc_feature (262)..(262): n is a, c, g, or t
  misc_feature (279)..(279): n is a, c, g, or t
  misc_feature (297)..(297): n is a, c, g, or t
  misc_feature (303)..(303): n is a, c, g, or t
  misc_feature (314)..(314): n is a, c, g, or t
  misc_feature (320)..(320): n is a, c, g, or t
  misc_feature (338)..(338): n is a, c, g, or t
  misc_feature (341)..(341): n is a, c, g, or t
  misc_feature (359)..(359): n is a, c, g, or t
  misc_feature (388)..(388): n is a, c, g, or t
  misc_feature (401)..(401): n is a, c, g, or t
  misc_feature (407)..(407): n is a, c, g, or t
  misc_feature (423)..(423): n is a, c, g, or t
  misc_feature (426)..(426): n is a, c, g, or t
  misc_feature (436)..(436): n is a, c, g, or t
  misc_feature (442)..(442): n is a, c, g, or t
  misc_feature (445)..(445): n is a, c, g, or t
  misc_feature (459)..(459): n is a, c, g, or t
  Coding DNA Sequence Number=SeqID_2698
atgacatcgacactgcgcgactgatcactgactcatagtgtantcacanaccattngactatcaatgctcgaatactgtctgactatgatcacgangcgcgtcgacgcgcgatctacgcatacatacatcatcaatcacaacgtatctacatcctacgctgatagtagtatngcttgacatgntactattcatacgtgatgnagcacgttaccnagntctgtcgtctacgatncntcgctactattgatgccaataactctngtatcgagcgtgatacnacattcagtcactgatcnactgtnctgacagacgnataccnctgactcactagcgacgncantccgatcactgatcgacnttcgttcctcatgactgagatactactcnactaccccctgtngcccgntaactaccatcgacgncgntcgtcagcancagtantanataatgtcatcatncgatacgatcgctgactagcactcgtcat

SEQ ID NO: 12478 - DNA, 247 bp, Glycine max
  misc_feature (40)..(57): n is a, c, g, or t
  misc_feature (65)..(69): n is a, c, g, or t
  misc_feature (102)..(102): n is a, c, g, or t
  misc_feature (108)..(130): n is a, c, g, or t
  Coding DNA Sequence Number=SeqID_2699
tttgaaatggccttgaatgacttgatgcaaaagcatagannnnnnnnnnnnnnnnnnacactgcnnnnngttaggtcacagtacggaatattggatgatggntgttcnnnnnnnnnnnnnnnnnnnnnnnatacgggagactgtcaatattggaaaatcaatgcttgctactagcattgcgagtcgagatgatgccttttgatcctagctacaattcaaagatgcagggtccattcaaaatttaatt

SEQ ID NO: 12479 - DNA, 543 bp, Glycine max
  misc_feature (35)..(35): n is a, c, g, or t
  misc_feature (88)..(88): n is a, c, g, or t
  misc_feature (145)..(145): n is a, c, g, or t
  misc_feature (212)..(212): n is a, c, g, or t
  misc_feature (415)..(415): n is a, c, g, or t
  Coding DNA Sequence Number=SeqID_2700
acaaatagtaagaggtcaccggattttttggctcncgtgtttccgcgtctctgccgctgcttcgtctgtcctcactccctgtgtgatncagcacggtgaaggtgtggatggcgacgtagcgatggtatatgcaggtgagagggtnaaggcgcgctggccgaccgcgcgtgagcgatatgggcattcgtcttatgtgtgagaggcctctacgngaaaataagatatatagatagtagattatcgtagatgagtaaatagagagacagcggcaggtggatttatcccgtatgttatttagttcgacagatgtttacgaccatatccccggatgagaattaccagtagtacatgagatgaccagtagcaatgcgagtcggcatagacagctgtagggcgagagagaggtgtgcagtanccattgacacacgacccaccggcggacggtcacgggtgtggagtgcggacagaaggcctgtgtgctttaagttctgattcagtcaggacgcacaggattcgatgtgagaagcactatgtatgctttcc

SEQ ID NO: 12480 - DNA, 481 bp, Glycine max
  Coding DNA Sequence Number=SeqID_2701
tgatagagctcaagggcttcgccaccactggtcgttcattgggtatggctttcactaacatgccattgtatgtgaagcgtagcagacgaacactccaacaacaacaacccaatatcatatctgggaccaacaacaaagtccgatctggtagaaccaatgttgtatccggaaacgacaacacggttgtatctgggaataacaatactgttgctgggagcaacaataccatcacaactgggagtggcaataccgtatctggtagtaaccatgttgtttctgggaccaaacatatcgtaactgacaacaacaatgttgtttccgggatagacaataatgtatccgggagcttccacaccgtatccgggactctcaataccgtatccgggagcaacaataccgtatctgggagcaaccatgtcgtgtctgggagcaacaaagttgtgaaaggaggttaatggtttgcgagtcagtgtagctcaca

SEQ ID NO: 12481 - DNA, 424 bp, Glycine max
  Coding DNA Sequence Number=SeqID_2702
tctttgacagcttagaaatcttgccgaagaagaagatgggagtattcacattcgtttgcaaaagcaaaggcggggaatggagcgctaagcaacacgagggagacctcgaagcctccgcttcttccacctacgatctccagcgcaaggttgttcagactgctctctccgccgattcctccggtggcgttcagtcttccttctctctcgtctcccctacctccgccgtcttccaggtgatcattggtggtggttctggaggaggatttgctgccggtggaggtgcagcagctggaggcggtggtggaggtgaggccgccgcagccacaaaggaggaagaaaagaaaaaggaagaatctgaagaggaggaaggcgactttggatttgatctctttggttaatgctctttcgaaggtgttactttttg

SEQ ID NO: 12482 - DNA, 193 bp, Glycine max
  misc_feature (40)..(40): n is a, c, g, or t
  misc_feature (62)..(62): n is a, c, g, or t
  misc_feature (67)..(67): n is a, c, g, or t
  misc_feature (109)..(109): n is a, c, g, or t
  misc_feature (112)..(112): n is a, c, g, or t
  misc_feature (121)..(121): n is a, c, g, or t
  misc_feature (130)..(130): n is a, c, g, or t
  misc_feature (132)..(132): n is a, c, g, or t
  Coding DNA Sequence Number=SeqID_2703
tgaacttgacaaaagaactgggcttattatgggtgatcgnatcctttactcatcgggggggnatccncacaacgaggggaggatcccacggactattggggaggagggngancccaagganggcgggggnancaggcaggagccagaagcgccagggggggggggacggggcgaagccagaggaaggagggca

SEQ ID NO: 12483 - DNA, 515 bp, Glycine max
  misc_feature (122)..(122): n is a, c, g, or t
  misc_feature (214)..(214): n is a, c, g, or t
  misc_feature (350)..(350): n is a, c, g, or t
  misc_feature (403)..(403): n is a, c, g, or t
  misc_feature (475)..(475): n is a, c, g, or t
  misc_feature (488)..(488): n is a, c, g, or t
  Coding DNA Sequence Number=SeqID_2704
gcaaacatacactatcgtccgcggtgtgtggtaacccaccatatcctcgccacgatgtggagatgtcagtattagtggtgtattttgtgtttccgacgtgctgatccagtgaaagaatcacncgcataataagttagtagattaaggagataaaatattttataatgttcgaaagtgcgattatgttattctaactatattaagtgtattatgngtgttatctgtccgcgcactggcgggggtgcggcggcgcggacgcgtcgtaggcctgcgctttgttagagaacagaaatgataatgaaagatagaataatagtacgagtggacagtagacgccctacgaacaaccncagttcggctgcgtgcgcgatatggtgctgctcgtgctgacacagagggaaanacggcggagagaaaaggaggtgatggaatatcacaagtcacacgctgcagagcaaaagaccagaccaacccnatcagcaaacaanccacgccctccaccatatatatgttgt

SEQ ID NO: 12484 - DNA, 340 bp, Glycine max
  Coding DNA Sequence Number=SeqID_2705
tctcctttcttcaagcttcatcataatcatcgtaaacaccaaccgggtggagcagtgcaccatgatccttcagacacacagattgatccacgttatggcgttgagaagcgtcgcgtgccaactggtccaaacccattacaccattgatcatggattgattctcagttgaaccaaaaatgtttttcttttttttatctagatcacaaatatgctccactgaaagcaagcaatcatgttcaagcttgataaatggttagtaaggaaatgcttgataataacataacctgaatatttttttgttttgtttattaactttctttttctcccattttctcctttg

SEQ ID NO: 12485 - DNA, 494 bp, Glycine max
  Coding DNA Sequence Number=SeqID_2706
ccctggtttggtcggatctacttataacaaaacattcggtgaagtcactgaaatcggccctcaatctggacaaatcgctagagaagaaatgatctctaacactatctccactaataactatgttcccatgaacaatgttgtcaccgaaagaagagaagttttcactgaatcaatccctcaaagaagagaagtcattgctactgaaaccattcctgaaagaagagaagtctatactactgaaagaatccccgttcgtgaaagcattcctgctgatcacttgaacagagatatggccagtggaaccttccttcccgaacccgttatcactgaagaaagattgaatgttgatcgtatccccgttgctaccaccaacacttcaaatatcagccccgttcatgaaaacagacccaacattattgaaagaatcgaagataaaattgaaggccgtactcaccatatcagcaatgaaggacttgttcaacctaccatggaaa

SEQ ID NO: 12486 - DNA, 201 bp, Glycine max
  Coding DNA Sequence Number=SeqID_2707
ggcaccggatgcaagtcgatctactgcgccaagttcatctacaagaacttagagaataagcacactggtcccggcttcctctacgtggctaacgcctgtcccggaaccagcggatctcaattcttcatttgcacgacgaaaacggagtggctctacggaaagcacgtcgtgttcggacaggtcaccgatgggatggacgtc

SEQ ID NO: 12487 - DNA, 508 bp, Glycine max
  misc_feature (151)..(151): n is a, c, g, or t
  misc_feature (295)..(295): n is a, c, g, or t
  misc_feature (310)..(310): n is a, c, g, or t
  misc_feature (334)..(334): n is a, c, g, or t
  misc_feature (364)..(364): n is a, c, g, or t
  misc_feature (384)..(384): n is a, c, g, or t
  misc_feature (397)..(397): n is a, c, g, or t
  misc_feature (416)..(416): n is a, c, g, or t
  misc_feature (432)..(432): n is a, c, g, or t
  misc_feature (480)..(480): n is a, c, g, or t
  Coding DNA Sequence Number=SeqID_2708
tgatcacattggctagtcacgcgcgagatgtgcatcatcgcacaccttgcatcgacggactgagcgtgagatatcatatgcgttatcatatatggatgatgagctcaagctgacgtgaagagttaagacacagatcatacaatatatatanagcaacgatctacggctagacggagtcgctgcgtacacacgctactactactctgtctatgatacagatgtactactgtcctcgcacgcgcatgtagtagcgtatatgctatagtgatatacatctacctactcatctaaggcncatacgtcagagtcnagacataagatcacacgttccctncacactactcacaacacggagagagcacanccacagaacataagcgcgtntcgcacgatgcgnaagaacgcgcagagcgcangcgcatactagcatanacgagtagaccactcagaacgcgcacgcgtcatacgtctcgtacggcntcgctcagtggctacgtcgatcgttgaa

SEQ ID NO: 12488 - DNA, 288 bp, Glycine max
  Coding DNA Sequence Number=SeqID_2709
cggctaccaggtaggaacttggtctgctgggcatgattacatgtgtgatctgggctttgggattgatgtggtgtggcttagcatcccttcacagcatactcgtgctcatcaactggctcaaatgtcttgcactggcactacttcttttgacgagcatctgtgtgctgagctttgctctactttcgccagcacctctcttgcccttactatctgtcctttatggttactggtctggctacagtggcactcttgtgcttgttcattcgtcctcatcttttgggctaaatt

SEQ ID NO: 12489 - DNA, 472 bp, Glycine max
  Coding DNA Sequence Number=SeqID_2710
ctcagagagccgtaagtgtcaggactctagcatgtcagaaggacctcgataaatggcggcttgcagaaggcgacttccccacggggtgctctgttggctaaccctgctcagcctcccagggattttgtgttttagcgatctgatgtttgttaaagaacctcaagatgtaatagtttcacggaaagattcagtaattttagactgccagactaatggagaagctccaataacagtcacatggatgaagaatggaataaagatttctgagaatgaacggatatccacatttcacaatggatccttgtacatccgtgaggtagagggcaggaaaggcgagcaatctgatgaaggattttatcagtgtttggctttgaacaaatttggtgccattctaagtcaaagagctcatctttcattagcaagtaagttatttggtgtttggtttcaataggactgcctgtgttggattgtt

SEQ ID NO: 12490 - DNA, 534 bp, Glycine max
  Coding DNA Sequence Number=SeqID_2711
ttctcattctctgcctagcgtaacagaacttgtggtctgcttctaaatttgggggagaaaaagggaagagaagaatgggagaatgtaggccacttggtttcttgttggggctaccatttgcacttgtcgctctccttctatctcttgttggtgctgtcatctggatcattgggacgatactgagttgtttgtgcccatgttgcttctgtttcgctgcgttggctaacttcgccgtggatctcatcaaacttcctgtcaaagtcctccgttggtttacccactccatcccttgttaagaccagactccattacttctttaaaaaaaaaagtactcttaattttctttttctttactaaattaatttttgtcacgaaaattgttatttttttaatgtaatttttgggtaatattagaatgttaaatgttcttaagataaggcttactaggtgaccggttcgcaccctgtgcgggcataagaacatgaccggcccgcactctgtgttccctctcgatccgcacttcacgagagggaa

SEQ ID NO: 12491 - DNA, 497 bp, Glycine max
  misc_feature (26)..(26): n is a, c, g, or t
  misc_feature (63)..(63): n is a, c, g, or t
  misc_feature (160)..(160): n is a, c, g, or t
  misc_feature (179)..(179): n is a, c, g, or t
  misc_feature (197)..(197): n is a, c, g, or t
  misc_feature (213)..(213): n is a, c, g, or t
  misc_feature (363)..(363): n is a, c, g, or t
  misc_feature (418)..(418): n is a, c, g, or t
  misc_feature (420)..(420): n is a, c, g, or t
  Coding DNA Sequence Number=SeqID_2712
ggcactaccgctgtcgtctatcgagntggcgtctgctctactcgctgttatatctatctaacnagtctgacgcaggtcgaagatgcaacgcatctcaatactacgaagatcgtcttatctgctgttcataataactggtgtcgctgcctgtgcggatgcncgcgtatgagttcgcgctncttctgtcactcttggangccgactactcaatantgctgcgtggccgtggggtggcgcatggcggctctgctgtgtgctctctatacatgtgctgcgcagctgcgacacgcgctgcggcgcaccgactgacggcaggcaaatcgatctctcactactcggtctcgtcattctactcggtattgntcgatgatgcattagtgagtgcgatgatcgagcagtcgtgagatagattatgctnanatcatctgtcgatgttatcgccacactctatgcgtgctcagttgatgcgtctaggtatggtcgcacatacgctcgca

SEQ ID NO: 12492 - DNA, 469 bp, Glycine max
  misc_feature (162)..(162): n is a, c, g, or t
  misc_feature (310)..(310): n is a, c, g, or t
  misc_feature (369)..(369): n is a, c, g, or t
  misc_feature (422)..(422): n is a, c, g, or t
  misc_feature (424)..(424): n is a, c, g, or t
  misc_feature (429)..(429): n is a, c, g, or t
  misc_feature (432)..(434): n is a, c, g, or t
  misc_feature (437)..(437): n is a, c, g, or t
  misc_feature (439)..(439): n is a, c, g, or t
  Coding DNA Sequence Number=SeqID_2713
cgctacttcacgatatctcacaaataacacacactgtaactaacacagggagtatgcaatgaatctcagttattcatacgctgcatctatacacccgtcctaatacttcccacatacacaaccgacacccaatgcgattcataacctatgcttatccattcncaccgaagattcaaggccgcgagctatatatacactcctcattttaaaccgagtcaactacacagacacataatgctcctactctacacaccaggtcgcacggaagaactgatcggaactacaccgtgccagtcactgcaatgacaancacgcaaaaatgcgtactacaactatcaccaactatccatgaaaccccaaagtatcttntccctatacaataagagagactgaggggagaggcgggacccatcagccgtcangngcganatnnngangngtaatagagaggcgtgtcatggcactcact

SEQ ID NO: 12493 - DNA, 297 bp, Glycine max
  misc_feature (56)..(56): n is a, c, g, or t
  Coding DNA Sequence Number=SeqID_2714
tcttcaaaagttttcagttgtcaagttataatgattatgagtattcaaaaccaagntgtgatctttgcatgtgcccccgctcaatgcctcctcaatgcaggtgtggagatattaggctgaattcatgccttttttattgtaagacctgtatgtgtcacgctctcacccaggacagtgtcgttgttttgacaccaacttttttttatacaaaccttgccagtccagatatgtttttataatagtgatagctctttcaaatggacaaagcccctttaggctttgtcccttatgttaggg

SEQ ID NO: 12494 - DNA, 562 bp, Glycine max
  misc_feature (273)..(273): n is a, c, g, or t
  misc_feature (337)..(337): n is a, c, g, or t
  misc_feature (513)..(513): n is a, c, g, or t
  Coding DNA Sequence Number=SeqID_2715
tagcgaccgaccacgagtacatcagctaatgagtgagaccacatataacgttagtagttatcgacttcttatctttattgggtaaagtacgcggagcgatgagcgtaagtatcccaatcaatatagcgacttacaacccgatgcccgcgcacgcatcgatgatattttatggaagttaaatcggaagttgagtagtcgggcgtcgcgcattatactctcaatggtttattagtatgtcatatacgtgtggtctcagcgaggtgagctgacatngatgactatcgaagcgaaacgccctgcaaagcgacgctttgaactatttaggtgaagtacaccncgacgctcacaggacagacagcgagctatgcggagtgggacctcaggatgataccgattacgcgatttactgtctacgagtgtggcgcgtgcagatagtatttcgtgctcgtaagtcacaggagtatattactgtatactttatctgttgcaacaagaatgacatactcatgattntatagtctggtgtctgatcttctcacttacatcttcctctgtgtcgcat

SEQ ID NO: 12495 - DNA, 469 bp, Glycine max
  Coding DNA Sequence Number=SeqID_2716
atacagctttaattcgtttcgtgggagggacggataattaaaactagaaatcagtggcggggcgactgtatttttccgcggcgggacaaaaaaaacagaacctctaaaagacccataaatttgttttgtacgcagtacaaaaacactgacgtaacaattggttcagccaataattctatgatcgcatgacaaaccgaatgcttgtgagctaggcggacacgaggaagagatgagtaggatcgacgaaacgtccctagagcgacaagagagtgtcgaggtagagtgtgggtgggggcaagcgttcggaaaacgttcgggttggattccctctcccgagtacggttctctgtatgctcttgtcccagttcgtgggtcgacgcacattgttactggccgctaatttttcagcaaagaagtgcagtgaaagacgtcgttataaagaggatgatgaccctggattcgggccggc

SEQ ID NO: 12496 - DNA, 558 bp, Glycine max
  misc_feature (116)..(116): n is a, c, g, or t
  misc_feature (175)..(175): n is a, c, g, or t
  misc_feature (262)..(262): n is a, c, g, or t
  misc_feature (299)..(299): n is a, c, g, or t
  misc_feature (316)..(316): n is a, c, g, or t
  misc_feature (387)..(387): n is a, c, g, or t
  misc_feature (449)..(449): n is a, c, g, or t
  misc_feature (463)..(463): n is a, c, g, or t
  Coding DNA Sequence Number=SeqID_2717
atatcacggtgtagggtcttccgccgtactcgagcgacgaaagagggagtcgacatcgtcggacgatagcactcaatgcgattaagagaatcgctacgaaagccgatgctacgcgngagcacgacaacaatgctcacaataaggtttgcgcatacgtactggtcgccaataatgnatcccctacgcaatataccggtacaattcgaatagcagatatcaatcgccgatcacctacacacacgtgctaatgttctctctaccncactcgctatgtgctccgaaacgatagactatacacntcctccacttgtgtganacgatattgaccgtgccacgccgcgatacaatagaggacgtgtacgttacgcagcagacgtcttgaattangtaatgtaccgcgtgcttcatccatcgatcatgttcttcatagatagtgtaacattgccgcntgacgtacgtctcntcgtcgacgagacagcatatcgcacgcacacggtagacacatatatcgcgtagctgtacctctcatctccacaacgctgatgactatgcactcgc

SEQ ID NO: 12497 - DNA, 568 bp, Glycine max
  Coding DNA Sequence Number=SeqID_2718
acggagggtttctattgggccatcagccctctccctcgctgagtacccaatcatttcatacggagtaacactacggccaggtctgccgatccgcgccatcattcaagggccctcgccaatctccggcatctggaatacgtcattcggcgccctccaagcggcgaacattgctgagtctctgccggcgaatcccaactgcggcccacccagtgggttaatcgcgaacgtcttgccctactacccggcgagcaacatcactctgatcaccgtcggaaacgagattttgaccttagccgaccagggtcttaagtcgcagctcgtcccggcgatgcgaaatgtccaaaatgccctcggcgcggcctcgctcggcggcaagatcaaggtctccacagtgcactcgatggccgtgttgactcagtcggacccgccctcgtccgggttgttcaacccggcgctgcaagacacgctcaaacagctgctggcgctactcaaggacaacaaatcgccgttcacgatcaacccgtacccgtttttcgcttaccagagcgacccgagacctgaaacgctg

SEQ ID NO: 12498 - DNA, 530 bp, Glycine max
  misc_feature (442)..(442): n is a, c, g, or t
  misc_feature (463)..(464): n is a, c, g, or t
  Coding DNA Sequence Number=SeqID_2719
catagtgacagtcggctgtgctcgtgtgtatttcttctacgctcagtcatagctgctttcgtaactcgagccagaggcagagggctgggcaggtcggtggagtccgcacgcgtaaaacgatgccatcggagtcgtggcgaggatgagtgagaatgcggcaggagtagatatgaatatgaaggcggatcgtcgcgctagtgtcagacagagacggtagcgtgagaccgtctgcgtcgcgcggactggtcctgttacacaggtggagcgtgaagaatgcgaggtgcagctgtggcttgagcgcgggacgactatagatgttctgatgtgattgttctatcgctgctggtgtaggttgtgtcctgtacatctcaccgatgacaacaagcatcacgtgccggcggcatcctatcgcgccgtctctacgttggaaaaaacattatantgattacatcaaaatatttanntgcacacatatgttcctctctctgtgtatgttcactttctgttgttatatgagttgtgtcgtgcca

SEQ ID NO: 12499 - DNA, 435 bp, Glycine max
  Coding DNA Sequence Number=SeqID_2720
gatggactcagaaaccaaactgctcctgaaactggtatccccatccgcaagaagcttggttatggcttcggaaccgtcaccttcagaccccttgaagcaagaatgaacaaggacaccgaccttattggtaagatggatccttactgcaagttcaagattggtcttcacatcggaaagagctctgttgccaaggctcaaggcaagaaccccgtctggaatgatgccattaccatcaaatcaaagggagaagaattcgccaccatcaagctcaaggataaggatagacttaccttcaacgatagagtcggaaaggcaaagattcctttgaacaatgtttacaatggtgaaagagttcaataatggattcctttgcacaagggagataagatgactggtgaagttttggtcgaaatgcaattcgttcctaatgtctaa

SEQ ID NO: 12500 - DNA, 374 bp, Glycine max
  Coding DNA Sequence Number=SeqID_2721
aaactctagaggaccatcatatgctttaagtatacctcatgcgtctaccttagaggtgggtatgatctatcatgtatgaatgagttttggctatagtactagtagttatatatctagtttagttttgtatctagtgagattatatggtaggtcaaccttacacatgataaatggtggcattgtgtatagtgacactctccatgtccaagcttcttgataagtgttgctgatttgtagtatttgtaacatcccctttttttttaaaataaataaaaaatattttatttaaaaattaatagagtttttagaaactaaataaataagagaaaaatgtttttgttaattaaaataagggtttcacagtattagaaaat

SEQ ID NO: 12501 - DNA, 547 bp, Glycine max
  misc_feature (333)..(333): n is a, c, g, or t
  Coding DNA Sequence Number=SeqID_2722
attactcttagtcatgcctccatatcctgtctccttctttctactctcttcctcgtctcgtacaccttctccgtcccgtcccttcgccccgctgcttctcccgtccgctctgtatcgctcgctcacactcatccgccttgacatatcaaacaaagctaggcacgcataacaaggaaagtgggtaatataagagtgagttcagacaacgatgacgatatccgatggtaggcagactgagatccatgagccggacctcatcttccattcctattgtataaactccgacttcctcccctcttcctccagcgaaccggagcgtgcactgaacgtagnctataacaatagcagaggagaaccagaacaccccgcacagctcgccagccccccacgtcacgcgagcgtctatatacacagagatacggtctgcccctcgcgttacgtgccaagcctcgcctcgcggggggatgcgcttcttattgtttggagagacttccttctctttacctccccgctcttactctctcacccctctcacttcgagaaaaaa

SEQ ID NO: 12502 - DNA, 538 bp, Glycine max
  misc_feature (383)..(383): n is a, c, g, or t
  misc_feature (478)..(478): n is a, c, g, or t
  misc_feature (497)..(497): n is a, c, g, or t
  misc_feature (506)..(506): n is a, c, g, or t
  misc_feature (510)..(510): n is a, c, g, or t
  Coding DNA Sequence Number=SeqID_2723
ttgcgcatagcaacagcatcatggtgggtacatcatgaagaagagaagagagtaaaacaccccgcaccccccctctggtctaaaccgtgctgcgctgagtagactggcgtcgctgcactgtcgcgtgacatctctctataagtccacaggtgcggctaatatagaatgagcgacacagtagagtagcctcacgtctgtagactcctctcttctccatatctgcgttcgatcggagctatctacactatctctatatactacacacgccggtgacttccatatatgtgctctgaccgtacaggcgatgccgcacctcacctctcttactcactaagacatatatgagtattgagtattagcaagatgtatgctgcggacttatnccgctctccgacgggcgtctcgcatcatccgctcacacatcctctcctctgcgcgtgcatgctggcgggatctcgcacgtacctgttagctccancagcagatacgcagacgangactacagntctnatatagacacagccactatgagtcctgc

SEQ ID NO: 12503 - DNA, 598 bp, Glycine max
  misc_feature (81)..(81): n is a, c, g, or t
  misc_feature (171)..(171): n is a, c, g, or t
  misc_feature (173)..(173): n is a, c, g, or t
  misc_feature (187)..(187): n is a, c, g, or t
  misc_feature (202)..(202): n is a, c, g, or t
  misc_feature (223)..(223): n is a, c, g, or t
  misc_feature (281)..(281): n is a, c, g, or t
  misc_feature (294)..(294): n is a, c, g, or t
  misc_feature (307)..(307): n is a, c, g, or t
  misc_feature (330)..(330): n is a, c, g, or t
  misc_feature (332)..(332): n is a, c, g, or t
  misc_feature (342)..(342): n is a, c, g, or t
  misc_feature (348)..(348): n is a, c, g, or t
  misc_feature (353)..(353): n is a, c, g, or t
  misc_feature (364)..(364): n is a, c, g, or t
  misc_feature (372)..(372): n is a, c, g, or t
  misc_feature (447)..(447): n is a, c, g, or t
  misc_feature (452)..(452): n is a, c, g, or t
  misc_feature (490)..(492): n is a, c, g, or t
  misc_feature (497)..(497): n is a, c, g, or t
  misc_feature (541)..(541): n is a, c, g, or t
  misc_feature (564)..(564): n is a, c, g, or t
  Coding DNA Sequence Number=SeqID_2724
acgggcacgaatggaacacacatcacactctatagtcgcactgctgctctgcactctctctctctaccaaattagatcatngtcatacttacgcagacttgcaatgacacgtgataacaagtcagactatagtctacttcacacttggctgcctcgctagtacactacgantnatactacctgtatntaaacagcatagcanctacaacattgagcacgaatncggtgctacgtgatcaagtgcacgcacccgagctcgcacactactatacagtgatgcntgagggtgctganatcgctgctacantggatcattcgctagcaaatgcntncgtcgatagnagtganagtgntctgatatganaggtacantgtgtgcatcgtggcgtgacactcgcacagcccacatgctcactgcacatcgactgcacgatggcggataggggngtcgnactatatagatatcacatatgtgggatatgtgcctgtnnntgcancatctctgttaatatatatgacacacgatgacagctagaggaanacctggtagacacatcgttgctnacatcagccaaagacacactcacgggcatgacag

SEQ ID NO: 12504 - DNA, 366 bp, Glycine max
  Coding DNA Sequence Number=SeqID_2725
cgagctgctacaggctagcttcactcccgggactgagctgattcttattgccggactatttaaaggaaagagggtcctcttttacaatcagttcccttctgggttgctctttgtctctggatctttataaattaatggagttcctttgagacgtgtgaatcagtcctatgtcattggcacttccatcccaagctaaatgtcctctgcatgataattgtcgaacagtgctgatgacaaatactttacaaaggaagcccagacgacgattattggagagggcgaatactatgacgcagagaaggacgaaaagagtgtgttgccccatcagaagagagatgaccagtatactgatgactctgcgttgat

SEQ ID NO: 12505 - DNA, 385 bp, Glycine max
  Coding DNA Sequence Number=SeqID_2726
gtgttgacgatgaacctgatcctcttcttgaggaagttaaaaaaattagagaatcaagggaacaaaaccagaaggaaagaaaggaacgtgatgacaggattatagagcttgataaaaaaatagacttggagcaagatcaacatgacaagataataatgacaacagacgctagcacaatggatgaacaagcacaacagtactttaggttgctgaaagatgaaattttagttcgccggtttgggcggcaatcgtagcttttacgcgaagactttctagaaataaggcattgttatgcattttttactgcatactgtttagcatatttcattgtgtaagaacaatttcaatttgtgacagaaataaagtcttagtttgctgtgtgaaa

SEQ ID NO: 12506 - DNA, 513 bp, Glycine max
  Coding DNA Sequence Number=SeqID_2727
catcacacacaacatcttcatttcaaggcctttttttttttttttttaataattactcatcgcttctgaaacaacgaatgatccatggccccttcattcgacacaagtactcatacggtatgcgtgatggatgctttgctccacttgcgctttatactgttacaaagactcctccaaaggggctacaccgatgatgcctccttttattgatctggagaataaaaccttctcactggactttgattttatcccccttagcttatggttcttacttctcccccttttgattaccatgcctaatcaaacctctcctacgaccttctggttagttatactaattctaaccttccttggtccatccaaattatgatgaatacatatgcgacgtggaagtatgggctgcgcacaacgtgctggaagcctgtcctcagacagaaaccttggataaaggggtcttcacttcctcagctaccccagctgtttggagagaagaatgcgcagaggaactcattt

SEQ ID NO: 12507 - DNA, 271 bp, Glycine max
  Coding DNA Sequence Number=SeqID_2728
gatggtatgtttataccttcctgtcttcttcatctccaggttgtacactgattggaaaacatgccaaaatattgcacgtagaactcatgctatgttactcctgttaatatgtattatatatattttttattatcaaactgcttcttttctggattttattcggccaaggactacggcgactaagactcgatgaacccgaagccgttaaccctccggcacgctgtgatccacgacgagcccttatggatcaccttccccagagacatcgtga

SEQ ID NO: 12508 - DNA, 558 bp, Glycine max
  misc_feature (38)..(38): n is a, c, g, or t
  misc_feature (116)..(116): n is a, c, g, or t
  misc_feature (159)..(159): n is a, c, g, or t
  misc_feature (242)..(242): n is a, c, g, or t
  misc_feature (249)..(249): n is a, c, g, or t
  misc_feature (271)..(271): n is a, c, g, or t
  misc_feature (387)..(387): n is a, c, g, or t
  misc_feature (391)..(391): n is a, c, g, or t
  misc_feature (401)..(401): n is a, c, g, or t
  misc_feature (403)..(403): n is a, c, g, or t
  misc_feature (431)..(431): n is a, c, g, or t
  misc_feature (497)..(497): n is a, c, g, or t
  misc_feature (505)..(505): n is a, c, g, or t
  misc_feature (525)..(525): n is a, c, g, or t
  Coding DNA Sequence Number=SeqID_2729
caccgtcatatttcgttaccactagttgtcgctccacnacacataccgacaccatcagtagacctctaataaataagttactactacgtacctttgcgtccgcaccgtccgcaccncaactgctcacatagcacacgactatcggcgctcgagatatgncccgaccaacactacgtctgtctgctgttaccacatactgccgcacaccaaccgcgcgcaaaacaccagcctcctctgtctanatctatngcaagactacgcatgtcatcanctgaacactcactatatactctagacactctacgcggcgatctactagacgcacacacgatcacgctccgatttactccgcgcagacggcgtctaataaagaacgcgacgatcgcncgcngttccacttncnataacatgtagatgtctgctcctagacngatgtcgatctcactgcacacactgatagaacacgtcttccttccactattatcacactgcgcgcnaagcgcangtacacgttcgatctacacncgaataccaaacttcactcccaacgtgtatcat

SEQ ID NO: 12509 - DNA, 562 bp, Glycine max
  misc_feature (292)..(292): n is a, c, g, or t
  Coding DNA Sequence Number=SeqID_2730
gtttcagcgtgctcagagatgcagtacatctatctaccgtatgggtgatgtgtttatcagggtggtggagtgatgagacttatagagagacaaaaagcccctctcactatgtgtctgtgtaacgttatactatctaacgtcaggaagcaggaacgatgatctgtgcagttgaatcttatgttactcagccggagtcaccatagatactatatgtggtggaccgataatttagatggtggagagtccatccatgccccgacacacacatcgatgaggagtatagtgtgcggtnggagagcgtggctcgtcgtgaccgagcgatgacctgttttagattcgtgtttatgatatgctgtacgagcactataggaccattgataagactgaatgacaggtaagagaaatatgaataaatatagtagttgttaatagagtagtgaggagacaatccgcagacacattactactatatagatcacatccttatcactctactctatgcatatattgtcacatattttcgctgtgtctgaacaaatttgctattctgctgcggagacac

SEQ ID NO: 12510 - DNA, 352 bp, Glycine max
  Coding DNA Sequence Number=SeqID_2731
aaccccataataaactatgctcaagaaaaagagggaataaacaaatcctaacaagcggctgcttgtgaagccggtgaagaggcacatgacggggaagagcaagggattgagaattgcatgccaagccaccatcatttccgctgatagagttcctgacatgggcaaaagacagatcatgaatcttctccttcttggtgccatttcactccccactgctggaatgcttatgccctacacctactaaggtgtccctccaggttcatgttcttcagctggcggtcctgttgccaaagatgccgccggaaatgatgtgattgtcaagaattggcgtagggcgcatggacctggtgac

SEQ ID NO: 12511 - DNA, 494 bp, Glycine max
  Coding DNA Sequence Number=SeqID_2732
gtacttatggatactagcatcatcagtattactacacactactagaagcgtcccatagcttcactatgctcctttttctcgtactcttaacttgaattgttcaggaagaatgtgatttaactgctgataatcatgttattcatcagcatatatgaaccaaatccttgccaagagctctctcgtacggataatcttggaagtaatgaattatgtgaccaatgcctcaatcaactgtagtgtaacaattaagacaatggactgcacatcaagggttttcccattaatggacaagcactggagttttcttgtatactgggttgtattcaagaagttgaagactcttattgtagcggtcttcttctatgttttgatatggtatatcctttaactttaaggtccataccaccctcaaagtgtagggactataccaaaatccatgaagcttcacctctgcctataccaatatccaagaagttacacttcagcctcactga

SEQ ID NO: 12512 - DNA, 373 bp, Glycine max
  misc_feature (187)..(187): n is a, c, g, or t
  misc_feature (271)..(271): n is a, c, g, or t
  misc_feature (303)..(303): n is a, c, g, or t
  Coding DNA Sequence Number=SeqID_2733
acaagcgtatcactgaacttctccagggttggcaaggcaaccgcgcccctgaatgtggccaaaccaaaagtggggaccccacaagaagggtaaaaagaaaaaaaaagcaagtcccatgtctcccccaacaagaaatttcgtttgaccttcgaccccccaaaaagagaaaaaacggctttccccccgntcccgagagtagaaggggaagatttctctgcttcgggggccgcaccggctcttattggctcggggagcccctctcttttagatncacggcaaattggtttaaaccctcccggctcnacaaatatatacgcttctttttaaaaaaccccccgaccgttttgcgcggatgctctgtgggcgcacactc

SEQ ID NO: 12513 - DNA, 538 bp, Glycine max
  misc_feature (334)..(334): n is a, c, g, or t
  misc_feature (401)..(401): n is a, c, g, or t
  misc_feature (491)..(491): n is a, c, g, or t
  Coding DNA Sequence Number=SeqID_2734
cctccaaccacctaatcataagacaccctccccctaccacttctcatccacaacacctatctactcctccaccacttcctctcacaaccacccactcctctcccctccctcccccacacaccacacacactctccattcacccaccatataataaccatccaaacataaacatacactctcccctccaacaatcaccaccccacataatctatcccacaccaaaccctccctcactctcacacgccaccacatacactacctcacccccgcagcacctcacaccaaccttttattctatctcattctcctccacttcctcactctcatctcacnactcgatatactcccttccctctgccccttccacaacctacaccattcacacaccctcaccacccancctattcaaatatatcactacaatcttctcgactacctcccccttctctctccgctccttctctcccaacacaccacccctagccctccntccccccaccacacgcatcacactatcttctcctcatatcccacaaa

SEQ ID NO: 12514 - DNA, 160 bp, Glycine max
  Coding DNA Sequence Number=SeqID_2735
ttttttcaacctggtacacacaaatacttccaatgccgtgttacaaagccgcctggttcattcaagtcaataataatacggttacatgttggcagccacaactttgaacaaaataccccgcatcacatcgatgctggcagatttggcgacatctaaacgc

SEQ ID NO: 12515 - DNA, 358 bp, Glycine max
  Coding DNA Sequence Number=SeqID_2736
gtggcctcgcattgtcggcatggctgccggcatgggctcaacccatttcgtccgggattgccaagccactgccaacggtcagcgggaacgatatcacgctcaagatcgcgcatcagatgatgatgatcgacggccgacaaagccatgccatcggcatcaatggcactgtgcctgcgcccctcatccgtctgcgtcagggccaaaacgtccgcctgtcggtgatcaacgatctcgaggaagacagctcgatccactggcacggcctgcttttgccgttccagttcgacggcgtgcccggcatcagcttccccggcatcaagcccaagtcgacctttgtctatgagttccccatcgtcca

SEQ ID NO: 12516 - DNA, 562 bp, Glycine max
  misc_feature (160)..(160): n is a, c, g, or t
  misc_feature (234)..(234): n is a, c, g, or t
  misc_feature (250)..(250): n is a, c, g, or t
  misc_feature (331)..(331): n is a, c, g, or t
  misc_feature (355)..(355): n is a, c, g, or t
  misc_feature (530)..(530): n is a, c, g, or t
  Coding DNA Sequence Number=SeqID_2737
aaactatatatacctacacccggcgcggagatcaatacagcgaggactaacgcgcgataatagtcggaagacgggcaacggtctacccgtaactcgctctccgtggtgttgcgctgcgagtccgaacccgcgctatacatcaacacttactataatctcntctatctcatctatatcgcgcacaggggtggccgcggctgtcagtgctcggcggagggttaagtgcggcgcgancaggggtacagctggngaagggatatcgcgaacactgccactacacacgatcatcttctcttgtatctcttccaacctggcagtcgacgctctcatncgacttaactctacgcgcaaggcngctgggtgcgagagtgatactctaagaactacgttcttcggcgcgagctagctgtaggcataagaggataagtgagtgttccatggcaatgctcccgcggcgggactctcgaggaggtttctcgaaagagatgctcatgacgccgccccggcgctgccggcggcgaggaggcttnttcacaatatatatagggcacgcacccgcaga

SEQ ID NO: 12517 - DNA, 536 bp, Glycine max
  misc_feature (337)..(337): n is a, c, g, or t
  misc_feature (368)..(368): n is a, c, g, or t
  Coding DNA Sequence Number=SeqID_2738
gactacgcactcttgctgaggccatctttgtatcgctcatgtcctatcctttctccgcgggatggtcactatacatacccatacaccccgcgtcgccctaatcataccgacacgtatttgctgcggcccttccttgtcattatccaccctcctctctcgctgcgtatttcctagtatcctcgcccgcgttagataatactacattacctaatttctcaccaccccgcgcgatccctaacgctgatgtggggattctctacaccgcacccgcttgccaacatatcacgactttcctgtccatttactatgatattatccgccgcacttcatcagaccnttgagcgcatttcgcctgctcatctatcacntcgctcacgcgaaccgacgccgcctacgatattatttatttattcacaggtagccttgccggaaagagatatatcataccgttttattgcgcgtgtgaactcacgccccaccgacacgacggaagaataatgtatcgtttcatagactgatattgacacgccctacat

SEQ ID NO: 12518 - DNA, 458 bp, Glycine max
  Coding DNA Sequence Number=SeqID_2739
tcgagatcattgtgcttaccgcccgcccgaacgacgcgctggctcgtagtagcacggacgtagtcccgcttctccttgcccaggaaaacgtccttgaactgcaccatccctgcgtttgtgaacagaagggtggggtcattgccggggacgagcgagctggaggggacgaccgcatggccgtgctcacggaaaaactccaggaaggcgcggcggatatccgccgcactcaggtacgagggtttgttcaagtttgtcagtccaggtcgaaatcagcgccaagggccaaacggatatgatccgatgaaaagccccggtactgcaaaaagcgcgcttggcgcgccttctccggccactccgcgggcggttcggagccaaatttccggttccgcaccgttccggccagggcccgccaatccggcccacctgccagggcagcctgaatcaggtcggccggcagc

SEQ ID NO: 12519 - DNA, 517 bp, Glycine max
  misc_feature (286)..(286): n is a, c, g, or t
  Coding DNA Sequence Number=SeqID_2740
catatatctacaatgcgtggtcggggtgtgtggctataactcggcgtacactacttgtgtttgtgcgaccaatacattaaggtgtttgttaataagatcactatgcgcgttgctctcccggacgggccggtagctctaaatactcgctcggcggtgtccttgtctctgccaccacccctatcataacattgggcctggtgcgccggcagtacgcacaacgcgtgcacggctggtttagctcacatacagtatcccacctattatcgtaccaatctatctctttggngggttcatcgccgaaacccgtaccaaaccaaaattgtccctgtcttgggggggcatcatatatggcgcgggcggggccaaatacgctgctgagccgctgcatatatattattatagcctgtgtgctactgtcgcgtctggcctctcacacataacaaaccgcgccgtagcccccaatttctggcgagtgacccgcgcggatttgtcaacaaccgtgttgatttctgagaaa

SEQ ID NO: 12520 - DNA, 316 bp, Glycine max
  Coding DNA Sequence Number=SeqID_2741
aacccttttgcttggcagttatcattcaaagttgaggcttctgaagttgcgcattgatggctacaaatggagtacaccatttagtgtaagctatgaacgtgtaatgcgcattaacttgaaaaaagatgttggagatgaacctatgcaaataagggtagcactaagaagtggtgccaagaaatcaccctttgaagttgttttccgtccagattcactatcaagtccttacaggtttagttctcttactttctcccctgtgagccatttgtttttctacattgaggaagggaaatataggaaatcacctgaatccgtg

SEQ ID NO: 12521 - DNA, 579 bp, Glycine max
  misc_feature (28)..(28): n is a, c, g, or t
  misc_feature (61)..(61): n is a, c, g, or t
  misc_feature (80)..(80): n is a, c, g, or t
  misc_feature (158)..(158): n is a, c, g, or t
  misc_feature (162)..(162): n is a, c, g, or t
  misc_feature (175)..(175): n is a, c, g, or t
  misc_feature (208)..(208): n is a, c, g, or t
  misc_feature (258)..(258): n is a, c, g, or t
  misc_feature (260)..(260): n is a, c, g, or t
  misc_feature (264)..(264): n is a, c, g, or t
  misc_feature (267)..(267): n is a, c, g, or t
  misc_feature (269)..(269): n is a, c, g, or t
  misc_feature (296)..(296): n is a, c, g, or t
  misc_feature (310)..(310): n is a, c, g, or t
  misc_feature (317)..(317): n is a, c, g, or t
  misc_feature (328)..(328): n is a, c, g, or t
  misc_feature (351)..(351): n is a, c, g, or t
  misc_feature (354)..(354): n is a, c, g, or t
  misc_feature (359)..(359): n is a, c, g, or t
  misc_feature (367)..(367): n is a, c, g, or t
  misc_feature (384)..(384): n is a, c, g, or t
  misc_feature (408)..(408): n is a, c, g, or t
  misc_feature (431)..(431): n is a, c, g, or t
  misc_feature (487)..(487): n is a, c, g, or t
  misc_feature (518)..(518): n is a, c, g, or t
  misc_feature (524)..(524): n is a, c, g, or t
  misc_feature (547)..(547): n is a, c, g, or t
  Coding DNA Sequence Number=SeqID_2742
cacgacgagtggtcgatgcgatgtatgnaagtagatgcgcgacagacagatgcgacgtcgncccgtgctagcatcgatanatcctactctcacgtacgctgctgtagtccactcaatatatgtcaacatgagtagttgggactgcatctatgcgctanctgntctcgacgtgatngtctgttcctatgtgtatctgatatcgcgatcntacacagatgtgtgagcacgtgcactagtggcgtgctgtccacgaggcantntgtngtncntctgctgtttcagatgcgcgtctactncgaatactgccgcnctgtcgntcatgactacnatgtgatgcgactaacatctacnacncactngtcgttanatgttgctaattactantcggtgattgtaggtagcagagtngtcgtccgacgacatcagtacgnctattggacagaactactctacgagcagtagacgtacgacagtctgacgtctcatncttactcatcacgtcgcagacacgatggcgnactacngatagtcagcatcaagagcagcntctacaaattgcggacaagtatgacgtagata

SEQ ID NO: 12522 - DNA, 495 bp, Glycine max
  Coding DNA Sequence Number=SeqID_2743
gagtacatgatgcagctgaagctgtcaaagaagccatacatcctcatgaaccaacacttggagagagaatcatggaaaagatcaatgatgtgactcatagcattaagaaggcagtaggtcttgaagctgcagaatcgattggtgaaaaagttctcgagaaaggtgaacaaaaagctgcatcaaaagccgcgaaagaaggtctagagaaagtagttgaaaaggctagtggaatgactcttgagaccgttgccggcccaattggagcaaagatagctgaaaaggttgctggcaaagcagcttcaaaaggtatcaaagaagctcaagaaaagggtcttaatgatgctgttggagatcttgctgaagagataaaagaaaaagcccaacatttaggtgagaagattcagaaacacgcccatcataagcctagcgctgctgatgatgatctttaaggtagaaacagcaggttcataatatgacgcatgtttagctctatag

SEQ ID NO: 12523 - DNA, 528 bp, Glycine max
  misc_feature (209)..(209): n is a, c, g, or t
  misc_feature (397)..(397): n is a, c, g, or t
  Coding DNA Sequence Number=SeqID_2744
aaagagtgcacaacattatcgcggggggtgtggggaaggggactcctccccgacgcgaggtgttcttcctttgtgcaattgtgcgcgatggctggggggggggtgttgatgcgcggggtgacccaccgtacgtgcgggggaatgtcttttcagtaaacgagacacccacacggttttcatttcgggggggggggtgtggccgcccacanggtatctttccttttttttaaccccccccgccttgtggggccacaatcccaaaacgggaataaaaattataaggggggggccctcagggggcggccagaatttgggggggggggggaagtaactaggtagtcttccttaaaggcttggcgacggaagatttagggtggctcggggcgggtaatccccnccgagcgacgcgaagcatttcccccttggcaccatttccattgcagacggcaaccgccggcgcctatacctacaccttcacctacaccaactccaccacgcaacactgaaggcagcttttgttgtactgag

SEQ ID NO: 12524 - DNA, 510 bp, Glycine max
  misc_feature (98)..(98): n is a, c, g, or t
  misc_feature (188)..(188): n is a, c, g, or t
  misc_feature (336)..(336): n is a, c, g, or t
  Coding DNA Sequence Number=SeqID_2745
ttcggtctaatatgtcgcgttcgcatctcatatgtcttccgattgtgcacccgattgcccgtgcctctagcgtccgacaaattgcaatacatactaanatatcattttctcgctttcgccgcgccgtgcgaggtctctacgtcgcctacgctgcgcctccctcgtgtgcccacgcactcctgattcgnccatcgtcgtctcagctcatcttcgtggatggcgcacgtgctcgacctccgcttctcttcctttttactctgtcattccgttgcactctcgtcttgggtggcctgtcgcctcgcgtccttcctctcgtcgataatgcttcgacatgtnacttttcctgacctcggcgtgtaccgttgtcctttagggcgatgaatataaacactcctgttctacgctgtataattcggacttatttgcgggttgctatcgcgtgtcctccattcgccctctgcgcatataatgttttctcctagcacgccctccacgcgaatgggtgagaat

SEQ ID NO: 12525 - DNA, 559 bp, Glycine max
  misc_feature (45)..(45): n is a, c, g, or t
  misc_feature (87)..(87): n is a, c, g, or t
  misc_feature (466)..(467): n is a, c, g, or t
  misc_feature (522)..(522): n is a, c, g, or t
  misc_feature (528)..(528): n is a, c, g, or t
  Coding DNA Sequence Number=SeqID_2746
aaatgtgggtggtctatgatatatataaataagtgtggagaggtnatgcgatatatcattgtaatacatatatacaaaatcgcgatntaaacgagttacgtctcagagaggcgcgtgatcgaatagttttgtgttagtggtgtctgagcaatagtcggccagccggacatggacttctctatccgcccacaggcgggcggtgtgtgtgttgcgtacggacacgcgtgtaatatagtaatcgaaagacacgagtgggtataatattgagacctccaatatgcaactgttatgtctgtggaccaatagtgagagtaagaggatacataagaagcggtggtttcgggactttcgtcggagtcgctatcatattagattgttttatatgaatagtagagagaaataataccgttcttaatagaagagatataataataacacaatatctcgtgacaggtgatggagggtnngggcaggggtacagagggcggtcgccgggcgcgtagccgcgtaaatctcacatancaccanctacacactaacgcaccagccgagaacaata

SEQ ID NO: 12526 - DNA, 545 bp, Glycine max
  misc_feature (114)..(114): n is a, c, g, or t
  Coding DNA Sequence Number=SeqID_2747
tactctgaccatatgtacccacggttatcgatgctagaagctacgatgtgactgcgtgtgcgtctctgtacaccgaccactgcgcgctagcaacgctcatgtcgcctctccgcnctgtatgcgcgtggaggtgctgggcacgcgacgtctcgtgcactactatgacacgtgtggagtaggctgaccatcagaacatcatcctgttcgcgattcatcacgatttcctcgctcgcgcctgcgtccagctgtatcgtccgctgttgctgtgttgcacaactcgcacgcacgtcggctcgggtgcatgtcatatcactatctcgcatagtcatacacattatgtatcgcaatcaaatcataattcagaagtcgctgtgagagcgtcgacctgcgtgtgcgcgtgagcggtcgcgcgcgtcacgcggccgcgctggcgccatgctactactacgtcgacacaatacaacgaaagagagtagaaagagatatgtgtaataatatggacatataatatagcaagtgagactgtgaactaactgtctcaacta

SEQ ID NO: 12527 - DNA, 418 bp, Glycine max
  misc_feature (136)..(136): n is a, c, g, or t
  misc_feature (163)..(163): n is a, c, g, or t
  misc_feature (174)..(174): n is a, c, g, or t
  misc_feature (189)..(189): n is a, c, g, or t
  Coding DNA Sequence Number=SeqID_2748
gtcacttcgtgtatatttcttgctttgtttcgcttttcgtgttgtcacgtctccttgtatggtggtggtggtgttggtgtatgcagtgattagtgatgtatactttgagtagatgtgagtgtgggagtgggagagngggtgtgggtgtgtttgtttggttganagatatatttnttatattttgttatnttactactaatattgttcttatgtcgattagtgttaaggtgtctagtacatacataatgacataatgctagtattactatgagagagatgtgtatgatactagtgattatagattcatcagacagagatattcgacaataggtataatctacagttagatgtagctaggggatgagagatgatgaatgatagaccgaaagttatgtcatatgttagattcgacgagttt

SEQ ID NO: 12528 - DNA, 309 bp, Glycine max
  Coding DNA Sequence Number=SeqID_2749
atgccatactgggaccaacttgacctttctgactacctaaaaaagcgatacttgcccatccctgagtttgttgctactacgcattatcaatgtaatccctattctgtttagatcttccagtgctcaatgttcttttaattgtcatatcttagcggatcaaatacaactagcgttacagactagtacttttagagctctactgtctgactgatgctataatcgctgaatcttcgatcaagaatgtgtgactctggttaagagatcgagatgactccaggatattaagtgacatgcgcacatttagacaaa

SEQ ID NO: 12529 - DNA, 576 bp, Glycine max
  misc_feature (42)..(42): n is a, c, g, or t
  misc_feature (366)..(366): n is a, c, g, or t
  misc_feature (405)..(405): n is a, c, g, or t
  Coding DNA Sequence Number=SeqID_2750
ttgctttgacgtatgtgtgccgcacggcgccacaagacgccncctatgttctcacgcatcttcacatatcatgtgtactttatactatcatatctcttctctctctacctcattcatctttatatctatgctgtataatcgtttacactatgtcctacacacgatgcacacatccgactgctcgcaattactattatgttgttcgctgagcacgcgactcactgtgcggagtgatcacaacattcaacacatttacttaacgatggactcttatggtatcattatagtgtaacaacgtaacggatgcatataatatctatagtgatgtgatatcatacacacaagtactacaatgaactaataganccagattgatattaagaaatgttatatatatttattacnaggcggttgctctctcactcttacacacccgcccgtgcactctatagaatttgatgttttccgtatgctcttatcttatctatacgctgttgtcttctctgttacgtgcactctctatcacctcgacggacacttcttacgatcatatggtacgatcatacttctctgtga

SEQ ID NO: 12530 - DNA, 421 bp, Glycine max
  Coding DNA Sequence Number=SeqID_2751
tgctatccggtgatcttgatgctgaagaatctgagtatttatctctacttctatccctctttttcttatgtctatcttctctatcatcatgtcttcttggtgatctcgatcttgaatatcttttctttcttctctcataacttctatcgcgacttcttctatcccttctatctcttgaatctcttctgtctctatatcttctcgaatcacgataatctctatctctattgtctctacttcttgaatgtcttctagagggatcatcacgacgtggactgacctttttcgactctttaagctcttgttctctctgtagttttctctgattctcaaactcttgttcactatcaatgatatactctttattcaatttatttgttgtgtaagatctatcaagtatctccttcacatgtttcatttc

SEQ ID NO: 12531 - DNA, 119 bp, Glycine max
  Coding DNA Sequence Number=SeqID_2752
atcataactcagatttcctgcttgatgaagcctctcaaaggtttaacacttgccacacccgttgcggaatgaacacttaggaactactacaaggatctttatcctgatgtttttcaaaa

SEQ ID NO: 12532 - DNA, 488 bp, Glycine max
  misc_feature (45)..(46): n is a, c, g, or t
  misc_feature (55)..(55): n is a, c, g, or t
  misc_feature (130)..(130): n is a, c, g, or t
  misc_feature (154)..(154): n is a, c, g, or t
  misc_feature (157)..(157): n is a, c, g, or t
  misc_feature (174)..(174): n is a, c, g, or t
  misc_feature (183)..(183): n is a, c, g, or t
  misc_feature (194)..(194): n is a, c, g, or t
  misc_feature (196)..(196): n is a, c, g, or t
  misc_feature (198)..(199): n is a, c, g, or t
  misc_feature (221)..(221): n is a, c, g, or t
  misc_feature (223)..(223): n is a, c, g, or t
  misc_feature (259)..(259): n is a, c, g, or t
  misc_feature (267)..(269): n is a, c, g, or t
  misc_feature (277)..(277): n is a, c, g, or t
  misc_feature (281)..(283): n is a, c, g, or t
  misc_feature (294)..(294): n is a, c, g, or t
  misc_feature (336)..(337): n is a, c, g, or t
  misc_feature (340)..(342): n is a, c, g, or t
  misc_feature (356)..(358): n is a, c, g, or t
  misc_feature (377)..(377): n is a, c, g, or t
  misc_feature (380)..(380): n is a, c, g, or t
  misc_feature (390)..(391): n is a, c, g, or t
  misc_feature (408)..(408): n is a, c, g, or t
  misc_feature (410)..(410): n is a, c, g, or t
  misc_feature (432)..(433): n is a, c, g, or t
  Coding DNA Sequence Number=SeqID_2753
gtcacatatcgtaccctcgatgctgctgtatctcgttgactctgnntgagtgatncagtaaaatagatcactgctatatcactacctcgtacaagtcatgcgccgctgtcacaggactgagagtatagtngcattgtagactagacatgatggnganattacaatgatcatcgntcgtacgtntcattcgaaantntnnttacaccatcagcgagcatgangngtacgtatgacgtcgcgacatcacagcactcagtgncgcatgcnnnttgtgtgngggnnnttagagatganacacagagctgcgacgcgcgacgactacgctgacacaccgtnngcnnnacactagtgtgagnnngagactattgacacgagcnatntcacaacatnntatcactagcatgacantnctgcgcatcatacgacgtgctnnacggtgctgcgaatcgcttatgacgtcgtcgcgtgctggtacgatgagtacgtct

SEQ ID NO: 12533 - DNA, 491 bp, Glycine max
  misc_feature (223)..(223): n is a, c, g, or t
  Coding DNA Sequence Number=SeqID_2754
agaggtattgtttcgtgtcacgcccccgacgatactattcagagattggatgtccgaggaatttacaccatgcgtacaacaacgttgagatgcaatgcgtgagctgggactaatatgtatatatatgagcgctagatcgctgaccggtgcacgatctacacgcacgccacagaattaatcatatattttaacatatatcttagccgcgacaaatagtacacgnatgactgagtacaatagacactgtatcgctataaacacttatgcgctacgcactagacttcttatgtgtatgtatcatattgcagcacgctgcagcacgcccagcgatatcgtgacgcgagatttacaagtgagatgtatagcgagcgtcacatgcgtctaggcgttgatatgcgtcggatactagcatcttcagacacctctcttagtacttgtaatgaatgcatagaggtccgattctatcaatactctctctatctgacgacgag

SEQ ID NO: 12534 - DNA, 594 bp, Glycine max
  misc_feature (89)..(89): n is a, c, g, or t
  misc_feature (117)..(117): n is a, c, g, or t
  misc_feature (152)..(152): n is a, c, g, or t
  misc_feature (193)..(193): n is a, c, g, or t
  misc_feature (202)..(202): n is a, c, g, or t
  misc_feature (323)..(323): n is a, c, g, or t
  misc_feature (523)..(524): n is a, c, g, or t
  misc_feature (565)..(565): n is a, c, g, or t
  Coding DNA Sequence Number=SeqID_2755
cacgaagtgcgttgtaggctgcgtaagtatctatacgtaactgactggcatagatcagctatctggatactgtctctatggttgagatnagcgattagaggcatacagatataatanaatagcagaatgagcagaggatgtgaagaagcgangttgaggaagatcatcgtgcagcggatgcggtgtagcgtgncgggacagntgagtgttcagcatatcgataaggagatgagaacagtaaattctggtcgtacctcgccagcccgctcctgaattggagatatgttgataagattgatgagagatctcggatatgcgtgagntagtgcagatgtagcccatattcttactcgttatacctgcttgtacttgtctggtgcgtacgctagtatggaggtatatgtgcaatatgtagtgagtctatgtgagaatagggtgatatatgtggtgctatgagtactgtgtgtagttagttaatagtatctcttcgggtatgcgtccaggctcgtccactctctctgtnntactatgtgctttggtttagattctgtatgtctgtcgtgtnttctcattcgctagtggtgtggttcgcat

SEQ ID NO: 12535 - DNA, 560 bp, Glycine max
  misc_feature (118)..(118): n is a, c, g, or t
  misc_feature (130)..(130): n is a, c, g, or t
  misc_feature (171)..(171): n is a, c, g, or t
  misc_feature (192)..(192): n is a, c, g, or t
  misc_feature (225)..(225): n is a, c, g, or t
  misc_feature (246)..(247): n is a, c, g, or t
  misc_feature (313)..(313): n is a, c, g, or t
  Coding DNA Sequence Number=SeqID_2756
gagactctatcctaggaatgaattcaagagttttctttgggcccaaagtaggagagactttgacactcgaagggtaatagaacccttcctacgtttagtctaatgtttctcgtgaaanaacgtccagggnttccaacctatcacaagaaagagctggtgccatgaatgcancttgttcgagtctcagcagtnccttactttaatggacctttcttattgaatctntgattgtgatcaactacatannaacaacagcaaaggccttgagggaaagcttatgtgctttatgaaatggatcccaaccttgggaaancatgtttgcttatgtccagtttccgcagaaggtttgacgagtattgataggaatgatcgatatgccaatcgcaatacagttttctttgatataaacttgagaggtttgggagggcatccagggcccggttaaggggggtactggatgtgtcttcaacaggacagctttatatggttatgaacctgctcttaaacccaatcataaaaagcctgagttgttatcatcaatctatcatgcaaaaaggaac

SEQ ID NO: 12536 - DNA, 331 bp, Glycine max
  Coding DNA Sequence Number=SeqID_2757
aaattactatttgcgggcggacactggcagtaaaattatgcgggtgaattgcgttcaatgctaagaatgccccaccagaaccaaccttggtatggaccttacactctaccacataaacgactcctcctcagggaaatttgttccctgctatccagaatattgcgaagagatctatgtttgtctgcagacccgatacactgctaatattacctgtccatatctggagatatatggagatgggagctctactgctggatactctctagaggatctctcactttatgaacaagtgtctgtcgaccctacaactgaatcactcaatggacgtatt

SEQ ID NO: 12537 - DNA, 140 bp, Glycine max
  Coding DNA Sequence Number=SeqID_2758
atcaagggtggaccagacgccacaccgacgcaaaccctcaccactctcccctccgtctcgcaccattccctcgccggcggcgccgcctcgccgacgccgccatgctccgcctccggcgcagcgtgctcgccaagctcctc

SEQ ID NO: 12538 - DNA, 590 bp, Glycine max
  misc_feature (244)..(244): n is a, c, g, or t
  misc_feature (357)..(357): n is a, c, g, or t
  misc_feature (409)..(409): n is a, c, g, or t
  misc_feature (462)..(462): n is a, c, g, or t
  misc_feature (479)..(479): n is a, c, g, or t
  misc_feature (487)..(487): n is a, c, g, or t
  misc_feature (529)..(529): n is a, c, g, or t
  misc_feature (560)..(560): n is a, c, g, or t
  Coding DNA Sequence Number=SeqID_2759
catgttttattgtacactgtgcaacaacaagaacacgcgcgggccacagtctcggtcacttcagcggccatcgaccgcactgctgatatctacgaccttcaagcgtcacacccgaatgtattcaatatagcttgagtgattctgtgtgggcactcggcttagcagtccgtacgcaccgttacaacaatttgcagagactcacatcagtctctgataatccgactgtatactcgacgctgtgtgncgtgtgatgaatacggacctgtcagtctctctagtgcctctgcggaagatacaggacgaagcgctgtgccgcatacgggactccggcacgccgcccataacatttcactccgntgtctgcagacgctgaatcctgacgctgcagcacgacccacactgcagcccnagatattattgatacagcgctcatgagagattgcccgactaatttagagatcngtgtcgaagctctccanacatatantaggcaactagcgcgcgctgcacgtctcaacctgcagtgtgngtgtacgcgcgtagtcgcgtgcgctccgatntacacgatccgtctcgtagctactgtcgaa

SEQ ID NO: 12539 - DNA, 461 bp, Glycine max
  misc_feature (28)..(28): n is a, c, g, or t
  misc_feature (176)..(176): n is a, c, g, or t
  misc_feature (219)..(219): n is a, c, g, or t
  misc_feature (239)..(239): n is a, c, g, or t
  misc_feature (247)..(247): n is a, c, g, or t
  misc_feature (254)..(254): n is a, c, g, or t
  misc_feature (286)..(286): n is a, c, g, or t
  misc_feature (320)..(320): n is a, c, g, or t
  misc_feature (396)..(396): n is a, c, g, or t
  misc_feature (434)..(434): n is a, c, g, or t
  Coding DNA Sequence Number=SeqID_2760
gttcgcgcccacgagaagttctctacancgcgcgaccgcagacactgcactactgcggatcatgcgcactagccggtcgcatataacgtatcttcgcgcacacgacgcgatcacgatctccacttcgcccactcgcctctcaactcttcacatctaccgccttatctcttcttatnactctcttctcctctacttccatctctactgtctctattacanatatcacacacacctcctcnttccatcnaaataantgcacactcacgtttctatcacatactgagtnctcctcctactcatccgtccgcacttcccgtctnttgcgctctctcacacaacattccccacctatacttctcactcactagcatctctctactctctcccatctccctncccaccaaactacacccacccgcacgacaatctctcanaccatctatcgcgtccgtgacacaggc

SEQ ID NO: 12540 - DNA, 402 bp, Glycine max
  Coding DNA Sequence Number=SeqID_2761
taatggcagggcacttacccgtacacaccatgcaaggattaacacggtgttcatacatacatgttccatccaattcaccaaataaacacaacaacttaatcagcaccaccactaccactactgctactactacatcattccatcagttactggacttggcactgctagcggtttacaaatggccaaataacaccaacaagcaagagccactacatggaagagaacatgcaaattaacactagccagagactgcagtctgcagaccccatctaatatatatgtggcaggtgggctggtggacgggccatctaatatgaaagcactcaagttgcacacatgccaaatcgaccaacatgcgtgcatgtatgccatcaaaaggatcggatgcgagactcaagtcaa

SEQ ID NO: 12541 - DNA, 567 bp, Glycine max
  misc_feature (138)..(138): n is a, c, g, or t
  misc_feature (300)..(300): n is a, c, g, or t
  misc_feature (336)..(336): n is a, c, g, or t
  misc_feature (347)..(347): n is a, c, g, or t
  misc_feature (500)..(500): n is a, c, g, or t
  Coding DNA Sequence Number=SeqID_2762
gaagattccgatacactgtgttccgtccgctgcacttgcctcatcggcagaaatgcgtcgcgtgggtctgcgcgtagcgcgggggaggagtgtggtgagcacagaacacttctctactacgggtatatgacttacgancagtctcagtatcacatccagtctctctcacagcctatctttacgcgtctacgtagctatgtgaatgaggccaaccgccctcgcatctcttctcaccacagatgtgcggtacgtcgcccggtgccagcgtgcgattatcctacaaggcctacaatcgttcancaacatgtgcgacatactgacacgaacgatgatcgncatataagganggacgcggacacagcgatagtacatactcatcagtgtgcgtcagcgtcgtcctacatggggcgcgagcacagaggctggcggtctgtgtcacagcggtgagtctgtgtccgtcacggatcatctatcactactcattctactacacacgactnttatcctactatctccaaaattagtcagtgacacgcgcagacgacaactatccgtgactctgtgatg

SEQ ID NO: 12542 - DNA, 437 bp, Glycine max
  Coding DNA Sequence Number=SeqID_2763
acatacacacccagagcgaacgaagcagtagcaatcaatcgaacagccatgaagaagggaagcagcgccgccgtcctgctgatgctctcgctcgcggccctcctcctcgtcggcgccgccgtcgcggacgacgccatcattcgcctccactccgacgcggggacgggggagacgaggccgtgggactgctgcgaccaccccgtgtgcaccaagaggagctggtgcggctgcaaggacgtggtcgagcagtgcttccccgcctgcaggagctgcaagccggccaagcgagcggacgagtcggccccttccggctacatgtgccgggacgcctatcacggcagtcccgggcctaagtgcatgctctgattctcatatctgtttgttgttcgagatggacgtacggtgctagctgcctagctgacgtgtctgatgttgta

SEQ ID NO: 12543 - DNA, 475 bp, Glycine max
  misc_feature (33)..(33): n is a, c, g, or t
  misc_feature (35)..(35): n is a, c, g, or t
  misc_feature (75)..(75): n is a, c, g, or t
  misc_feature (147)..(147): n is a, c, g, or t
  misc_feature (157)..(157): n is a, c, g, or t
  misc_feature (163)..(163): n is a, c, g, or t
  misc_feature (178)..(178): n is a, c, g, or t
  misc_feature (192)..(192): n is a, c, g, or t
  misc_feature (219)..(219): n is a, c, g, or t
  misc_feature (235)..(235): n is a, c, g, or t
  misc_feature (304)..(304): n is a, c, g, or t
  misc_feature (364)..(364): n is a, c, g, or t
  misc_feature (382)..(382): n is a, c, g, or t
  misc_feature (400)..(400): n is a, c, g, or t
  misc_feature (408)..(408): n is a, c, g, or t
  misc_feature (410)..(410): n is a, c, g, or t
  misc_feature (428)..(428): n is a, c, g, or t
  misc_feature (435)..(435): n is a, c, g, or t
  Coding DNA Sequence Number=SeqID_2764
tagcatatagatgagagacacgtatatcaagangngagagcgcgacgcacgctgacacgtatcatgactatactntctcttgatgaattactacatgactctattcgcaagacactacacgtatgagtactggatactgcagtaganacagtatgtngtaganagatgaagatgtgangagtgaatgtgtanagtagtacccacacactcaccaagcantgtactgtctattagngaagcatgataactcgtctgtatctcatctcaatatgacatagtggtcgtgccgcagacgtagacgccncggtgcacgtcatctcgtatcatgacatcacctgtaatagtcattagctcaatcccatangactcagaatatgctacnacataactgagcgatgtnctcaatantntcgaatcatgcatgactnatatctntacacacgtgcaattctactctcatcgcagtctatatact

SEQ ID NO: 12544 - DNA, 539 bp, Glycine max
  misc_feature (103)..(103): n is a, c, g, or t
  misc_feature (126)..(126): n is a, c, g, or t
  misc_feature (202)..(202): n is a, c, g, or t
  misc_feature (474)..(474): n is a, c, g, or t
  Coding DNA Sequence Number=SeqID_2765
catctctcatcgttctattcgattctcttgctctctcttgctgttgatataactcatggacaatgatgtagtcatatacgtatatagtctgtgtagtcgacanttactataacagtgatgtatgcntcaagattatagtcacacacctgatgcatccgctgcgtgtgctatgcttatgacgtgtgactatgctcactcaccncgctgcgcgctgcaatgagcgatgtccgtgttcgtgccgacgtatgatcgatagtctaaaggatgtacaatgacggggtaagtgtgaatatgtttgtatattatacgatgtaagtgcgagcgctactagttgcctattgatatgtatcctctcactcgtcagatcacgcgatgagctccgagtgatgttgactacgtcccgatacgatctacgttctctacaatccaatatctggtagctgcctatatataaactatgatgatgacatactnatctcagatcgagatgttagagcagtcgtagcgaagtacgagtttctcatgcgtgtgggccgtgc

SEQ ID NO: 12545 - DNA, 282 bp, Glycine max
  Coding DNA Sequence Number=SeqID_2766
cttgtgcttatgaatgctaagcgaataacgatgggacctgaccaaccctgtatcctccacatgctggacattcctccggctgaaaaaccattgaatggtgttaaaatggaatagaaggatgctgcattccctcttcttaaaggtgttgctgccacaactgatgtggctgaggcatgcactgaggtcaatattgccgagatggtaggcggattcccaacaaaagaacgtatggagaggaaggatgtgatgactaagaacgtataaatttacaagtgccaagct

SEQ ID NO: 12546 - DNA, 339 bp, Glycine max
  misc_feature (204)..(204): n is a, c, g, or t
  misc_feature (288)..(288): n is a, c, g, or t
  misc_feature (297)..(297): n is a, c, g, or t
  misc_feature (308)..(308): n is a, c, g, or t
  Coding DNA Sequence Number=SeqID_2767
aggacaattatgaatactgactataaatgaatgaaaccattttttacgcataaattatgaggggagagtattcatgaatttccttataaatcctgtgtttaccaccatctggcggcgactttagtttgggagagtctggtcaaatcagcttgtccagtgacgacaccaccatcgataccgcattggccgaaagcgattctgaanaaaccgttttcaccccaagctgggccccaagagttggcgacgatccagtagttggtaccgttttcgttaccccaaccgatgatnttgacagcntgaccaccganagcagcaccactttggtgagtgtagatacca

SEQ ID NO: 12547 - DNA, 468 bp, Glycine max
  misc_feature (134)..(134): n is a, c, g, or t
  Coding DNA Sequence Number=SeqID_2768
catctgcggcgctcgcttctctatgcacgtctttcatgttctccgtcggtcaccgcaccctcctacgctatccgtagccgcccccgcctatactcactcgccgctctccaggtcctcgcgccgttctccccacncccgccgcctctcggcctccccgacttattgtctcccaacctccccccacctctcgatcacgctcatctccgtcccacatttcatcctctctcaccgtcctcgctccacgcctcgctccccgtcgtatctctccctctcgcccgcccctcgcctccgccgcggccgacttctttactttcccacagcccacagttcctcgctcccacaacatacacacccaccaaccccaccccacaacaacgaaagagcgcactttccctgacactccgcggggtcactcccccttagaaattagagccgtcccccccaacccacggtggagccttccatcgg

SEQ ID NO: 12548 - DNA, 204 bp, Glycine max
  misc_feature (63)..(63): n is a, c, g, or t
  misc_feature (66)..(66): n is a, c, g, or t
  misc_feature (71)..(71): n is a, c, g, or t
  misc_feature (79)..(79): n is a, c, g, or t
  misc_feature (92)..(92): n is a, c, g, or t
  misc_feature (102)..(102): n is a, c, g, or t
  misc_feature (124)..(124): n is a, c, g, or t
  misc_feature (126)..(126): n is a, c, g, or t
  misc_feature (134)..(134): n is a, c, g, or t
  misc_feature (158)..(158): n is a, c, g, or t
  Coding DNA Sequence Number=SeqID_2769
atgtgctatatatatctcatcctgcatctcctccttcactagtcatatacacatctcatgttntgntggcntgccttcnctgatcgtccttntattctctanccatctctacacatatgatatnantactgatngagtgtgttagtgtgagagtaaanactcagtacagatcactgtatcagactgtcctgtcttgctgggcgt

SEQ ID NO: 12549 - DNA, 552 bp, Glycine max
  Coding DNA Sequence Number=SeqID_2770
gatatatcggtttccagactgcatgcttatataaaatatgaaaacgacaaatttgtgattgtggacaataactcgaaattcggaactctgattttgctgaggagggatttagagattgagaaaaagaagattgcagtgcaagttggaagaactgtgataaccttttctttgaagcaaggaaccagtaatttagctgctcaacctgaggagctgcagaaactgggcaacaatyttcagcaatggccactcaagaattttaatgatgttgataaagataccgatgatttgaacttgaacgaaggattatgaaagcaggtttgaagactttttaggccttgttggaaaagtttcagatattctgaataagaatttttcttaatgaagcattagaagtattgttggttcgactgaacaacttgaacggcaaataaaaataaaagtgaattgtagttttattctatattttttactattaaaaataattgttatggtactctccaacaaccctgtctataactagatattatgaatctaatcctcatggaactgcat

SEQ ID NO: 12550 - DNA, 436 bp, Glycine max
  Coding DNA Sequence Number=SeqID_2771
ggcgcatcctcttcgaggcaccatttcttcaaaccttatctttcctcaaaaacacacacagacgatggcgtcgctgctaatcggagctcctccgcgagtcaccgtcgcatcatcttcgaggctatcatcatctcactcggaaaccgtcggtgtctctctcccttgcttcactcagcagctgtctctctccgcttcgtcatcatccagctcaattccacttgtgtactgtggccgaggcgaccgcaaaacagcgagaggaaagcgtttcaatcactccttcgggaatgcgaggccacggaacaaggataaaggaagagggccgcagagagtaccagtccctcctgcaccaccgaggaaggataagtttgagaacgacgagaagatcaagattgacatcgacgagtccctcttctccaactagagtctttcttcactt

SEQ ID NO: 12551 - DNA, 560 bp, Glycine max
  misc_feature (45)..(46): n is a, c, g, or t
  misc_feature (55)..(55): n is a, c, g, or t
  misc_feature (137)..(137): n is a, c, g, or t
  misc_feature (187)..(187): n is a, c, g, or t
  misc_feature (274)..(274): n is a, c, g, or t
  misc_feature (343)..(343): n is a, c, g, or t
  misc_feature (361)..(361): n is a, c, g, or t
  misc_feature (366)..(366): n is a, c, g, or t
  misc_feature (382)..(382): n is a, c, g, or t
  misc_feature (461)..(461): n is a, c, g, or t
  misc_feature (485)..(485): n is a, c, g, or t
  misc_feature (489)..(489): n is a, c, g, or t
  misc_feature (491)..(491): n is a, c, g, or t
  Coding DNA Sequence Number=SeqID_2772
atgttgtcatcatgagccgtgctcacaagacatgactgagttgtnnagtggaggncgtgctacgccggtgtcccatctgcgatattcgaccgtcataaagtatgtaacacaagtgtacagacaatgatactcattantagagtaatatgtttatctatgactctctgatagaccgtgccgggaggangtgagagtagcatggctacattatcgacgcacatcatccgctgatgatgacgcattatcgcgagctactaaatcccccacgatccancagtagacatcgtaaagtatgagattctctccaccataatgtatcagatgctctgactattgtgaactncacacatacgcaacatcntccantgccacgcaaagcgantcacaccaataagatatgtctggagtcgttcgaggaatccacgtggtctcttcgcggtctctagtcgatactctatctncatctcgtctgcctcgcctccgcntacngntacccttatcaacactatacatatacaggtgattacagacgtaggagatatgcgtgtgtcgtatgctgc

SEQ ID NO: 12552 - DNA, 339 bp, Glycine max
  Coding DNA Sequence Number=SeqID_2773
tgtaaccgacggtgagcggattttgggacttggggatcttggatgtcaggggatgggaattcctgttggtaaattggctttgtacacagcactaggaggagttcgtcctttagcatgtttgcctattactatcgatgtgggggcaaacaatggagaattattgattgatgaattctacattgggcttaaacaaaagagggcaattgggcaggaattattataccttattcatggattttttactggtggggagcaaaactaccgggaaaaaatcccttgtccagtttaagaaattttcaaacacaagggttttttggtccttgctaaaattgggcaacc

SEQ ID NO: 12553 - DNA, 388 bp, Glycine max
  misc_feature (117)..(117): n is a, c, g, or t
  Coding DNA Sequence Number=SeqID_2774
attctcagaggccagcaggattccggggttgggtgaaagattactcttcagtcggttcctttcccatctacccatggcagaaaaagtcaaaaactgtggaggtgggaaaagaagganaaaccccaaaaaggggagaaaaccaagaaaaaggtggaaaaaaaaaaggggaaaagacctaaactggggaatactgggactgggaattggcccatgaaaccaaccctatggatgcgccaccccagggagttgaaaaggggagaccctggattttttagaagacttttttggaattttttaacccctgtgcttatcccttcctatgcaaggggaggggggttcaaagaatttttatgttccgcaagggaccctttccatgagggaaatggga

SEQ ID NO: 12554 - DNA, 486 bp, Glycine max
  misc_feature (51)..(51): n is a, c, g, or t
  misc_feature (116)..(116): n is a, c, g, or t
  misc_feature (159)..(159): n is a, c, g, or t
  misc_feature (230)..(230): n is a, c, g, or t
  misc_feature (241)..(241): n is a, c, g, or t
  misc_feature (245)..(245): n is a, c, g, or t
  misc_feature (247)..(247): n is a, c, g, or t
  misc_feature (341)..(341): n is a, c, g, or t
  misc_feature (351)..(351): n is a, c, g, or t
  misc_feature (430)..(430): n is a, c, g, or t
  Coding DNA Sequence Number=SeqID_2775
gaaatcacacaccactacgatatgtgtgtttgtgatatgtgtatcacatcncatgttatgctgttgtgatagttagacgccaccacgcaggcgtcacatcatactatcgacagatnctatcacacgccaacaccgcccacagatgattgacgatcgcgnaagacgagcccgtatgtcaagagtgagtatgcgtaagggatagtcgcgcgaccagttattatagtcccgcnagatttgtgtngagntngtgtgttcagatagaagctacatcgctagtcggttgagtgagcagagtgtgttgctagttgttgagtgttgaatatagaattagcgcatgatancaccgacacngtatgtcagtaggtaggtctgtagcgctcgcgtaatgggtgtgttggtgtggtagtggcgcgcgcggtgatatagagtnttgtcgtggtatgtggtatagtagagtgtaaccgcaccgagtgatagagagtactt

SEQ ID NO: 12555 - DNA, 584 bp, Glycine max
  misc_feature (83)..(83): n is a, c, g, or t
  misc_feature (139)..(139): n is a, c, g, or t
  misc_feature (157)..(158): n is a, c, g, or t
  misc_feature (168)..(168): n is a, c, g, or t
  misc_feature (204)..(204): n is a, c, g, or t
  misc_feature (288)..(288): n is a, c, g, or t
  misc_feature (351)..(351): n is a, c, g, or t
  misc_feature (425)..(425): n is a, c, g, or t
  misc_feature (470)..(470): n is a, c, g, or t
  misc_feature (538)..(539): n is a, c, g, or t
  Coding DNA Sequence Number=SeqID_2776
atgacctaatgatggcgcgagtcgccgatagggctaataagcatatattagcgagcagtgtgagagctatgagataagtaatngtcacaactgattacgcgagactcagtatctatgatgtctatgatacatcagagcnacatatcagtcttgttgnnctaatagatnacctatctctgcgagcgtacgctactagcatgcgtnccctcgtatgcctatgtgactagccgtccctggcgtacagggcgatccctagcttgcgtctatgcgccgtgagcagattcgctngtcgtgtcgagaggaagtagaggtagagataccttcatgacgacctaactatctctcgacaantcaagctgctacctagatacaaccaagtgtgacttatatccttctcattatgataagtagagagagacaaacanagagaagaaaagatagactcgttatatatagagtaatgaccgttncgggtcatctctcgagagggaggggggggaggcgcacgcgtgatcactccaacatttatcgaggggtnnttgtaatgtggtgtgtcgttagaccgcaggatgctgtgcagtcac

SEQ ID NO: 12556 - DNA, 549 bp, Glycine max
  misc_feature (123)..(123): n is a, c, g, or t
  misc_feature (188)..(188): n is a, c, g, or t
  misc_feature (381)..(381): n is a, c, g, or t
  misc_feature (434)..(434): n is a, c, g, or t
  misc_feature (515)..(515): n is a, c, g, or t
  Coding DNA Sequence Number=SeqID_2777
gtgatctgtcactcattcatgcagaatctcactccgcacccgccctctgtctcatcttgtgtgatgcgatataacagcacactatttactcaatactcgcctctatcatgtgctcgctgtgtntgtcacgatctcaccacctctatcatccagcctatcacatctatcagctgcgagccgcatgtggngtcagtgtcatcctcctataactatacgtcagcgccggagtctcaaactatctacgtcgtagccgcctttcactccacatgactgcatgataaatacactaccatgtaccatcacggtctgcgtcatccgtcatgtggcgggacagatccagatcactcgatcgatccgacatcgtgtgctcgcatagctacnatatggactgtcggcaccatatcttaacgctcgtatcgacataacagtgtcantatgtgtctcaggcgttatcgcacacatcatatgatcgacgcgaatgcggagatcgagtcttgctatcacgtacaatacgnctcagcattgtctatgcgattctactactcttat

SEQ ID NO: 12557 - DNA, 344 bp, Glycine max
  Coding DNA Sequence Number=SeqID_2778
atgtcgaactaatacgaaagctattatcaggaaactgaaaggtctggaacgctttgtcatcctcaatacaatgtcaaaatcaattgaaagctattatcaagaatctggaagggcatgataagaaatggccaaggatataaaaaggaaagttctaagacagcaatggctcacatctatgtactgtgaaattaagcaaactagtgctgtggattaaatcagacgaggaatcaagagatcagtgtggcagactaattcaagaaagaaattcaaagcaaagcaaaagtgatgctatgaaaccaaagaaacctcttgcggccttcttctcgcgattgtacagaagctac

SEQ ID NO: 12558 - DNA, 594 bp, Glycine max
  misc_feature (32)..(32): n is a, c, g, or t
  misc_feature (85)..(85): n is a, c, g, or t
  misc_feature (110)..(110): n is a, c, g, or t
  misc_feature (131)..(131): n is a, c, g, or t
  misc_feature (155)..(155): n is a, c, g, or t
  misc_feature (214)..(214): n is a, c, g, or t
  misc_feature (232)..(232): n is a, c, g, or t
  misc_feature (255)..(255): n is a, c, g, or t
  misc_feature (268)..(268): n is a, c, g, or t
  misc_feature (292)..(292): n is a, c, g, or t
  misc_feature (327)..(327): n is a, c, g, or t
  misc_feature (338)..(338): n is a, c, g, or t
  misc_feature (346)..(346): n is a, c, g, or t
  misc_feature (371)..(371): n is a, c, g, or t
  misc_feature (388)..(388): n is a, c, g, or t
  misc_feature (430)..(430): n is a, c, g, or t
  misc_feature (437)..(437): n is a, c, g, or t
  misc_feature (542)..(542): n is a, c, g, or t
  Coding DNA Sequence Number=SeqID_2779
tcatctagacgacgataggtgctgtagacacnttttataactcatgctctatcatatagtcgtatctatgatacatgcttctacngactcactgtatgtatatatccatnatgctgtactatcgtatttcntcatgtcgtactatatcatacttnataatcatgcgtgtagtgatatgatacgaataactatcatctcgtctcactcgacacgngaactcaagtatctactnattctaagacatatctacttcantacacattacatntatatgatatacttacatcgtgtnactatactcctcactatcactcttactatctatcntatcatcgtcntatcacanatacgtcatacatcgtctactcaangttctaagaagaaacanactatgtacagcactacattagacgcagtcagtttcaatctncacatcngacttcatcaatataacactattacatattaatcttactctcatctatatcgatgatatgtatctctgatctatcatatacacgcatatcagtatgtactatgantaatcaatgtgaccgagcgttatgatctgcgatacgatgatccatctacgtg

SEQ ID NO: 12559 - DNA, 538 bp, Glycine max
  misc_feature (100)..(100): n is a, c, g, or t
  misc_feature (143)..(143): n is a, c, g, or t
  misc_feature (176)..(176): n is a, c, g, or t
  misc_feature (193)..(193): n is a, c, g, or t
  misc_feature (217)..(217): n is a, c, g, or t
  misc_feature (221)..(221): n is a, c, g, or t
  misc_feature (410)..(410): n is a, c, g, or t
  misc_feature (421)..(421): n is a, c, g, or t
  misc_feature (491)..(491): n is a, c, g, or t
  misc_feature (502)..(502): n is a, c, g, or t
  Coding DNA Sequence Number=SeqID_2780
gtatcgtggctgatcacgtcatcgtgtgtctgatcatatatgctgcgtggcgcctgtgatgcgaatacgataatattacatacagatgacacgatctacntgatcatctggtgtcagctaagatggtgaataatattatgctnatgctattgttatgcggtgaggcatgtcatatntacagctcatcgtgacntcgcattcgtcatatatatatatntacnaatatcgtatgaatctcatgaagcgtagatgagatgtaggcagacgcacactacgcgcgctcggcagccgcacgcgcgtactgcgtgagacgacgatcacactgtcattatcgtataccacacacacagtagttgaggcagagtagggtggtgggtcgcgcgcgcgtcgcagtcgttatacgcgtcttntgtcttatcantacgagggggggtagaagcgctcctcttgtcattacacttctatatcaatgatgggcgagaagggatagngcacagctggnctaacactacatctagtcacgtcatgagatgcatat

SEQ ID NO: 12560 - DNA, 554 bp, Glycine max
  misc_feature (215)..(215): n is a, c, g, or t
  misc_feature (343)..(343): n is a, c, g, or t
  misc_feature (448)..(448): n is a, c, g, or t
  Coding DNA Sequence Number=SeqID_2781
ggcgcgcgcattatctcataatggctgatgaatataatgtatcatgaaatgacgattatcagtatcttgtcgttgtctcgattatcctctccgcctcgtcagcgcgctctattgaggtagacaataatcagatataattgcttctccatcatacgcgcgcaatacgcactgagatatgatacatagtcgtactcccagactagctctaatactangtcatgtcgtcaatagtataaacgaaacggatatatggagactcgatgatctcacacatccacacattctcccctctcgagtggtaatacgctgtcttaacacgtctcgtacgcgctgagcagtaaangtggcgactatagacggatggttgtgaaggtagatggtcgtgcgtaagtcagcgtgctcgatgtcgtagcgacactcgactatagctcatagaacgcgctagatnacgctcgatcgcttcgtgtgatagatgagcgtatcgttatgtttggatgtatatacacgaccctccgctctgcgcctgccgcgacctattcactgcgattcttata

SEQ ID NO: 12561 - DNA, 204 bp, Glycine max
  misc_feature (125)..(125): n is a, c, g, or t
  misc_feature (144)..(144): n is a, c, g, or t
  Coding DNA Sequence Number=SeqID_2782
acattagctccatagttcaatagagagagtaaagagcagacataggaagagataaaatggccatggcaacaaaatcagtttcttacttcaccctcattttcatcctcgttttggttttttttttngaagcgccggaaatagaancgcaggatagcgagtgccttaaagaatacggcgggaatgtgggtttcggcttctgtgcgc

SEQ ID NO: 12562 - DNA, 486 bp, Glycine max
  misc_feature (310)..(310): n is a, c, g, or t
  misc_feature (368)..(368): n is a, c, g, or t
  Coding DNA Sequence Number=SeqID_2783
ccacggggggatccacatacttctaaaaggggcccgcccacccggggggagcctccacccttttggtcccctttagggggggggtaaatttccagccttggccgtaaatccttgggcccatacccggttcccctgggggggaaaaatggttatccccgcgtcccgattttcccccccccgggttaccaaacccccggaaagcctaaaaggggggaaaacccccggagggtggccctaaagggaggcggggcgaaactcccccctataaatttaggttttgagggttccttagcccaccatttttcctccncggggagaaaacctggctggtgccaaggcggccttaataagaatgtcggtcaaacccnccacgcccaaaaagccggcgttttgcgaatgatgggggggacttttcgcgcttttccccccacaatgtaaaaccccagtgcccacctggatctccactgttcctgaggcatagaaaaa

SEQ ID NO: 12563 - DNA, 524 bp, Glycine max
  misc_feature (149)..(149): n is a, c, g, or t
  misc_feature (281)..(281): n is a, c, g, or t
  misc_feature (393)..(393): n is a, c, g, or t
  misc_feature (416)..(416): n is a, c, g, or t
  Coding DNA Sequence Number=SeqID_2784
accatactcatgtgtctttgtttatctttctgctgctttctggttgtgtcttcatatcttctcattacacaggacagagacctacgtaactatgcgttatgctcgacactcatactatattacatcacgaaagaacaataagctgacantctccgtacattatatgcgcgctcaccaaccgctagctcctatttctcatactcactcttggtcctctgtgtttcttcttattcatgtctcagtcgtctattgctgtgcgtactctctcttcgcctctgtgnagacgcgacgagacgtccgcgcgtgtgtgtatgagagcgattagcgtgcaggtgcgcttcacagtgatagtgaataattatccgagtgtaaacacaggaccgataactacgnaaccacacacagtcatcattgtntatttgctgcttagcgctgcgttctgtcatatgtgtaccgtctctcttgtctgtatgatagtcgtttttgatactgatcatttactctctgctattcgtctgcgtgat

SEQ ID NO: 12564 - DNA, 421 bp, Glycine max
  Coding DNA Sequence Number=SeqID_2785
tttctcgtctagctcgctcagggcgtcggtcgccattgcaacaccagccgcaggaatcggcgggatacgctggccctcagttcggatcgacgtccatgcctccggctctgacatgcacgcccgctggacgccgccgtgaaccaccttgttttccgcctcttggaccgaggccatcttcgtcggttccgtcggccgccactgcggcgccgcggttatcctcctcaccaaacaactccagggaccgtgacgggctccgtgttatccgcatctcctctggaccatggactcgaagccgcgggtccctcctacttcttccctgacgttgaccgtcattgtcgctgtccgagctcgttgctctgctccgtccgaccttgccactaacaacatgggtttcttgatcgtttcaataggagtccagtaa

SEQ ID NO: 12565 - DNA, 171 bp, Glycine max
  misc_feature (130)..(130): n is a, c, g, or t
  Coding DNA Sequence Number=SeqID_2786
agctggctcaaatttcaacttccacccgaaaaatgtacaagaattgacgatccttggtgcaatggccttgggctttggaataatggctggatgcgaaaatcccatttcataaccgggtaggggtccaagncaaaagcttaacaataacgctattcagaggcccatggccgt

SEQ ID NO: 12566 - DNA, 499 bp, Glycine max
  misc_feature (167)..(167): n is a, c, g, or t
  misc_feature (226)..(226): n is a, c, g, or t
  misc_feature (321)..(321): n is a, c, g, or t
  Coding DNA Sequence Number=SeqID_2787
acggcagagcctacatcatttgacctctcttagatgattagctaaactctctactgctcagtctacgcacaaagaatgcactttgtggagtgttagctcacagccgcacgtcatgagttgcgtagcttgtcagatataccagtagagggatatgcgagagtgtgcangggatactatgtaaggtgcactctgttcgttttgttcgtcgcatacgcactacagtagncttgatatagtactcctgacgtgagatgatactgcagacggctgtgcgtgctatagtatgctcttcgactgaatccaaccaatacgagcgagacncgttatgatagacgtgaagaatgacgcggataggagtagtaaagccaaacacagaaagcatcaatcaagatgagaatatcttgaacatagtagatagagaagacatacactataggatgttcctacttctttcctcccgcgaggcggtggtgtagtctcctctgcgtagattggcgga

SEQ ID NO: 12567 - DNA, 441 bp, Glycine max
  misc_feature (159)..(159): n is a, c, g, or t
  misc_feature (165)..(165): n is a, c, g, or t
  misc_feature (167)..(167): n is a, c, g, or t
  misc_feature (304)..(304): n is a, c, g, or t
  misc_feature (391)..(391): n is a, c, g, or t
  Coding DNA Sequence Number=SeqID_2788
gtatggtcttctgaaagcggccagtggttctctccagatcccaccttactcctgggtgtagaggaacgcgacgcattcaccggtctctgtagtatagacacgtatgtaggtaattgtgtgtgtcgtacgttgccctcagatagaccgacagcggaagangcgtgntnacatcatcgtcgatcgtttcggccactgaagagatacgttaccgattctggaggacttttgtcttctatttgttgccaaccgagagatagtgcgaggttcctcacgatatcctaatacgtctagacgcatcagagcncatgcctggcgataggacaacaggacccgaggtacctaaggttctacgcgtggagataacaacaatgctcgatctctgcatgctcgngattcacttgaaacatagtcgatgcgtctaccgcgactatgactgtgtat

SEQ ID NO: 12568 - DNA, 390 bp, Glycine max
  Coding DNA Sequence Number=SeqID_2789
caaccgcaaagtccaggtaacacaaagaagtaagtagccgaaaccctaaatcctcactcaaatcgatcgagatcatccaacgttgaagagctgtgtcactatctcacagatcaattctcaaaactctcccctacaatggttgcaccgatacttgcaggtgttgctgtcgcggctgctgcttacgctggtaaatacggaatcgaggcgtggcaagcgttcaaggcaagaccacctaggcctaaactccgcaagttctacgaaggtggtttccaagctgctatgactcggagagaagctgctctcattctcgacgttagggagagtgtagcggcagagaaggtgaaggaagcgcaccggagggtgatggtggctaatcatccagacgcagga

SEQ ID NO: 12569 - DNA, 447 bp, Glycine max
  Coding DNA Sequence Number=SeqID_2790
aattatgcagcgtttttattctttattatttgaccttgatgatgattttgtaattttttaataaatttaagctaaaaatagaaagagtgttagaaggtgttacttattattactattattttggagcaagttttgttattgcttacaaatctcgtgccgaattcggcaccagtggtaatcaaacccctctcagttgcacctaacaacattacatgttatccacttctgatgctcaaaatttcaggcaatctctcgtggtatttggagtgaggtaacctcagtcaaggtttccaattataaatttgaaatgtgatcccaacgagatcatgtctcaattcatgtcatttgccaactagttcttttgtttgaaaattctgtaaattctacataattgtttgctggctgcatgttggtaatatacttataaacattaaacagtccgttgga

SEQ ID NO: 12570 - DNA, 520 bp, Glycine max
  Coding DNA Sequence Number=SeqID_2791
gggtccgcgagagccctcaggacttccagccgcacccccgcctcccgcgccgcggcctgccggccctccgcgaggcggccgatccgtgcctcgtccggctgctccaggccacccacctgcgcccccaccacgcccaaccccgtcccccacgcccgccgagcccctcgccagcgcgccccagccgcgcggcgagccccgcggcaccggttccgcgcgggcccagcaggcttcgtatcctcctagaggcttatctctccgcggtggtctgctcctcgttatgtttccctccttgtatttctaatggatgccatcaaatgttcaaatcgcgttggtttgtttatagtcggtgtgccccgcgggaagagggaccccgtaccccacgcggcgcggtgccggtcgatacagaacccgtcgggatagtggcgcgtgcttcgccccgcgccccgcttgttccccctcgcgccgccccgcttgcttggcggtgggctcccacgcgcgcaaacatcacccgtatacctgt

SEQ ID NO: 12571 - DNA, 311 bp, Glycine max
  Coding DNA Sequence Number=SeqID_2792
gagaaattgacctccgcggcaactcctcctcctccttccgctacttcatctctcccgcttcctacagcagctgcagcagatcagagatcttcgccggcgatggacttagataacccgccggttccgagtcggccacatataggaggagctcaggtggctccgtcagatccgtcgtcaagggggagaaagagggggctggaagggaatctgaaggtggagaactccaactactacaagatgcgtctccttgtcaaggatcttcgccctcacgttctcgaggtactacgagctcccgacttcagaaactgcaa

SEQ ID NO: 12572 - DNA, 348 bp, Glycine max
  Coding DNA Sequence Number=SeqID_2793
tgcgattccgatgaggccctttcgttctctcttgctcttcggccccgtattcgtcgtcctccagcccctgggcgccacgcacggcgacaccgatgccgctttggctatagtggtcggggcaagaagcaagaactcgcagactgaagcgtagatgtgtaacagatcaacggttgccctaggatagcattttatgttgtagaaagatgagggtatagtatgttcccggagaatcttttctaagggttttggaggggctgtggcttacatgttaaaaataatatataggtggaaggagtttgatttgggatgtatttaccaaaagggtgctgggaacagggccaagcttct

SEQ ID NO: 12573 - DNA, 571 bp, Glycine max
  misc_feature (42)..(42): n is a, c, g, or t
  misc_feature (91)..(91): n is a, c, g, or t
  misc_feature (111)..(111): n is a, c, g, or t
  misc_feature (134)..(134): n is a, c, g, or t
  misc_feature (140)..(140): n is a, c, g, or t
  misc_feature (146)..(146): n is a, c, g, or t
  misc_feature (213)..(213): n is a, c, g, or t
  misc_feature (260)..(260): n is a, c, g, or t
  misc_feature (271)..(271): n is a, c, g, or t
  misc_feature (294)..(294): n is a, c, g, or t
  misc_feature (297)..(297): n is a, c, g, or t
  misc_feature (350)..(350): n is a, c, g, or t
  misc_feature (436)..(436): n is a, c, g, or t
  misc_feature (445)..(445): n is a, c, g, or t
  misc_feature (476)..(476): n is a, c, g, or t
  misc_feature (481)..(481): n is a, c, g, or t
  misc_feature (484)..(485): n is a, c, g, or t
  misc_feature (497)..(497): n is a, c, g, or t
  misc_feature (502)..(502): n is a, c, g, or t
  misc_feature (504)..(504): n is a, c, g, or t
  misc_feature (507)..(507): n is a, c, g, or t
  misc_feature (516)..(516): n is a, c, g, or t
  misc_feature (520)..(520): n is a, c, g, or t
  misc_feature (523)..(524): n is a, c, g, or t
  misc_feature (534)..(534): n is a, c, g, or t
  misc_feature (536)..(536): n is a, c, g, or t
  misc_feature (538)..(538): n is a, c, g, or t
  Coding DNA Sequence Number=SeqID_2794
cgtcgacaggcgtcacatatgtgcacagacagtatcatcatnatcagctgtacgagtgacacgatgggcgagaggcggcgctgacgtgtgncattgcggacgcatgtcgcnagtagatgcgtcgtgatgtgagngatgangatagnatccatcatttacgacgcatcactatctgtcgtcatactcatctgtgatcctaattcgtagtgtgancaggatagtagaacgactcatagacgacagacgaagcgtctatacanatacatctgcntatatattagagatgtcgtgtantanagtcgcagcgaccgtcgcgacgcgacgacagtacgcgcgtcagtgtcgacagnacgaacacacagtcgcagacgcgcgttggttgagtgtgtggctagtgcatgcatctctctcgtgacgtggatcagcagacgccgtngtgctcctnagtatgcatagctgtatccgtattagagagntatanctnntcaggtccgcgngccgncnggnagcgacccngcgntcnncgtgatgtgntnantctattacgtaatcgtgctctatataccacctc

SEQ ID NO: 12574 - DNA, 532 bp, Glycine max
  Coding DNA Sequence Number=SeqID_2795
aagctattctcttcttattgatataattagcccagatataaaacgggaaacgaactttgtcataaatgaaatgaattcaaataacaacaaacaataaacgaagcaagtaaaatattaacgatgaatcaatacaaaaatcctatgacaattcctatatctcaaatatataaaaaaacgtccaattttcagtttcaacatctccaatattcttaatccatgccatatttgtttttatatttatggaagacaaaatcaggtttgttggtctgattacgttcagcaaggttcagttttcttccttctttcatcttttgattagcttttaaaaatttcgtcttgttccactcattcttgaatgcatttattctactcactggatcactcttctttgcgatcgtcttgaagttcttttctgaataattaaacaccttcttcccaatcattggctctcttatcggttttgatatatcggcttaaatgtcactggttttctatcctcagtttcataagcatcaggatgagcggcagtttg

SEQ ID NO: 12575 - DNA, 496 bp, Glycine max
  Coding DNA Sequence Number=SeqID_2796
tgataataataacccgtaccctctgtccttccactttaatgggcaaagtttagaagtactcgactcattttttatccatacagatgtttttgttttgataattttgttggccaagattcatttagttattatgttagaaatttcttcttatacaaattattatgggcagaaataagcaagttatgttgcttaagagaagcaattaattactgatcactgttgtattcctactctcacaagtaactatgagaattggatggcacgacaaaagcaatatctttgtactggaaagatgtgatgattataataacatgtagcctctttccttcagcttacaaaaaaaaaaaaaaaaaataatatttatttatttttattcataagttttagtttttcaaagacagagactaatgtcttttggggggggggccgggtccccaattaccccttatcgggtgtgttttgtcccccttctgtcggcagccgtttaacaacgtgg

SEQ ID NO: 12576 - DNA, 570 bp, Glycine max
  misc_feature (50)..(50): n is a, c, g, or t
  misc_feature (65)..(65): n is a, c, g, or t
  misc_feature (70)..(70): n is a, c, g, or t
  misc_feature (80)..(80): n is a, c, g, or t
  misc_feature (91)..(91): n is a, c, g, or t
  misc_feature (102)..(102): n is a, c, g, or t
  misc_feature (169)..(170): n is a, c, g, or t
  misc_feature (174)..(174): n is a, c, g, or t
  misc_feature (430)..(430): n is a, c, g, or t
  misc_feature (437)..(437): n is a, c, g, or t
  misc_feature (461)..(461): n is a, c, g, or t
  misc_feature (544)..(544): n is a, c, g, or t
  Coding DNA Sequence Number=SeqID_2797
caccgctcctacacactattattataatatcaatatatatatttttggancacactgattaatanatganaaataataanaaaaattaagncatacacatancatacttactatcctccatattcatcacacctccccaacacaccacctcctcacacatcatccccanntatntcataataaaatatcaacattcccatcacacacctacacctcacagtctacaaccctcgcttacttcatcctcactctctcttctatctgttcttacatatcaactctctctattctaaaccccctactctatctctccttacatctatctctaccgcacattcttctcacgctattcaacactcacgcaccccgacaaatatctattctcatcactattaccatagactcagctatatactctactaatctcttncataatnctcatcacaccacttgctactatncactcacatatataacactattactacttaattcagactagaattatcacacaccatactctattacacaatatctactcctncccgtccatctcatacataatcatca

SEQ ID NO: 12577 - DNA, 510 bp, Glycine max
  Coding DNA Sequence Number=SeqID_2798
gtcgcacttgtcgtaggcctatattgagcagatcgtctactctatatgtactattcacgtccgcgcgctgcatgtcgctgcccagcatgcagtcactcccgcgcgtacatagatagagcatgtgggcccgcgaggttatatctgacaacagtgcacagcgatgcatcgtctttactacagcctcataaacgtaagtatactacattcgagtatatacgtgtgtatgtgatcaatatgccatgtctcatctcatccaactgtctatcgattatgcgtcggcgcgataaaacagagtcgcgggcgctgcgagtgagggtcgccgtgcctccccgtctctccatgtactcctcgcagcaacggcgatcttcggtttgtgtagtgtgcacaacatcgcgttctctgtggctctcgtcccccgctctctctttctgcggagaaataatacctgcccgcaccacctgctgctccgcgtcacgttcactctcgccacactctgttactacgtataca

SEQ ID NO: 12578 - DNA, 539 bp, Glycine max
  misc_feature (139)..(139): n is a, c, g, or t
  misc_feature (164)..(164): n is a, c, g, or t
  misc_feature (211)..(211): n is a, c, g, or t
  misc_feature (221)..(221): n is a, c, g, or t
  misc_feature (317)..(317): n is a, c, g, or t
  misc_feature (371)..(371): n is a, c, g, or t
  misc_feature (402)..(402): n is a, c, g, or t
  misc_feature (404)..(404): n is a, c, g, or t
  misc_feature (408)..(408): n is a, c, g, or t
  misc_feature (438)..(438): n is a, c, g, or t
  Coding DNA Sequence Number=SeqID_2799
gcgactgcccgatagtgtgtatcatgtcgtgcgtcgacacgtggtgagagcgccagcaccagtgagctgcacagtgtggtatcgacgctccatatgcggccccactacctcgcattcacatcacgcgataatcgacacntgtgctagtgatctcaccaatacgnacatgtgatcgacagcgtacgtgatattgacactaatcgatatcgtngtacggtctngtcgatatgctagagtgtgtatgtagtagtatcactatcagacgtactgcgctcttctacctcacacttgccactgcggttagatatacgatatantatacctgtgcacggcagtatgctgcgagcgagcgtgctcgactatcgcgtcgnataggccgtgcgtgatgagatgcgatgtagncnagtncacgcgggtctgcacgtttcaccagccganctccactacactcatatcactagcgtcagtgttcgtcgacgtgcgcccagcacgctgcagacgactactgagcactgagcaccgtaacacgtcaatcatag

SEQ ID NO: 12579 - DNA, 211 bp, Glycine max
  misc_feature (172)..(172): n is a, c, g, or t
  Coding DNA Sequence Number=SeqID_2800
acacttatctcctctcaggtcaggctttatttgggagtcttgaagatggagtggagtgattggttcatgattaattggatttgaatggggcgaggtaaaccaatactgttgcttgactgctgaaggagctatgtctgacgcctcatatcttaccttgccgtttcactatggnactggatgacattgcattgggaaaactctctcatttttt

SEQ ID NO: 12580 - DNA, 585 bp, Glycine max
  Coding DNA Sequence Number=SeqID_2801
ttcgcctctccaatgacaagatcgagactgccgccgtcgtgctcctccactcctttgcctacctcccccatgtcacccatcgctgcctccgcccttaccacctcctcatcctttgccttgggtcttctgactacgcctcgtccacgtcgacacctcgggcaccgaggagatcacggacactgtcatggcgctcttcttcggcctcctccgccgcacgaacctcctcaacccctcctccatctgtggcgacctcaccttcgtcctctcgccggacaacgacaccatcgacgaggccttggagtaagaaggttgggtcgctacagtatttgtggagtttcacgtgtttcgcgtggttgatggaggagaggatgagaatctcattgcagaaggatttggtggagaacgcggcamtamacggtgtggtgagggagagggtggttgcgtcgcgaaaaataggcttgtggagcggtggttgcggcggctcttggcgtcagcgaaggaggagggtgaggaagaaggagagagggagacgagggagaagggaaagaacttccttacgtgagaagggaaagacctgagtctatt

SEQ ID NO: 12581 - DNA, 495 bp, Glycine max
  misc_feature (222)..(222): n is a, c, g, or t
  misc_feature (280)..(281): n is a, c, g, or t
  misc_feature (339)..(339): n is a, c, g, or t
  misc_feature (399)..(399): n is a, c, g, or t
  misc_feature (418)..(418): n is a, c, g, or t
  misc_feature (453)..(453): n is a, c, g, or t
  misc_feature (470)..(470): n is a, c, g, or t
  Coding DNA Sequence Number=SeqID_2802
atgtagatcgcgctgcgactatgacgcgtgcgcgagcagagtacatagcaagatgcaaacaaatcaaagcgagctacaaaaattcgagtctatctgctacaactccagcccacgcacacaccctctactcatcccgcgcacacgcgcgcggcacaccagtcgcatataacaataaccaatatgtggcagatcggtaggcggcggtcacacaagcaaatcgancacccatcacgcatctgccgcgcgcacagaagcagcacagcaggcagcttttagcccnntcctagttcaacccaaggcggcacgacagtgtcttagtaatgatatggaagtatatanagatacacatatacgaatacaacagaatatcgccgcgtctcatcgttttattgtatgggntgttcgacccacctgctcnacctctaccggactcggactggtgcgggggcggcnggggagagcaagggagngggagaggacgtctcgccacattat

SEQ ID NO: 12582 - DNA, 543 bp, Glycine max
  misc_feature (64)..(64): n is a, c, g, or t
  misc_feature (178)..(178): n is a, c, g, or t
  misc_feature (213)..(213): n is a, c, g, or t
  misc_feature (236)..(236): n is a, c, g, or t
  Coding DNA Sequence Number=SeqID_2803
aactactattgtgatcgtctctatataatatcatgtagtgtcttcatctacttcaataactctntatcttcgtcgcttatccttcctgatctctctgaatcaatacgaagtgtcacgcgtcataatagatagcgcctctcatgaagattcatcggttcggctaaattgtatgattaantattcacatttctctagaaagactcacgatgcttnactccccatctccactcataatnatgacgatcatatcacaccaccacccctccctatctatccttcttctgtgatgtactctcacaaatattttgttgtcttatatgattctaaatttatagatacaaattcgtatagtatcactctttcgtatttatatattcctcatatatttattctcttcatatctattatataactcatcctcgatgctcatccaccacatctatctcccgcgctctctgccacctgcaacataagataatattagtaatgtgctggcgctgatgctaacacgcaaagactcgcatgtcttgatagctcctctgt

SEQ ID NO: 12583 - DNA, 571 bp, Glycine max
  misc_feature (341)..(341): n is a, c, g, or t
  Coding DNA Sequence Number=SeqID_2804
gataggaagatcacagcgacgacagagaaatatgtgctggagaagatgtaggtgagtaagaagaggactaggtagaagcataaggactgtgcctacgtggaggtaggatacgtgaagaacgtagattcactatagtgcgcgcatctagatggtgatctctatcacgcttataatgagagagagagtagtcgccggtggcgatggtgaagatgtacacggaagggaatactagcgtgctagcgcggagagtgggtacgaggtgatatgtatgctgatgagaagacgagaagtgtggagaagaggcggagtagtgcaggtataaggtcgatgtgttgcgctgnagatgaggtgattgggtcgctcactatggagagtattgtgctacgcagtcgtgtgatatgataagtggggcataagtttacataacgcactacaaaccgcgacaaacagatataagacagtcttggtagcggatagcgcgtggcgacgcttgcgatgcgggcgaggccgactgtgacgcacatatgtcgatgaggtacagagttgatagttcgtgtagtcaggtgtgagt

SEQ ID NO: 12584 - DNA, 589 bp, Glycine max
  Coding DNA Sequence Number=SeqID_2805
atcttcgttcccttaagaccagcattaaatctgccctcaaacgatgcaatcctgatttcttcatagaggggaaattgattgcagttggacatgccattggagatagacatcaagccatcactatgctccctgatgacttcgaactctcacctgtccaaccagataacgctcgtactccagacccagaagatcaaactgctttggagttggtcctgaagctctctatgaaagtattacacaacagggctaacattttggtcatttctggaaaccatgatgtgatgggtgcgattaacagatggacacaaaggggtatatttattatgttagccctacctgaaagctcggacccaagcttctaccactgtgccaacgtgacttggcttttgtcttccgaagatcctgagagagttgctgctaccatggttaatggaggtggaccgatccctcctgtaccccgtattagaggatgagcgtaataaaatagtggtagatataacaagaactcctagtaatatcatctgttttagtttcagactctcttatgcttgcgctgttttagtttcagactctctttagctgctttttg

SEQ ID NO: 12585 - DNA, 528 bp, Glycine max
  misc_feature (72)..(72): n is a, c, g, or t
  misc_feature (90)..(90): n is a, c, g, or t
  misc_feature (152)..(152): n is a, c, g, or t
  misc_feature (333)..(333): n is a, c, g, or t
  misc_feature (442)..(442): n is a, c, g, or t
  misc_feature (445)..(445): n is a, c, g, or t
  misc_feature (457)..(457): n is a, c, g, or t
  misc_feature (460)..(461): n is a, c, g, or t
  Coding DNA Sequence Number=SeqID_2806
tcagttacatacaccattccatgcctcatcacatcaccgattatatcgtgagacgcacactcggtcacgagntctgtgtgtgtgcgtcgncatcattgttgcgcgtcatcgtctgtctagacagacactgataggtaaatgacagatgcacnaaatcgtcgcgactgacgttgatcgtgagaggtgatgatgctcctatccctattctcagcaacacagtatatacgcgctcgtcgagggtggttatgagtgcgtataatttgtagatagataataacatcgcgacagagagaggttcatgttagattatcgttgcgtggtagatgatagagngacgctgtatactacgtcgacggcaggtagctaaagactcatcacacaatatatacatagatacgcgacatgcgcgcgtcgtggtccgcgctcgcccgccctccgcgcngcncctctcactctncgnncgttaaaatcagcgcaaccttccatcgctcattgaatgcgtgggtggcgtgctgtcatcaggctact

SEQ ID NO: 12586 - DNA, 212 bp, Glycine max
  Coding DNA Sequence Number=SeqID_2807
gatctgcgacggcaagcaccacagggcgaccgtactcatggagcgcgacatggtctttgatccaatgacacactaggtatacgctacccgcgttggcaaggagggacacgagatctccgagctggctgaagagacccgcatgtacaccctgatccactccatcgtacagcagctcggaggatggcccatgtacctcgtagggaacgtgaccg

SEQ ID NO: 12587 - DNA, 380 bp, Glycine max
  misc_feature (62)..(62): n is a, c, g, or t
  misc_feature (122)..(122): n is a, c, g, or t
  misc_feature (145)..(145): n is a, c, g, or t
  misc_feature (154)..(154): n is a, c, g, or t
  misc_feature (249)..(249): n is a, c, g, or t
  misc_feature (295)..(295): n is a, c, g, or t
  misc_feature (297)..(297): n is a, c, g, or t
  Coding DNA Sequence Number=SeqID_2808
tcctgcctgtattactgcacagcgagaccagctcctatcccatcatctctcacactaacganacatcagtcgtacactcgacccgacgcgcacacactccagcgccacgacccacccacacnccgcgtctcgctcttgcgtctantcttacacngtatacactactacagtgatgttttatagacactgtgggtcgtcgtcgacgctgtcggatctatctcgcgcgcatatagagagagaggcggacgnagagagagaccgacgtattgagagaaagaagagacacgagacagangntgcgcagacacctactccagtggctgctctgtgtacacgagtaggtatatagagacatatagacagacatatcactatcaatg

SEQ ID NO: 12588 - DNA, 550 bp, Glycine max
  misc_feature (35)..(35): n is a, c, g, or t
  misc_feature (44)..(44): n is a, c, g, or t
  misc_feature (170)..(170): n is a, c, g, or t
  misc_feature (200)..(200): n is a, c, g, or t
  misc_feature (279)..(279): n is a, c, g, or t
  misc_feature (310)..(310): n is a, c, g, or t
  misc_feature (375)..(375): n is a, c, g, or t
  misc_feature (397)..(397): n is a, c, g, or t
  misc_feature (446)..(446): n is a, c, g, or t
  misc_feature (472)..(472): n is a, c, g, or t
  misc_feature (496)..(496): n is a, c, g, or t
  Coding DNA Sequence Number=SeqID_2809
ttgtgatgtgtgtgtcgtgcgcctcccgctccgcncaccgcacnggatgtgcgctgagagtaatatcacacgtagcagctagtgttgtgtgtgtgtgcctcttgccttgtccttctacttactctatatctctgacactcactcatcgcgtatagacagtgatgtatcgnactactgactgtctcgtgtacacgtcgcanacgcgctactcatgagagtagaatcacatgacgacgaggactgtactctcttcgtctccatatatatacgtagtggtgncatgtattcacgatttctcattgtggatacntcatacaatatgctgtgtagcgacgcgccgcgcgtcacgctcgagcggcatgcgaacgcggtgtnaatatgagtgtgtagatgtagnagtacgaacgcgtcgctctgcggttggtgtatatgtgcgtgtaactgcnactactagtgtgtatatatcatcgcntcgctgacgtctctcgcgaagcgnagtgctgagtgcgcagtgcagtgaggactggatgtacaacagctcgacctgcgg

SEQ ID NO: 12589 - DNA, 585 bp, Glycine max
  misc_feature (344)..(344): n is a, c, g, or t
  misc_feature (351)..(351): n is a, c, g, or t
  misc_feature (358)..(358): n is a, c, g, or t
  misc_feature (492)..(492): n is a, c, g, or t
  misc_feature (520)..(520): n is a, c, g, or t
  misc_feature (540)..(540): n is a, c, g, or t
  misc_feature (560)..(560): n is a, c, g, or t
  Coding DNA Sequence Number=SeqID_2810
cgaccacgaatcctacaattcttcaaatattcaacacacacatatccatcatccacatcgcacttgcagcctacacactatatttacacatttacctctcggatgcccacgtccggagtatctgtcacacttgtcttcgtagcgactagtactgctcgcggagcatcagtccacacataaacgtgacgagagctcatcaccactgtcacaaccatacaaaccaacatatcactacatcatcgaccacatatactcagcagcggcggcgacggctgtctctctctcactctctcagatattaactcgtcgacggcagtgagcgtcatgtcgatcaccgttatatnctgcgancggtatnatccctggctcgcagctctctctccgcactcatagtcgcacgctagctcgagatctatctacacacacggtctcattgtgatatacaccgggatagaataactatagacaactacacatcacgtagctacaccnacgccgacgcaacgcgcgtctatacctnacacgctctcgtgctacgcngcgcgcacacctactgcgtnaccgcgtatgtgatgacgagtactg

SEQ ID NO: 12590 - DNA, 579 bp, Glycine max
  misc_feature (216)..(216): n is a, c, g, or t
  misc_feature (260)..(260): n is a, c, g, or t
  misc_feature (383)..(383): n is a, c, g, or t
  misc_feature (554)..(554): n is a, c, g, or t
  Coding DNA Sequence Number=SeqID_2811
agggataaactatcaacgccccacttgaggcgcctggcctcgctcgaacggaaaccacagagccacttccacgggccaacaacagcgtggcgtggctcctcctgggatctaatctaccagtcgatgtgccttcacgttcaactcgatacatctgtatctctcggcgtcactaatcgtatcaaacatcgtaactagcatctcatagcttgtactacncccagcagcgacagcacgctaccacgactttgctgttaaagacngatatcgctagcgcaggtgcccactcgcgccttcgtattgcacaacacacaggcgcggctcgcaaattagaaacggctcgatcacaatacaatagacgatagagacaagactccgaggcattntggagtcaatagtcatgcagcatatctcatcccaccacctagcacataaccgcacgagacgacactatcacactctcacagtacagagatcgtcagattacaaatcgcgcgccagtcgactatacgtttgctcgagatctgcacgacatcccgacacctacgctcatgccngttgtagcgcgcttcgtcagaccac

SEQ ID NO: 12591 - DNA, 520 bp, Glycine max
  Coding DNA Sequence Number=SeqID_2812
taaataccccaatctttgaaaatgcatattaaattaggtttagtctcagctctagctgccgcatcaactgcctcagctttcagcttaaaccaaaatactggtatccaaggccaaggtatgacccaagccaatgagtacgcaatcagaaacattgacgaaatctgtgtctcaaccagaccagtccaaatgtgtgaacaagactacgttgtcaaatcattcaaaaacgaaaaagtcaacttccactgtgtctcaagaaactcactagaaggtcaaagactaaaacaacaagttgaaaatgaccaagttatcagcgaaatgcacggtaaacaaactcacattcaaggtcgtgtccaagtaccaaccagatgtgttgaaaaatcacaagttagtggtcaagaagcaagaagacgtcaacaacaacaacaacacggtcaacgtgtacaattgatcgaaaacgaccaagaagatttcgaacaagaaggtaactgggaccaagaagaagaccaactaaccaacgaag

SEQ ID NO: 12592 - DNA, 537 bp, Glycine max
  Coding DNA Sequence Number=SeqID_2813
ccacaatatgtagccctttcttgcatttattgcagacattttcttattctcggcatattcgtgggtcgtccttgcttagtcagagagattctaatgttttttccaggtgccttattttgtgccgcaattcgcactgttactccttgtaacatgtaacatctgtttcatgtcgatattctatcttttgtttttttatacctctatttccacgatcccatacttttttctgccaactaggtacatgatatatatgactctttctcctcgtctacctgttccgttcttcctttttctccccttatcgtgtgttttttttttttctatcccttcttttattctttttccttcttatatatcaccttctttttttacccatgccctttctttctttctgcgtggaaaaacaaatacaccacgttggtcaatattacaaaaatacatcatttttactagaattacctcatttctcagggaaaaaaataatttttatattattatctctcgttttgatatttcttatttcgttcttgtgtccgc

SEQ ID NO: 12593 - DNA, 545 bp, Glycine max
  misc_feature (39)..(39): n is a, c, g, or t
  misc_feature (87)..(87): n is a, c, g, or t
  misc_feature (102)..(104): n is a, c, g, or t
  misc_feature (108)..(108): n is a, c, g, or t
  misc_feature (117)..(117): n is a, c, g, or t
  misc_feature (134)..(134): n is a, c, g, or t
  misc_feature (203)..(203): n is a, c, g, or t
  misc_feature (310)..(310): n is a, c, g, or t
  misc_feature (326)..(326): n is a, c, g, or t
  misc_feature (355)..(355): n is a, c, g, or t
  misc_feature (357)..(357): n is a, c, g, or t
  misc_feature (376)..(376): n is a, c, g, or t
  misc_feature (386)..(386): n is a, c, g, or t
  misc_feature (407)..(407): n is a, c, g, or t
  misc_feature (416)..(416): n is a, c, g, or t
  misc_feature (418)..(419): n is a, c, g, or t
  misc_feature (421)..(421): n is a, c, g, or t
  misc_feature (423)..(424): n is a, c, g, or t
  misc_feature (431)..(431): n is a, c, g, or t
  misc_feature (445)..(446): n is a, c, g, or t
  misc_feature (449)..(449): n is a, c, g, or t
  misc_feature (510)..(510): n is a, c, g, or t
  Coding DNA Sequence Number=SeqID_2814
acacccgatgtcattatgtctagagtcgtggcgcgtccngtgtctttgacgaaactctcactactagcgctgctgtcgcgactctcnctctgattttgatannnaaanaaaaataantgcaggagttggtgagngcatgattgaacgtgtgtgatggtggcgcgttgctctgtgctcccctagtgttaccgactcctcatgtnctctctactctctcctatggtcttgcgacgtgtgtctctatatggatgatattagatatatagatatacatgcacacacgttcgtcgtctccgctgtggagtgtgtncactgatgccgcgctnatcgctctgcgtatatcatggctgtatananagatgacgaatcgaagtgncgtgactgtnatgttgatgggtagtggtgangtacacccnannanannaataaangataaacatatatnnaanatgatgtgtatctgttgtgtgtgtgtttgtttgtgtagactactcgaggtgtcccgaccancaccacacacaccctgctgtgtagatggcgtcgtg

SEQ ID NO: 12594 - DNA, 164 bp, Glycine max
  Coding DNA Sequence Number=SeqID_2815
ggcggctgagacgaacgaagaaggtggtaggcattcaccctcctctgcagggcccacgcccttcctgggacgggttgtgttcttcaacttccaaagggagaacgtggcaaagcaagtgcctgagcagaacggcctcacacatcttgaggctggtgatacacgtg

SEQ ID NO: 12595 - DNA, 266 bp, Glycine max
  misc_feature (152)..(152): n is a, c, g, or t
  Coding DNA Sequence Number=SeqID_2816
tgggttggcccatcttttcccagggggggctgcccaggccgcctcgggaggggatgggggagatgatgaccttgagggtcgaggaaccccagcgacagcgccttcttggaaatagtttattggcatcggccgcgtggccgtgtgtggtgtanccgcaacccatgagttcaacgaccatggtcggctccggagaagaacggtgaaaggtgggtgcgcccttgtgcttttgcttgtggcgttgtgcgactttgagatttgaggtggaa

SEQ ID NO: 12596 - DNA, 513 bp, Glycine max
  misc_feature (231)..(231): n is a, c, g, or t
  Coding DNA Sequence Number=SeqID_2817
tccacacttgtgcttattcttcatattctagtgtacttttattgctcccgctgatccacctctatactctccgtacgccgatactagacaacactgcaaactatatctcgctccacccgcgttacctgctccagaccttatatattcgttactctgcgttgcagtgagatatatgatacctcctaacactcacctcatccactctgctactccgcttaatcttagcttgtnttgtaatctctctgccccgacacctccactaatatggtctatcatattagagcactaatcactcgtactcgctatagcaacatctagtgactattatcatactacatacaagcacaatctataccataaccatacaaccacaacgaacagatcatataaatcgcacaactccactcctacatcataccccaattgtaattcaagcatatatatcatatgagtctaaatgtaatcgagagcatatgtattcgtattcagtatctccctatatactaggcagct

SEQ ID NO: 12597 - DNA, 386 bp, Glycine max
  misc_feature (200)..(200): n is a, c, g, or t
  misc_feature (253)..(253): n is a, c, g, or t
  misc_feature (272)..(272): n is a, c, g, or t
  misc_feature (276)..(276): n is a, c, g, or t
  misc_feature (317)..(317): n is a, c, g, or t
  misc_feature (319)..(319): n is a, c, g, or t
  misc_feature (346)..(346): n is a, c, g, or t
  misc_feature (358)..(358): n is a, c, g, or t
  misc_feature (361)..(361): n is a, c, g, or t
  Coding DNA Sequence Number=SeqID_2818
gaactagtagccaacccatcaataatattcatggatgagccaacctctggccttgatgctagagcagctgcaattgtaatgagaaccgtgaggaataccgtgaacacgggacgaactgtggtttgcaccatccaccagccaagtattgatatatttgatgcctttgatgagctgttacttttgaagttgggaggggagcnaatatatgctggtccattaggccaccactgttccgatctgattcagtactttngaggctattcaaggagttnctangatcaaagaaggtttaatcctgctcctggatgttggaagtncnttcagcaggccagaagcatctttatgncaactttcacantgngtacagaactcaaactataccggag

SEQ ID NO: 12598 - DNA, 582 bp, Glycine max
  misc_feature (173)..(173): n is a, c, g, or t
  misc_feature (279)..(279): n is a, c, g, or t
  misc_feature (281)..(281): n is a, c, g, or t
  misc_feature (343)..(343): n is a, c, g, or t
  misc_feature (371)..(371): n is a, c, g, or t
  misc_feature (498)..(498): n is a, c, g, or t
  misc_feature (556)..(556): n is a, c, g, or t
  Coding DNA Sequence Number=SeqID_2819
atcgtgctctgcgtactcctatgtacgatgtgtgggatgctctctctatgtgtgggatgccgcgagtgtgtagagtagggtgcggtgcgacctgtggaggagcttgctgagcaaaacgagcgatgagagaagagtatacacaacggctgcgataatcagggagagtacttgtnataccttcatggtgtcagtacatgcatcgataatatatatattgagtagatacacgctgcggcagtagtatcgagcgagcgtatccgctgcgagagattcgtgtgncntgcgcgctcgactctatgtacattcttcattatcgtgaagctgcgcacgtatgactgtgtangctagatcttgagtttatgtttatatcntgtgcacactgacaatgtcagagtagtgtgggtcgcgctgttgtaaggacgactatttctatgtactatagtatgtcacgactgtatagagtatcatgaccaatatctcctttatacactacattangtactcgtacatatataatctcgacgctcccacatactgtgcatttgttgtcatgaanacgctgagcgcatctttcacatttca

SEQ ID NO: 12599 - DNA, 391 bp, Glycine max
  misc_feature (110)..(110): n is a, c, g, or t
  misc_feature (160)..(160): n is a, c, g, or t
  misc_feature (211)..(211): n is a, c, g, or t
  misc_feature (259)..(259): n is a, c, g, or t
  misc_feature (271)..(271): n is a, c, g, or t
  misc_feature (306)..(306): n is a, c, g, or t
  misc_feature (313)..(313): n is a, c, g, or t
  misc_feature (348)..(348): n is a, c, g, or t
  Coding DNA Sequence Number=SeqID_2820
agcctgcttcgcctgtttgctcggatctctccgcacaggctcgggctgcgcccggagaggcatcacttatgtggccgtgcgtctacatagagaatgaacttgtttaacanaatatatattataatcgcagctgcgtaaatacacagtcacacgctgtgtnggctgactgcgacttccggcgggctgctggcgcgtgcggcgactcggcgcncgcactgtaggctatatcgtgcgcactcatgctaccctctcgtgtctncggggctgtcgnggcgcgtatggagggagacctcgtagagaggaganagatgangcatatctctatgttggtctcgcaccgtacgctgnggcagagagagggaggacgcgccgtgttacatgactaatgata

SEQ ID NO: 12600 - DNA, 319 bp, Glycine max
  misc_feature (46)..(46): n is a, c, g, or t
  Coding DNA Sequence Number=SeqID_2821
aatgtctcacgggtgcgaaccttactgtcgtccgctttaaatcctntgctgaatattgtagcaatgggcctatactagggtgtgtgttgttagctgtcgcctgtgaacatcacgtagaaacaattgccaaagaatgaatgtccaatctgatggctaaactcataactgatctgctatctcggtattggagaatcaccacacgctaccgccaccacttgatagttaatgaaggggctcttgataagtcgctacttgagcatgaagtatggctggtgataacagcaatttattgtgcgtttgcgcgttgtattgttggtaa

SEQ ID NO: 12601 - DNA, 107 bp, Glycine max
  Coding DNA Sequence Number=SeqID_2822
ttaaggtatgagtgctctcggggaagcagatttgacccaaaacccacgtgccaataaataagtttctcaagaaatccgcgcagcgtaagatctttagttagaagttt

SEQ ID NO: 12602 - DNA, 179 bp, Glycine max
  Coding DNA Sequence Number=SeqID_2823
tatttgagaatttaggatgccgggtcaaccccctatataaacagaaaccgtctttacttattttgggacccaaacctgaattatctttaaccatgtggacaaaggagaaattgcaaatggcaacggaaatggtgaaaggtgacgcacttttcaataaagtgtcccgaggaaggctaagg

SEQ ID NO: 12603 - DNA, 537 bp, Glycine max
  misc_feature (71)..(71): n is a, c, g, or t
  misc_feature (247)..(247): n is a, c, g, or t
  misc_feature (282)..(282): n is a, c, g, or t
  misc_feature (311)..(311): n is a, c, g, or t
  misc_feature (352)..(352): n is a, c, g, or t
  misc_feature (370)..(370): n is a, c, g, or t
  misc_feature (416)..(416): n is a, c, g, or t
  Coding DNA Sequence Number=SeqID_2824
tacagagccacgcagaacactagtctaataccgcgcggaggtcgacgtactgtacattaaatatatgggangtatgcgtcgtctgcgtgtgcgttaggagcgcgcgcttctgtactgtcatacatccacgcgcgtaacgcagacactgatcgcgcgacgaggcgtacgcgagacggtctcattcaacctatatcaagatatgtagagctcggtagtgcgtccattatcagcagagctgcagccgcgngctcacatagtatatctatatgtagcggctcactnattagtgatgcgagcgcgagcttgtaagnaggcgtacgagtcggccgcggattgtatatacttcacacgngcgacagacctcaccgcncctggacacgtaagtgatggagacgggagagtgggaggtacgtatngatgaggagagaaagtagctaatcgagacgacgggaagggagccaacaccgatctactacgccgacacatgagagacgcgtatacaagaggctggggtatcaagtgagcagcggccgatcc

SEQ ID NO: 12604 - DNA, 402 bp, Glycine max
  Coding DNA Sequence Number=SeqID_2825
gcacgaggttctatttaattatggatttctctctctctctctccttttgcaaacataaaggaaatccaattctgctgtgtcttccatttctacccatgtaatgctgtacaagtttatttgctattctaagtgggcagttaaatgtttacttcatagctgccttttccctcgattgaccacgttttgtatgctgacgtagtgacgttctttttctttttctttctttttttgctgcagtggattttgaggagttggatgtgtccttgggttcgggacaataatggagtaatgtatttatgtaacccttgaaattgtgaggccatgatgatatagagtttaatcatatttccttttgcatttgtaatataaatgtgtttgggctagttgtgaaacgatagacat

SEQ ID NO: 12605 - DNA, 226 bp, Glycine max
  Coding DNA Sequence Number=SeqID_2826
gctggcatcttacggggacacattaacccggcggcgacatttgtgctgtttatgacgacgaagtagtcgtagcccagagcgatgttctacatcgtgatgcgatgcttgggtgctatttgtggcgctggcgtggtgaatggttacgaggggatagcagtatacagtgcgttgaatggagtagccacttagatgatcctggatacaccagcggtagatgacttagggc

SEQ ID NO: 12606 - DNA, 569 bp, Glycine max
  misc_feature (429)..(429): n is a, c, g, or t
  misc_feature (519)..(519): n is a, c, g, or t
  Coding DNA Sequence Number=SeqID_2827
gtctcccatatgattatctcactcactccgcaattccccacactacaccgagtatagtctctcagtgtagtcctcggatctcgagtgttgattgtgctgattcttactcggcgcgggtttgctataattaaaggatctcgattataatatggcccagaggtctatagcccagcgagcctcagttatcaccctacattcatgctcatacgctcgccgatcgtcagcgtatgtagttattactatcaataccacacagccggacacacgcattagcacactaagcgattgctccagatccatcaacaaccggagcttcgtgatattgaaagcgcttcggcaaccgccggtctcctcatgtaatagtgtgcgccatagcaaggaccacattaaagacatcttctctctcgtccgtccgtctcttctatcttncatcgtgtacgcgtgctctacgaacacgccacttctcttactcgctctagtcaatagctggtcacatcgtcctcctatatgattccgcgncgcgcgcacattctaaatatctaatcgcgttttcgctacacagatcttaa

SEQ ID NO: 12607 - DNA, 454 bp, Glycine max
  misc_feature (113)..(113): n is a, c, g, or t
  Coding DNA Sequence Number=SeqID_2828
atcagaatcgtcaagcacgctttcgaaatcatccacatcatgactggcaagaaccccatccaagtcttcatcgaagccgtccaaaacggtggtgccagagaaggctctaccanaatcggtactggtggtgtcgtcagaagacaagccgtcgacgtttccccccttaagagagctaacctctccatctacttcatgaccgtcggtgccagaaaggccgctttcaagagcatgaagtccatcgctgaatgcttggctgatgaaatcatgaactgcgccaagaactcccccaactccactgccatcagaaagagagatgataccgaaagcgtgcttgacgattctgatggcgaggttcttcttaccagtgtttcttccgtggaacatgatagagccaatgagtctttcgacgatggggcattgggccbytctgaatttcttgatttgcctcttctgt

SEQ ID NO: 12608 - DNA, 573 bp, Glycine max
  misc_feature (400)..(400): n is a, c, g, or t
  misc_feature (423)..(423): n is a, c, g, or t
  Coding DNA Sequence Number=SeqID_2829
ggtaagatcaccacacatagcgtaatatgtgcacagatgatcgtaagatgtgtaagatatagcaacgtcgtctcacgctccaccctgcgcaaggaacgaagagtgaatgtcgagtgtgatgacggcgcaatactatcacgtgagatgtactgcacctacccattcccaatgtacggaatacatacaggagatcatatcaccccagacctcgaccgccacactatacacactagcacatacatataacgtattatatgtgtatatatataccacacgacctcacactctactcctctccctatgtcacactcatgccctcatactctttatgacacatacatgtcacaccctctgctcacatgtagcacgcgcagatgttatacaatcgaccgcgttatancgaatattgtgtatactatgatntgcgatattgtgcgcgccactacatgctaacgatacgcgtgctccacacacgatcacgaagaacacacacccgcgcagctctatatcacagagatacagtaggataaagagatagcaagatggatcgctagtatccatgcgacgtatatt

SEQ ID NO: 12609 - DNA, 587 bp, Glycine max
  misc_feature (475)..(475): n is a, c, g, or t
  misc_feature (480)..(480): n is a, c, g, or t
  misc_feature (495)..(495): n is a, c, g, or t
  Coding DNA Sequence Number=SeqID_2830
atggaatgatatcgcgttcacgcatatatccctctctatttctctgtattctgtcgtatctgagacatgcttcgcgatgtaccgaaccaacacacaaacatacacactcactctaccctatatataacgttggcccatatgcaacattgaatcatccattcaaacgctcgctgacgttttcccgcaacactattgcctcttgtcttctttcactactcaccattaatgattgacttggattctccctgcactcatatataacacgatactcagcgggtcgacaacacacaacaacactatctaatgtccccacatcatcacgattatggcgcgcccgcgatgtattgccgcgccctgtctctcactcaatacaactattatatatctcgcggcgcactcgactattgatatattatacgcgcccgcaacaataatcgtgagctcatatgattatcgataatacacatcacattgnctgcnctcctccaccttaantatatcgtgtgctatggaattattatctggtataattgaacagtgtaattgtcactgagatgagtgtgaggcagatcttttgtatcgctata

SEQ ID NO: 12610 - DNA, 453 bp, Glycine max
  Coding DNA Sequence Number=SeqID_2831
aaggtgcaccctaaggtatcgtagcgggcagcgcgcatgcttgcgcttgaggttcttcatgcaggagaggttcatctccccgatcttgatgttcttgttggcccggttccagtgtgtggcggggtgcgcagtcgatcacctcttttctttccatgttccagtagcacgcgggctcccccaccacgctcggcgagcagttctcgcactcgcccacgaggaggaggcagttcgcgaagtgcatggcctgcgttttccaggactatggccccgtccggtacgtcgcgtaccccgccaccgtcgccatgagcgcggtgctctgcaagagcccggcggcgagctccacggccgccatgggaggatggatcgatggatccagatgcagcttagctacctagtgggggaagcaaagtgtagcagttaacgacaggggtcagcgcggaacgatggtttttc

SEQ ID NO: 12611 - DNA, 593 bp, Glycine max
  misc_feature (336)..(336): n is a, c, g, or t
  misc_feature (515)..(515): n is a, c, g, or t
  misc_feature (538)..(538): n is a, c, g, or t
  Coding DNA Sequence Number=SeqID_2832
attagcgccggatggctatatatatgcagtgggttgtttggaatcaaacctccatcctatcctcccatacgtcgaggcgtcggtcgcaagataatggatatggctgagtgacgacggaatactttgggctggtgatgagtactatcgatgaccatggtggtaatagatactccggcgcgccctctctgtatatacttgcctgactggctcagatgcgcgcgcgtgggtgtgtgacatatcgctacatccacctccctactcctcacgtcattggcctaggcgcgctcgggcgtgaagacgcccgtggcgtctgtgccgacgagagtcgccggcgcngacgtattcggtggtggtacgccggagcaggaatagagtgtacacgataaaagattaatctatcgataattacgagctagtgcaatatacgcagtcatactatcagtatgtgcattagatgatgtgcttgtgtagttgcgctgatgtactctaatcgcgtaggtctgtgggtgcggcangttcgtgacactgcacgtgcgantcggcagcttctctcgtcgcgctgaccgtgtatgagcgtgtctccttgagcgttc

SEQ ID NO: 12612 - DNA, 180 bp, Glycine max
  Coding DNA Sequence Number=SeqID_2833
gtagtgtaacaatgttctttccctttccatttttttactagaatggttctgtttagtccccctggggcctgttgtacctctttagtctgtcaaactgttggtcaagccaaatgtcgagggttgttgtgggatgaaatttcccctgttgattggatgccaaaatgtgcattcagagcaatg

SEQ ID NO: 12613 - DNA, 555 bp, Glycine max
  misc_feature (50)..(50): n is a, c, g, or t
  misc_feature (343)..(343): n is a, c, g, or t
  misc_feature (500)..(500): n is a, c, g, or t
  Coding DNA Sequence Number=SeqID_2834
ctgtgtctgatacctcgcaaacatatgatgagtggtgcgttgcccgctanacaatccacagtgatgtatatgctctcaacgctgcgtgagagtaatcatgtcaatatatccctccctctctgcatgtagcagtagtatcgcacatatgtattatatagcactagatggacgtttgtcacaatgcatgttgctgatgcagcttgaagctacaatgtatagatgagatatgtcggatggcagcgcccgcacgcgctggtcagtgaaagattgatctcgtcatcatgattgagtcgaccacacgagatgtagagatgcacgccccgtagctctctgtggagatgtntgtattagagacacctcatctaccagattgatatgcaagatcagatataagacagactgatagtagattatctcactacgcggtgcggcatgcagacgagagtgcacacagctaccgtgctatgcctgctagtgtagagcgaccgatctccgcgcancactgctgctgtgagagctgtgtgcgcacagccgcgctactacttgatcacagta

SEQ ID NO: 12614 - DNA, 570 bp, Glycine max
  misc_feature (83)..(83): n is a, c, g, or t
  misc_feature (132)..(132): n is a, c, g, or t
  misc_feature (213)..(214): n is a, c, g, or t
  misc_feature (456)..(456): n is a, c, g, or t
  misc_feature (528)..(528): n is a, c, g, or t
  Coding DNA Sequence Number=SeqID_2835
tggtggccactaccaacggtgtagagcgagtctcaatattgcgtggggggggcgacctataaacgcgtgtctccacaacagcnctgagcatcatccacacaatctgtgtggggcgggatgggctgggtgtgngcagcatcttccacatacgagaatataggtgtggtcctcgacagacctacgggtggtgtgcgccggtcgatccacatcaanngcgggagggcagacaaaatgcctgttcatcgctggatatagaaaggtgtgcgtgtgctacaactactctcgcgcggcgcggcaagcgacacattcgaaacgctggtgtggggcgcatggataattctacttcacgcatgttgattatacacatctgtcgcgagcgccgtctccacatctgcggtgtgcgggctgagagtgcggacacacacacacctcgcgaaacgcataacacacaagctncatgtggaagggcacaccaataaggagggtgctgaggcgcatacaaagacaagcggcgcccgaagagaaacnccccgctcataatacagagcgcacttcttgcgcggagagcaa

SEQ ID NO: 12615 - DNA, 434 bp, Glycine max
  misc_feature (67)..(67): n is a, c, g, or t
  misc_feature (214)..(214): n is a, c, g, or t
  Coding DNA Sequence Number=SeqID_2836
tactgagtagtctctgctctgtgagccccacgagcatgcatcacctgtgtatctttaacactgtagngtctcacgctagagtattaaagcgataatcagtctgtgcctctcagcgactgatatagactcgggtgagcgctcgctgcgcagtgttcatccgtcgcacgaacatacggcgcgaccacgaagatttctgcttcgagtgtcacgacangagccactgagcatgtgcatatccgctctgtgcgctaacaatagatactacgcaaccgctcccactgccgtcgcgggaggtgctgtatgtacatgatgtctgtcacatccttatcacactctctccttccgcgcagaagaagagaaagcagaaggtgcacaaacgacctttatctcgtatcaacacgctcggcgccgtgcgagtgtgagcgtcgctccta

SEQ ID NO: 12616 - DNA, 135 bp, Glycine max
  Coding DNA Sequence Number=SeqID_2837
agaagcaacttctgttagcggacgtaattggggagaagttgatctaaatggaatatgctgcttcacggttggtcaaaccagcttttgaagtgctttaccaaatgtctctcaaccgcacttcaagggaaaattgat

SEQ ID NO: 12617 - DNA, 193 bp, Glycine max
  Coding DNA Sequence Number=SeqID_2838
ttatccctcgatatctccttcgattcttccaattatcggttaattaaattccttttcaggccaggtgcttcttctggaattctgctcggcgctgtcactctcccttctctttttctctccaaattggtccaactgtcgcgggaattctcactcgctcaacttcatcttgaagagattcaatatctgacattgc

SEQ ID NO: 12618 - DNA, 494 bp, Glycine max
  Coding DNA Sequence Number=SeqID_2839
attttcgtcttcttggtctacctcttcctctggttcgagtttcagagttttgcgatcagtcggttcgttggtttcagttgttttagcttgtataattgggacgagattcgaggaagctgcatacccaatttgcgatgcagctgttgaaacccgaactgagatgaacgtgcgagagttacagaaggaatgtctggaagagatattaaatatgtttgtcagctagccgaacgatcgtgggcgtcataaataattcgagggcaagttcctaaataaggtgataaagcaccgcttccacctttgcaagaatattgataatgcgccacgagtcgacaggaggcgctgcatagtgctgccgcaaacaggaagttcgcaggctctttccggcgcatgaaaaggattatatgcgactaacacctcttttttttttttgtttattcacgcaagccaataagagctttagaaaatttaatacactgtctgcacactactaattg

SEQ ID NO: 12619 - DNA, 570 bp, Glycine max
  misc_feature (101)..(101): n is a, c, g, or t
  misc_feature (103)..(103): n is a, c, g, or t
  misc_feature (118)..(118): n is a, c, g, or t
  misc_feature (136)..(136): n is a, c, g, or t
  misc_feature (144)..(144): n is a, c, g, or t
  misc_feature (183)..(183): n is a, c, g, or t
  misc_feature (192)..(192): n is a, c, g, or t
  misc_feature (231)..(231): n is a, c, g, or t
  misc_feature (234)..(234): n is a, c, g, or t
  misc_feature (245)..(245): n is a, c, g, or t
  misc_feature (272)..(272): n is a, c, g, or t
  misc_feature (284)..(284): n is a, c, g, or t
  misc_feature (300)..(300): n is a, c, g, or t
  misc_feature (356)..(356): n is a, c, g, or t
  misc_feature (367)..(367): n is a, c, g, or t
  misc_feature (385)..(385): n is a, c, g, or t
  misc_feature (389)..(389): n is a, c, g, or t
  misc_feature (391)..(391): n is a, c, g, or t
  misc_feature (398)..(398): n is a, c, g, or t
  misc_feature (408)..(408): n is a, c, g, or t
  misc_feature (426)..(426): n is a, c, g, or t
  misc_feature (428)..(428): n is a, c, g, or t
  misc_feature (442)..(442): n is a, c, g, or t
  misc_feature (467)..(467): n is a, c, g, or t
  misc_feature (471)..(471): n is a, c, g, or t
  misc_feature (476)..(476): n is a, c, g, or t
  misc_feature (489)..(489): n is a, c, g, or t
  misc_feature (504)..(504): n is a, c, g, or t
  misc_feature (519)..(519): n is a, c, g, or t
  misc_feature (527)..(527): n is a, c, g, or t
  misc_feature (530)..(530): n is a, c, g, or t
  misc_feature (536)..(536): n is a, c, g, or t
  misc_feature (539)..(539): n is a, c, g, or t
  Coding DNA Sequence Number=SeqID_2840
gctaatgtcatatcgatcacgtatgatacactgctcgacctgtcgcctgcgcgcgacagtagttaagcgcagctctgagactgcgcgctcagcgtcactgnancgctacgacgcgtcncactgtacgcgcatatangctgtgantggctgtcgcgctcgctgcacgcgatcgtccgggctgcnacgcacgcntccacgtatgcttgtctacgtacacacactcttcgtgantgnatctatgctanattcgactagagcgcgcacactgcacnacgctcgtatgncagttatcctatgcgngactcgatagtgctagtagcgcccgagcacgtatgacgagacgacgtacgtgctgntgagatgttantcggtgcgatgagtcgancgcnanctcgtcncgcgtgtcgntcgttgctacgtagcgancnacgtggacggatcngagtgaaatcagctgggtctgggtngcgngtagnacgtgcgaggcgnagtcgtcgacgcagnctgatgcgccctgtnacgatgtncgncagcangtnatcgtatcagatgtagactcgcagcagcaca

SEQ ID NO: 12620 - DNA, 318 bp, Glycine max
  misc_feature (93)..(93): n is a, c, g, or t
  misc_feature (112)..(112): n is a, c, g, or t
  misc_feature (123)..(123): n is a, c, g, or t
  misc_feature (171)..(171): n is a, c, g, or t
  Coding DNA Sequence Number=SeqID_2841
gaagacgtaggcaatagctcggagtagtgatgtactacgtgaacattatgacaatacgctgagttcgtctcgtcgctgtgatgtcatgtttcnggagtgttgtttgtccgtnttgtcttagtngttatcttgagcgtctgtgcattcattgtcattcgtaggtctagttgngagtgacactcagtgcagacagcccatcgccattaaacagagcgctctgatactgtgtacgtgagtggcacgtgacgtgtatactcgactactctgcctaccgcgctctctgtcgtatcttatacgatgtacagtctataccacaat

SEQ ID NO: 12621 - DNA, 368 bp, Glycine max
  Coding DNA Sequence Number=SeqID_2842
catggcagagcgttcgaaggttcccaaatttggaaactgggaacacgaagaggatgttccttacacacgcttactttgaaaatgccaatagagctcgagctcccggcggcagtgtagtgaacccgaccgacccggaatattactcggattcacagtctcaagctcctcctcctcctcctccacctctttcaaaaaccaaacctgaggaagttgaaccgcttagaagatcgcgtgaaaggttgagaacccccgaagagagcgagttgaagcagattggtgatgctggtggttcatcaaaagaagctgataataaaagacaaggaagggcttctcaaaacaatggtaatgacaagtcaccgttgcataaa

SEQ ID NO: 12622 - DNA, 539 bp, Glycine max
  Coding DNA Sequence Number=SeqID_2843
actgcacggtgaagttattctcgaaaaattagcttttaaatttgggactggttgcctggagtttccatttggtgcttcccaagccggggaaccggcccttattaattgtggcctggtggcccccggttgaacttcgttcaccggggttaaactttttaaacgttgtggggctgaagttgttgaatttgcctttttccatggtgttcctgatttccaagggccattccggagtttttgaaaacccctttttgtttttggtgaaccccgttaagccgattaaattccagctccaaccgattaattgttctgagatttgaatgttgtttcattcttgacttaccttccaaaagggccctttgtttgaagaaccccggcccttatgttgtccctaagtttttggcttatggagaattttgtttcttgccacttccaaatttcctacccgggaaaatgttccccctttcattccttttataccttggaccaggtaaaccacctttatgtggcccaccattagaaccattccagcctttaggcgt

SEQ ID NO: 12623 - DNA, 208 bp, Glycine max
  Coding DNA Sequence Number=SeqID_2844
attgcgtgggcaaaacatgcatcccaacattcccttctttccaagcccttagtggccacagggcttgccacaagcagcccaagatggcggacatacagttggtatcaccaccactgctattgccaccactgccagcttcgtcttcgtcactatcctattctgcggaagcagatcaaacccacatgaagcatattattcccccttctgg

SEQ ID NO: 12624 - DNA, 578 bp, Glycine max
  Coding DNA Sequence Number=SeqID_2845
aatacgtatggcacgaacgctactcacaggtatcggattagacgcggcgatacttatgcgctaaatggtatcgtatacatcgacgcgctgcgggagtgggatgggaataagaatgatgagacgctgctcatataccaaagacgtatccacacacacgaccgagctatagattacgttggcgccgaaggcgagtagatgcgagtacactatccctaacttatagcagtgtgttcttaagcgtgaggtcacacatcggatagaaattcacatcgcgcacatggacatacatcgcggaggtctaaataatagaaggtccagatcgctaacaacgatataagcgcattctcacatacaaacagtagacatttagtctaagatgtggccgttgtttcacttacttcctcagaatatacaaatacatagcgccggagcggtgatggggtagggagggatataaccacataccccggtctcacgggtcggtaagatattggatctgttaagtattcgatatatacgtatatcacctctggacccttcaccccttcagaggattagagtcgggacggtcgccaaca

SEQ ID NO: 12625 - DNA, 528 bp, Glycine max
  Coding DNA Sequence Number=SeqID_2846
agaccgccgcttgtcactaaagaagacgaaaacatggtgcacgtttgctactaccgtaactatggaaaaaccttcaagggcccacgacgtcctttcgagaaggagcgtctcgactccgagctgaagctagtcggcgagtacggtctccgcaacaagcgtgagctctggagagtccagtactctcttagccgcatccgtaacgcggctagagatcttctgactctcgacgagaagaatcccaagaggatcttcgaaggtgaggcccttctccgtaagatgaaccgttacgggcttcttgatgagagccagaacaagctcgattacgtcttggcgttgaccgttgagaattttctcgagcgtcgtcttcagaccattgtgttcaagtctggtatggctaagtctatccatcactcccgtgtcctcatcaggcagaggcatatcagggttgggaagcagttggtgaacattccttcgttcatggtgagacttgactcgcagaagcatattgactttgcgttgaccagtccc

SEQ ID NO: 12626 - DNA, 282 bp, Glycine max
  Coding DNA Sequence Number=SeqID_2847
gagaacgtgagattcaaaggaccatgttagagttgctgaaccagttagatggttttgattctagaggagatgtaaaagggattctggcaaccaacagaattgaaaggcttgatccagctttgctacggcctggtcgaatttacaggaagatagaattttttttttttgacaccaaaacagggagacgcacgcggcagatattcacatcgaggacgaggttagctgataatgccaacttggaagaattcgctaggactaaagaggagtccgaaggagctgata

SEQ ID NO: 12627 - DNA, 409 bp, Glycine max
  Coding DNA Sequence Number=SeqID_2848
gatgtacagcgaggcagtcgagacaggagggagaacagtgaagacgcgaaggcgcgcgatacgatgtcgtagacataacatactagataagcaagaggcgcacaagatccagacgaagagggtaataacacgccatagcgagtcgtcgttactcatacaatcaatcagtttgacattgtcttatatactattaagatattatatttcgttcttttttatagtctttactgttcattcgtgtagtgacgaatatgcgaggctggggcgaggggtcacgcatgagacgtgcgtatcgtgtgaggtggaatcgacacgcaaatggtcgtaaacgggagtaagtgggaccagcgacgcacagccggacggccggacgcgacatatggcgacgtatagctgtcgcagaagcata

SEQ ID NO: 12628 - DNA, 431 bp, Glycine max
  Coding DNA Sequence Number=SeqID_2849
gcatatccgcaagttgtgcttgaacatttgcgttggtgaatctggtgacagacttacacgagccgctaaggtgttggaacaattgactggacaacagccagttttctcaaaagcacgttacaccgttcgttcattcggtattcgtcgtaatgaaaaaattgccgttcactgcacggttcgcggtgctaaagccgaagaaatcttggaacgtggtcttaaggtccgtgaatacgaattgagacgcgacaacttctcagccagcggtaacttcggtttcggtatccaagaacacatcgatttgggcatcaaatacgatccatcaatcggtatctatggtttggacttctacgttgtattgggccgtccaggcttcaacgtagcccacaaacgcaagaagaccggcaaagttggattccaacaccgacttacaa

SEQ ID NO: 12629 - DNA, 529 bp, Glycine max
  Coding DNA Sequence Number=SeqID_2850
gagtgcccaaactacgaggtggttcacgcgggaaacgggtacgagattcgccggtacgatacaacggtctggatttccactgaaccgattcaagacatctctctcaaggatgccacaagaacagctttcttccagttgtttgcgtacatacaagggaagaacgagtatcatcagaaaattgagatgacagctccggtgatcagccaagtctcaccaagcgacggtcctctctgtgaatcttccttcactgtctccttctacgtccccaaaaagaaccagcctgatccagctccagctgagaatctccacatccagaaatggacccctaggcacgtggcggtgagacagttcagcggcttcgtctccgactataacgtcggagaagaagctgcagcgctgtctgctagcctcgaaggtacagcttgggccaatgccatagagaaaagcaaagaagacggtggtgttggggctgattcagcttacacggtggctcagtacaactcgccgttcgagttcattggtcgtgtca

SEQ ID NO: 12630 - DNA, 410 bp, Glycine max
  misc_feature (26)..(26): n is a, c, g, or t
  Coding DNA Sequence Number=SeqID_2851
ttaaattgtagtctcacgttgtatcntagtattgtgcgtgcgcgatgcatataaagtggtaagcgtcggaacaggaatgttgaggcgaaatcaaccgaggcacttcgacgagatagcggggacagaggagcaagcaaatcactgcccacacaatacgaaagcacacgaccagatgcgcaagacaaatcaataacaaaacaaagttatagcaacgcatcaaacgacaccatcttactttcccttcacgtagccgtagtgtggtgcgtctcgtgtggtgttgtgtttgcgtggcgattgtctatcagattatgccaccgacttagtctgcagcctcacaacataagatagacgcgcactctctgtaccacgtgcccaatagcatatccttctatcacgctatctcttatatc

SEQ ID NO: 12631 - DNA, 356 bp, Glycine max
  Coding DNA Sequence Number=SeqID_2852
gcagcctgccgattgttaagactttgaatgcagccaatcatattaaagagacgctgctgcctggtacggttaatacttcctttaacttcccaattggaggaagtactactacttatggagggcagtatgcatttaaccaaacccaggctggacctattactttgacaatgccatcgctgccaagtggcgctaatgtaactgttagttatactctcaccggaccttccggtcaaagcggttacctgtgtaattccggttccggtggcacgagttgcggaacaactccttctactatcacatataataatatgccaaccgggcaatatacgctgaactacacggtaagcacctctttc

SEQ ID NO: 12632 - DNA, 534 bp, Glycine max
  Coding DNA Sequence Number=SeqID_2853
gagagttagtgcacctccgtagggtttggttattagggttttcgctccccggtgcgcagtcgagcccccagaagacgaagcgaaaatgccgtcgcacaagacattcagaatcaagaagaagttggctgaagaagatgaggcagaacaggcccatcccctactggatccgcatgaggaccgagcacaccatccaggtacaacgcgaggcgccgccactgccgtcgcaccaagcttgcattctgaggcgtatgctctgcctaggtccaatttatcccattaaccactgccctattcccttgaggccaaaacaatgcctcgcactttttcctacctcccacttgcctcgaagactataccgcgcaaggaacctattgtagttcatacccatgctgttcgcccactccctcttacagtattttcgcgaccccttgcccataacaataaaccctaggccccctacccccccggtcgctccacacctagtgggacccccgggctgccggaattccacatccacgctttattgataccgct

SEQ ID NO: 12633 - DNA, 457 bp, Glycine max
  misc_feature (144)..(144): n is a, c, g, or t
  Coding DNA Sequence Number=SeqID_2854
gtcgacttcactgcaatcttcgtggttctatcttccatctcgcgcacccatcacccccacataccatcactcgcgcagaacaagtatccgtgttattatcttatagtgtccgacagtgacggactgatctacacaattacctanctatccctacagccacctgcccgcacccagggatagcgcatgcgccgcgacgtacgcattattttcgctgtcggtgatgtgtcgtggcagcgattggatcgattactgagctaacatatctctcgcacaactcctcacttctaataaaactcattcgcttcatactatctcaaccccacacacacacaccactctaacaacataaatgcatccattagagtgactttattataatatataataataaattctttacgctacgatgctacatacaaacaaatctcttacaaccatctcagattatagccaccca

SEQ ID NO: 12634 - DNA, 508 bp, Glycine max
  misc_feature (167)..(167): n is a, c, g, or t
  misc_feature (238)..(238): n is a, c, g, or t
  misc_feature (292)..(292): n is a, c, g, or t
  misc_feature (437)..(437): n is a, c, g, or t
  Coding DNA Sequence Number=SeqID_2855
cggccacgttagctctgctatataactccgccacattgcaagtatctatcccctactgcgtattggcaggtcgacgtgtctgtatgtgccacagatcacagacaccacgtatgtgtgagaggtatatgagatagatacgcaggtctactcgtgcgcgcgtggcattntactgcgtcgtcacgagctacacgactagcggtcagagacaccatacattcatgaagtactgtatagtacnctggacttcacacatatgctgcgaactgtgctgtatcagaactacgactcatancacgatgcgccacaccacagcgtacacgcctctagggtgcggctcactgagcaaccggtctgatctactccgtgatcgatagtggacgtcgcacacaccgcactcctatcatagttgtacaggactcgatcagcgatagatgtgnagagcatcgtgatatacgactatactgcggtaatggatggtgctctcgatcgcgccgatgagtgacagata

SEQ ID NO: 12635 - DNA, 300 bp, Glycine max
  Coding DNA Sequence Number=SeqID_2856
agcactctggttcttgacgcactaggcaacattggtcaagtgtatttgcttagtatacttggtattgagctttacatgcgcactattcgtcgaatgtggtagaaaggccataggaagtccactgtgtggattctatgtgcttatgggttagggcaagcctcttcttaggcttttagagccactgagtccaaaggtgatgaccctgtttccatgcgtgtaatcatgggtctgcactgtcaaacagtgcattccctgtccttgcgaggatccatagatgaggacaaactcctcttcaccgat

SEQ ID NO: 12636 - DNA, 546 bp, Glycine max
  Coding DNA Sequence Number=SeqID_2857
aatcatctaatctctcctgaaactcgcgaagcttctctctcgaagcctaaatcagaaatcgatggcgtccttcgctcgccgagcaatgagcctagctcagattccatctgcacgtgtgcccgcctctgtttgtcagcgtcgcggtctcgccggcgccgctgatcaccatggatctaccaaggttgacttctggaaacagcccacgaatccaggaaactggaaagaggagcatttcgtgcttatttcgctctctggctggggattgctcttctacagtggatacaaactcttcaccggcggtaaaggtgacgacgagaagcctgcgcaatgaatttatcactgggaaaagacaaagagagctctccttctcgtgctggtcttgtatcaaacaaagccagcaaaattacttctttgacagtctttgtttgctttcttttaaaataatatatatatatatacatgctgctatgatgcatcaaacacttttgagatccttcctaatcatgtctccaattgatgatgattcgtagctgttttgcgtttcat

SEQ ID NO: 12637 - DNA, 536 bp, Glycine max
  misc_feature (29)..(29): n is a, c, g, or t
  misc_feature (185)..(185): n is a, c, g, or t
  misc_feature (233)..(233): n is a, c, g, or t
  misc_feature (311)..(311): n is a, c, g, or t
  misc_feature (375)..(375): n is a, c, g, or t
  misc_feature (383)..(383): n is a, c, g, or t
  misc_feature (387)..(387): n is a, c, g, or t
  misc_feature (420)..(420): n is a, c, g, or t
  misc_feature (468)..(468): n is a, c, g, or t
  misc_feature (494)..(494): n is a, c, g, or t
  Coding DNA Sequence Number=SeqID_2858
tcgtctactctatgccgatggagtcgctngctgcacagcgtagttattgtaggtgtagtgtatgttatatactatgcatcggtacaaggctcatccaccgtagatcttccgtgcagtcctcggcccgcgtgctctcgccttccgcagcagccaagacaggttacacgtgtcttagcgctggatanctatctggactgcggggcgtcgttgagtcgtatcatgtccaccacagnataaggatacgtccagtcttcgtgcggatatgtcgagccgctgtgtgaatagtcgatactcctctgcgtctgcggttntggagtgtgtggtgatgtgttgatctcgcagttgtggcgacaggatcagactagctcggatctntgctcctntctnccccccttctctatcgcgagcgggacgtctagntaggacatgattgttgtcttgtggatcgtagggatgatgatgcgtggntgaagggtgacgcgcgcgccggctcngagattgtgtcgagcgcgaagactagcactcagtacagcaga

SEQ ID NO: 12638 - DNA, 578 bp, Glycine max
  Coding DNA Sequence Number=SeqID_2859
gtttctcttaccagagatggcggcaaaacatggaaaaatataacacctgccgggttagcagaatgtttgatcaatgctattgaagtatctccctttgataacgctaccgcttatattgctactacacgttataaattcaacgaccataaaccggggttatataaaacaacggattacggaaaaagctggacaaaaatagataacggtattccgaataatgcgtttacacgtgtggtacgtgaagatgcagttgtgaaagatttattgtttgcaggtactgaattaggcctctatatttcttggaatggaggtaaaaattggagcccttttcaactcaacctacccattacgccgatcaccgatcttaaaattcatcaggataatttaatagcggcaacatcaggtcgtgctttttggattttagatgatttgggtttgatacgccaatacaaaaaagatacgagcttcaaagtatttcaacccgccaataattatattaccaatagctactccgaattagatgcatctaacagttcctttaccggagctaatcgttttcgtggcgtaaatgcaccatc

SEQ ID NO: 12639 - DNA, 575 bp, Glycine max
  misc_feature (368)..(368): n is a, c, g, or t
  misc_feature (417)..(417): n is a, c, g, or t
  misc_feature (443)..(443): n is a, c, g, or t
  misc_feature (483)..(483): n is a, c, g, or t
  misc_feature (485)..(485): n is a, c, g, or t
  Coding DNA Sequence Number=SeqID_2860
ccagattgcgggtagtcgcgaagcaggaagtgaccacgcactgggctggagacaagcgcgcgacgcaccggtgcgcggcgacgatatcgcgctccggcgtgcagcagagcgtcgcgcgtgatggcgtggcggaggggtcgtaaagcataagagcagatttattgttaatactggagtgctagtggtctttttaagttgtattcttgcgtgtcttgtgtggtattgcagtgtatcgctcgcaccgtcacgtcaggatgtgataggaggtctgtttctctcttcatccacacgtgacatgcgctgccacattcgaccacacacagacgtggcgcgtcaggcacgcgccgaccttatatatctgaatggtncgagacacataggagacgacatagcgagacaatagttgcagaatattgnaaacaaactgttgcatatctcgattnttatatgtttcatccccgcacggtccatccaccaacttantngcgcgcgtgccgcgcgacacgcacgtgctatagcagtgtgcgcccacgcgaccgcgaggcgcatagagtgctatggtgacacgtcagtgt

SEQ ID NO: 12640 - DNA, 235 bp, Glycine max
  Coding DNA Sequence Number=SeqID_2861
gactatttcatcgaggggtgccttactgttaagggactgactgacaatctcggagaggagctggctgccgggccatgctctgtcaccttgacctatgaatcgtttatgctgacagtcctgccattcctgatagctgaggagattaatggtgtgtgtgtggattggtaggcttagtaaatggctggctgcattgtgtatgacatgtgtggaggagatctatagtatgacacacata

SEQ ID NO: 12641 - DNA, 288 bp, Glycine max
  Coding DNA Sequence Number=SeqID_2862
ggagacatcgaaaacttcagtagcattagtagaatgaagaagtggtaaggagggagtagattgaggatcaaggaagcttagtaactaaaaaaaagcagtccgcaatagaaccccatctggaaaatttaggaagcattacataagtcaagccaacaactcagacgacaaccacccagaacaataagcccttctcttttgaaaagacgccgggaacctaacaagcctactgctacaatgggctactgcccaattctagtatacgacttctttgtcgctttatttgatgga

SEQ ID NO: 12642 - DNA, 502 bp, Glycine max
  Coding DNA Sequence Number=SeqID_2863
agcaaggtctgcatctctcttgtaatcctcgcgctagctgtgctccctggcctgggcacgaaggcggccgcgctcgccggcggaacggctaccaccgaggacgcggcggcgtcgcagatgatggcgatatcgccatcatcgatgaagctagaagacggcgtgccgccagagcttgcggtggtggacttggaggtgcaccgccgcgtcctcacgggcacaaacatcagcccgaataacggcctgaatccctacaggccagtctgcaaccccgcgtgcacacccggaaagtcgtacaatttccaaggccggccgtgcgccaatatttacatgtgcgtcggtcacagataaatgggagggcattaggaatgcttcctccttcctgcccgtcgtcagtgcctggatgcacacgcgttccatcgatccatgttttatttccattttcattttgcaatttcttttagtgttgtcgttgtggtggaacccgttcaacagggtgcaagtt

SEQ ID NO: 12643 - DNA, 433 bp, Glycine max
  misc_feature (206)..(206): n is a, c, g, or t
  misc_feature (208)..(208): n is a, c, g, or t
  misc_feature (213)..(214): n is a, c, g, or t
  misc_feature (222)..(222): n is a, c, g, or t
  misc_feature (228)..(228): n is a, c, g, or t
  misc_feature (231)..(232): n is a, c, g, or t
  misc_feature (234)..(234): n is a, c, g, or t
  misc_feature (255)..(257): n is a, c, g, or t
  misc_feature (259)..(261): n is a, c, g, or t
  misc_feature (277)..(277): n is a, c, g, or t
  misc_feature (281)..(281): n is a, c, g, or t
  misc_feature (288)..(288): n is a, c, g, or t
  misc_feature (310)..(310): n is a, c, g, or t
  misc_feature (320)..(321): n is a, c, g, or t
  misc_feature (387)..(387): n is a, c, g, or t
  misc_feature (392)..(392): n is a, c, g, or t
  Coding DNA Sequence Number=SeqID_2864
gaccgcgaccacaacacaacagtaagcacgcgatacaacaccagcacagaacgctatgagataagagagatccacacaatacgctcacagagcgcacagaggacggccgaacgacaagacgcatacagccagacgagagcttagagagtcgtagaggagaagcgagaagaaccagagatgcggaatggaagaagatagaggtgatngnaaggnnaagagagnaggganggnnanatatcttgtgcccggcgccgnnngnnngcgtcgagaagggtanatangacacanacataccacaaggaaccagcgnggcaaaggcnnccacgacaaccccaagcaaggcgaacacaggcaagggggggagaaagagagcccgccacgaaacanaagcncgcagaacacacaaaacaaccacacacacaagaacaaacga

SEQ ID NO: 12644 - DNA, 319 bp, Glycine max
  misc_feature (219)..(219): n is a, c, g, or t
  misc_feature (224)..(224): n is a, c, g, or t
  misc_feature (292)..(292): n is a, c, g, or t
  Coding DNA Sequence Number=SeqID_2865
agtactccaagaataagctcataacaccttcgcatcttaaaaaattcctgatcgatgtgcagaagcaagagaaagccactgaaaaagacacgcaagccatcatcaatggcttcgaacatttccatcacagagacgctggcctcaatctcgaaactttcttcaagtacctcttgagtgacaataatcctcctcttgttccttctcatagggggcaccatngtatnagtgtagccttatcacattatttcatatatactagccataagtcctatgtgaagtgggatgagctcancgactactacgggtgcggtcggctcat

SEQ ID NO: 12645 - DNA, 594 bp, Glycine max
  misc_feature (62)..(62): n is a, c, g, or t
  misc_feature (78)..(78): n is a, c, g, or t
  misc_feature (101)..(101): n is a, c, g, or t
  misc_feature (169)..(169): n is a, c, g, or t
  misc_feature (171)..(171): n is a, c, g, or t
  misc_feature (176)..(176): n is a, c, g, or t
  misc_feature (186)..(186): n is a, c, g, or t
  misc_feature (220)..(220): n is a, c, g, or t
  misc_feature (258)..(258): n is a, c, g, or t
  misc_feature (276)..(276): n is a, c, g, or t
  misc_feature (287)..(287): n is a, c, g, or t
  misc_feature (326)..(326): n is a, c, g, or t
  misc_feature (328)..(328): n is a, c, g, or t
  misc_feature (344)..(344): n is a, c, g, or t
  misc_feature (364)..(364): n is a, c, g, or t
  misc_feature (408)..(408): n is a, c, g, or t
  misc_feature (416)..(416): n is a, c, g, or t
  misc_feature (425)..(425): n is a, c, g, or t
  misc_feature (431)..(431): n is a, c, g, or t
  misc_feature (437)..(437): n is a, c, g, or t
  misc_feature (448)..(448): n is a, c, g, or t
  misc_feature (453)..(453): n is a, c, g, or t
  misc_feature (469)..(469): n is a, c, g, or t
  misc_feature (482)..(482): n is a, c, g, or t
  misc_feature (490)..(490): n is a, c, g, or t
  misc_feature (493)..(493): n is a, c, g, or t
  misc_feature (514)..(514): n is a, c, g, or t
  misc_feature (545)..(545): n is a, c, g, or t
  Coding DNA Sequence Number=SeqID_2866
gaagatgctcgtcagcagcgtagctatgacagtcgtgaatatgtcgtcggcagagatccgantgtgtctgtcgcgtcntagtcatctgatctacgtgttantcaatattcattcacgctatgtcacgtatccgcactcagcatcttagcgtccacacgctcatatcctntncacancccgctgcgntgctactatacacgctcatctccactatgcatcncacgaaatacgtcacgcgtatatacgctgctgtgcccntgtcgttctgtgagcgtntctaaaattcnacatctgcactatactctatcccgtctgccgcgtatcgncnctgataccatcatganacgtactcaatgatctgtgnctggcatctcatgtcaccacgtcgtatcacaatcgatcgtccgnccacgatnagagcgtancatgtntccccngctacacgctngccgncaacatcgagctactncgctctgctgcgnaccattcntgntatcgcgtcatctgacgtgtnttcactgcactgcaggacggtgtgcagatgnctagcacctggatgacagaactacgatgatacatcgaaatgtactacta

SEQ ID NO: 12646 - DNA, 383 bp, Glycine max
  misc_feature (84)..(84): n is a, c, g, or t
  misc_feature (86)..(86): n is a, c, g, or t
  misc_feature (196)..(196): n is a, c, g, or t
  misc_feature (233)..(233): n is a, c, g, or t
  Coding DNA Sequence Number=SeqID_2867
gacaaggttagagatgaagcgatgcagatcattggaatgtttcagatccttcccagacttgtcgttttcgacctcgattatacngnctggcctttctactgtgaatgtcgttctaaacgcgaaatgccgtctttgtacccacaagcaaagggtataatgagtggtctgaaagagaaaggaattcaaatggcgattncttccagatctcccacttcagatattgccaacacttngattgacaaattgaatatcaagtccttgttcgtcgccaaggaaatattttcgagctggagtcacaagacggagcattttcaaaagatacacacaaggacaggggtgccgtttactgacatgctcttcttcgatgatgaggacagaaacat

SEQ ID NO: 12647 - DNA, 467 bp, Glycine max
  misc_feature (78)..(78): n is a, c, g, or t
  misc_feature (80)..(82): n is a, c, g, or t
  misc_feature (94)..(94): n is a, c, g, or t
  misc_feature (136)..(136): n is a, c, g, or t
  misc_feature (198)..(198): n is a, c, g, or t
  misc_feature (208)..(208): n is a, c, g, or t
  misc_feature (222)..(222): n is a, c, g, or t
  misc_feature (329)..(329): n is a, c, g, or t
  misc_feature (333)..(333): n is a, c, g, or t
  misc_feature (344)..(344): n is a, c, g, or t
  misc_feature (421)..(421): n is a, c, g, or t
  Coding DNA Sequence Number=SeqID_2868
gatcaacagttatgacgcttcgactgactcactgagtatacgctcgatctctacgagctcatagaaggtgaacagcancnnncacacaagatancgcgactgtatactctcgtgtatatgtggaggcgcgtagatntaggacctctagtgcggtcgagctgtattcaccaccgtactgctcgtagcacgcgatgtcgncgaaatgagngaacaagacatacngatgccgcagtcgagcgtcgaggacgtatcgatcacgaattcgccgccgcgaaaactatgtacctgcccacgtatatgtagacatcggagtacgtgatagctaatgnaagnagcaaaaggcnctccgactagtcctacatctacttatatgtctctgtcgtatatctcgtgttatgtgtgagggtgagatgagcgagangtgcgacagatgcatgtgagcgtgcactgcgtacatcatttctata

SEQ ID NO: 12648 - DNA, 464 bp, Glycine max
  Coding DNA Sequence Number=SeqID_2869
catcgtaatcgaaaacaccctctacggagatcgggctcgtccacacactcccaccgctgccagccccccgaaccggagagcgaggccgacaccgccgccgcgatgagggccaaagggaagaagaagaggatgaggaggctcaagaggaagcgccgaaagatgaggcagcgatccaagtaggcgccttggaagcaggggaagcatcatcctgcatccaggctgccaggcaccgagggatgacggcatggtctagtgattcctggcgtgtttgctgcgatggctgtggaagctgttttacctgtgttctgtccaatttagctgtttaatgcttagtctggttatgttccaagactgagttttatgtaatgtgaggattatatgtgtttgtgactgaattttatgcagctattaattttgcagtactctgaaatatgtaattctcacctgcgtctcatcttttttgt

SEQ ID NO: 12649 - DNA, 571 bp, Glycine max
  misc_feature (49)..(49): n is a, c, g, or t
  misc_feature (170)..(170): n is a, c, g, or t
  misc_feature (258)..(258): n is a, c, g, or t
  misc_feature (271)..(271): n is a, c, g, or t
  misc_feature (279)..(279): n is a, c, g, or t
  misc_feature (494)..(494): n is a, c, g, or t
  Coding DNA Sequence Number=SeqID_2870
ttcacactcacatctcgtagtctatctctctcctcgacgtcacgcactntcttatcagcaacattgagacagccgtacgacgatgacacgcatacaaaatgcttcacttgagacacttgtgatgtgctaccaaccaagacacacacgccgcacaccacgtctactatcgnctaatagacacttacagcgcgactctctttgtctctaccgccacaccgtcatctctgccttctctcctactgtgttacacactcatanaaccacacaccanatcactgntactacgtctatgatatacaacgcacagatcactctcacctataatacatgcacaatgtatgtatctctcagacacatataaatatcgcgcagatgctctgtttgtcactcacacgctcactctctactgtcctcgtacatgacgctcgtgtctctctcttacatctcctgcagctcgtcttcactactgctctgctcatcgtcatatctcccanctctacgctccggctctcgtatatactatgatatctgtgtcgacgactctctccgcgcactctctattcatatttat

SEQ ID NO: 12650 - DNA, 372 bp, Glycine max
  Coding DNA Sequence Number=SeqID_2871
tctcggcgagttcacacaggccaagtcacgcacgtgcagcaaagacaggggtggaggaggggggacattgaaatcatttactgggacttcccggggagtctcaagggaggatccggagaagggacctcgtcccacattttcctttcaaggaccacgcctggcggcactttctccaagggggcctctagtcctttccgccaaccattctcctacacccggcgttggattcccccggggcccgcgccgccctaccagcgagctggcctccaagctccctcggacgacctccgtcagaaggcgctccgcccgctccccccaacaaggagctccgtccggcggcgccggtcgcccgaagcataagcgctggttgaa

SEQ ID NO: 12651 - DNA, 386 bp, Glycine max
  Coding DNA Sequence Number=SeqID_2872
atcacaacggtgttgatccatctcttgttcatcatccttgttgtctaccctgagctgatcttgccgactatctttctttacctttttcttatcggtgtatggtactaccgttggagaccgaggcatcctccgcacatggacacgcgtctctcacacgctgactcagctcacccggacgagcttgacgaggagtttgatactttccctacttcacgaccctctgatattgtcaggatgaggtatgataggttgaggagtatcgctgggaggattcagacggtggttggtgatcttgcgacgcaaggagagaggcttcagtctctgctgagctggcgtgatcctcgtgcgacggcgctgtttgtcttgttctgtttgattgctgcggt

SEQ ID NO: 12652 - DNA, 439 bp, Glycine max
  Coding DNA Sequence Number=SeqID_2873
cactgctatacctcaggcacagataaatgagatcgccttctcatacatatcatatcgactgcgtcacgcgcgtgaggaaaatggagagaccttcacctacgttaggtctccctttttctcgtgcttttctctcacttctcatctatttctcttgttctaatatgtaatcgcatgcacgttctacgaacctaagagataagttatttaatagccggctctagttgggtgctatattctccttctccgcacgtgttgggtgtgtgctcatctagtactatttccaaatctttcctgtttgttactaaagtgtgggtggggtggctggtttactaatcacttctattatcatcctcctgtatgatgaggacagtgtcgcgtcaccctcccggggacaatgagaacaaaaaagaagggggaggcctcgtagcgactgaccgtc
